United States Patent Application Publication US 2023/0302116 A1 - sequence listing, part 3

SEQ ID NO: 2689 - DNA, 2421 bp, Artificial Sequence
  Description of Artificial Sequence: Synthetic polynucleotide
atgaaaatcgaagaaggtaaactggtaatctggattaacggcgataaaggctataacggtctcgctgaagtcggtaagaaattcgagaaagataccggaattaaagtcaccgttgagcatccggataaactggaagagaaattcccacaggttgcggcaactggcgatggccctgacattatcttctgggcacacgaccgctttggtggctacgctcaatctggcctgttggctgaaatcaccccggacaaagcgttccaggacaagctgtatccgtttacctgggatgccgtacgttacaacggcaagctgattgcttacccgatcgctgttgaagcgttatcgctgatttataacaaagatctgctgccgaacccgccaaaaacctgggaagagatcccggcgctggataaagaactgaaagcgaaaggtaagagcgcgctgatgttcaacctgcaagaaccgtacttcacctggccgctgattgctgctgacgggggttatgcgttcaagtatgaaaacggcaagtacgacattaaagacgtgggcgtggataacgctggcgcgaaagcgggtctgaccttcctggttgacctgattaaaaacaaacacatgaatgcagacaccgattactccatcgcagaagctgcctttaataaaggcgaaacagcgatgaccatcaacggcccgtgggcatggtccaacatcgacaccagcaaagtgaattatggtgtaacggtactgccgaccttcaagggtcaaccatccaaaccgttcgttggcgtgctgagcgcaggtattaacgccgccagtccgaacaaagagctggcgaaagagttcctcgaaaactatctgctgactgatgaaggtctggaagcggttaataaagacaaaccgctgggtgccgtagcgctgaagtcttacgaggaagagttggcgaaagatccacgtattgccgccaccatggaaaacgcccagaaaggtgaaatcatgccgaacatcccgcagatgtccgctttctggtatgccgtgcgtactgcggtgatcaacgccgccagcggtcgtcagactgtcgatgaagccctgaaagacgcgcagactggtggttctggtgagaacctgtactttcaaagctcagataatgggcctcaaaaccagcgcaacgctccacgtataaccttcggtggcccgtctgactccacaggcagcaaccagaatggtgagcgtagtggagccaggtctaagcagcgccgtccccagggtctgccgaacaacacggcgagctggtttactgcgcttacccaacacggtaaagaagacttaaaattcccgcgtggccagggcgtcccgatcaacactaactcttccccggatgatcagattggttattaccgcagagcaactcgtcggattcgcggcggcgacggtaaaatgaaagatttgtctccgcgttggtacttttactatctcggcaccggtccggaagctggactgccctacggggcacgaaaggacgggatcatttgggtggctaccgaaggtgccctgaatactccaaaagatcatatcggcacccgtaaccctgctaataacgctgcgatcgttctgcaactgcctcagggtacaactctgccaaaaggcttctatgcagaagggtcgcgtggtggcagccaggcgagtagccgtagcagctcccgctctcgcaactcgtcccgtaactccactccgggctcttctcgcggcacgtccccggctcgtatggcaggtaacggtggtgacgctgctctggcgctgctactgctggacaggctgaaccagctggagtcgaagatgagtggtaaaggccaacagcagcagggccagaccgttaccaaaaagagcgcagctgaagcatctaaaaaaccgcgacagaaacgtaccgcgactaaagcgtacaatgtaacacaggccttcggtcgtcgaggtccggagcaaactcaaggaaactttggcgatcaggaattaatccgccaggggaccgactacaaacactggccgcaaattgcccagttcgccccatccgctagtgcattcttcggtatgagccgcatcggcatggaagtaacgccaagtggtacgtggctgacctacaccggtgctatcaagcttgatgacaaggacccgaactttaaagaccaggttattctgcttaacaaacatattgatgcctataaaactttcccgccgaccgaacccaaaaaggacaaaaagaaaaaagctgatgaaacccaggctctaccgcagcgtcagaaaaaacagcaaactgtgactctgctgccagctgcggacctggatgatttttccaagcagctgcaacagtctatgagctctgcggactctacgcaggctggtggttctggtcaccatcatcaccatcattaa

SEQ ID NO: 2690 - DNA, 2421 bp, Artificial Sequence
  Description of Artificial Sequence: Synthetic polynucleotide
atgaaaatcgaagaaggtaaactggtaatctggattaacggcgataaaggctataacggtctcgctgaagtcggtaagaaattcgagaaagataccggaattaaagtcaccgttgagcatccggataaactggaagagaaattcccacaggttgcggcaactggcgatggccctgacattatcttctgggcacacgaccgctttggtggctacgctcaatctggcctgttggctgaaatcaccccggacaaagcgttccaggacaagctgtatccgtttacctgggatgccgtacgttacaacggcaagctgattgcttacccgatcgctgttgaagcgttatcgctgatttataacaaagatctgctgccgaacccgccaaaaacctgggaagagatcccggcgctggataaagaactgaaagcgaaaggtaagagcgcgctgatgttcaacctgcaagaaccgtacttcacctggccgctgattgctgctgacgggggttatgcgttcaagtatgaaaacggcaagtacgacattaaagacgtgggcgtggataacgctggcgcgaaagcgggtctgaccttcctggttgacctgattaaaaacaaacacatgaatgcagacaccgattactccatcgcagaagctgcctttaataaaggcgaaacagcgatgaccatcaacggcccgtgggcatggtccaacatcgacaccagcaaagtgaattatggtgtaacggtactgccgaccttcaagggtcaaccatccaaaccgttcgttggcgtgctgagcgcaggtattaacgccgccagtccgaacaaagagctggcgaaagagttcctcgaaaactatctgctgactgatgaaggtctggaagcggttaataaagacaaaccgctgggtgccgtagcgctgaagtcttacgaggaagagttggcgaaagatccacgtattgccgccaccatggaaaacgcccagaaaggtgaaatcatgccgaacatcccgcagatgtccgctttctggtatgccgtgcgtactgcggtgatcaacgccgccagcggtcgtcagactgtcgatgaagccctgaaagacgcgcagactggtggttctggtgagaacctgtactttcaaagctcagataatgggcctcaaaaccagcgcaacgctccacgtataaccttcggtggcccgtctgactccacaggcagcaaccagaatggtgagcgtagtggagccaggtctaagcagcgccgtccccagggtctgccgaacaacacggcgagctggtttactccgcttacccaatttggtaaagaagacttaaaattcccgcccggccagggcgtcccgatcaacactaactcttccccggatgatcagattggttattaccgcagagcaactcgtcggattcgcggcggcgacggtaaaatgaaagatttgcctccgaagtggtacttttactatctcggcaccggtccgcatgctgatctgccctacgggcaaaaacacccaggggttgtgtgggtggctagacctggtgccctgaatactccaaaagatcatatcggcacccgtaaccctgctaataacgctgcgatcccgctgcaactgcctccgggtacaaagctgccaaaaggcttctatgcagaagggtcgcgtggtggcagccaggcgagtagccgtagcagctcccgctctcgcaactcgtcccgtaactccactccgggctcttctcgcggcacgtccccggctcgtatggcaggtaacggtggtgacgctgctctggcgctgctactgctggacaggctgaaccagctggagtcgaagatgagtggtaaaggccaacagcagcagggccagaccgttaccaaaaagagcgcagctgaagcatctaaaaaaccgcgacagaaacgtaccgcgactaaagcgtacaatgtaacacaggccttcggtcgtcgaggtccggagcaaactcaaggaaactttggcgatcaggaattaatccgccaggggaccgactacaaacactggccgcaaattgcccagttcgccccatccgctagtgcattcttcggtatgagccgcatcggcatggaagtaacgccaagtggtacgtggctgacctacaccggtgctatcaagcttgatgacaaggacccgaactttaaagaccaggttattctgcttaacaaacatattgatgcctataaaactttcccgccgaccgaacccaaaaaggacaaaaagaaaaaagctgatgaaacccaggctctaccgcagcgtcagaaaaaacagcaaactgtgactctgctgccagctgcggacctggatgatttttccaagcagctgcaacagtctatgagctctgcggactctacgcaggctggtggttctggtcaccatcatcaccatcattaa

SEQ ID NO: 2691 - DNA, 2421 bp, Artificial Sequence
  Description of Artificial Sequence: Synthetic polynucleotide
atgaaaatcgaagaaggtaaactggtaatctggattaacggcgataaaggctataacggtctcgctgaagtcggtaagaaattcgagaaagataccggaattaaagtcaccgttgagcatccggataaactggaagagaaattcccacaggttgcggcaactggcgatggccctgacattatcttctgggcacacgaccgctttggtggctacgctcaatctggcctgttggctgaaatcaccccggacaaagcgttccaggacaagctgtatccgtttacctgggatgccgtacgttacaacggcaagctgattgcttacccgatcgctgttgaagcgttatcgctgatttataacaaagatctgctgccgaacccgccaaaaacctgggaagagatcccggcgctggataaagaactgaaagcgaaaggtaagagcgcgctgatgttcaacctgcaagaaccgtacttcacctggccgctgattgctgctgacgggggttatgcgttcaagtatgaaaacggcaagtacgacattaaagacgtgggcgtggataacgctggcgcgaaagcgggtctgaccttcctggttgacctgattaaaaacaaacacatgaatgcagacaccgattactccatcgcagaagctgcctttaataaaggcgaaacagcgatgaccatcaacggcccgtgggcatggtccaacatcgacaccagcaaagtgaattatggtgtaacggtactgccgaccttcaagggtcaaccatccaaaccgttcgttggcgtgctgagcgcaggtattaacgccgccagtccgaacaaagagctggcgaaagagttcctcgaaaactatctgctgactgatgaaggtctggaagcggttaataaagacaaaccgctgggtgccgtagcgctgaagtcttacgaggaagagttggcgaaagatccacgtattgccgccaccatggaaaacgcccagaaaggtgaaatcatgccgaacatcccgcagatgtccgctttctggtatgccgtgcgtactgcggtgatcaacgccgccagcggtcgtcagactgtcgatgaagccctgaaagacgcgcagactggtggttctggtgagaacctgtactttcaaagctcagataatgggcctcaaaaccagcgcaacgctccacgtataaccttcggtggcccgtctgactccacaggcagcaaccagaatggtgagcgtagtggagccaggtctaagcagcgccgtccccagggtctgccgaacaacacggcgagctggtttactccgcttacccaacacggtaaagaagacttaaaattcccgcgtggccagggcgtcccgatcaacactaactcttccccggatgatcagattggttattaccgcagagcaactcgtcggattcgcggcggcgacggtaaaatgaaagatttgtctccgcgttggtacttttactatctcggcaccggtccggaagctggactgccctacggggcaaacaaggacgggatcatttgggtggctaccgaaggtgccctgaatactccaaaagatcatatcggcacccgtaaccctgctaataacgctgcgatcgttctgcaactgcctcagggtacaactctgccaaaaggcttctatgcagaagggtcgcgtggtggcagccaggcgagtagccgtagcagctcccgctctcgcaactcgtcccgtaactccactccgggctcttctcgcggcacgtccccggctcgtatggcaggtaacggtggtgacgctgctctggcgctgctactgctggacaggctgaaccagctggagtcgaagatgagtggtaaaggccaacagcagcagggccagaccgttaccaaaaagagcgcagctgaagcatctaaaaaaccgcgacagaaacgtaccgcgactaaagcgtacaatgtaacacaggccttcggtcgtcgaggtccggagcaaactcaaggaaactttggcgatcaggaattaatccgccaggggaccgactacaaacactggccgcaaattgcccagttcgccccatccgctagtgcattcttcggtatgagccgcatcggcatggaagtaacgccaagtggtacgtggctgacctacaccggtgctatcaagcttgatgacaaggacccgaactttaaagaccaggttattctgcttaacaaacatattgatgcctataaaactttcccgccgaccgaacccaaaaaggacaaaaagaaaaaagctgatgaaacccaggctctaccgcagcgtcagaaaaaacagcaaactgtgactctgctgccagctgcggacctggatgatttttccaagcagctgcaacagtctatgagctctgcggactctacgcaggctggtggttctggtcaccatcatcaccatcattaa

SEQ ID NO: 2692 - DNA, 2421 bp, Artificial Sequence
  Description of Artificial Sequence: Synthetic polynucleotide
atgaaaatcgaagaaggtaaactggtaatctggattaacggcgataaaggctataacggtctcgctgaagtcggtaagaaattcgagaaagataccggaattaaagtcaccgttgagcatccggataaactggaagagaaattcccacaggttgcggcaactggcgatggccctgacattatcttctgggcacacgaccgctttggtggctacgctcaatctggcctgttggctgaaatcaccccggacaaagcgttccaggacaagctgtatccgtttacctgggatgccgtacgttacaacggcaagctgattgcttacccgatcgctgttgaagcgttatcgctgatttataacaaagatctgctgccgaacccgccaaaaacctgggaagagatcccggcgctggataaagaactgaaagcgaaaggtaagagcgcgctgatgttcaacctgcaagaaccgtacttcacctggccgctgattgctgctgacgggggttatgcgttcaagtatgaaaacggcaagtacgacattaaagacgtgggcgtggataacgctggcgcgaaagcgggtctgaccttcctggttgacctgattaaaaacaaacacatgaatgcagacaccgattactccatcgcagaagctgcctttaataaaggcgaaacagcgatgaccatcaacggcccgtgggcatggtccaacatcgacaccagcaaagtgaattatggtgtaacggtactgccgaccttcaagggtcaaccatccaaaccgttcgttggcgtgctgagcgcaggtattaacgccgccagtccgaacaaagagctggcgaaagagttcctcgaaaactatctgctgactgatgaaggtctggaagcggttaataaagacaaaccgctgggtgccgtagcgctgaagtcttacgaggaagagttggcgaaagatccacgtattgccgccaccatggaaaacgcccagaaaggtgaaatcatgccgaacatcccgcagatgtccgctttctggtatgccgtgcgtactgcggtgatcaacgccgccagcggtcgtcagactgtcgatgaagccctgaaagacgcgcagactggtggttctggtgagaacctgtactttcaaagctcagataatgggcctcaaaaccagcgcaacgctccacgtataaccttcggtggcccgtctgactccacaggcagcaaccagaatggtgagcgtagtggagccaggtctaagcagcgccgtccccagggtctgccgaacaacacggcgagctggtttactgcgcttacccaacacggtaaagaagacttaaaattcccgcgtggccagggcgtcccgatcaacactaactcttccccggatgatcagattggttattaccgcagagcaactcgtcggattcgcggcggcgacggtaaaatgaaagatttgtctccgcgttggtacttttactatctcggcaccggtccggaagctggactgccctacggggcaaacaaggacgggatcatttgggtggctaccgaaggtgccctgaatactccaaaagatcatatcggcacccgtaaccctgctaataacgctgcgatcgttctgcaactgcctcagggtacaactctgccaaaaggcttctatgcagaagggtcgcgtggtggcagccaggcgagtagccgtagcagctcccgctctcgcaactcgtcccgtaactccactccgggctcttctcgcggcacgtccccggctcgtatggcaggtaacggtggtgacgctgctctggcgctgctactgctggacaggctgaaccagctggagtcgaagatgagtggtaaaggccaacagcagcagggccagaccgttaccaaaaagagcgcagctgaagcatctaaaaaaccgcgacagaaacgtaccgcgactaaagcgtacaatgtaacacaggccttcggtcgtcgaggtccggagcaaactcaaggaaactttggcgatcaggaattaatccgccaggggaccgactacaaacactggccgcaaattgcccagttcgccccatccgctagtgcattcttcggtatgagccgcatcggcatggaagtaacgccaagtggtacgtggctgacctacaccggtgctatcaagcttgatcctaaggacccgaactttaaagaccaggttattctgcttaacaaacatattgatgcctataaaactttcccgccgaccgaacccaaaaaggacaaaaagaaaaaagctgatgaaacccaggctctaccgcagcgtcagaaaaaacagcaaactgtgactctgctgccagctgcggacctggatgatttttccaagcagctgcaacagtctatgagctctgcggactctacgcaggctggtggttctggtcaccatcatcaccatcattaa

SEQ ID NO: 2693 - DNA, 2421 bp, Artificial Sequence
  Description of Artificial Sequence: Synthetic polynucleotide
atgaaaatcgaagaaggtaaactggtaatctggattaacggcgataaaggctataacggtctcgctgaagtcggtaagaaattcgagaaagataccggaattaaagtcaccgttgagcatccggataaactggaagagaaattcccacaggttgcggcaactggcgatggccctgacattatcttctgggcacacgaccgctttggtggctacgctcaatctggcctgttggctgaaatcaccccggacaaagcgttccaggacaagctgtatccgtttacctgggatgccgtacgttacaacggcaagctgattgcttacccgatcgctgttgaagcgttatcgctgatttataacaaagatctgctgccgaacccgccaaaaacctgggaagagatcccggcgctggataaagaactgaaagcgaaaggtaagagcgcgctgatgttcaacctgcaagaaccgtacttcacctggccgctgattgctgctgacgggggttatgcgttcaagtatgaaaacggcaagtacgacattaaagacgtgggcgtggataacgctggcgcgaaagcgggtctgaccttcctggttgacctgattaaaaacaaacacatgaatgcagacaccgattactccatcgcagaagctgcctttaataaaggcgaaacagcgatgaccatcaacggcccgtgggcatggtccaacatcgacaccagcaaagtgaattatggtgtaacggtactgccgaccttcaagggtcaaccatccaaaccgttcgttggcgtgctgagcgcaggtattaacgccgccagtccgaacaaagagctggcgaaagagttcctcgaaaactatctgctgactgatgaaggtctggaagcggttaataaagacaaaccgctgggtgccgtagcgctgaagtcttacgaggaagagttggcgaaagatccacgtattgccgccaccatggaaaacgcccagaaaggtgaaatcatgccgaacatcccgcagatgtccgctttctggtatgccgtgcgtactgcggtgatcaacgccgccagcggtcgtcagactgtcgatgaagccctgaaagacgcgcagactggtggttctggtgagaacctgtactttcaaagctcagataatgggcctcaaaaccagcgcaacgctccacgtataaccttcggtggcccgtctgactccacaggcagcaaccagaatggtgagcgtagtggagccaggtctaagcagcgccgtccccagggtctgccgaacaacacggcgagctggtttactgcgcttacccaacacggtaaagaagacttaaaattcccgcgtggccagggcgtcccgatcaacactaactcttccccggatgatcagattggttattaccgcagagcaactcgtcggattcgcggcggcgacggtaaaatgaaagatttgtctccgcgttggtacttttactatctcggcaccggtccggaagctggactgccctacggggcaaacaaggacgggatcatttgggtggctaccgaaggtgccctgaatactccaaaagatcatatcggcacccgtaaccctgctaataacgctgcgatcgatctgcaactgcctcagggtacaactctgccaaaaggcttctatgcagaagggtcgcgtggtggcagccaggcgagtagccgtagcagctcccgctctcgcaactcgtcccgtaactccactccgggctcttctcgcggcacgtccccggctcgtatggcaggtaacggtggtgacgctgctctggcgctgctactgctggacaggctgaaccagctggagtcgaagatgagtggtaaaggccaacagcagcagggccagaccgttaccaaaaagagcgcagctgaagcatctaaaaaaccgcgacagaaacgtaccgcgactaaagcgtacaatgtaacacaggccttcggtcgtcgaggtccggagcaaactcaaggaaactttggcgatcaggaattaatccgccaggggaccgactacaaacactggccgcaaattgcccagttcgccccatccgctagtgcattcttcggtatgagccgcatcggcatggaagtaacgccaagtggtacgtggctgacctacaccggtgctatcaagcttgatgacaaggacccgaactttaaagaccaggttattctgcttaacaaacatattgatgcctataaaactttcccgccgaccgaacccaaaaaggacaaaaagaaaaaagctgatgaaacccaggctctaccgcagcgtcagaaaaaacagcaaactgtgactctgctgccagctgcggacctggatgatttttccaagcagctgcaacagtctatgagctctgcggactctacgcaggctggtggttctggtcaccatcatcaccatcattaa

SEQ ID NO: 2694 - DNA, 2421 bp, Artificial Sequence
  Description of Artificial Sequence: Synthetic polynucleotide
atgaaaatcgaagaaggtaaactggtaatctggattaacggcgataaaggctataacggtctcgctgaagtcggtaagaaattcgagaaagataccggaattaaagtcaccgttgagcatccggataaactggaagagaaattcccacaggttgcggcaactggcgatggccctgacattatcttctgggcacacgaccgctttggtggctacgctcaatctggcctgttggctgaaatcaccccggacaaagcgttccaggacaagctgtatccgtttacctgggatgccgtacgttacaacggcaagctgattgcttacccgatcgctgttgaagcgttatcgctgatttataacaaagatctgctgccgaacccgccaaaaacctgggaagagatcccggcgctggataaagaactgaaagcgaaaggtaagagcgcgctgatgttcaacctgcaagaaccgtacttcacctggccgctgattgctgctgacgggggttatgcgttcaagtatgaaaacggcaagtacgacattaaagacgtgggcgtggataacgctggcgcgaaagcgggtctgaccttcctggttgacctgattaaaaacaaacacatgaatgcagacaccgattactccatcgcagaagctgcctttaataaaggcgaaacagcgatgaccatcaacggcccgtgggcatggtccaacatcgacaccagcaaagtgaattatggtgtaacggtactgccgaccttcaagggtcaaccatccaaaccgttcgttggcgtgctgagcgcaggtattaacgccgccagtccgaacaaagagctggcgaaagagttcctcgaaaactatctgctgactgatgaaggtctggaagcggttaataaagacaaaccgctgggtgccgtagcgctgaagtcttacgaggaagagttggcgaaagatccacgtattgccgccaccatggaaaacgcccagaaaggtgaaatcatgccgaacatcccgcagatgtccgctttctggtatgccgtgcgtactgcggtgatcaacgccgccagcggtcgtcagactgtcgatgaagccctgaaagacgcgcagactggtggttctggtgagaacctgtactttcaaagctcagataatgggcctcaaaaccagcgcaacgctccacgtataaccttcggtggcccgtctgactccacaggcagcaaccagaatggtgagcgtagtggagccaggtctaagcagcgccgtccccagggtctgccgaacaacacggcgagctggtttactggccttacccaacacggtaaagaagacttaaaattcccgccgggccagggcgtcccgatcaacactaactcttccccggatgatcagattggttattaccgcagagcaactcgtcggattcgcggcggcgacggtaaaatgaaagatttgccaccgcgttggtacttttactatctcggcaccggtccggaagctgatctgccctacggggcagttaaggacgggatcttttgggtggctgcggaaggtgccctgaatactccaaaagatcatatcggcacccgtaaccctgctaataacgctgcgatccccctgcaactgcctccgggtacaactctgccaaaaggcttctatgcagaagggtcgcgtggtggcagccaggcgagtagccgtagcagctcccgctctcgcaactcgtcccgtaactccactccgggctcttctcgcggcacgtccccggctcgtatggcaggtaacggtggtgacgctgctctggcgctgctactgctggacaggctgaaccagctggagtcgaagatgagtggtaaaggccaacagcagcagggccagaccgttaccaaaaagagcgcagctgaagcatctaaaaaaccgcgacagaaacgtaccgcgactaaagcgtacaatgtaacacaggccttcggtcgtcgaggtccggagcaaactcaaggaaactttggcgatcaggaattaatccgccaggggaccgactacaaacactggccgcaaattgcccagttcgccccatccgctagtgcattcttcggtatgagccgcatcggcatggaagtaacgccaagtggtacgtggctgacctacaccggtgctatcaagcttgatgacaaggacccgaactttaaagaccaggttattctgcttaacaaacatattgatgcctataaaactttcccgccgaccgaacccaaaaaggacaaaaagaaaaaagctgatgaaacccaggctctaccgcagcgtcagaaaaaacagcaaactgtgactctgctgccagctgcggacctggatgatttttccaagcagctgcaacagtctatgagctctgcggactctacgcaggctggtggttctggtcaccatcatcaccatcattaa

SEQ ID NO: 2695 - DNA, 2421 bp, Artificial Sequence
  Description of Artificial Sequence: Synthetic polynucleotide
atgaaaatcgaagaaggtaaactggtaatctggattaacggcgataaaggctataacggtctcgctgaagtcggtaagaaattcgagaaagataccggaattaaagtcaccgttgagcatccggataaactggaagagaaattcccacaggttgcggcaactggcgatggccctgacattatcttctgggcacacgaccgctttggtggctacgctcaatctggcctgttggctgaaatcaccccggacaaagcgttccaggacaagctgtatccgtttacctgggatgccgtacgttacaacggcaagctgattgcttacccgatcgctgttgaagcgttatcgctgatttataacaaagatctgctgccgaacccgccaaaaacctgggaagagatcccggcgctggataaagaactgaaagcgaaaggtaagagcgcgctgatgttcaacctgcaagaaccgtacttcacctggccgctgattgctgctgacgggggttatgcgttcaagtatgaaaacggcaagtacgacattaaagacgtgggcgtggataacgctggcgcgaaagcgggtctgaccttcctggttgacctgattaaaaacaaacacatgaatgcagacaccgattactccatcgcagaagctgcctttaataaaggcgaaacagcgatgaccatcaacggcccgtgggcatggtccaacatcgacaccagcaaagtgaattatggtgtaacggtactgccgaccttcaagggtcaaccatccaaaccgttcgttggcgtgctgagcgcaggtattaacgccgccagtccgaacaaagagctggcgaaagagttcctcgaaaactatctgctgactgatgaaggtctggaagcggttaataaagacaaaccgctgggtgccgtagcgctgaagtcttacgaggaagagttggcgaaagatccacgtattgccgccaccatggaaaacgcccagaaaggtgaaatcatgccgaacatcccgcagatgtccgctttctggtatgccgtgcgtactgcggtgatcaacgccgccagcggtcgtcagactgtcgatgaagccctgaaagacgcgcagactggtggttctggtgagaacctgtactttcaaagctcagataatgggcctcaaaaccagcgcaacgctccacgtataaccttcggtggcccgtctgactccacaggcagcaaccagaatggtgagcgtagtggagccaggtctaagcagcgccgtccccagggtctgccgaacaacacggcgagctggtttactgcgcttacccaacacggtaaagaagacttaaaattcccgcgtggccagggcgtcccgatcaacactaactcttccccggatgatcagattggttattaccgcagagcaactcgtcggattcgcggcggcgacggtaaaatgaaagatttgtctccgcgttggtacttttactatctcggcaccggtccggaagctggactgccctacggggcaaacaaggacgggatcatttgggtggctaccgaaggtgccctgaatactccaaaagatcatatcggcacccgtaaccctgctaataacgctgcgatcgttctgcaactgcctcagggtacaactctgccaaaaggcttctatgcagaagggtcgcgtggtggcagccaggcgagtagccgtagcagctcccgctctcgcaactcgtcccgtaactccactccgggctcttctcgcggcacgtccccggctcgtatggcaggtaacggtggtgacgctgctctggcgctgctactgctggacaggctgaaccagctggagtcgaagatgagtggtaaaggccaacagcagcagggccagaccgttaccaaaaagagcgcagctgaagcatctaaaaaaccgcgacagaaacgtaccgcgactaaagcgtacaatgtaacacaggccttcggtaaacgaggtccggagcaaactcaaggaaactttggcgatcaggaattaatccgccaggggaccgactacaaacactggccgcaaattgcccagttcgccccatccgctagtgcattcttcggtatgagccgcatcggcatggaagtaacgccaagtggtacgtggctgacctacaccggtgctatcaagcttgatgacaaggacccgaactttaaagaccaggttattctgcttaacaaacatattgatgcctataaaactttcccgccgaccgaacccaaaaaggacaaaaagaaaaaagctgatgaaacccaggctctaccgcagcgtcagaaaaaacagcaaactgtgactctgctgccagctgcggacctggatgatttttccaagcagctgcaacagtctatgagctctgcggactctacgcaggctggtggttctggtcaccatcatcaccatcattaa

SEQ ID NO: 2696 - DNA, 2421 bp, Artificial Sequence
  Description of Artificial Sequence: Synthetic polynucleotide
atgaaaatcgaagaaggtaaactggtaatctggattaacggcgataaaggctataacggtctcgctgaagtcggtaagaaattcgagaaagataccggaattaaagtcaccgttgagcatccggataaactggaagagaaattcccacaggttgcggcaactggcgatggccctgacattatcttctgggcacacgaccgctttggtggctacgctcaatctggcctgttggctgaaatcaccccggacaaagcgttccaggacaagctgtatccgtttacctgggatgccgtacgttacaacggcaagctgattgcttacccgatcgctgttgaagcgttatcgctgatttataacaaagatctgctgccgaacccgccaaaaacctgggaagagatcccggcgctggataaagaactgaaagcgaaaggtaagagcgcgctgatgttcaacctgcaagaaccgtacttcacctggccgctgattgctgctgacgggggttatgcgttcaagtatgaaaacggcaagtacgacattaaagacgtgggcgtggataacgctggcgcgaaagcgggtctgaccttcctggttgacctgattaaaaacaaacacatgaatgcagacaccgattactccatcgcagaagctgcctttaataaaggcgaaacagcgatgaccatcaacggcccgtgggcatggtccaacatcgacaccagcaaagtgaattatggtgtaacggtactgccgaccttcaagggtcaaccatccaaaccgttcgttggcgtgctgagcgcaggtattaacgccgccagtccgaacaaagagctggcgaaagagttcctcgaaaactatctgctgactgatgaaggtctggaagcggttaataaagacaaaccgctgggtgccgtagcgctgaagtcttacgaggaagagttggcgaaagatccacgtattgccgccaccatggaaaacgcccagaaaggtgaaatcatgccgaacatcccgcagatgtccgctttctggtatgccgtgcgtactgcggtgatcaacgccgccagcggtcgtcagactgtcgatgaagccctgaaagacgcgcagactggtggttctggtgagaacctgtactttcaaagctcagataatgggcctcaaaaccagcgcaacgctccacgtataaccttcggtggcccgtctgactccacaggcagcaaccagaatggtgagcgtagtggagccaggtctaagcagcgccgtccccagggtctgccgaacaacacggcgagctggtttactgcgcttacccaacacggtaaagaagacttaaaattcccgcgtggccagggcgtcccgatcaacactaactcttccccggatgatcagattggttattaccgcagagcaactcgtcggattcgcggcggcgacggtaaaatgaaagatttgtctccgcgttggtacttttactatctcggcaccggtccggaagctggactgccctacggggcaaacaaggacgggatcatttgggtggctaccgaaggtgccctgaatactccaaaagatcatatcggcacccgtaaccctgctaataacgctgcgatcgttctgcaactgcctcagggtacaactctgccaaaaggcttctatgcagaagggtcgcgtggtggcagccaggcgagtagccgtagcagctcccgctctcgcaactcgtcccgtaactccactccgggctcttctcgcggcacgtccccggctcgtatggcaggtaacggtggtgacgctgctctggcgctgctactgctggacaggctgaaccagctggagtcgaagatgagtggtaaaggccaacagcagcagggccagaccgttaccaaaaagagcgcagctgaaatgtctaaaaaaccgcgacagaaacgtaccgcgactaaaggttgtaatgtaacacagtgcttcggtccccgaggtccggagcaaactcaaggaaactttggcgatgccgaattaatcaaaaaagggaccgactacaaacactggccgcaaattgcccagttcgccccatccgctagtgcattcttcggtatgagccgcatctcgagtaaggaacaaccaagtggtacgtggctgacctacaccggtgctatcaagcttgataaggatgacccgaactttaaagaccaggttattctgcttaacaaacatattgatgcctataaaactttcccgccgaccgaacccaaaaaggacaaaaagaaaaaagctgatgaaacccaggctctaccgcagcgtcagaaaaaacagcaaactgtgactctgctgccagctgcggacctggatgatttttccaagcagctgcaacagtctatgagctctgcggactctacgcaggctggtggttctggtcaccatcatcaccatcattaa

SEQ ID NO: 2697 - DNA, 2421 bp, Artificial Sequence
  Description of Artificial Sequence: Synthetic polynucleotide
atgaaaatcgaagaaggtaaactggtaatctggattaacggcgataaaggctataacggtctcgctgaagtcggtaagaaattcgagaaagataccggaattaaagtcaccgttgagcatccggataaactggaagagaaattcccacaggttgcggcaactggcgatggccctgacattatcttctgggcacacgaccgctttggtggctacgctcaatctggcctgttggctgaaatcaccccggacaaagcgttccaggacaagctgtatccgtttacctgggatgccgtacgttacaacggcaagctgattgcttacccgatcgctgttgaagcgttatcgctgatttataacaaagatctgctgccgaacccgccaaaaacctgggaagagatcccggcgctggataaagaactgaaagcgaaaggtaagagcgcgctgatgttcaacctgcaagaaccgtacttcacctggccgctgattgctgctgacgggggttatgcgttcaagtatgaaaacggcaagtacgacattaaagacgtgggcgtggataacgctggcgcgaaagcgggtctgaccttcctggttgacctgattaaaaacaaacacatgaatgcagacaccgattactccatcgcagaagctgcctttaataaaggcgaaacagcgatgaccatcaacggcccgtgggcatggtccaacatcgacaccagcaaagtgaattatggtgtaacggtactgccgaccttcaagggtcaaccatccaaaccgttcgttggcgtgctgagcgcaggtattaacgccgccagtccgaacaaagagctggcgaaagagttcctcgaaaactatctgctgactgatgaaggtctggaagcggttaataaagacaaaccgctgggtgccgtagcgctgaagtcttacgaggaagagttggcgaaagatccacgtattgccgccaccatggaaaacgcccagaaaggtgaaatcatgccgaacatcccgcagatgtccgctttctggtatgccgtgcgtactgcggtgatcaacgccgccagcggtcgtcagactgtcgatgaagccctgaaagacgcgcagactggtggttctggtgagaacctgtactttcaaagctcagataatgggcctcaaaaccagcgcaacgctccacgtataaccttcggtggcccgtctgactccacaggcagcaaccagaatggtgagcgtagtggagccaggtctaagcagcgccgtccccagggtctgccgaacaacacggcgagctggtttactgcgcttacccaacacggtaaagaagacttaaaattcccgcgtggccagggcgtcccgatcaacactaactcttccccggatgatcagattggttattaccgcagagcaactcgtcggattcgcggcggcgacggtaaaatgaaagatttgtctccgcgttggtacttttactatctcggcaccggtccggaagctggactgccctacggggcaaacaaggacgggatcatttgggtggctaccgaaggtgccctgaatactccaaaagatcatatcggcacccgtaaccctgctaataacgctgcgatcgttctgcaactgcctcagggtacaactctgccaaaaggcttctatgcagaagggtcgcgtggtggcagccaggcgagtagccgtagcagctcccgctctcgcaactcgtcccgtaactccactccgggctcttctcgcggcacgtccccggctcgtatggcaggtaacggtggtgacgctgctctggcgctgctactgctggacaggctgaaccagctggagtcgaagatgagtggtaaaggccaacagcagcagggccagaccgttaccaaaaagagcgcagctgaagcatctaaaaaaccgcgacagaaacgtaccgcgactaaagcgtacaatgtaacacaggccttcggtcgtcgaggtccggagcaaactcaaggaaactttggcgatcaggaattaatccgccaggggaccgactacaaacactggccgcaaattgcccagttcgccccatccgctagtgcattcttcggtatgagccgcatcggcacggaagtaacgccaagtggtacgtggctgacctacaccggtgctatcaagcttgatgacaaggacccgaactttaaagaccaggttattctgcttaacaaacatattgatgcctataaaactttcccgccgaccgaacccaaaaaggacaaaaagaaaaaagctgatgaaacccaggctctaccgcagcgtcagaaaaaacagcaaactgtgactctgctgccagctgcggacctggatgatttttccaagcagctgcaacagtctatgagctctgcggactctacgcaggctggtggttctggtcaccatcatcaccatcattaa

SEQ ID NO: 2698 - DNA, 2421 bp, Artificial Sequence
  Description of Artificial Sequence: Synthetic polynucleotide
atgaaaatcgaagaaggtaaactggtaatctggattaacggcgataaaggctataacggtctcgctgaagtcggtaagaaattcgagaaagataccggaattaaagtcaccgttgagcatccggataaactggaagagaaattcccacaggttgcggcaactggcgatggccctgacattatcttctgggcacacgaccgctttggtggctacgctcaatctggcctgttggctgaaatcaccccggacaaagcgttccaggacaagctgtatccgtttacctgggatgccgtacgttacaacggcaagctgattgcttacccgatcgctgttgaagcgttatcgctgatttataacaaagatctgctgccgaacccgccaaaaacctgggaagagatcccggcgctggataaagaactgaaagcgaaaggtaagagcgcgctgatgttcaacctgcaagaaccgtacttcacctggccgctgattgctgctgacgggggttatgcgttcaagtatgaaaacggcaagtacgacattaaagacgtgggcgtggataacgctggcgcgaaagcgggtctgaccttcctggttgacctgattaaaaacaaacacatgaatgcagacaccgattactccatcgcagaagctgcctttaataaaggcgaaacagcgatgaccatcaacggcccgtgggcatggtccaacatcgacaccagcaaagtgaattatggtgtaacggtactgccgaccttcaagggtcaaccatccaaaccgttcgttggcgtgctgagcgcaggtattaacgccgccagtccgaacaaagagctggcgaaagagttcctcgaaaactatctgctgactgatgaaggtctggaagcggttaataaagacaaaccgctgggtgccgtagcgctgaagtcttacgaggaagagttggcgaaagatccacgtattgccgccaccatggaaaacgcccagaaaggtgaaatcatgccgaacatcccgcagatgtccgctttctggtatgccgtgcgtactgcggtgatcaacgccgccagcggtcgtcagactgtcgatgaagccctgaaagacgcgcagactggtggttctggtgagaacctgtactttcaaagctcagataatgggcctcaaaaccagcgcaacgctccacgtataaccttcggtggcccgtctgactccacaggcagcaaccagaatggtgagcgtagtggagccaggtctaagcagcgccgtccccagggtctgccgaacaacacggcgagctggtttactgcgcttacccaacacggtaaagaagacttaaaattcccgcgtggccagggcgtcccgatcaacactaactcttccccggatgatcagattggttattaccgcagagatactcgtcggattcgcggcggcgacggtaaaatgaaagatttgtctccgcgttggtacttttactatctcggcaccggtccggaagctggactgccctacggggcaaacaaggacgggatcatttgggtggctaccgaaggtgccctgaatactccaaaagatcatatcggcacccgtaaccctgctaataacgctgcgatcgttctgcaactgcctcagggtacaactctgccaaaaggcttctatgcagaagggtcgcgtggtggcagccaggcgagtagccgtagcagctcccgctctcgcaactcgtcccgtaactccactccgggctcttctcgcggcacgtccccggctcgtatggcaggtaacggtggtgacgctgctctggcgctgctactgctggacaggctgaaccagctggagtcgaagatgagtggtaaaggccaacagcagcagggccagaccgttaccaaaaagagcgcagctgaagcatctaaaaaaccgcgacagaaacgtaccgcgactaaagcgtacaatgtaacacaggccttcggtcgtcgaggtccggagcaaactcaaggaaactttggcgatcaggaattaatccgccaggggaccgactacaaacactggccgcaaattgcccagttcgccccatccgctagtgcattcttcggtatgagccgcatcggcatggaagtaacgccaagtggtacgtggctgacctacaccggtgctatcaagcttgatgacaaggacccgaactttaaagaccaggttattctgcttaacaaacatattgatgcctataaaactttcccgccgaccgaacccaaaaaggacaaaaagaaaaaagctgatgaaacccaggctctaccgcagcgtcagaaaaaacagcaaactgtgactctgctgccagctgcggacctggatgatttttccaagcagctgcaacagtctatgagctctgcggactctacgcaggctggtggttctggtcaccatcatcaccatcattaa

SEQ ID NO: 2699 - DNA, 2421 bp, Artificial Sequence
  Description of Artificial Sequence: Synthetic polynucleotide
atgaaaatcgaagaaggtaaactggtaatctggattaacggcgataaaggctataacggtctcgctgaagtcggtaagaaattcgagaaagataccggaattaaagtcaccgttgagcatccggataaactggaagagaaattcccacaggttgcggcaactggcgatggccctgacattatcttctgggcacacgaccgctttggtggctacgctcaatctggcctgttggctgaaatcaccccggacaaagcgttccaggacaagctgtatccgtttacctgggatgccgtacgttacaacggcaagctgattgcttacccgatcgctgttgaagcgttatcgctgatttataacaaagatctgctgccgaacccgccaaaaacctgggaagagatcccggcgctggataaagaactgaaagcgaaaggtaagagcgcgctgatgttcaacctgcaagaaccgtacttcacctggccgctgattgctgctgacgggggttatgcgttcaagtatgaaaacggcaagtacgacattaaagacgtgggcgtggataacgctggcgcgaaagcgggtctgaccttcctggttgacctgattaaaaacaaacacatgaatgcagacaccgattactccatcgcagaagctgcctttaataaaggcgaaacagcgatgaccatcaacggcccgtgggcatggtccaacatcgacaccagcaaagtgaattatggtgtaacggtactgccgaccttcaagggtcaaccatccaaaccgttcgttggcgtgctgagcgcaggtattaacgccgccagtccgaacaaagagctggcgaaagagttcctcgaaaactatctgctgactgatgaaggtctggaagcggttaataaagacaaaccgctgggtgccgtagcgctgaagtcttacgaggaagagttggcgaaagatccacgtattgccgccaccatggaaaacgcccagaaaggtgaaatcatgccgaacatcccgcagatgtccgctttctggtatgccgtgcgtactgcggtgatcaacgccgccagcggtcgtcagactgtcgatgaagccctgaaagacgcgcagactggtggttctggtgagaacctgtactttcaaagctcagataatgggcctcaaaaccagcgcaacgctccacgtataaccttcggtggcccgtctgactccacaggcagcaaccagaatggtgagcgtagtggagccaggtctaagcagcgccgtccccagggtctgccgaacaacacggcgagctggtttactgcgcttacccaacacggtaaagaagacttaaaattcccgcgtggccagggcgtcccgatcaacactaactcttccccggatgatcagattggttattaccgcagagcaactcgtcggtggcgcggcggcgacggtaaaatgaaagatttgtctccgcgttggtacttttactatctcggcaccggtccggaagctggactgccctacggggcaaacaaggacgggatcatttgggtggctaccgaaggtgccctgaatactccaaaagatcatatcggcacccgtaaccctgctaataacgctgcgatcgttctgcaactgcctcagggtacaactctgccaaaaggcttctatgcagaagggtcgcgtggtggcagccaggcgagtagccgtagcagctcccgctctcgcaactcgtcccgtaactccactccgggctcttctcgcggcacgtccccggctcgtatggcaggtaacggtggtgacgctgctctggcgctgctactgctggacaggctgaaccagctggagtcgaagatgagtggtaaaggccaacagcagcagggccagaccgttaccaaaaagagcgcagctgaagcatctaaaaaaccgcgacagaaacgtaccgcgactaaagcgtacaatgtaacacaggccttcggtcgtcgaggtccggagcaaactcaaggaaactttggcgatcaggaattaatccgccaggggaccgactacaaacactggccgcaaattgcccagttcgccccatccgctagtgcattcttcggtatgagccgcatcggcatggaagtaacgccaagtggtacgtggctgacctacaccggtgctatcaagcttgatgacaaggacccgaactttaaagaccaggttattctgcttaacaaacatattgatgcctataaaactttcccgccgaccgaacccaaaaaggacaaaaagaaaaaagctgatgaaacccaggctctaccgcagcgtcagaaaaaacagcaaactgtgactctgctgccagctgcggacctggatgatttttccaagcagctgcaacagtctatgagctctgcggactctacgcaggctggtggttctggtcaccatcatcaccatcattaa

SEQ ID NO: 2700 - DNA, 2421 bp, Artificial Sequence
  Description of Artificial Sequence: Synthetic polynucleotide
atgaaaatcgaagaaggtaaactggtaatctggattaacggcgataaaggctataacggtctcgctgaagtcggtaagaaattcgagaaagataccggaattaaagtcaccgttgagcatccggataaactggaagagaaattcccacaggttgcggcaactggcgatggccctgacattatcttctgggcacacgaccgctttggtggctacgctcaatctggcctgttggctgaaatcaccccggacaaagcgttccaggacaagctgtatccgtttacctgggatgccgtacgttacaacggcaagctgattgcttacccgatcgctgttgaagcgttatcgctgatttataacaaagatctgctgccgaacccgccaaaaacctgggaagagatcccggcgctggataaagaactgaaagcgaaaggtaagagcgcgctgatgttcaacctgcaagaaccgtacttcacctggccgctgattgctgctgacgggggttatgcgttcaagtatgaaaacggcaagtacgacattaaagacgtgggcgtggataacgctggcgcgaaagcgggtctgaccttcctggttgacctgattaaaaacaaacacatgaatgcagacaccgattactccatcgcagaagctgcctttaataaaggcgaaacagcgatgaccatcaacggcccgtgggcatggtccaacatcgacaccagcaaagtgaattatggtgtaacggtactgccgaccttcaagggtcaaccatccaaaccgttcgttggcgtgctgagcgcaggtattaacgccgccagtccgaacaaagagctggcgaaagagttcctcgaaaactatctgctgactgatgaaggtctggaagcggttaataaagacaaaccgctgggtgccgtagcgctgaagtcttacgaggaagagttggcgaaagatccacgtattgccgccaccatggaaaacgcccagaaaggtgaaatcatgccgaacatcccgcagatgtccgctttctggtatgccgtgcgtactgcggtgatcaacgccgccagcggtcgtcagactgtcgatgaagccctgaaagacgcgcagactggtggttctggtgagaacctgtactttcaaagctcagataatgggcctcaaaaccagcgcaacgctccacgtataaccttcggtggcccgtctgactccacaggcagcaaccagaatggtgagcgtagtggagccaggtctaagcagcgccgtccccagggtctgccgaacaacacggcgagctggtttactgcgcttacccaacacggtaaagaagacttaaaattcccgcgtggccagggcgtcccgatcaacactaactcttccccggatgatcagattggttattaccgcagagcaactcgtcggattcgcggcggcgacggtaaaatgaaagatttgtctccgcgttggtacttttactatctcggcaccggtccggaagctggactgccctacggggcaaacaaggacgggatcatttgggtggctaccgaaggtgccctgaatactccaaaagatcatatcggcacccgtaaccctgctaataacgctgcgatcgttctgcaactgcctcagggtacaactctgccaaaaggcttctatgcagaagggtcgcgtggtggcagccaggcgagtagccgtagcagctcccgctctcgcaactcgtcccgtaactccactccgggctcttctcgcggcacgtccccggctcgtatggcaggtaacggtggtgacgctgctctggcgctgctactgctggacaggctgaaccagctggagtcgaagatgagtggtaaaggccaacagcagcagggccagaccgttaccaaaaagagcgcagctgaagcatctaaaaaaccgcgatgcaaacgtaccgcgactaaagcgtacaatgtaacacaggccttcggtcgtcgaggtccggagcaaactcaaggaaactttggcgatcaggaattaatccgccaggggaccgactacaaacactggccgcaaattgcccagttcgccccatccgctagtgcattcttcggtatgagccgcatcggcatggaagtaacgccaagtggtacgtggctgacctacaccggtgctatcaagcttgatgacaaggacccgaactttaaagaccaggttattctgcttaacaaacatattgatgcctataaaactttcccgccgaccgaacccaaaaaggacaaaaagaaaaaagctgatgaaacccaggctctaccgcagcgtcagaaaaaacagcaaactgtgactctgctgccagctgcggacctggatgatttttccaagcagctgcaacagtctatgagctctgcggactctacgcaggctggtggttctggtcaccatcatcaccatcattaa

SEQ ID NO: 2701 - DNA, 2421 bp, Artificial Sequence
  Description of Artificial Sequence: Synthetic polynucleotide
atgaaaatcgaagaaggtaaactggtaatctggattaacggcgataaaggctataacggtctcgctgaagtcggtaagaaattcgagaaagataccggaattaaagtcaccgttgagcatccggataaactggaagagaaattcccacaggttgcggcaactggcgatggccctgacattatcttctgggcacacgaccgctttggtggctacgctcaatctggcctgttggctgaaatcaccccggacaaagcgttccaggacaagctgtatccgtttacctgggatgccgtacgttacaacggcaagctgattgcttacccgatcgctgttgaagcgttatcgctgatttataacaaagatctgctgccgaacccgccaaaaacctgggaagagatcccggcgctggataaagaactgaaagcgaaaggtaagagcgcgctgatgttcaacctgcaagaaccgtacttcacctggccgctgattgctgctgacgggggttatgcgttcaagtatgaaaacggcaagtacgacattaaagacgtgggcgtggataacgctggcgcgaaagcgggtctgaccttcctggttgacctgattaaaaacaaacacatgaatgcagacaccgattactccatcgcagaagctgcctttaataaaggcgaaacagcgatgaccatcaacggcccgtgggcatggtccaacatcgacaccagcaaagtgaattatggtgtaacggtactgccgaccttcaagggtcaaccatccaaaccgttcgttggcgtgctgagcgcaggtattaacgccgccagtccgaacaaagagctggcgaaagagttcctcgaaaactatctgctgactgatgaaggtctggaagcggttaataaagacaaaccgctgggtgccgtagcgctgaagtcttacgaggaagagttggcgaaagatccacgtattgccgccaccatggaaaacgcccagaaaggtgaaatcatgccgaacatcccgcagatgtccgctttctggtatgccgtgcgtactgcggtgatcaacgccgccagcggtcgtcagactgtcgatgaagccctgaaagacgcgcagactggtggttctggtgagaacctgtactttcaaagctcagataatgggcctcaaaaccagcgcaacgctccacgtataaccttcggtggcccgtctgactccacaggcagcaaccagaatggtgagcgtagtggagccaggtctaagcagcgccgtccccagggtctgccgaacaacacggcgagctggtttactgcgcttacccaacacggtaaagaagacttaaaattcccgcgtggccagggcgtcccgatcaacactaactcttccccggatgatcagattggttattaccgcagagcaactcgtcggattcgcggcggcgacggtaaaatgaaagatttgtctccgcgttggtacttttactatctcggcaccggtccggaagctggactgccctacggggcaaacaaggacgggatcatttgggtggctaccgaaggtgccctgaatactccaaaagatcatatcggcacccgtaaccctgctaataacgctgcgatccaactgcaactgcctcagggtacaactctgccaaaaggcttctatgcagaagggtcgcgtggtggcagccaggcgagtagccgtagcagctcccgctctcgcaactcgtcccgtaactccactccgggctcttctcgcggcacgtccccggctcgtatggcaggtaacggtggtgacgctgctctggcgctgctactgctggacaggctgaaccagctggagtcgaagatgagtggtaaaggccaacagcagcagggccagaccgttaccaaaaagagcgcagctgaagcatctaaaaaaccgcgacagaaacgtaccgcgactaaagcgtacaatgtaacacaggccttcggtcgtcgaggtccggagcaaactcaaggaaactttggcgatcaggaattaatccgccaggggaccgactacaaacactggccgcaaattgcccagttcgccccatccgctagtgcattcttcggtatgagccgcatcggcatggaagtaacgccaagtggtacgtggctgacctacaccggtgctatcaagcttgatgacaaggacccgaactttaaagaccaggttattctgcttaacaaacatattgatgcctataaaactttcccgccgaccgaacccaaaaaggacaaaaagaaaaaagctgatgaaacccaggctctaccgcagcgtcagaaaaaacagcaaactgtgactctgctgccagctgcggacctggatgatttttccaagcagctgcaacagtctatgagctctgcggactctacgcaggctggtggttctggtcaccatcatcaccatcattaa

SEQ ID NO: 2702 - DNA, 2421 bp, Artificial Sequence
  Description of Artificial Sequence: Synthetic polynucleotide
atgaaaatcgaagaaggtaaactggtaatctggattaacggcgataaaggctataacggtctcgctgaagtcggtaagaaattcgagaaagataccggaattaaagtcaccgttgagcatccggataaactggaagagaaattcccacaggttgcggcaactggcgatggccctgacattatcttctgggcacacgaccgctttggtggctacgctcaatctggcctgttggctgaaatcaccccggacaaagcgttccaggacaagctgtatccgtttacctgggatgccgtacgttacaacggcaagctgattgcttacccgatcgctgttgaagcgttatcgctgatttataacaaagatctgctgccgaacccgccaaaaacctgggaagagatcccggcgctggataaagaactgaaagcgaaaggtaagagcgcgctgatgttcaacctgcaagaaccgtacttcacctggccgctgattgctgctgacgggggttatgcgttcaagtatgaaaacggcaagtacgacattaaagacgtgggcgtggataacgctggcgcgaaagcgggtctgaccttcctggttgacctgattaaaaacaaacacatgaatgcagacaccgattactccatcgcagaagctgcctttaataaaggcgaaacagcgatgaccatcaacggcccgtgggcatggtccaacatcgacaccagcaaagtgaattatggtgtaacggtactgccgaccttcaagggtcaaccatccaaaccgttcgttggcgtgctgagcgcaggtattaacgccgccagtccgaacaaagagctggcgaaagagttcctcgaaaactatctgctgactgatgaaggtctggaagcggttaataaagacaaaccgctgggtgccgtagcgctgaagtcttacgaggaagagttggcgaaagatccacgtattgccgccaccatggaaaacgcccagaaaggtgaaatcatgccgaacatcccgcagatgtccgctttctggtatgccgtgcgtactgcggtgatcaacgccgccagcggtcgtcagactgtcgatgaagccctgaaagacgcgcagactggtggttctggtgagaacctgtactttcaaagctcagataatgggcctcaaaaccagcgcaacgctccacgtataaccttcggtggcccgtctgactccacaggcagcaaccagaatggtgagcgtagtggagccaggtctaagcagcgccgtccccagggtctgccgaacaacacggcgagctggtttactgcgcttacccaacacggtaaagaagacttaaaattcccgcgtggccagggcgtcccgatcaacactaactcttccccggatgatcagattggttattaccgcagagcaactcgtcggattcgcggcggcgacggtaaaatgaaagatttgtctccgcgttgggccttttactatctcggcaccggtccggaagctggactgccctacggggcaaacaaggacgggatcatttgggtggctaccgaaggtgccctgaatactccaaaagatcatatcggcacccgtaaccctgctaataacgctgcgatcgttctgcaactgcctcagggtacaactctgccaaaaggcttctatgcagaagggtcgcgtggtggcagccaggcgagtagccgtagcagctcccgctctcgcaactcgtcccgtaactccactccgggctcttctcgcggcacgtccccggctcgtatggcaggtaacggtggtgacgctgctctggcgctgctactgctggacaggctgaaccagctggagtcgaagatgagtggtaaaggccaacagcagcagggccagaccgttaccaaaaagagcgcagctgaagcatctaaaaaaccgcgacagaaacgtaccgcgactaaagcgtacaatgtaacacaggccttcggtcgtcgaggtccggagcaaactcaaggaaactttggcgatcaggaattaatccgccaggggaccgactacaaacactggccgcaaattgcccagttcgccccatccgctagtgcattcttcggtatgagccgcatcggcatggaagtaacgccaagtggtacgtggctgacctacaccggtgctatcaagcttgatgacaaggacccgaactttaaagaccaggttattctgcttaacaaacatattgatgcctataaaactttcccgccgaccgaacccaaaaaggacaaaaagaaaaaagctgatgaaacccaggctctaccgcagcgtcagaaaaaacagcaaactgtgactctgctgccagctgcggacctggatgatttttccaagcagctgcaacagtctatgagctctgcggactctacgcaggctggtggttctggtcaccatcatcaccatcattaa

SEQ ID NO: 2703 - DNA, 2421 bp, Artificial Sequence
  Description of Artificial Sequence: Synthetic polynucleotide
atgaaaatcgaagaaggtaaactggtaatctggattaacggcgataaaggctataacggtctcgctgaagtcggtaagaaattcgagaaagataccggaattaaagtcaccgttgagcatccggataaactggaagagaaattcccacaggttgcggcaactggcgatggccctgacattatcttctgggcacacgaccgctttggtggctacgctcaatctggcctgttggctgaaatcaccccggacaaagcgttccaggacaagctgtatccgtttacctgggatgccgtacgttacaacggcaagctgattgcttacccgatcgctgttgaagcgttatcgctgatttataacaaagatctgctgccgaacccgccaaaaacctgggaagagatcccggcgctggataaagaactgaaagcgaaaggtaagagcgcgctgatgttcaacctgcaagaaccgtacttcacctggccgctgattgctgctgacgggggttatgcgttcaagtatgaaaacggcaagtacgacattaaagacgtgggcgtggataacgctggcgcgaaagcgggtctgaccttcctggttgacctgattaaaaacaaacacatgaatgcagacaccgattactccatcgcagaagctgcctttaataaaggcgaaacagcgatgaccatcaacggcccgtgggcatggtccaacatcgacaccagcaaagtgaattatggtgtaacggtactgccgaccttcaagggtcaaccatccaaaccgttcgttggcgtgctgagcgcaggtattaacgccgccagtccgaacaaagagctggcgaaagagttcctcgaaaactatctgctgactgatgaaggtctggaagcggttaataaagacaaaccgctgggtgccgtagcgctgaagtcttacgaggaagagttggcgaaagatccacgtattgccgccaccatggaaaacgcccagaaaggtgaaatcatgccgaacatcccgcagatgtccgctttctggtatgccgtgcgtactgcggtgatcaacgccgccagcggtcgtcagactgtcgatgaagccctgaaagacgcgcagactggtggttctggtgagaacctgtactttcaaagctcagataatgggcctcaaaaccagcgcaacgctccacgtataaccttcggtggcccgtctgactccacaggcagcaaccagaatggtgagcgtagtggagccaggtctaagcagcgccgtccccagggtctgccgaacaacacggcgagctggtttactgcgcttacccaacacggtaaagaagacttaaaattcccgcgtggccagggcgtcccgatcaacactaactcttccccggatgatcagattggttattaccgcagagcaactcgtcggattcgcggcggcgacggtaaaatgaaagatttgtctccgcgttggtacttttactatctcggcaccggtccggaagctaatctgccctacggggcaaacaaggacgggatcatttgggtggctaccgaaggtgccctgaatactccaaaagatcatatcggcacccgtaaccctgctaataacgctgcgatcgttctgcaactgcctcagggtacaactctgccaaaaggcttctatgcagaagggtcgcgtggtggcagccaggcgagtagccgtagcagctcccgctctcgcaactcgtcccgtaactccactccgggctcttctcgcggcacgtccccggctcgtatggcaggtaacggtggtgacgctgctctggcgctgctactgctggacaggctgaaccagctggagtcgaagatgagtggtaaaggccaacagcagcagggccagaccgttaccaaaaagagcgcagctgaagcatctaaaaaaccgcgacagaaacgtaccgcgactaaagcgtacaatgtaacacaggccttcggtcgtcgaggtccggagcaaactcaaggaaactttggcgatcaggaattaatccgccaggggaccgactacaaacactggccgcaaattgcccagttcgccccatccgctagtgcattcttcggtatgagccgcatcggcatggaagtaacgccaagtggtacgtggctgacctacaccggtgctatcaagcttgatgacaaggacccgaactttaaagaccaggttattctgcttaacaaacatattgatgcctataaaactttcccgccgaccgaacccaaaaaggacaaaaagaaaaaagctgatgaaacccaggctctaccgcagcgtcagaaaaaacagcaaactgtgactctgctgccagctgcggacctggatgatttttccaagcagctgcaacagtctatgagctctgcggactctacgcaggctggtggttctggtcaccatcatcaccatcattaa

SEQ ID NO: 2704 - DNA, 2421 bp, Artificial Sequence
  Description of Artificial Sequence: Synthetic polynucleotide
atgaaaatcgaagaaggtaaactggtaatctggattaacggcgataaaggctataacggtctcgctgaagtcggtaagaaattcgagaaagataccggaattaaagtcaccgttgagcatccggataaactggaagagaaattcccacaggttgcggcaactggcgatggccctgacattatcttctgggcacacgaccgctttggtggctacgctcaatctggcctgttggctgaaatcaccccggacaaagcgttccaggacaagctgtatccgtttacctgggatgccgtacgttacaacggcaagctgattgcttacccgatcgctgttgaagcgttatcgctgatttataacaaagatctgctgccgaacccgccaaaaacctgggaagagatcccggcgctggataaagaactgaaagcgaaaggtaagagcgcgctgatgttcaacctgcaagaaccgtacttcacctggccgctgattgctgctgacgggggttatgcgttcaagtatgaaaacggcaagtacgacattaaagacgtgggcgtggataacgctggcgcgaaagcgggtctgaccttcctggttgacctgattaaaaacaaacacatgaatgcagacaccgattactccatcgcagaagctgcctttaataaaggcgaaacagcgatgaccatcaacggcccgtgggcatggtccaacatcgacaccagcaaagtgaattatggtgtaacggtactgccgaccttcaagggtcaaccatccaaaccgttcgttggcgtgctgagcgcaggtattaacgccgccagtccgaacaaagagctggcgaaagagttcctcgaaaactatctgctgactgatgaaggtctggaagcggttaataaagacaaaccgctgggtgccgtagcgctgaagtcttacgaggaagagttggcgaaagatccacgtattgccgccaccatggaaaacgcccagaaaggtgaaatcatgccgaacatcccgcagatgtccgctttctggtatgccgtgcgtactgcggtgatcaacgccgccagcggtcgtcagactgtcgatgaagccctgaaagacgcgcagactggtggttctggtgagaacctgtactttcaaagctcagataatgggcctcaaaaccagcgcaacgctccacgtataaccttcggtggcccgtctgactccacaggcagcaaccagaatggtgagcgtagtggagccaggtctaagcagcgccgtccccagggtctgccgaacaacacggcgagctggtttactgcgcttacccaacacggtaaagaagacttaaaattcccgcgtggccagggcgtcccgatcaacactaactcttccccggatgatcagattggttattaccgcagagcaactcgtcggattcgcggcggcgacggtaaaatgaaagatttgtctccgcgttggtacttttactatctcggcaccggtccggaagctggactgccctacggggcaaacaaggacgggatcatttgggtggctaccgaaggtgccctgaatactccaaaagatcatatcggcacccgtaaccctgctaataacgctgcgatcgttctgcaactgcctcagggtacaactctgccaaaaggcttctatgcagaagggtcgcgtggtggcagccaggcgagtagccgtagcagctcccgctctcgcaactcgtcccgtaactccactccgggctcttctcgcggcacgtccccggctcgtatggcaggtaacggtggtgacgctgctctggcgctgctactgctggacaggctgaaccagctggagtcgaagatgagtggtaaaggccaacagcagcagggccagaccgttaccaaaaagagcgcagctgaagcatctaaaaaaccgcgacagaaacgtaccgcgactaaagcgtacaatgtaacacaggccttcggtcgtcgaggtccggagcaaactcaaggaaactttggcgatcaggaattaatccgccaggggaccgaatacaaacactggccgcaaattgcccagttcgccccatccgctagtgcattcttcggtatgagccgcatcggcatggaagtaacgccaagtggtacgtggctgacctacaccggtgctatcaagcttgatgacaaggacccgaactttaaagaccaggttattctgcttaacaaacatattgatgcctataaaactttcccgccgaccgaacccaaaaaggacaaaaagaaaaaagctgatgaaacccaggctctaccgcagcgtcagaaaaaacagcaaactgtgactctgctgccagctgcggacctggatgatttttccaagcagctgcaacagtctatgagctctgcggactctacgcaggctggtggttctggtcaccatcatcaccatcattaa

SEQ ID NO: 2705 - DNA, 2421 bp, Artificial Sequence
  Description of Artificial Sequence: Synthetic polynucleotide
atgaaaatcgaagaaggtaaactggtaatctggattaacggcgataaaggctataacggtctcgctgaagtcggtaagaaattcgagaaagataccggaattaaagtcaccgttgagcatccggataaactggaagagaaattcccacaggttgcggcaactggcgatggccctgacattatcttctgggcacacgaccgctttggtggctacgctcaatctggcctgttggctgaaatcaccccggacaaagcgttccaggacaagctgtatccgtttacctgggatgccgtacgttacaacggcaagctgattgcttacccgatcgctgttgaagcgttatcgctgatttataacaaagatctgctgccgaacccgccaaaaacctgggaagagatcccggcgctggataaagaactgaaagcgaaaggtaagagcgcgctgatgttcaacctgcaagaaccgtacttcacctggccgctgattgctgctgacgggggttatgcgttcaagtatgaaaacggcaagtacgacattaaagacgtgggcgtggataacgctggcgcgaaagcgggtctgaccttcctggttgacctgattaaaaacaaacacatgaatgcagacaccgattactccatcgcagaagctgcctttaataaaggcgaaacagcgatgaccatcaacggcccgtgggcatggtccaacatcgacaccagcaaagtgaattatggtgtaacggtactgccgaccttcaagggtcaaccatccaaaccgttcgttggcgtgctgagcgcaggtattaacgccgccagtccgaacaaagagctggcgaaagagttcctcgaaaactatctgctgactgatgaaggtctggaagcggttaataaagacaaaccgctgggtgccgtagcgctgaagtcttacgaggaagagttggcgaaagatccacgtattgccgccaccatggaaaacgcccagaaaggtgaaatcatgccgaacatcccgcagatgtccgctttctggtatgccgtgcgtactgcggtgatcaacgccgccagcggtcgtcagactgtcgatgaagccctgaaagacgcgcagactggtggttctggtgagaacctgtactttcaaagctcagataatgggcctcaaaaccagcgcaacgctccacgtataaccttcggtggcccgtctgactccacaggcagcaaccagaatggtgagcgtagtggagccaggtctaagcagcgccgtccccagggtctgccgaacaacacggcgagctggtttactgcgcttacccaacacggtaaagaagacttaaaattcccgcgtggccagggcgtcccgatcaacactaactcttccccggatgatcagattggttattaccgcagagcaactcgtcggattcgcggcggcgacggtaaaatgaaagatttgtctccgcgttggtacttttactatctcggcaccggtccggaagctggactgccctacggggcaaacaaggacgggatcgtgtgggtggctaccgaaggtgccctgaatactccaaaagatcatatcggcacccgtaaccctgctaataacgctgcgatcgttctgcaactgcctcagggtacaactctgccaaaaggcttctatgcagaagggtcgcgtggtggcagccaggcgagtagccgtagcagctcccgctctcgcaactcgtcccgtaactccactccgggctcttctcgcggcacgtccccggctcgtatggcaggtaacggtggtgacgctgctctggcgctgctactgctggacaggctgaaccagctggagtcgaagatgagtggtaaaggccaacagcagcagggccagaccgttaccaaaaagagcgcagctgaagcatctaaaaaaccgcgacagaaacgtaccgcgactaaagcgtacaatgtaacacaggccttcggtcgtcgaggtccggagcaaactcaaggaaactttggcgatcaggaattaatccgccaggggaccgactacaaacactggccgcaaattgcccagttcgccccatccgctagtgcattcttcggtatgagccgcatcggcatggaagtaacgccaagtggtacgtggctgacctacaccggtgctatcaagcttgatgacaaggacccgaactttaaagaccaggttattctgcttaacaaacatattgatgcctataaaactttcccgccgaccgaacccaaaaaggacaaaaagaaaaaagctgatgaaacccaggctctaccgcagcgtcagaaaaaacagcaaactgtgactctgctgccagctgcggacctggatgatttttccaagcagctgcaacagtctatgagctctgcggactctacgcaggctggtggttctggtcaccatcatcaccatcattaa

SEQ ID NO: 2706 - DNA, 2421 bp, Artificial Sequence
  Description of Artificial Sequence: Synthetic polynucleotide
atgaaaatcgaagaaggtaaactggtaatctggattaacggcgataaaggctataacggtctcgctgaagtcggtaagaaattcgagaaagataccggaattaaagtcaccgttgagcatccggataaactggaagagaaattcccacaggttgcggcaactggcgatggccctgacattatcttctgggcacacgaccgctttggtggctacgctcaatctggcctgttggctgaaatcaccccggacaaagcgttccaggacaagctgtatccgtttacctgggatgccgtacgttacaacggcaagctgattgcttacccgatcgctgttgaagcgttatcgctgatttataacaaagatctgctgccgaacccgccaaaaacctgggaagagatcccggcgctggataaagaactgaaagcgaaaggtaagagcgcgctgatgttcaacctgcaagaaccgtacttcacctggccgctgattgctgctgacgggggttatgcgttcaagtatgaaaacggcaagtacgacattaaagacgtgggcgtggataacgctggcgcgaaagcgggtctgaccttcctggttgacctgattaaaaacaaacacatgaatgcagacaccgattactccatcgcagaagctgcctttaataaaggcgaaacagcgatgaccatcaacggcccgtgggcatggtccaacatcgacaccagcaaagtgaattatggtgtaacggtactgccgaccttcaagggtcaaccatccaaaccgttcgttggcgtgctgagcgcaggtattaacgccgccagtccgaacaaagagctggcgaaagagttcctcgaaaactatctgctgactgatgaaggtctggaagcggttaataaagacaaaccgctgggtgccgtagcgctgaagtcttacgaggaagagttggcgaaagatccacgtattgccgccaccatggaaaacgcccagaaaggtgaaatcatgccgaacatcccgcagatgtccgctttctggtatgccgtgcgtactgcggtgatcaacgccgccagcggtcgtcagactgtcgatgaagccctgaaagacgcgcagactggtggttctggtgagaacctgtactttcaaagctcagataatgggcctcaaaaccagcgcaacgctccacgtataaccttcggtggcccgtctgactccacaggcagcaaccagaatggtgagcgtagtggagccaggtctaagcagcgccgtccccagggtctgccgaacaacacggcgagctggtttactgcgcttacccaacacggtaaagaagacttaaaattcccgcgtggccagggcgtcccgatcaacactaactcttccccggatgatcagattggttattaccgcagagcaactcgtcggattcgcggcggcgacggtaaaatgaaagatttgtctccgcgttggtacttttactatctcggcaccggtccggaagctaaactgccctacggggcaaacaaggacgggatcatttgggtggctaccgaaggtgccctgaatactccaaaagatcatatcggcacccgtaaccctgctaataacgctgcgatcgttctgcaactgcctcagggtacaactctgccaaaaggcttctatgcagaagggtcgcgtggtggcagccaggcgagtagccgtagcagctcccgctctcgcaactcgtcccgtaactccactccgggctcttctcgcggcacgtccccggctcgtatggcaggtaacggtggtgacgctgctctggcgctgctactgctggacaggctgaaccagctggagtcgaagatgagtggtaaaggccaacagcagcagggccagaccgttaccaaaaagagcgcagctgaagcatctaaaaaaccgcgacagaaacgtaccgcgactaaagcgtacaatgtaacacaggccttcggtcgtcgaggtccggagcaaactcaaggaaactttggcgatcaggaattaatccgccaggggaccgactacaaacactggccgcaaattgcccagttcgccccatccgctagtgcattcttcggtatgagccgcatcggcatggaagtaacgccaagtggtacgtggctgacctacaccggtgctatcaagcttgatgacaaggacccgaactttaaagaccaggttattctgcttaacaaacatattgatgcctataaaactttcccgccgaccgaacccaaaaaggacaaaaagaaaaaagctgatgaaacccaggctctaccgcagcgtcagaaaaaacagcaaactgtgactctgctgccagctgcggacctggatgatttttccaagcagctgcaacagtctatgagctctgcggactctacgcaggctggtggttctggtcaccatcatcaccatcattaa

SEQ ID NO: 2707 - DNA, 2421 bp, Artificial Sequence
  Description of Artificial Sequence: Synthetic polynucleotide
atgaaaatcgaagaaggtaaactggtaatctggattaacggcgataaaggctataacggtctcgctgaagtcggtaagaaattcgagaaagataccggaattaaagtcaccgttgagcatccggataaactggaagagaaattcccacaggttgcggcaactggcgatggccctgacattatcttctgggcacacgaccgctttggtggctacgctcaatctggcctgttggctgaaatcaccccggacaaagcgttccaggacaagctgtatccgtttacctgggatgccgtacgttacaacggcaagctgattgcttacccgatcgctgttgaagcgttatcgctgatttataacaaagatctgctgccgaacccgccaaaaacctgggaagagatcccggcgctggataaagaactgaaagcgaaaggtaagagcgcgctgatgttcaacctgcaagaaccgtacttcacctggccgctgattgctgctgacgggggttatgcgttcaagtatgaaaacggcaagtacgacattaaagacgtgggcgtggataacgctggcgcgaaagcgggtctgaccttcctggttgacctgattaaaaacaaacacatgaatgcagacaccgattactccatcgcagaagctgcctttaataaaggcgaaacagcgatgaccatcaacggcccgtgggcatggtccaacatcgacaccagcaaagtgaattatggtgtaacggtactgccgaccttcaagggtcaaccatccaaaccgttcgttggcgtgctgagcgcaggtattaacgccgccagtccgaacaaagagctggcgaaagagttcctcgaaaactatctgctgactgatgaaggtctggaagcggttaataaagacaaaccgctgggtgccgtagcgctgaagtcttacgaggaagagttggcgaaagatccacgtattgccgccaccatggaaaacgcccagaaaggtgaaatcatgccgaacatcccgcagatgtccgctttctggtatgccgtgcgtactgcggtgatcaacgccgccagcggtcgtcagactgtcgatgaagccctgaaagacgcgcagactggtggttctggtgagaacctgtactttcaaagctcagataatgggcctcaaaaccagcgcaacgctccacgtataaccttcggtggcccgtctgactccacaggcagcaaccagaatggtgagcgtagtggagccaggtctaagcagcgccgtccccagggtctgccgaacaacacggcgagctggtttactgcgcttacccaacacggtaaagaagacttaaaattcccgcgtggccagggcgtcccgatcaacactaactcttccccggatgatcagattggttattaccgcagagcaactcgtcggattcgcggcggcgacggtaaaatgaaagatttgtctccgcgttggtacttttactatctcggcaccggtccggaagctggactgccctacggggcaaacaaggacgggatcatttgggtggctaccgaaggtgccctgaatactccaaaagatcatatcggcacccgtaaccctgctaataacgctgcgatcgttctgcaactgcctcagggtacaactctgccaaaaggcttctatgcagaagggtcgcgtggtggcagccaggcgagtagccgtagcagctcccgctctcgcaactcgtcccgtaactccactccgggctcttctcgcggcacgtccccggctcgtatggcaggtaacggtggtgacgctgctctggcgctgctactgctggacaggctgaaccagctggagtcgaagatgagtggtaaaggccaacagcagcagggccagaccgttaccaaaaagagcgcagctgaagcatctaaaaaaccgcgacagaaacgtaccgcgactaaagcgtacaatgtaacacaggccttcggtcgtcgaggtccggagcaaactcaaggaaactttggcgatcaggaattaatccgccaggggaccgactacaaacactggccgcaaattgcccagttcgccccatccgctagtgcattcttcggtatgagccgcatcggcatggaagtaacgccaagtggtacgtggctgacctacaccggtgctatcaagcttgatgacaaggacccgaactttaaagaccaggttattctgcttaacaaacatattgatgcctggaaaactttcccgccgaccgaacccaaaaaggacaaaaagaaaaaagctgatgaaacccaggctctaccgcagcgtcagaaaaaacagcaaactgtgactctgctgccagctgcggacctggatgatttttccaagcagctgcaacagtctatgagctctgcggactctacgcaggctggtggttctggtcaccatcatcaccatcattaa

SEQ ID NO: 2708 - DNA, 2421 bp, Artificial Sequence
  Description of Artificial Sequence: Synthetic polynucleotide
atgaaaatcgaagaaggtaaactggtaatctggattaacggcgataaaggctataacggtctcgctgaagtcggtaagaaattcgagaaagataccggaattaaagtcaccgttgagcatccggataaactggaagagaaattcccacaggttgcggcaactggcgatggccctgacattatcttctgggcacacgaccgctttggtggctacgctcaatctggcctgttggctgaaatcaccccggacaaagcgttccaggacaagctgtatccgtttacctgggatgccgtacgttacaacggcaagctgattgcttacccgatcgctgttgaagcgttatcgctgatttataacaaagatctgctgccgaacccgccaaaaacctgggaagagatcccggcgctggataaagaactgaaagcgaaaggtaagagcgcgctgatgttcaacctgcaagaaccgtacttcacctggccgctgattgctgctgacgggggttatgcgttcaagtatgaaaacggcaagtacgacattaaagacgtgggcgtggataacgctggcgcgaaagcgggtctgaccttcctggttgacctgattaaaaacaaacacatgaatgcagacaccgattactccatcgcagaagctgcctttaataaaggcgaaacagcgatgaccatcaacggcccgtgggcatggtccaacatcgacaccagcaaagtgaattatggtgtaacggtactgccgaccttcaagggtcaaccatccaaaccgttcgttggcgtgctgagcgcaggtattaacgccgccagtccgaacaaagagctggcgaaagagttcctcgaaaactatctgctgactgatgaaggtctggaagcggttaataaagacaaaccgctgggtgccgtagcgctgaagtcttacgaggaagagttggcgaaagatccacgtattgccgccaccatggaaaacgcccagaaaggtgaaatcatgccgaacatcccgcagatgtccgctttctggtatgccgtgcgtactgcggtgatcaacgccgccagcggtcgtcagactgtcgatgaagccctgaaagacgcgcagactggtggttctggtgagaacctgtactttcaaagctcagataatgggcctcaaaaccagcgcaacgctccacgtataaccttcggtggcccgtctgactccacaggcagcaaccagaatggtgagcgtagtggagccaggtctaagcagcgccgtccccagggtctgccgaacaacacggcgagctggtttactgcgcttacccaacacggtaaagaagacttaaaattcccgccgggccagggcgtcccgatcaacactaactcttccccggatgatcagattggttattaccgcagagcaactcgtcggattcgcggcggcgacggtaaaatgaaagatttgtctccgcgttggtacttttactatctcggcaccggtccggaagctggactgccctacggggcaaacaaggacgggatcatttgggtggctaccgaaggtgccctgaatactccaaaagatcatatcggcacccgtaaccctgctaataacgctgcgatcgttctgcaactgcctcagggtacaactctgccaaaaggcttctatgcagaagggtcgcgtggtggcagccaggcgagtagccgtagcagctcccgctctcgcaactcgtcccgtaactccactccgggctcttctcgcggcacgtccccggctcgtatggcaggtaacggtggtgacgctgctctggcgctgctactgctggacaggctgaaccagctggagtcgaagatgagtggtaaaggccaacagcagcagggccagaccgttaccaaaaagagcgcagctgaagcatctaaaaaaccgcgacagaaacgtaccgcgactaaagcgtacaatgtaacacaggccttcggtcgtcgaggtccggagcaaactcaaggaaactttggcgatcaggaattaatccgccaggggaccgactacaaacactggccgcaaattgcccagttcgccccatccgctagtgcattcttcggtatgagccgcatcggcatggaagtaacgccaagtggtacgtggctgacctacaccggtgctatcaagcttgatgacaaggacccgaactttaaagaccaggttattctgcttaacaaacatattgatgcctataaaactttcccgccgaccgaacccaaaaaggacaaaaagaaaaaagctgatgaaacccaggctctaccgcagcgtcagaaaaaacagcaaactgtgactctgctgccagctgcggacctggatgatttttccaagcagctgcaacagtctatgagctctgcggactctacgcaggctggtggttctggtcaccatcatcaccatcattaa

SEQ ID NO: 2709 - DNA, 2421 bp, Artificial Sequence
  Description of Artificial Sequence: Synthetic polynucleotide
atgaaaatcgaagaaggtaaactggtaatctggattaacggcgataaaggctataacggtctcgctgaagtcggtaagaaattcgagaaagataccggaattaaagtcaccgttgagcatccggataaactggaagagaaattcccacaggttgcggcaactggcgatggccctgacattatcttctgggcacacgaccgctttggtggctacgctcaatctggcctgttggctgaaatcaccccggacaaagcgttccaggacaagctgtatccgtttacctgggatgccgtacgttacaacggcaagctgattgcttacccgatcgctgttgaagcgttatcgctgatttataacaaagatctgctgccgaacccgccaaaaacctgggaagagatcccggcgctggataaagaactgaaagcgaaaggtaagagcgcgctgatgttcaacctgcaagaaccgtacttcacctggccgctgattgctgctgacgggggttatgcgttcaagtatgaaaacggcaagtacgacattaaagacgtgggcgtggataacgctggcgcgaaagcgggtctgaccttcctggttgacctgattaaaaacaaacacatgaatgcagacaccgattactccatcgcagaagctgcctttaataaaggcgaaacagcgatgaccatcaacggcccgtgggcatggtccaacatcgacaccagcaaagtgaattatggtgtaacggtactgccgaccttcaagggtcaaccatccaaaccgttcgttggcgtgctgagcgcaggtattaacgccgccagtccgaacaaagagctggcgaaagagttcctcgaaaactatctgctgactgatgaaggtctggaagcggttaataaagacaaaccgctgggtgccgtagcgctgaagtcttacgaggaagagttggcgaaagatccacgtattgccgccaccatggaaaacgcccagaaaggtgaaatcatgccgaacatcccgcagatgtccgctttctggtatgccgtgcgtactgcggtgatcaacgccgccagcggtcgtcagactgtcgatgaagccctgaaagacgcgcagactggtggttctggtgagaacctgtactttcaaagctcagataatgggcctcaaaaccagcgcaacgctccacgtataaccttcggtggcccgtctgactccacaggcagcaaccagaatggtgagcgtagtggagccaggtctaagcagcgccgtccccagggtctgccgaacaacacggcgagctggtttactgcgcttacccaacacggtaaagaagacttaaaattcccgcgtggccagggcgtcccgatcaacactaactcttccccggatgatcagattggttattaccgcagagcaactcgtcggattcgcggcggcgacggtaaaatgaaagatttgtctccgcgttggtacttttactatctcggcaccggtccggaagctggactgccctacggggcaaacaaggacgggatcatttgggtggctaccgatggtgccctgaatactccaaaagatcatatcggcacccgtaaccctgctaataacgctgcgatcgttctgcaactgcctcagggtacaactctgccaaaaggcttctatgcagaagggtcgcgtggtggcagccaggcgagtagccgtagcagctcccgctctcgcaactcgtcccgtaactccactccgggctcttctcgcggcacgtccccggctcgtatggcaggtaacggtggtgacgctgctctggcgctgctactgctggacaggctgaaccagctggagtcgaagatgagtggtaaaggccaacagcagcagggccagaccgttaccaaaaagagcgcagctgaagcatctaaaaaaccgcgacagaaacgtaccgcgactaaagcgtacaatgtaacacaggccttcggtcgtcgaggtccggagcaaactcaaggaaactttggcgatcaggaattaatccgccaggggaccgactacaaacactggccgcaaattgcccagttcgccccatccgctagtgcattcttcggtatgagccgcatcggcatggaagtaacgccaagtggtacgtggctgacctacaccggtgctatcaagcttgatgacaaggacccgaactttaaagaccaggttattctgcttaacaaacatattgatgcctataaaactttcccgccgaccgaacccaaaaaggacaaaaagaaaaaagctgatgaaacccaggctctaccgcagcgtcagaaaaaacagcaaactgtgactctgctgccagctgcggacctggatgatttttccaagcagctgcaacagtctatgagctctgcggactctacgcaggctggtggttctggtcaccatcatcaccatcattaa

SEQ ID NO: 2710 - DNA, 2421 bp, Artificial Sequence
  Description of Artificial Sequence: Synthetic polynucleotide
atgaaaatcgaagaaggtaaactggtaatctggattaacggcgataaaggctataacggtctcgctgaagtcggtaagaaattcgagaaagataccggaattaaagtcaccgttgagcatccggataaactggaagagaaattcccacaggttgcggcaactggcgatggccctgacattatcttctgggcacacgaccgctttggtggctacgctcaatctggcctgttggctgaaatcaccccggacaaagcgttccaggacaagctgtatccgtttacctgggatgccgtacgttacaacggcaagctgattgcttacccgatcgctgttgaagcgttatcgctgatttataacaaagatctgctgccgaacccgccaaaaacctgggaagagatcccggcgctggataaagaactgaaagcgaaaggtaagagcgcgctgatgttcaacctgcaagaaccgtacttcacctggccgctgattgctgctgacgggggttatgcgttcaagtatgaaaacggcaagtacgacattaaagacgtgggcgtggataacgctggcgcgaaagcgggtctgaccttcctggttgacctgattaaaaacaaacacatgaatgcagacaccgattactccatcgcagaagctgcctttaataaaggcgaaacagcgatgaccatcaacggcccgtgggcatggtccaacatcgacaccagcaaagtgaattatggtgtaacggtactgccgaccttcaagggtcaaccatccaaaccgttcgttggcgtgctgagcgcaggtattaacgccgccagtccgaacaaagagctggcgaaagagttcctcgaaaactatctgctgactgatgaaggtctggaagcggttaataaagacaaaccgctgggtgccgtagcgctgaagtcttacgaggaagagttggcgaaagatccacgtattgccgccaccatggaaaacgcccagaaaggtgaaatcatgccgaacatcccgcagatgtccgctttctggtatgccgtgcgtactgcggtgatcaacgccgccagcggtcgtcagactgtcgatgaagccctgaaagacgcgcagactggtggttctggtgagaacctgtactttcaaagctcagataatgggcctcaaaaccagcgcaacgctccacgtataaccttcggtggcccgtctgactccacaggcagcaaccagaatggtgagcgtagtggagccaggtctaagcagcgccgtccccagggtctgccgaacaacacggcgagctggtttactgcgcttacccaacacggtaaagaagacttaaaattcccgcgtggccagggcgtcccgatcaacactaactcttccccggatgatcagattggttattaccgcagagcaactcgtcggattcgcggcggcgacggtaaaatgaaagatttgtctccgcgttggtacttttactatctcggcaccggtccggaagctggactgccctacggggcaaacaaggacgggatcatttgggtggctaccgaaggtgccctgaatactccaaaagatcatatcggcacccgtaaccctgctaataacgctgcgatcgttctgcaactgcctcagggtacaactctgccaaaaggcttctatgcagaagggtcgcgtggtggcagccaggcgagtagccgtagcagctcccgctctcgcaactcgtcccgtaactccactccgggctcttctcgcggcacgtccccggctcgtatggcaggtaacggtggtgacgctgctctggcgctgctactgctggacaggctgaaccagctggagtcgaagatgagtggtaaaggccaacagcagcagggccagaccgttaccaaaaagagcgcagctgaaatgtctaaaaaaccgcgacagaaacgtaccgcgactaaaggctgcaatgtaacacagtgtttcggtccgcgaggtccggagcaaactcaaggaaactttggcgatgatgatttaatcaaattggggaccgactacaaacactggccgcaaattgcccagttcgccccatccgctagtgcattcttcggtatgagccgcatctcatcgaaggaacagccaagtggtacgtggctgacctacaccggtgctatcaagcttgataaagatgacccgaactttaaagaccaggttattctgcttaacaaacatattgatgcctataaaactttcccgccgaccgaacccaaaaaggacaaaaagaaaaaagctgatgaaacccaggctctaccgcagcgtcagaaaaaacagcaaactgtgactctgctgccagctgcggacctggatgatttttccaagcagctgcaacagtctatgagctctgcggactctacgcaggctggtggttctggtcaccatcatcaccatcattaa

SEQ ID NO: 2711 - DNA, 2421 bp, Artificial Sequence
  Description of Artificial Sequence: Synthetic polynucleotide
atgaaaatcgaagaaggtaaactggtaatctggattaacggcgataaaggctataacggtctcgctgaagtcggtaagaaattcgagaaagataccggaattaaagtcaccgttgagcatccggataaactggaagagaaattcccacaggttgcggcaactggcgatggccctgacattatcttctgggcacacgaccgctttggtggctacgctcaatctggcctgttggctgaaatcaccccggacaaagcgttccaggacaagctgtatccgtttacctgggatgccgtacgttacaacggcaagctgattgcttacccgatcgctgttgaagcgttatcgctgatttataacaaagatctgctgccgaacccgccaaaaacctgggaagagatcccggcgctggataaagaactgaaagcgaaaggtaagagcgcgctgatgttcaacctgcaagaaccgtacttcacctggccgctgattgctgctgacgggggttatgcgttcaagtatgaaaacggcaagtacgacattaaagacgtgggcgtggataacgctggcgcgaaagcgggtctgaccttcctggttgacctgattaaaaacaaacacatgaatgcagacaccgattactccatcgcagaagctgcctttaataaaggcgaaacagcgatgaccatcaacggcccgtgggcatggtccaacatcgacaccagcaaagtgaattatggtgtaacggtactgccgaccttcaagggtcaaccatccaaaccgttcgttggcgtgctgagcgcaggtattaacgccgccagtccgaacaaagagctggcgaaagagttcctcgaaaactatctgctgactgatgaaggtctggaagcggttaataaagacaaaccgctgggtgccgtagcgctgaagtcttacgaggaagagttggcgaaagatccacgtattgccgccaccatggaaaacgcccagaaaggtgaaatcatgccgaacatcccgcagatgtccgctttctggtatgccgtgcgtactgcggtgatcaacgccgccagcggtcgtcagactgtcgatgaagccctgaaagacgcgcagactggtggttctggtgagaacctgtactttcaaagctcagataatgggcctcaaaaccagcgcaacgctccacgtataaccttcggtggcccgtctgactccacaggcagcaaccagaatggtgagcgtagtggagccaggtctaagcagcgccgtccccagggtctgccgaacaacacggcgagctggtttactgcgcttacccaacacggtaaagaagacttaaaattcccgcgtggccagggcgtcccgatcaacactaactcttccccggatgatcagattggttattaccgcagagcaactcgtcggattcgcggcggcgacggtaaaatgaaagatttgtctccgcgttggtacttttactatctcggcaccggtccggaagctggactgccctacggggcaaacaaggacgggatcatttgggtggctaccgaaggtgccctgaatactccaaaagatcatatcggcacccgtaaccctgctaataacgctgcgatcccgctgcaactgcctcagggtacaactctgccaaaaggcttctatgcagaagggtcgcgtggtggcagccaggcgagtagccgtagcagctcccgctctcgcaactcgtcccgtaactccactccgggctcttctcgcggcacgtccccggctcgtatggcaggtaacggtggtgacgctgctctggcgctgctactgctggacaggctgaaccagctggagtcgaagatgagtggtaaaggccaacagcagcagggccagaccgttaccaaaaagagcgcagctgaagcatctaaaaaaccgcgacagaaacgtaccgcgactaaagcgtacaatgtaacacaggccttcggtcgtcgaggtccggagcaaactcaaggaaactttggcgatcaggaattaatccgccaggggaccgactacaaacactggccgcaaattgcccagttcgccccatccgctagtgcattcttcggtatgagccgcatcggcatggaagtaacgccaagtggtacgtggctgacctacaccggtgctatcaagcttgatgacaaggacccgaactttaaagaccaggttattctgcttaacaaacatattgatgcctataaaactttcccgccgaccgaacccaaaaaggacaaaaagaaaaaagctgatgaaacccaggctctaccgcagcgtcagaaaaaacagcaaactgtgactctgctgccagctgcggacctggatgatttttccaagcagctgcaacagtctatgagctctgcggactctacgcaggctggtggttctggtcaccatcatcaccatcattaa

SEQ ID NO: 2712 - DNA, 2421 bp, Artificial Sequence
  Description of Artificial Sequence: Synthetic polynucleotide
atgaaaatcgaagaaggtaaactggtaatctggattaacggcgataaaggctataacggtctcgctgaagtcggtaagaaattcgagaaagataccggaattaaagtcaccgttgagcatccggataaactggaagagaaattcccacaggttgcggcaactggcgatggccctgacattatcttctgggcacacgaccgctttggtggctacgctcaatctggcctgttggctgaaatcaccccggacaaagcgttccaggacaagctgtatccgtttacctgggatgccgtacgttacaacggcaagctgattgcttacccgatcgctgttgaagcgttatcgctgatttataacaaagatctgctgccgaacccgccaaaaacctgggaagagatcccggcgctggataaagaactgaaagcgaaaggtaagagcgcgctgatgttcaacctgcaagaaccgtacttcacctggccgctgattgctgctgacgggggttatgcgttcaagtatgaaaacggcaagtacgacattaaagacgtgggcgtggataacgctggcgcgaaagcgggtctgaccttcctggttgacctgattaaaaacaaacacatgaatgcagacaccgattactccatcgcagaagctgcctttaataaaggcgaaacagcgatgaccatcaacggcccgtgggcatggtccaacatcgacaccagcaaagtgaattatggtgtaacggtactgccgaccttcaagggtcaaccatccaaaccgttcgttggcgtgctgagcgcaggtattaacgccgccagtccgaacaaagagctggcgaaagagttcctcgaaaactatctgctgactgatgaaggtctggaagcggttaataaagacaaaccgctgggtgccgtagcgctgaagtcttacgaggaagagttggcgaaagatccacgtattgccgccaccatggaaaacgcccagaaaggtgaaatcatgccgaacatcccgcagatgtccgctttctggtatgccgtgcgtactgcggtgatcaacgccgccagcggtcgtcagactgtcgatgaagccctgaaagacgcgcagactggtggttctggtgagaacctgtactttcaaagctcagataatgggcctcaaaaccagcgcaacgctccacgtataaccttcggtggcccgtctgactccacaggcagcaaccagaatggtgagcgtagtggagccaggtctaagcagcgccgtccccagggtctgccgaacaacacggcgagctggtttactgcgcttacccaacacggtaaagaagacttaaaattcccgcgtggccagggcgtcccgatcaacactaactcttccccggatgatcagattggttattaccgcagagcaactcgtcggattcgcggcggcgacggtaaaatgaaagatttgtctccgcgttggtacttttactatctcggcaccggtccggaagctggactgccctacggggcaaacaaggacgggatcatttgggtggctaccgaaggtgccctgaatactccaaaagatcatatcggcacccgtaaccctgctaataacgctgcgatcgttctgcaactgcctcagggtacaactctgccaaaaggcttctatgcagaagggtcgcgtggtggcagccaggcgagtagccgtagcagctcccgctctcgcaactcgtcccgtaactccactccgggctcttctcgcggcacgtccccggctcgtatggcaggtaacggtggtgacgctgctctggcgctgctactgctggacaggctgaaccagctggagtcgaagatgagtggtaaaggccaacagcagcagggccagaccgttaccaaaaagagcgcagctgaagcatctaaaaaaccgcgacagaaacgtaccgcgactaaagcgtacaatgtaacacaggccttcggtcgtcgaggtccggagcaaactcaaggaaactttggcgatcaggaattaatccgccaggggaccgactacaaacactggccgcaaattgcccagttcgccccatccgctagtgcattcttcggtatgagccgcatcggcatggaagtaacgccaagtggtacgtggctgacctacaccggtgctatcaagcttgatgacaaggacccgaactttcaagaccaggttattctgcttaacaaacatattgatgcctataaaactttcccgccgaccgaacccaaaaaggacaaaaagaaaaaagctgatgaaacccaggctctaccgcagcgtcagaaaaaacagcaaactgtgactctgctgccagctgcggacctggatgatttttccaagcagctgcaacagtctatgagctctgcggactctacgcaggctggtggttctggtcaccatcatcaccatcattaa

SEQ ID NO: 2713 - DNA, 2421 bp, Artificial Sequence
  Description of Artificial Sequence: Synthetic polynucleotide
atgaaaatcgaagaaggtaaactggtaatctggattaacggcgataaaggctataacggtctcgctgaagtcggtaagaaattcgagaaagataccggaattaaagtcaccgttgagcatccggataaactggaagagaaattcccacaggttgcggcaactggcgatggccctgacattatcttctgggcacacgaccgctttggtggctacgctcaatctggcctgttggctgaaatcaccccggacaaagcgttccaggacaagctgtatccgtttacctgggatgccgtacgttacaacggcaagctgattgcttacccgatcgctgttgaagcgttatcgctgatttataacaaagatctgctgccgaacccgccaaaaacctgggaagagatcccggcgctggataaagaactgaaagcgaaaggtaagagcgcgctgatgttcaacctgcaagaaccgtacttcacctggccgctgattgctgctgacgggggttatgcgttcaagtatgaaaacggcaagtacgacattaaagacgtgggcgtggataacgctggcgcgaaagcgggtctgaccttcctggttgacctgattaaaaacaaacacatgaatgcagacaccgattactccatcgcagaagctgcctttaataaaggcgaaacagcgatgaccatcaacggcccgtgggcatggtccaacatcgacaccagcaaagtgaattatggtgtaacggtactgccgaccttcaagggtcaaccatccaaaccgttcgttggcgtgctgagcgcaggtattaacgccgccagtccgaacaaagagctggcgaaagagttcctcgaaaactatctgctgactgatgaaggtctggaagcggttaataaagacaaaccgctgggtgccgtagcgctgaagtcttacgaggaagagttggcgaaagatccacgtattgccgccaccatggaaaacgcccagaaaggtgaaatcatgccgaacatcccgcagatgtccgctttctggtatgccgtgcgtactgcggtgatcaacgccgccagcggtcgtcagactgtcgatgaagccctgaaagacgcgcagactggtggttctggtgagaacctgtactttcaaagctcagataatgggcctcaaaaccagcgcaacgctccacgtataaccttcggtggcccgtctgactccacaggcagcaaccagaatggtgagcgtagtggagccaggtctaagcagcgccgtccccagggtctgccgaacaacacggcgagctggtttactgcgcttacccaacacggtaaagaagacttaaaattcccgcgtggccagggcgtcccgatcaacactaactcttccccggatgatcagattggttattaccgcagagcaactcgtcggattcgcggcggcgacggtaaaatgaaagatttgtctccgcgttggtcgttttactatctcggcaccggtccggaagctggactgccctacggggcaaacaaggacgggatcatttgggtggctaccgaaggtgccctgaatactccaaaagatcatatcggcacccgtaaccctgctaataacgctgcgatcgttctgcaactgcctcagggtacaactctgccaaaaggcttctatgcagaagggtcgcgtggtggcagccaggcgagtagccgtagcagctcccgctctcgcaactcgtcccgtaactccactccgggctcttctcgcggcacgtccccggctcgtatggcaggtaacggtggtgacgctgctctggcgctgctactgctggacaggctgaaccagctggagtcgaagatgagtggtaaaggccaacagcagcagggccagaccgttaccaaaaagagcgcagctgaagcatctaaaaaaccgcgacagaaacgtaccgcgactaaagcgtacaatgtaacacaggccttcggtcgtcgaggtccggagcaaactcaaggaaactttggcgatcaggaattaatccgccaggggaccgactacaaacactggccgcaaattgcccagttcgccccatccgctagtgcattcttcggtatgagccgcatcggcatggaagtaacgccaagtggtacgtggctgacctacaccggtgctatcaagcttgatgacaaggacccgaactttaaagaccaggttattctgcttaacaaacatattgatgcctataaaactttcccgccgaccgaacccaaaaaggacaaaaagaaaaaagctgatgaaacccaggctctaccgcagcgtcagaaaaaacagcaaactgtgactctgctgccagctgcggacctggatgatttttccaagcagctgcaacagtctatgagctctgcggactctacgcaggctggtggttctggtcaccatcatcaccatcattaa

SEQ ID NO: 2714 - DNA, 2421 bp, Artificial Sequence
  Description of Artificial Sequence: Synthetic polynucleotide
atgaaaatcgaagaaggtaaactggtaatctggattaacggcgataaaggctataacggtctcgctgaagtcggtaagaaattcgagaaagataccggaattaaagtcaccgttgagcatccggataaactggaagagaaattcccacaggttgcggcaactggcgatggccctgacattatcttctgggcacacgaccgctttggtggctacgctcaatctggcctgttggctgaaatcaccccggacaaagcgttccaggacaagctgtatccgtttacctgggatgccgtacgttacaacggcaagctgattgcttacccgatcgctgttgaagcgttatcgctgatttataacaaagatctgctgccgaacccgccaaaaacctgggaagagatcccggcgctggataaagaactgaaagcgaaaggtaagagcgcgctgatgttcaacctgcaagaaccgtacttcacctggccgctgattgctgctgacgggggttatgcgttcaagtatgaaaacggcaagtacgacattaaagacgtgggcgtggataacgctggcgcgaaagcgggtctgaccttcctggttgacctgattaaaaacaaacacatgaatgcagacaccgattactccatcgcagaagctgcctttaataaaggcgaaacagcgatgaccatcaacggcccgtgggcatggtccaacatcgacaccagcaaagtgaattatggtgtaacggtactgccgaccttcaagggtcaaccatccaaaccgttcgttggcgtgctgagcgcaggtattaacgccgccagtccgaacaaagagctggcgaaagagttcctcgaaaactatctgctgactgatgaaggtctggaagcggttaataaagacaaaccgctgggtgccgtagcgctgaagtcttacgaggaagagttggcgaaagatccacgtattgccgccaccatggaaaacgcccagaaaggtgaaatcatgccgaacatcccgcagatgtccgctttctggtatgccgtgcgtactgcggtgatcaacgccgccagcggtcgtcagactgtcgatgaagccctgaaagacgcgcagactggtggttctggtgagaacctgtactttcaaagctcagataatgggcctcaaaaccagcgcaacgctccacgtataaccttcggtggcccgtctgactccacaggcagcaaccagaatggtgagcgtagtggagccaggtctaagcagcgccgtccccagggtctgccgaacaacacggcgagctggtttactgcgcttacccaacacggtaaagaagacttaaaattcccgcgtggccagggcgtcccgatcaacactaactcttccccggatgatcagattggttattaccgcagagcaactcgtcggattcgcggcggcgacggtaaaatgaaagatttgtctccgcgttggtacttttactatctcggcaccggtccggaagctggactgccctacggggcaaacaaggacgggatcatttgggtggctaccgaaggtgccctgaatactccaaaagatcatatcggcacccgtaaccctgctaataacgctgcgatcgttctgcaactgcctcagggtacaactctgccaaaaggcttctatgcagaagggtcgcgtggtggcagccaggcgagtagccgtagcagctcccgctctcgcaactcgtcccgtaactccactccgggctcttctcgcggcacgtccccggctcgtatggcaggtaacggtggtgacgctgctctggcgctgctactgctggacaggctgaaccagctggagtcgaagatgagtggtaaaggccaacagcagcagggccagaccgttaccaaaaagagcgcagctgaagcatctaaaaaaccgcgacagaaacgtaccgcgactaaaaaatacaatgtaacacaggccttcggtcgtcgaggtccggagcaaactcaaggaaactttggcgatcaggaattaatccgccaggggaccgactacaaacactggccgcaaattgcccagttcgccccatccgctagtgcattcttcggtatgagccgcatcggcatggaagtaacgccaagtggtacgtggctgacctacaccggtgctatcaagcttgatgacaaggacccgaactttaaagaccaggttattctgcttaacaaacatattgatgcctataaaactttcccgccgaccgaacccaaaaaggacaaaaagaaaaaagctgatgaaacccaggctctaccgcagcgtcagaaaaaacagcaaactgtgactctgctgccagctgcggacctggatgatttttccaagcagctgcaacagtctatgagctctgcggactctacgcaggctggtggttctggtcaccatcatcaccatcattaa

SEQ ID NO: 2715 - DNA, 2421 bp, Artificial Sequence
  Description of Artificial Sequence: Synthetic polynucleotide
atgaaaatcgaagaaggtaaactggtaatctggattaacggcgataaaggctataacggtctcgctgaagtcggtaagaaattcgagaaagataccggaattaaagtcaccgttgagcatccggataaactggaagagaaattcccacaggttgcggcaactggcgatggccctgacattatcttctgggcacacgaccgctttggtggctacgctcaatctggcctgttggctgaaatcaccccggacaaagcgttccaggacaagctgtatccgtttacctgggatgccgtacgttacaacggcaagctgattgcttacccgatcgctgttgaagcgttatcgctgatttataacaaagatctgctgccgaacccgccaaaaacctgggaagagatcccggcgctggataaagaactgaaagcgaaaggtaagagcgcgctgatgttcaacctgcaagaaccgtacttcacctggccgctgattgctgctgacgggggttatgcgttcaagtatgaaaacggcaagtacgacattaaagacgtgggcgtggataacgctggcgcgaaagcgggtctgaccttcctggttgacctgattaaaaacaaacacatgaatgcagacaccgattactccatcgcagaagctgcctttaataaaggcgaaacagcgatgaccatcaacggcccgtgggcatggtccaacatcgacaccagcaaagtgaattatggtgtaacggtactgccgaccttcaagggtcaaccatccaaaccgttcgttggcgtgctgagcgcaggtattaacgccgccagtccgaacaaagagctggcgaaagagttcctcgaaaactatctgctgactgatgaaggtctggaagcggttaataaagacaaaccgctgggtgccgtagcgctgaagtcttacgaggaagagttggcgaaagatccacgtattgccgccaccatggaaaacgcccagaaaggtgaaatcatgccgaacatcccgcagatgtccgctttctggtatgccgtgcgtactgcggtgatcaacgccgccagcggtcgtcagactgtcgatgaagccctgaaagacgcgcagactggtggttctggtgagaacctgtactttcaaagctcagataatgggcctcaaaaccagcgcaacgctccacgtataaccttcggtggcccgtctgactccacaggcagcaaccagaatggtgagcgtagtggagccaggtctaagcagcgccgtccccagggtctgccgaacaacacggcgagctggtttactgcgcttacccaacacggtaaagaagacttaaaattcccgcgtggccagggcgtcccgatcaacactaactcttccccggatgatcagattggttattaccgcagagcaactcgtcggattcgcggcggcgacggtaaaatgaaagatttgtctccgcgttggtacttttactatctcggcaccggtccggaagctggactgccctacggggcagataaggacgggatcatttgggtggctaccgaaggtgccctgaatactccaaaagatcatatcggcacccgtaaccctgctaataacgctgcgatcgttctgcaactgcctcagggtacaactctgccaaaaggcttctatgcagaagggtcgcgtggtggcagccaggcgagtagccgtagcagctcccgctctcgcaactcgtcccgtaactccactccgggctcttctcgcggcacgtccccggctcgtatggcaggtaacggtggtgacgctgctctggcgctgctactgctggacaggctgaaccagctggagtcgaagatgagtggtaaaggccaacagcagcagggccagaccgttaccaaaaagagcgcagctgaagcatctaaaaaaccgcgacagaaacgtaccgcgactaaagcgtacaatgtaacacaggccttcggtcgtcgaggtccggagcaaactcaaggaaactttggcgatcaggaattaatccgccaggggaccgactacaaacactggccgcaaattgcccagttcgccccatccgctagtgcattcttcggtatgagccgcatcggcatggaagtaacgccaagtggtacgtggctgacctacaccggtgctatcaagcttgatgacaaggacccgaactttaaagaccaggttattctgcttaacaaacatattgatgcctataaaactttcccgccgaccgaacccaaaaaggacaaaaagaaaaaagctgatgaaacccaggctctaccgcagcgtcagaaaaaacagcaaactgtgactctgctgccagctgcggacctggatgatttttccaagcagctgcaacagtctatgagctctgcggactctacgcaggctggtggttctggtcaccatcatcaccatcattaa

SEQ ID NO: 2716 - DNA, 2421 bp, Artificial Sequence
  Description of Artificial Sequence: Synthetic polynucleotide
atgaaaatcgaagaaggtaaactggtaatctggattaacggcgataaaggctataacggtctcgctgaagtcggtaagaaattcgagaaagataccggaattaaagtcaccgttgagcatccggataaactggaagagaaattcccacaggttgcggcaactggcgatggccctgacattatcttctgggcacacgaccgctttggtggctacgctcaatctggcctgttggctgaaatcaccccggacaaagcgttccaggacaagctgtatccgtttacctgggatgccgtacgttacaacggcaagctgattgcttacccgatcgctgttgaagcgttatcgctgatttataacaaagatctgctgccgaacccgccaaaaacctgggaagagatcccggcgctggataaagaactgaaagcgaaaggtaagagcgcgctgatgttcaacctgcaagaaccgtacttcacctggccgctgattgctgctgacgggggttatgcgttcaagtatgaaaacggcaagtacgacattaaagacgtgggcgtggataacgctggcgcgaaagcgggtctgaccttcctggttgacctgattaaaaacaaacacatgaatgcagacaccgattactccatcgcagaagctgcctttaataaaggcgaaacagcgatgaccatcaacggcccgtgggcatggtccaacatcgacaccagcaaagtgaattatggtgtaacggtactgccgaccttcaagggtcaaccatccaaaccgttcgttggcgtgctgagcgcaggtattaacgccgccagtccgaacaaagagctggcgaaagagttcctcgaaaactatctgctgactgatgaaggtctggaagcggttaataaagacaaaccgctgggtgccgtagcgctgaagtcttacgaggaagagttggcgaaagatccacgtattgccgccaccatggaaaacgcccagaaaggtgaaatcatgccgaacatcccgcagatgtccgctttctggtatgccgtgcgtactgcggtgatcaacgccgccagcggtcgtcagactgtcgatgaagccctgaaagacgcgcagactggtggttctggtgagaacctgtactttcaaagctcagataatgggcctcaaaaccagcgcaacgctccacgtataaccttcggtggcccgtctgactccacaggcagcaaccagaatggtgagcgtagtggagccaggtctaagcagcgccgtccccagggtctgccgaacaacacggcgagctggtttactgcgcttacccaacacggtaaagaagacttaaaattcccgcgtggccagggcgtcccgatcaacactaactcttccccggatgatcagattggtcaataccgcagagcaactcgtcggattcgcggcggcgacggtaaaatgaaagatttgtctccgcgttggtacttttactatctcggcaccggtccggaagctggactgccctacggggcaaacaaggacgggatcatttgggtggctaccgaaggtgccctgaatactccaaaagatcatatcggcacccgtaaccctgctaataacgctgcgatcgttctgcaactgcctcagggtacaactctgccaaaaggcttctatgcagaagggtcgcgtggtggcagccaggcgagtagccgtagcagctcccgctctcgcaactcgtcccgtaactccactccgggctcttctcgcggcacgtccccggctcgtatggcaggtaacggtggtgacgctgctctggcgctgctactgctggacaggctgaaccagctggagtcgaagatgagtggtaaaggccaacagcagcagggccagaccgttaccaaaaagagcgcagctgaagcatctaaaaaaccgcgacagaaacgtaccgcgactaaagcgtacaatgtaacacaggccttcggtcgtcgaggtccggagcaaactcaaggaaactttggcgatcaggaattaatccgccaggggaccgactacaaacactggccgcaaattgcccagttcgccccatccgctagtgcattcttcggtatgagccgcatcggcatggaagtaacgccaagtggtacgtggctgacctacaccggtgctatcaagcttgatgacaaggacccgaactttaaagaccaggttattctgcttaacaaacatattgatgcctataaaactttcccgccgaccgaacccaaaaaggacaaaaagaaaaaagctgatgaaacccaggctctaccgcagcgtcagaaaaaacagcaaactgtgactctgctgccagctgcggacctggatgatttttccaagcagctgcaacagtctatgagctctgcggactctacgcaggctggtggttctggtcaccatcatcaccatcattaa

SEQ ID NO: 2717 - DNA, 2421 bp, Artificial Sequence
  Description of Artificial Sequence: Synthetic polynucleotide
atgaaaatcgaagaaggtaaactggtaatctggattaacggcgataaaggctataacggtctcgctgaagtcggtaagaaattcgagaaagataccggaattaaagtcaccgttgagcatccggataaactggaagagaaattcccacaggttgcggcaactggcgatggccctgacattatcttctgggcacacgaccgctttggtggctacgctcaatctggcctgttggctgaaatcaccccggacaaagcgttccaggacaagctgtatccgtttacctgggatgccgtacgttacaacggcaagctgattgcttacccgatcgctgttgaagcgttatcgctgatttataacaaagatctgctgccgaacccgccaaaaacctgggaagagatcccggcgctggataaagaactgaaagcgaaaggtaagagcgcgctgatgttcaacctgcaagaaccgtacttcacctggccgctgattgctgctgacgggggttatgcgttcaagtatgaaaacggcaagtacgacattaaagacgtgggcgtggataacgctggcgcgaaagcgggtctgaccttcctggttgacctgattaaaaacaaacacatgaatgcagacaccgattactccatcgcagaagctgcctttaataaaggcgaaacagcgatgaccatcaacggcccgtgggcatggtccaacatcgacaccagcaaagtgaattatggtgtaacggtactgccgaccttcaagggtcaaccatccaaaccgttcgttggcgtgctgagcgcaggtattaacgccgccagtccgaacaaagagctggcgaaagagttcctcgaaaactatctgctgactgatgaaggtctggaagcggttaataaagacaaaccgctgggtgccgtagcgctgaagtcttacgaggaagagttggcgaaagatccacgtattgccgccaccatggaaaacgcccagaaaggtgaaatcatgccgaacatcccgcagatgtccgctttctggtatgccgtgcgtactgcggtgatcaacgccgccagcggtcgtcagactgtcgatgaagccctgaaagacgcgcagactggtggttctggtgagaacctgtactttcaaagctcagataatgggcctcaaaaccagcgcaacgctccacgtataaccttcggtggcccgtctgactccacaggcagcaaccagaatggtgagcgtagtggagccaggtctaagcagcgccgtccccagggtctgccgaacaacacggcgagctggtttactgcgcttacccaacacggtaaagaagacttaaaattcccgcgtggccagggcgtcccgatcaacactaactcttccccggatgatcagattggttattaccgcagagcaactcgtcggattcgcggcggcgacggtaaaatgaaagatttgtctccgcgttggtacttttactatctcggcaccggtccggaagctggactgccctacggggcaaacaaggacgggatcatttgggtggctaccgaaggtgccctgaatactccaaaagatcatatcggcacccgtaaccctgctaataacgctgcgatcgttctgcaactgcctcagggtacaactctgccaaaaggcttctatgcagaagggtcgcgtggtggcagccaggcgagtagccgtagcagctcccgctctcgcaactcgtcccgtaactccactccgggctcttctcgcggcacgtccccggctcgtatggcaggtaacggtggtgacgctgctctggcgctgctactgctggacaggctgaaccagctggagtcgaagatgagtggtaaaggccaacagcagcagggccagaccgttaccaaaaagagcgcagctgaagcatctaaaaaaccgcgacagaaacgtaccgcgactaaagcgtacaatgtaacacaggccttcggtcgtcgaggtccggagcaaactcaaggaaactttggcgatcaggaattaatccgccaggggaccgactacaaacactggccgcaaattgcccagttcgccccatccgctagtgcattcttcggtatgagccgcatcggcatggaagtaacgccaagtggtacgtggctgacctacaccggtgctatcaagcttgatgacaaggacccgaactttgaagaccaggttattctgcttaacaaacatattgatgcctataaaactttcccgccgaccgaacccaaaaaggacaaaaagaaaaaagctgatgaaacccaggctctaccgcagcgtcagaaaaaacagcaaactgtgactctgctgccagctgcggacctggatgatttttccaagcagctgcaacagtctatgagctctgcggactctacgcaggctggtggttctggtcaccatcatcaccatcattaa

SEQ ID NO: 2718 - DNA, 2421 bp, Artificial Sequence
  Description of Artificial Sequence: Synthetic polynucleotide
atgaaaatcgaagaaggtaaactggtaatctggattaacggcgataaaggctataacggtctcgctgaagtcggtaagaaattcgagaaagataccggaattaaagtcaccgttgagcatccggataaactggaagagaaattcccacaggttgcggcaactggcgatggccctgacattatcttctgggcacacgaccgctttggtggctacgctcaatctggcctgttggctgaaatcaccccggacaaagcgttccaggacaagctgtatccgtttacctgggatgccgtacgttacaacggcaagctgattgcttacccgatcgctgttgaagcgttatcgctgatttataacaaagatctgctgccgaacccgccaaaaacctgggaagagatcccggcgctggataaagaactgaaagcgaaaggtaagagcgcgctgatgttcaacctgcaagaaccgtacttcacctggccgctgattgctgctgacgggggttatgcgttcaagtatgaaaacggcaagtacgacattaaagacgtgggcgtggataacgctggcgcgaaagcgggtctgaccttcctggttgacctgattaaaaacaaacacatgaatgcagacaccgattactccatcgcagaagctgcctttaataaaggcgaaacagcgatgaccatcaacggcccgtgggcatggtccaacatcgacaccagcaaagtgaattatggtgtaacggtactgccgaccttcaagggtcaaccatccaaaccgttcgttggcgtgctgagcgcaggtattaacgccgccagtccgaacaaagagctggcgaaagagttcctcgaaaactatctgctgactgatgaaggtctggaagcggttaataaagacaaaccgctgggtgccgtagcgctgaagtcttacgaggaagagttggcgaaagatccacgtattgccgccaccatggaaaacgcccagaaaggtgaaatcatgccgaacatcccgcagatgtccgctttctggtatgccgtgcgtactgcggtgatcaacgccgccagcggtcgtcagactgtcgatgaagccctgaaagacgcgcagactggtggttctggtgagaacctgtactttcaaagctcagataatgggcctcaaaaccagcgcaacgctccacgtataaccttcggtggcccgtctgactccacaggcagcaaccagaatggtgagcgtagtggagccaggtctaagcagcgccgtccccagggtctgccgaacaacacggcgagctggtttactgcgcttacccaacacggtaaagaagacttaaaattcccgcgtggccagggcgtcccgatcaacactaactcttccccggatgatcagattggttattaccgcagagcaactcgtcggattcgcggcggcgacggtaaaatgaaagatttgtctccgcgttggtacttttactatctcggcaccggtccggaagctggactgccctacggggcaaacaaggacgggatcatttgggtggctattgaaggtgccctgaatactccaaaagatcatatcggcacccgtaaccctgctaataacgctgcgatcgttctgcaactgcctcagggtacaactctgccaaaaggcttctatgcagaagggtcgcgtggtggcagccaggcgagtagccgtagcagctcccgctctcgcaactcgtcccgtaactccactccgggctcttctcgcggcacgtccccggctcgtatggcaggtaacggtggtgacgctgctctggcgctgctactgctggacaggctgaaccagctggagtcgaagatgagtggtaaaggccaacagcagcagggccagaccgttaccaaaaagagcgcagctgaagcatctaaaaaaccgcgacagaaacgtaccgcgactaaagcgtacaatgtaacacaggccttcggtcgtcgaggtccggagcaaactcaaggaaactttggcgatcaggaattaatccgccaggggaccgactacaaacactggccgcaaattgcccagttcgccccatccgctagtgcattcttcggtatgagccgcatcggcatggaagtaacgccaagtggtacgtggctgacctacaccggtgctatcaagcttgatgacaaggacccgaactttaaagaccaggttattctgcttaacaaacatattgatgcctataaaactttcccgccgaccgaacccaaaaaggacaaaaagaaaaaagctgatgaaacccaggctctaccgcagcgtcagaaaaaacagcaaactgtgactctgctgccagctgcggacctggatgatttttccaagcagctgcaacagtctatgagctctgcggactctacgcaggctggtggttctggtcaccatcatcaccatcattaa

SEQ ID NO: 2719 - DNA, 2421 bp, Artificial Sequence
  Description of Artificial Sequence: Synthetic polynucleotide
atgaaaatcgaagaaggtaaactggtaatctggattaacggcgataaaggctataacggtctcgctgaagtcggtaagaaattcgagaaagataccggaattaaagtcaccgttgagcatccggataaactggaagagaaattcccacaggttgcggcaactggcgatggccctgacattatcttctgggcacacgaccgctttggtggctacgctcaatctggcctgttggctgaaatcaccccggacaaagcgttccaggacaagctgtatccgtttacctgggatgccgtacgttacaacggcaagctgattgcttacccgatcgctgttgaagcgttatcgctgatttataacaaagatctgctgccgaacccgccaaaaacctgggaagagatcccggcgctggataaagaactgaaagcgaaaggtaagagcgcgctgatgttcaacctgcaagaaccgtacttcacctggccgctgattgctgctgacgggggttatgcgttcaagtatgaaaacggcaagtacgacattaaagacgtgggcgtggataacgctggcgcgaaagcgggtctgaccttcctggttgacctgattaaaaacaaacacatgaatgcagacaccgattactccatcgcagaagctgcctttaataaaggcgaaacagcgatgaccatcaacggcccgtgggcatggtccaacatcgacaccagcaaagtgaattatggtgtaacggtactgccgaccttcaagggtcaaccatccaaaccgttcgttggcgtgctgagcgcaggtattaacgccgccagtccgaacaaagagctggcgaaagagttcctcgaaaactatctgctgactgatgaaggtctggaagcggttaataaagacaaaccgctgggtgccgtagcgctgaagtcttacgaggaagagttggcgaaagatccacgtattgccgccaccatggaaaacgcccagaaaggtgaaatcatgccgaacatcccgcagatgtccgctttctggtatgccgtgcgtactgcggtgatcaacgccgccagcggtcgtcagactgtcgatgaagccctgaaagacgcgcagactggtggttctggtgagaacctgtactttcaaagctcagataatgggcctcaaaaccagcgcaacgctccacgtataaccttcggtggcccgtctgactccacaggcagcaaccagaatggtgagcgtagtggagccaggtctaagcagcgccgtccccagggtctgccgaacaacacggcgagctggtttactgcgcttacccaacacggtaaagaagacttaaaattcccgcgtggccagggcgtcccgatcaacactaactcttccccggatgatcagattggttattaccgcagagcaactcgtcggattcgcggcggcgacggtaaaatgaaagatttgtctccgcgttggtacttttactatctcggcaccggtccggaagctggactgccctacggggcaaacaaggacgggatcatttgggtggctaccgaaggtgccctgaatactccaaaagatcatatcggcacccgtaaccctgctaataacgctgcgatcgttctgcaactgcctcagggtacaactctgccaaaaggcttctatgcagaagggtcgcgtggtggcagccaggcgagtagccgtagcagctcccgctctcgcaactcgtcccgtaactccactccgggctcttctcgcggcacgtccccggctcgtatggcaggtaacggtggtgacgctgctctggcgctgctactgctggacaggctgaaccagctggagtcgaagatgagtggtaaaggccaacagcagcagggccagaccgttaccaaaaaggatgcagctgaagcatctaaaaaaccgcgacagaaacgtaccgcgactaaagcgtacaatgtaacacaggccttcggtcgtcgaggtccggagcaaactcaaggaaactttggcgatcaggaattaatccgccaggggaccgactacaaacactggccgcaaattgcccagttcgccccatccgctagtgcattcttcggtatgagccgcatcggcatggaagtaacgccaagtggtacgtggctgacctacaccggtgctatcaagcttgatgacaaggacccgaactttaaagaccaggttattctgcttaacaaacatattgatgcctataaaactttcccgccgaccgaacccaaaaaggacaaaaagaaaaaagctgatgaaacccaggctctaccgcagcgtcagaaaaaacagcaaactgtgactctgctgccagctgcggacctggatgatttttccaagcagctgcaacagtctatgagctctgcggactctacgcaggctggtggttctggtcaccatcatcaccatcattaa

SEQ ID NO: 2720 - DNA, 2421 bp, Artificial Sequence
  Description of Artificial Sequence: Synthetic polynucleotide
atgaaaatcgaagaaggtaaactggtaatctggattaacggcgataaaggctataacggtctcgctgaagtcggtaagaaattcgagaaagataccggaattaaagtcaccgttgagcatccggataaactggaagagaaattcccacaggttgcggcaactggcgatggccctgacattatcttctgggcacacgaccgctttggtggctacgctcaatctggcctgttggctgaaatcaccccggacaaagcgttccaggacaagctgtatccgtttacctgggatgccgtacgttacaacggcaagctgattgcttacccgatcgctgttgaagcgttatcgctgatttataacaaagatctgctgccgaacccgccaaaaacctgggaagagatcccggcgctggataaagaactgaaagcgaaaggtaagagcgcgctgatgttcaacctgcaagaaccgtacttcacctggccgctgattgctgctgacgggggttatgcgttcaagtatgaaaacggcaagtacgacattaaagacgtgggcgtggataacgctggcgcgaaagcgggtctgaccttcctggttgacctgattaaaaacaaacacatgaatgcagacaccgattactccatcgcagaagctgcctttaataaaggcgaaacagcgatgaccatcaacggcccgtgggcatggtccaacatcgacaccagcaaagtgaattatggtgtaacggtactgccgaccttcaagggtcaaccatccaaaccgttcgttggcgtgctgagcgcaggtattaacgccgccagtccgaacaaagagctggcgaaagagttcctcgaaaactatctgctgactgatgaaggtctggaagcggttaataaagacaaaccgctgggtgccgtagcgctgaagtcttacgaggaagagttggcgaaagatccacgtattgccgccaccatggaaaacgcccagaaaggtgaaatcatgccgaacatcccgcagatgtccgctttctggtatgccgtgcgtactgcggtgatcaacgccgccagcggtcgtcagactgtcgatgaagccctgaaagacgcgcagactggtggttctggtgagaacctgtactttcaaagctcagataatgggcctcaaaaccagcgcaacgctccacgtataaccttcggtggcccgtctgactccacaggcagcaaccagaatggtgagcgtagtggagccaggtctaagcagcgccgtccccagggtctgccgaacaacacggcgagctggtttactgcgcttacccaacacggtaaagaagacttaaaattcccgcgtggccagggcgtcccgatcaacactaactcttccccggatgatcagattggttattaccgcagagcaactcgtcggattcgcggcggcgacggtaaaatgaaagatttgaaaccgcgttggtacttttactatctcggcaccggtccggaagctggactgccctacggggcaaacaaggacgggatcatttgggtggctaccgaaggtgccctgaatactccaaaagatcatatcggcacccgtaaccctgctaataacgctgcgatcgttctgcaactgcctcagggtacaactctgccaaaaggcttctatgcagaagggtcgcgtggtggcagccaggcgagtagccgtagcagctcccgctctcgcaactcgtcccgtaactccactccgggctcttctcgcggcacgtccccggctcgtatggcaggtaacggtggtgacgctgctctggcgctgctactgctggacaggctgaaccagctggagtcgaagatgagtggtaaaggccaacagcagcagggccagaccgttaccaaaaagagcgcagctgaagcatctaaaaaaccgcgacagaaacgtaccgcgactaaagcgtacaatgtaacacaggccttcggtcgtcgaggtccggagcaaactcaaggaaactttggcgatcaggaattaatccgccaggggaccgactacaaacactggccgcaaattgcccagttcgccccatccgctagtgcattcttcggtatgagccgcatcggcatggaagtaacgccaagtggtacgtggctgacctacaccggtgctatcaagcttgatgacaaggacccgaactttaaagaccaggttattctgcttaacaaacatattgatgcctataaaactttcccgccgaccgaacccaaaaaggacaaaaagaaaaaagctgatgaaacccaggctctaccgcagcgtcagaaaaaacagcaaactgtgactctgctgccagctgcggacctggatgatttttccaagcagctgcaacagtctatgagctctgcggactctacgcaggctggtggttctggtcaccatcatcaccatcattaa

SEQ ID NO: 2721 - DNA, 2421 bp, Artificial Sequence
  Description of Artificial Sequence: Synthetic polynucleotide
atgaaaatcgaagaaggtaaactggtaatctggattaacggcgataaaggctataacggtctcgctgaagtcggtaagaaattcgagaaagataccggaattaaagtcaccgttgagcatccggataaactggaagagaaattcccacaggttgcggcaactggcgatggccctgacattatcttctgggcacacgaccgctttggtggctacgctcaatctggcctgttggctgaaatcaccccggacaaagcgttccaggacaagctgtatccgtttacctgggatgccgtacgttacaacggcaagctgattgcttacccgatcgctgttgaagcgttatcgctgatttataacaaagatctgctgccgaacccgccaaaaacctgggaagagatcccggcgctggataaagaactgaaagcgaaaggtaagagcgcgctgatgttcaacctgcaagaaccgtacttcacctggccgctgattgctgctgacgggggttatgcgttcaagtatgaaaacggcaagtacgacattaaagacgtgggcgtggataacgctggcgcgaaagcgggtctgaccttcctggttgacctgattaaaaacaaacacatgaatgcagacaccgattactccatcgcagaagctgcctttaataaaggcgaaacagcgatgaccatcaacggcccgtgggcatggtccaacatcgacaccagcaaagtgaattatggtgtaacggtactgccgaccttcaagggtcaaccatccaaaccgttcgttggcgtgctgagcgcaggtattaacgccgccagtccgaacaaagagctggcgaaagagttcctcgaaaactatctgctgactgatgaaggtctggaagcggttaataaagacaaaccgctgggtgccgtagcgctgaagtcttacgaggaagagttggcgaaagatccacgtattgccgccaccatggaaaacgcccagaaaggtgaaatcatgccgaacatcccgcagatgtccgctttctggtatgccgtgcgtactgcggtgatcaacgccgccagcggtcgtcagactgtcgatgaagccctgaaagacgcgcagactggtggttctggtgagaacctgtactttcaaagctcagataatgggcctcaaaaccagcgcaacgctccacgtataaccttcggtggcccgtctgactccacaggcagcaaccagaatggtgagcgtagtggagccaggtctaagcagcgccgtccccagggtctgccgaacaacacggcgagctggtttactgcgcttacccaacacggtaaagaagacttaaaattcccgcgtggccagggcgtcccgatcaacactaactcttccccggatgatcagattggttattaccgcagagcaactcgtcggattcgcggcggcgacggtaaaatgaaagatttgtctccgcgttggtacttttactatctcggcaccggtccggaagctggactgccctacggggcaaacaaggacgggatcatttgggtggctaccgaaggtgccctgaatactccaaaagatcatatcggcacccgtaaccctgctaataacgctgcgatcgttctgcaactgcctcagggtacaactctgccaaaaggcttctatgcagaagggtcgcgtggtggcagccaggcgagtagccgtagcagctcccgctctcgcaactcgtcccgtaactccactccgggctcttctcgcggcacgtccccggctcgtatggcaggtaacggtggtgacgctgctctggcgctgctactgctggacaggctgaaccagctggagtcgaagatgagtggtaaaggccaacagcagcagggccagaccgttaccaaaaagagcgcagctgaagcatctaaaaaaccgcgacagaaacgtaccgcgactaaagggtacaatgtaacacaggccttcggtcgtcgaggtccggagcaaactcaaggaaactttggcgatcaggatttaatcaaattagggaccgactacaaacactggccgcaaattgcccagttcgccccatccgctagtgcattcttcggtatgagccgcatcagtacgcgtgaaacgccaagtggtacgtggctgacctacaccggtgctatcaagcttgataagaaggacccgaactttaaagaccaggttattctgcttaacaaacatattgatgcctataaaactttcccgccgaccgaacccaaaaaggacaaaaagaaaaaagctgatgaaacccaggctctaccgcagcgtcagaaaaaacagcaaactgtgactctgctgccagctgcggacctggatgatttttccaagcagctgcaacagtctatgagctctgcggactctacgcaggctggtggttctggtcaccatcatcaccatcattaa

SEQ ID NO: 2722 - DNA, 2421 bp, Artificial Sequence
  Description of Artificial Sequence: Synthetic polynucleotide
atgaaaatcgaagaaggtaaactggtaatctggattaacggcgataaaggctataacggtctcgctgaagtcggtaagaaattcgagaaagataccggaattaaagtcaccgttgagcatccggataaactggaagagaaattcccacaggttgcggcaactggcgatggccctgacattatcttctgggcacacgaccgctttggtggctacgctcaatctggcctgttggctgaaatcaccccggacaaagcgttccaggacaagctgtatccgtttacctgggatgccgtacgttacaacggcaagctgattgcttacccgatcgctgttgaagcgttatcgctgatttataacaaagatctgctgccgaacccgccaaaaacctgggaagagatcccggcgctggataaagaactgaaagcgaaaggtaagagcgcgctgatgttcaacctgcaagaaccgtacttcacctggccgctgattgctgctgacgggggttatgcgttcaagtatgaaaacggcaagtacgacattaaagacgtgggcgtggataacgctggcgcgaaagcgggtctgaccttcctggttgacctgattaaaaacaaacacatgaatgcagacaccgattactccatcgcagaagctgcctttaataaaggcgaaacagcgatgaccatcaacggcccgtgggcatggtccaacatcgacaccagcaaagtgaattatggtgtaacggtactgccgaccttcaagggtcaaccatccaaaccgttcgttggcgtgctgagcgcaggtattaacgccgccagtccgaacaaagagctggcgaaagagttcctcgaaaactatctgctgactgatgaaggtctggaagcggttaataaagacaaaccgctgggtgccgtagcgctgaagtcttacgaggaagagttggcgaaagatccacgtattgccgccaccatggaaaacgcccagaaaggtgaaatcatgccgaacatcccgcagatgtccgctttctggtatgccgtgcgtactgcggtgatcaacgccgccagcggtcgtcagactgtcgatgaagccctgaaagacgcgcagactggtggttctggtgagaacctgtactttcaaagctcagataatgggcctcaaaaccagcgcaacgctccacgtataaccttcggtggcccgtctgactccacaggcagcaaccagaatggtgagcgtagtggagccaggtctaagcagcgccgtccccagggtctgccgaacaacacggcgagctggtttactgcgcttacccaacacggtaaagaagacttaaaattcccgaaaggccagggcgtcccgatcaacactaactctaaaccggatgatcagattggttattaccgcagacaagtgcgtcggtatcgcggcggcgacggtcaaatgaaagatttgaatccgcgttggtacttttactatctcggcaccggtccggaagctggactgccctacggggcaaacaaggacgggatcatttgggtggctaccgaaggtgccctgaatactccaaaagatcatatcggcacccgtaaccctgctaataacgctgcgatcgttctgcaactgcctcagggtacaactctgccaaaaggcttctatgcagaagggtcgcgtggtggcagccaggcgagtagccgtagcagctcccgctctcgcaactcgtcccgtaactccactccgggctcttctcgcggcacgtccccggctcgtatggcaggtaacggtggtgacgctgctctggcgctgctactgctggacaggctgaaccagctggagtcgaagatgagtggtaaaggccaacagcagcagggccagaccgttaccaaaaagagcgcagctgaagcatctaaaaaaccgcgacagaaacgtaccgcgactaaagcgtacaatgtaacacaggccttcggtcgtcgaggtccggagcaaactcaaggaaactttggcgatcaggaattaatccgccaggggaccgactacaaacactggccgcaaattgcccagttcgccccatccgctagtgcattcttcggtatgagccgcatcggcatggaagtaacgccaagtggtacgtggctgacctacaccggtgctatcaagcttgatgacaaggacccgaactttaaagaccaggttattctgcttaacaaacatattgatgcctataaaactttcccgccgaccgaacccaaaaaggacaaaaagaaaaaagctgatgaaacccaggctctaccgcagcgtcagaaaaaacagcaaactgtgactctgctgccagctgcggacctggatgatttttccaagcagctgcaacagtctatgagctctgcggactctacgcaggctggtggttctggtcaccatcatcaccatcattaa

SEQ ID NO: 2723 - DNA, 2421 bp, Artificial Sequence
  Description of Artificial Sequence: Synthetic polynucleotide
atgaaaatcgaagaaggtaaactggtaatctggattaacggcgataaaggctataacggtctcgctgaagtcggtaagaaattcgagaaagataccggaattaaagtcaccgttgagcatccggataaactggaagagaaattcccacaggttgcggcaactggcgatggccctgacattatcttctgggcacacgaccgctttggtggctacgctcaatctggcctgttggctgaaatcaccccggacaaagcgttccaggacaagctgtatccgtttacctgggatgccgtacgttacaacggcaagctgattgcttacccgatcgctgttgaagcgttatcgctgatttataacaaagatctgctgccgaacccgccaaaaacctgggaagagatcccggcgctggataaagaactgaaagcgaaaggtaagagcgcgctgatgttcaacctgcaagaaccgtacttcacctggccgctgattgctgctgacgggggttatgcgttcaagtatgaaaacggcaagtacgacattaaagacgtgggcgtggataacgctggcgcgaaagcgggtctgaccttcctggttgacctgattaaaaacaaacacatgaatgcagacaccgattactccatcgcagaagctgcctttaataaaggcgaaacagcgatgaccatcaacggcccgtgggcatggtccaacatcgacaccagcaaagtgaattatggtgtaacggtactgccgaccttcaagggtcaaccatccaaaccgttcgttggcgtgctgagcgcaggtattaacgccgccagtccgaacaaagagctggcgaaagagttcctcgaaaactatctgctgactgatgaaggtctggaagcggttaataaagacaaaccgctgggtgccgtagcgctgaagtcttacgaggaagagttggcgaaagatccacgtattgccgccaccatggaaaacgcccagaaaggtgaaatcatgccgaacatcccgcagatgtccgctttctggtatgccgtgcgtactgcggtgatcaacgccgccagcggtcgtcagactgtcgatgaagccctgaaagacgcgcagactggtggttctggtgagaacctgtactttcaaagctcagataatgggcctcaaaaccagcgcaacgctccacgtataaccttcggtggcccgtctgactccacaggcagcaaccagaatggtgagcgtagtggagccaggtctaagcagcgccgtccccagggtctgccgaacaacacggcgagctggtttactgcgcttacccaacacggtaaagaagacttaaaattcccgcgtggccagggcgtcccgatcaacactaactcttccccggatgatcagattggttattaccgcagagcaactcgtcggattcgcggcggcgacggtaaaatgaaagatttgtctccgcgttggtacttttactatctcggcaccggtccggaagctggactgccctacggggcaaacaaggacgggatcatttgggtggctaccgaaggtgccctgaatactccaaaagatcatatcggcacccgtaaccctgctaataacgctgcgatccgactgcaactgcctcagggtacaactctgccaaaaggcttctatgcagaagggtcgcgtggtggcagccaggcgagtagccgtagcagctcccgctctcgcaactcgtcccgtaactccactccgggctcttctcgcggcacgtccccggctcgtatggcaggtaacggtggtgacgctgctctggcgctgctactgctggacaggctgaaccagctggagtcgaagatgagtggtaaaggccaacagcagcagggccagaccgttaccaaaaagagcgcagctgaagcatctaaaaaaccgcgacagaaacgtaccgcgactaaagcgtacaatgtaacacaggccttcggtcgtcgaggtccggagcaaactcaaggaaactttggcgatcaggaattaatccgccaggggaccgactacaaacactggccgcaaattgcccagttcgccccatccgctagtgcattcttcggtatgagccgcatcggcatggaagtaacgccaagtggtacgtggctgacctacaccggtgctatcaagcttgatgacaaggacccgaactttaaagaccaggttattctgcttaacaaacatattgatgcctataaaactttcccgccgaccgaacccaaaaaggacaaaaagaaaaaagctgatgaaacccaggctctaccgcagcgtcagaaaaaacagcaaactgtgactctgctgccagctgcggacctggatgatttttccaagcagctgcaacagtctatgagctctgcggactctacgcaggctggtggttctggtcaccatcatcaccatcattaa

SEQ ID NO: 2724 - DNA, 2421 bp, Artificial Sequence
  Description of Artificial Sequence: Synthetic polynucleotide
atgaaaatcgaagaaggtaaactggtaatctggattaacggcgataaaggctataacggtctcgctgaagtcggtaagaaattcgagaaagataccggaattaaagtcaccgttgagcatccggataaactggaagagaaattcccacaggttgcggcaactggcgatggccctgacattatcttctgggcacacgaccgctttggtggctacgctcaatctggcctgttggctgaaatcaccccggacaaagcgttccaggacaagctgtatccgtttacctgggatgccgtacgttacaacggcaagctgattgcttacccgatcgctgttgaagcgttatcgctgatttataacaaagatctgctgccgaacccgccaaaaacctgggaagagatcccggcgctggataaagaactgaaagcgaaaggtaagagcgcgctgatgttcaacctgcaagaaccgtacttcacctggccgctgattgctgctgacgggggttatgcgttcaagtatgaaaacggcaagtacgacattaaagacgtgggcgtggataacgctggcgcgaaagcgggtctgaccttcctggttgacctgattaaaaacaaacacatgaatgcagacaccgattactccatcgcagaagctgcctttaataaaggcgaaacagcgatgaccatcaacggcccgtgggcatggtccaacatcgacaccagcaaagtgaattatggtgtaacggtactgccgaccttcaagggtcaaccatccaaaccgttcgttggcgtgctgagcgcaggtattaacgccgccagtccgaacaaagagctggcgaaagagttcctcgaaaactatctgctgactgatgaaggtctggaagcggttaataaagacaaaccgctgggtgccgtagcgctgaagtcttacgaggaagagttggcgaaagatccacgtattgccgccaccatggaaaacgcccagaaaggtgaaatcatgccgaacatcccgcagatgtccgctttctggtatgccgtgcgtactgcggtgatcaacgccgccagcggtcgtcagactgtcgatgaagccctgaaagacgcgcagactggtggttctggtgagaacctgtactttcaaagctcagataatgggcctcaaaaccagcgcaacgctccacgtataaccttcggtggcccgtctgactccacaggcagcaaccagaatggtgagcgtagtggagccaggtctaagcagcgccgtccccagggtctgccgaacaacacggcgagctggtttactgcgcttacccaacacggtaaagaagacttaaaattcccgcgtggccagggcgtcccgatcaacactaactcttccccggatgatcagattggttattaccgcagagcaactcgtcggattcgcggcggcgacggtaaaatgaaagatttgtctccgcgttggtacttttactatctcggcaccggtccggaagctggactgccctacggggcaaacaaggacgggatcatttgggtggctaccgaaggtgccctgaatactccaaaagatcatatcggcacccgtaaccctgctaataacgctgcgatcgttctgcaactgcctcagggtacaactctgccaaaaggcttctatgcagaagggtcgcgtggtggcagccaggcgagtagccgtagcagctcccgctctcgcaactcgtcccgtaactccactccgggctcttctcgcggcacgtccccggctcgtatggcaggtaacggtggtgacgctgctctggcgctgctactgctggacaggctgaaccagctggagtcgaagatgagtggtaaaggccaacagcagcagggccagaccgttaccaaaaagagcgcagctgaaatgtctaaaaaaccgcgatggaaacgtaccgcgactaaaggatacaatgtaacacaggccttcggtaaacgaggtccgaaagatactcaaggaaactttggcgatgccgaattaatcaagcaggggaccgactacaaacactggccgcaaattgcccagttcgtgccatccgctgcggcattcttctttatgagccgcatcggcatgaaagaaacgccagatggtgtgtggctgacctacaccggtacgatcaagcttgataaagatgacccgaactttgatgaccaggttaaactgcttaacaaacatattgatgcctataaaactttcccgccgaccgaacccaaaaaggacaaaaagaaaaaagctgatgaaacccaggctctaccgcagcgtcagaaaaaacagcaaactgtgactctgctgccagctgcggacctggatgatttttccaagcagctgcaacagtctatgagctctgcggactctacgcaggctggtggttctggtcaccatcatcaccatcattaa

SEQ ID NO: 2725 - DNA, 2421 bp, Artificial Sequence
  Description of Artificial Sequence: Synthetic polynucleotide
atgaaaatcgaagaaggtaaactggtaatctggattaacggcgataaaggctataacggtctcgctgaagtcggtaagaaattcgagaaagataccggaattaaagtcaccgttgagcatccggataaactggaagagaaattcccacaggttgcggcaactggcgatggccctgacattatcttctgggcacacgaccgctttggtggctacgctcaatctggcctgttggctgaaatcaccccggacaaagcgttccaggacaagctgtatccgtttacctgggatgccgtacgttacaacggcaagctgattgcttacccgatcgctgttgaagcgttatcgctgatttataacaaagatctgctgccgaacccgccaaaaacctgggaagagatcccggcgctggataaagaactgaaagcgaaaggtaagagcgcgctgatgttcaacctgcaagaaccgtacttcacctggccgctgattgctgctgacgggggttatgcgttcaagtatgaaaacggcaagtacgacattaaagacgtgggcgtggataacgctggcgcgaaagcgggtctgaccttcctggttgacctgattaaaaacaaacacatgaatgcagacaccgattactccatcgcagaagctgcctttaataaaggcgaaacagcgatgaccatcaacggcccgtgggcatggtccaacatcgacaccagcaaagtgaattatggtgtaacggtactgccgaccttcaagggtcaaccatccaaaccgttcgttggcgtgctgagcgcaggtattaacgccgccagtccgaacaaagagctggcgaaagagttcctcgaaaactatctgctgactgatgaaggtctggaagcggttaataaagacaaaccgctgggtgccgtagcgctgaagtcttacgaggaagagttggcgaaagatccacgtattgccgccaccatggaaaacgcccagaaaggtgaaatcatgccgaacatcccgcagatgtccgctttctggtatgccgtgcgtactgcggtgatcaacgccgccagcggtcgtcagactgtcgatgaagccctgaaagacgcgcagactggtggttctggtgagaacctgtactttcaaagctcagataatgggcctcaaaaccagcgcaacgctccacgtataaccttcggtggcccgtctgactccacaggcagcaaccagaatggtgagcgtagtggagccaggtctaagcagcgccgtccccagggtctgccgaacaacacggcgagctggtttactgcgcttacccaacacggtaaagaagacttaaaattcccgcgtggccagggcgtcccgatcaacactaactcttccccggatgatcagattggttattaccgcagagcaactcgtcggattcgcggcggcgacggtaaaatgaaagatttgtctccgcgttggtacttttactatctcggcaccggtccggaagctggactgccctacggggcaaacaaggacgggatcatttgggtggctaccgaaggtgccctgaatactccaaaagatcatatcggcacccgtaaccctgctaataacgctgcgatcgttctgcaactgcctcagggtacaactctgccaaaaggcttctatgcagaagggtcgcgtggtggcagccaggcgagtagccgtagcagctcccgctctcgcaactcgtcccgtaactccactccgggctcttctcgcggcacgtccccggctcgtatggcaggtaacggtggtgacgctgctctggcgctgctactgctggacaggctgaaccagctggagtcgaagatgagtggtaaaggccaacagcagcagggccagaccgttaccaaaaagagcgcagctgaagcatctaaaaaaccgcgacagaaacgtaccgcgactaaagcgtacaatgtaacacaggccttcggtcgtcgaggtccggagcaaactcaaggaaactttggcgatcaggaattaatccgccaggggaccgactacaaacactggccgcaaattgcccagttcgccccatccgctagtgcattcttcggtatgagccatatcggcatggaagtaacgccaagtggtacgtggctgacctacaccggtgctatcaagcttgatgacaaggacccgaactttaaagaccaggttattctgcttaacaaacatattgatgcctataaaactttcccgccgaccgaacccaaaaaggacaaaaagaaaaaagctgatgaaacccaggctctaccgcagcgtcagaaaaaacagcaaactgtgactctgctgccagctgcggacctggatgatttttccaagcagctgcaacagtctatgagctctgcggactctacgcaggctggtggttctggtcaccatcatcaccatcattaa

SEQ ID NO: 2726 - DNA, 2421 bp, Artificial Sequence
  Description of Artificial Sequence: Synthetic polynucleotide
atgaaaatcgaagaaggtaaactggtaatctggattaacggcgataaaggctataacggtctcgctgaagtcggtaagaaattcgagaaagataccggaattaaagtcaccgttgagcatccggataaactggaagagaaattcccacaggttgcggcaactggcgatggccctgacattatcttctgggcacacgaccgctttggtggctacgctcaatctggcctgttggctgaaatcaccccggacaaagcgttccaggacaagctgtatccgtttacctgggatgccgtacgttacaacggcaagctgattgcttacccgatcgctgttgaagcgttatcgctgatttataacaaagatctgctgccgaacccgccaaaaacctgggaagagatcccggcgctggataaagaactgaaagcgaaaggtaagagcgcgctgatgttcaacctgcaagaaccgtacttcacctggccgctgattgctgctgacgggggttatgcgttcaagtatgaaaacggcaagtacgacattaaagacgtgggcgtggataacgctggcgcgaaagcgggtctgaccttcctggttgacctgattaaaaacaaacacatgaatgcagacaccgattactccatcgcagaagctgcctttaataaaggcgaaacagcgatgaccatcaacggcccgtgggcatggtccaacatcgacaccagcaaagtgaattatggtgtaacggtactgccgaccttcaagggtcaaccatccaaaccgttcgttggcgtgctgagcgcaggtattaacgccgccagtccgaacaaagagctggcgaaagagttcctcgaaaactatctgctgactgatgaaggtctggaagcggttaataaagacaaaccgctgggtgccgtagcgctgaagtcttacgaggaagagttggcgaaagatccacgtattgccgccaccatggaaaacgcccagaaaggtgaaatcatgccgaacatcccgcagatgtccgctttctggtatgccgtgcgtactgcggtgatcaacgccgccagcggtcgtcagactgtcgatgaagccctgaaagacgcgcagactggtggttctggtgagaacctgtactttcaaagctcagataatgggcctcaaaaccagcgcaacgctccacgtataaccttcggtggcccgtctgactccacaggcagcaaccagaatggtgagcgtagtggagccaggtctaagcagcgccgtccccagggtctgccgaacaacacggcgagctggtttactggccttacccaaaaaggtaaagaagacttaaaattcccgccaggccagggcgtcccgatcaacactaactcttccccggatgatcagattggttattaccgcagagcaactcgtcggattcgcggcggcgacggtaaaatgaaagatttgcccccgcgttggtacttttactatctcggcaccggtccgcatgctgacctgccctacgggcaaaagcaagacggggtgttttgggtggctcgccctggtgccctgaatactccaaaagatcatatcggcacccgtaaccctgctaataacgctgcgatcccgctgcaactgcctccaggtacaaaactgccaaaaggcttctatgcagaagggtcgcgtggtggcagccaggcgagtagccgtagcagctcccgctctcgcaactcgtcccgtaactccactccgggctcttctcgcggcacgtccccggctcgtatggcaggtaacggtggtgacgctgctctggcgctgctactgctggacaggctgaaccagctggagtcgaagatgagtggtaaaggccaacagcagcagggccagaccgttaccaaaaagagcgcagctgaagcatctaaaaaaccgcgacagaaacgtaccgcgactaaagcgtacaatgtaacacaggccttcggtcgtcgaggtccggagcaaactcaaggaaactttggcgatcaggaattaatccgccaggggaccgactacaaacactggccgcaaattgcccagttcgccccatccgctagtgcattcttcggtatgagccgcatcggcatggaagtaacgccaagtggtacgtggctgacctacaccggtgctatcaagcttgatgacaaggacccgaactttaaagaccaggttattctgcttaacaaacatattgatgcctataaaactttcccgccgaccgaacccaaaaaggacaaaaagaaaaaagctgatgaaacccaggctctaccgcagcgtcagaaaaaacagcaaactgtgactctgctgccagctgcggacctggatgatttttccaagcagctgcaacagtctatgagctctgcggactctacgcaggctggtggttctggtcaccatcatcaccatcattaa

SEQ ID NO: 2727 - DNA, 2421 bp, Artificial Sequence
  Description of Artificial Sequence: Synthetic polynucleotide
atgaaaatcgaagaaggtaaactggtaatctggattaacggcgataaaggctataacggtctcgctgaagtcggtaagaaattcgagaaagataccggaattaaagtcaccgttgagcatccggataaactggaagagaaattcccacaggttgcggcaactggcgatggccctgacattatcttctgggcacacgaccgctttggtggctacgctcaatctggcctgttggctgaaatcaccccggacaaagcgttccaggacaagctgtatccgtttacctgggatgccgtacgttacaacggcaagctgattgcttacccgatcgctgttgaagcgttatcgctgatttataacaaagatctgctgccgaacccgccaaaaacctgggaagagatcccggcgctggataaagaactgaaagcgaaaggtaagagcgcgctgatgttcaacctgcaagaaccgtacttcacctggccgctgattgctgctgacgggggttatgcgttcaagtatgaaaacggcaagtacgacattaaagacgtgggcgtggataacgctggcgcgaaagcgggtctgaccttcctggttgacctgattaaaaacaaacacatgaatgcagacaccgattactccatcgcagaagctgcctttaataaaggcgaaacagcgatgaccatcaacggcccgtgggcatggtccaacatcgacaccagcaaagtgaattatggtgtaacggtactgccgaccttcaagggtcaaccatccaaaccgttcgttggcgtgctgagcgcaggtattaacgccgccagtccgaacaaagagctggcgaaagagttcctcgaaaactatctgctgactgatgaaggtctggaagcggttaataaagacaaaccgctgggtgccgtagcgctgaagtcttacgaggaagagttggcgaaagatccacgtattgccgccaccatggaaaacgcccagaaaggtgaaatcatgccgaacatcccgcagatgtccgctttctggtatgccgtgcgtactgcggtgatcaacgccgccagcggtcgtcagactgtcgatgaagccctgaaagacgcgcagactggtggttctggtgagaacctgtactttcaaagctcagataatgggcctcaaaaccagcgcaacgctccacgtataaccttcggtggcccgtctgactccacaggcagcaaccagaatggtgagcgtagtggagccaggtctaagcagcgccgtccccagggtctgccgaacaacacggcgagctggtttactgcgcttacccaacacggtaaagaagacttaaaattcccgcgtggccagggcgtcccgatcaacactaactcttccccggatgatcagattggttattaccgcagagcaactcgtcggattcgcggcggcgacggtaaaatgaaagatttgtctccgcgttggtacttttactatctcggcaccggtccggaagctggactgccctacggggcaaacaaggacgggatcatttgggtggctaccgaaggtgccctgaatactccaaaagatcatatcggcacccgtaaccctgctaataacgctgcgatcgttctgcaactggcgcagggtacaactctgccaaaaggcttctatgcagaagggtcgcgtggtggcagccaggcgagtagccgtagcagctcccgctctcgcaactcgtcccgtaactccactccgggctcttctcgcggcacgtccccggctcgtatggcaggtaacggtggtgacgctgctctggcgctgctactgctggacaggctgaaccagctggagtcgaagatgagtggtaaaggccaacagcagcagggccagaccgttaccaaaaagagcgcagctgaagcatctaaaaaaccgcgacagaaacgtaccgcgactaaagcgtacaatgtaacacaggccttcggtcgtcgaggtccggagcaaactcaaggaaactttggcgatcaggaattaatccgccaggggaccgactacaaacactggccgcaaattgcccagttcgccccatccgctagtgcattcttcggtatgagccgcatcggcatggaagtaacgccaagtggtacgtggctgacctacaccggtgctatcaagcttgatgacaaggacccgaactttaaagaccaggttattctgcttaacaaacatattgatgcctataaaactttcccgccgaccgaacccaaaaaggacaaaaagaaaaaagctgatgaaacccaggctctaccgcagcgtcagaaaaaacagcaaactgtgactctgctgccagctgcggacctggatgatttttccaagcagctgcaacagtctatgagctctgcggactctacgcaggctggtggttctggtcaccatcatcaccatcattaa

SEQ ID NO: 2728 - DNA, 2421 bp, Artificial Sequence
  Description of Artificial Sequence: Synthetic polynucleotide
atgaaaatcgaagaaggtaaactggtaatctggattaacggcgataaaggctataacggtctcgctgaagtcggtaagaaattcgagaaagataccggaattaaagtcaccgttgagcatccggataaactggaagagaaattcccacaggttgcggcaactggcgatggccctgacattatcttctgggcacacgaccgctttggtggctacgctcaatctggcctgttggctgaaatcaccccggacaaagcgttccaggacaagctgtatccgtttacctgggatgccgtacgttacaacggcaagctgattgcttacccgatcgctgttgaagcgttatcgctgatttataacaaagatctgctgccgaacccgccaaaaacctgggaagagatcccggcgctggataaagaactgaaagcgaaaggtaagagcgcgctgatgttcaacctgcaagaaccgtacttcacctggccgctgattgctgctgacgggggttatgcgttcaagtatgaaaacggcaagtacgacattaaagacgtgggcgtggataacgctggcgcgaaagcgggtctgaccttcctggttgacctgattaaaaacaaacacatgaatgcagacaccgattactccatcgcagaagctgcctttaataaaggcgaaacagcgatgaccatcaacggcccgtgggcatggtccaacatcgacaccagcaaagtgaattatggtgtaacggtactgccgaccttcaagggtcaaccatccaaaccgttcgttggcgtgctgagcgcaggtattaacgccgccagtccgaacaaagagctggcgaaagagttcctcgaaaactatctgctgactgatgaaggtctggaagcggttaataaagacaaaccgctgggtgccgtagcgctgaagtcttacgaggaagagttggcgaaagatccacgtattgccgccaccatggaaaacgcccagaaaggtgaaatcatgccgaacatcccgcagatgtccgctttctggtatgccgtgcgtactgcggtgatcaacgccgccagcggtcgtcagactgtcgatgaagccctgaaagacgcgcagactggtggttctggtgagaacctgtactttcaaagctcagataatgggcctcaaaaccagcgcaacgctccacgtataaccttcggtggcccgtctgactccacaggcagcaaccagaatggtgagcgtagtggagccaggtctaagcagcgccgtccccagggtctgccgaacaacacggcgagctggtttactgcgcttacccaacacggtaaagaagacttaaaattcccgaaaggccagggcgtcccgatcaacactaactctaaaccggatgatcagattggttattaccgcagagaagtacgtcggtatcgcggcggcgacggtcaaatgaaagatttggatccgcgttggtacttttactatctcggcaccggtccggaagctggactgccctacggggcaaacaaggacgggatcatttgggtggctaccgaaggtgccctgaatactccaaaagatcatatcggcacccgtaaccctgctaataacgctgcgatcgttctgcaactgcctcagggtacaactctgccaaaaggcttctatgcagaagggtcgcgtggtggcagccaggcgagtagccgtagcagctcccgctctcgcaactcgtcccgtaactccactccgggctcttctcgcggcacgtccccggctcgtatggcaggtaacggtggtgacgctgctctggcgctgctactgctggacaggctgaaccagctggagtcgaagatgagtggtaaaggccaacagcagcagggccagaccgttaccaaaaagagcgcagctgaagcatctaaaaaaccgcgacagaaacgtaccgcgactaaagcgtacaatgtaacacaggccttcggtcgtcgaggtccggagcaaactcaaggaaactttggcgatcaggaattaatccgccaggggaccgactacaaacactggccgcaaattgcccagttcgccccatccgctagtgcattcttcggtatgagccgcatcggcatggaagtaacgccaagtggtacgtggctgacctacaccggtgctatcaagcttgatgacaaggacccgaactttaaagaccaggttattctgcttaacaaacatattgatgcctataaaactttcccgccgaccgaacccaaaaaggacaaaaagaaaaaagctgatgaaacccaggctctaccgcagcgtcagaaaaaacagcaaactgtgactctgctgccagctgcggacctggatgatttttccaagcagctgcaacagtctatgagctctgcggactctacgcaggctggtggttctggtcaccatcatcaccatcattaa

SEQ ID NO: 2729 - DNA, 2421 bp, Artificial Sequence
  Description of Artificial Sequence: Synthetic polynucleotide
atgaaaatcgaagaaggtaaactggtaatctggattaacggcgataaaggctataacggtctcgctgaagtcggtaagaaattcgagaaagataccggaattaaagtcaccgttgagcatccggataaactggaagagaaattcccacaggttgcggcaactggcgatggccctgacattatcttctgggcacacgaccgctttggtggctacgctcaatctggcctgttggctgaaatcaccccggacaaagcgttccaggacaagctgtatccgtttacctgggatgccgtacgttacaacggcaagctgattgcttacccgatcgctgttgaagcgttatcgctgatttataacaaagatctgctgccgaacccgccaaaaacctgggaagagatcccggcgctggataaagaactgaaagcgaaaggtaagagcgcgctgatgttcaacctgcaagaaccgtacttcacctggccgctgattgctgctgacgggggttatgcgttcaagtatgaaaacggcaagtacgacattaaagacgtgggcgtggataacgctggcgcgaaagcgggtctgaccttcctggttgacctgattaaaaacaaacacatgaatgcagacaccgattactccatcgcagaagctgcctttaataaaggcgaaacagcgatgaccatcaacggcccgtgggcatggtccaacatcgacaccagcaaagtgaattatggtgtaacggtactgccgaccttcaagggtcaaccatccaaaccgttcgttggcgtgctgagcgcaggtattaacgccgccagtccgaacaaagagctggcgaaagagttcctcgaaaactatctgctgactgatgaaggtctggaagcggttaataaagacaaaccgctgggtgccgtagcgctgaagtcttacgaggaagagttggcgaaagatccacgtattgccgccaccatggaaaacgcccagaaaggtgaaatcatgccgaacatcccgcagatgtccgctttctggtatgccgtgcgtactgcggtgatcaacgccgccagcggtcgtcagactgtcgatgaagccctgaaagacgcgcagactggtggttctggtgagaacctgtactttcaaagctcagataatgggcctcaaaaccagcgcaacgctccacgtataaccttcggtggcccgtctgactccacaggcagcaaccagaatggtgagcgtagtggagccaggtctaagcagcgccgtccccagggtctgccgaacaacacggcgagctggtttactgcgcttacccaacacggtaaagaagacttaaaattcccgcgtggccagggcgtcccgatcaacactaactcttccccggatgatcagattggttattaccgcagagcaactcgtcggattcgcggcggcgacggtaaaatgaaagatttgtctccgcgttggtacttttactatctcggcaccggtccggaagctggactgccctacggggcaaacaaggacgggatcatttgggtggctaccgaaggtgccctgaatactccaaaagatcatatcggcacccgtaaccctgctaataacgctgcgatcgttctgcaactgcctcagggtacaactctgccaaaaggcttctatgcagaagggtcgcgtggtggcagccaggcgagtagccgtagcagctcccgctctcgcaactcgtcccgtaactccactccgggcgagtctcgcggcacggaaccggctcgtatggcaggtaacggtggtgacgctgctctggcgctgctactgctggacaggctgaaccagctggagtcgaagatgagtggtaaaggccaacagcagcagggccagaccgttaccaaaaagagcgcagctgaagcatctaaaaaaccgcgacagaaacgtaccgcgactaaagcgtacaatgtaacacaggccttcggtcgtcgaggtccggagcaaactcaaggaaactttggcgatcaggaattaatccgccaggggaccgactacaaacactggccgcaaattgcccagttcgccccatccgctagtgcattcttcggtatgagccgcatcggcatggaagtaacgccaagtggtacgtggctgacctacaccggtgctatcaagcttgatgacaaggacccgaactttaaagaccaggttattctgcttaacaaacatattgatgcctataaaactttcccgccgaccgaacccaaaaaggacaaaaagaaaaaagctgatgaaacccaggctctaccgcagcgtcagaaaaaacagcaaactgtgactctgctgccagctgcggacctggatgatttttccaagcagctgcaacagtctatgagctctgcggactctacgcaggctggtggttctggtcaccatcatcaccatcattaa

SEQ ID NO: 2730 - DNA, 2421 bp, Artificial Sequence
  Description of Artificial Sequence: Synthetic polynucleotide
atgaaaatcgaagaaggtaaactggtaatctggattaacggcgataaaggctataacggtctcgctgaagtcggtaagaaattcgagaaagataccggaattaaagtcaccgttgagcatccggataaactggaagagaaattcccacaggttgcggcaactggcgatggccctgacattatcttctgggcacacgaccgctttggtggctacgctcaatctggcctgttggctgaaatcaccccggacaaagcgttccaggacaagctgtatccgtttacctgggatgccgtacgttacaacggcaagctgattgcttacccgatcgctgttgaagcgttatcgctgatttataacaaagatctgctgccgaacccgccaaaaacctgggaagagatcccggcgctggataaagaactgaaagcgaaaggtaagagcgcgctgatgttcaacctgcaagaaccgtacttcacctggccgctgattgctgctgacgggggttatgcgttcaagtatgaaaacggcaagtacgacattaaagacgtgggcgtggataacgctggcgcgaaagcgggtctgaccttcctggttgacctgattaaaaacaaacacatgaatgcagacaccgattactccatcgcagaagctgcctttaataaaggcgaaacagcgatgaccatcaacggcccgtgggcatggtccaacatcgacaccagcaaagtgaattatggtgtaacggtactgccgaccttcaagggtcaaccatccaaaccgttcgttggcgtgctgagcgcaggtattaacgccgccagtccgaacaaagagctggcgaaagagttcctcgaaaactatctgctgactgatgaaggtctggaagcggttaataaagacaaaccgctgggtgccgtagcgctgaagtcttacgaggaagagttggcgaaagatccacgtattgccgccaccatggaaaacgcccagaaaggtgaaatcatgccgaacatcccgcagatgtccgctttctggtatgccgtgcgtactgcggtgatcaacgccgccagcggtcgtcagactgtcgatgaagccctgaaagacgcgcagactggtggttctggtgagaacctgtactttcaaagctcagataatgggcctcaaaaccagcgcaacgctccacgtataaccttcggtggcccgtctgactccacaggcagcaaccagaatggtgagcgtagtggagccaggtctaagcagcgccgtccccagggtctgccgaacaacacggcgagctggtttactgcgcttacccaacacggtaaagaagacttaaaattcccgcgtggccagggcgtcccgatcaacactaactcttccccggatgatcagattggttattaccgcagagcaactcgtcggattcgcggcggcgacggtaaaatgaaagatttgtctccgcgttggtacttttactatctcggcaccggtccggaagctggactgccctacggggcaaacaaggacgggatcatttgggtggctaccgaaggtgccctgaatactccaaaagatcatatcggcacccgtaaccctgctaataacgctgcgatcgttctgcaactgcctcagggtacaactctgccaaaaggcttctatgcagaagggtcgcgtggtggcagccaggcgagtagccgtagcagctcccgctctcgcaactcgtcccgtaactccactccgggctcttctcgcggcacgtccccggctcgtatggcaggtaacggtggtgacgctgctctggcgctgctactgctggacaggctgaaccagctggagtcgaagatgagtggtaaaggccaacagcagcagggccagaccgttaccaaaaagagcgcagctgaagcatctaaaaaaccgcgacagaaacgtaccgcgactaaagcgtacaatgtaacacaggccttcggtcgtcgaggtccggagcaaactcaaggaaactttggcgatcaggaattaatccgccaggggaccgactacaaaaattggccgcaaattgcccagttcgccccatccgctagtgcattcttcggtatgagccgcatcggcatggaagtaacgccaagtggtacgtggctgacctacaccggtgctatcaagcttgatgacaaggacccgaactttaaagaccaggttattctgcttaacaaacatattgatgcctataaaactttcccgccgaccgaacccaaaaaggacaaaaagaaaaaagctgatgaaacccaggctctaccgcagcgtcagaaaaaacagcaaactgtgactctgctgccagctgcggacctggatgatttttccaagcagctgcaacagtctatgagctctgcggactctacgcaggctggtggttctggtcaccatcatcaccatcattaa

SEQ ID NO: 2731 - DNA, 2421 bp, Artificial Sequence
  Description of Artificial Sequence: Synthetic polynucleotide
atgaaaatcgaagaaggtaaactggtaatctggattaacggcgataaaggctataacggtctcgctgaagtcggtaagaaattcgagaaagataccggaattaaagtcaccgttgagcatccggataaactggaagagaaattcccacaggttgcggcaactggcgatggccctgacattatcttctgggcacacgaccgctttggtggctacgctcaatctggcctgttggctgaaatcaccccggacaaagcgttccaggacaagctgtatccgtttacctgggatgccgtacgttacaacggcaagctgattgcttacccgatcgctgttgaagcgttatcgctgatttataacaaagatctgctgccgaacccgccaaaaacctgggaagagatcccggcgctggataaagaactgaaagcgaaaggtaagagcgcgctgatgttcaacctgcaagaaccgtacttcacctggccgctgattgctgctgacgggggttatgcgttcaagtatgaaaacggcaagtacgacattaaagacgtgggcgtggataacgctggcgcgaaagcgggtctgaccttcctggttgacctgattaaaaacaaacacatgaatgcagacaccgattactccatcgcagaagctgcctttaataaaggcgaaacagcgatgaccatcaacggcccgtgggcatggtccaacatcgacaccagcaaagtgaattatggtgtaacggtactgccgaccttcaagggtcaaccatccaaaccgttcgttggcgtgctgagcgcaggtattaacgccgccagtccgaacaaagagctggcgaaagagttcctcgaaaactatctgctgactgatgaaggtctggaagcggttaataaagacaaaccgctgggtgccgtagcgctgaagtcttacgaggaagagttggcgaaagatccacgtattgccgccaccatggaaaacgcccagaaaggtgaaatcatgccgaacatcccgcagatgtccgctttctggtatgccgtgcgtactgcggtgatcaacgccgccagcggtcgtcagactgtcgatgaagccctgaaagacgcgcagactggtggttctggtgagaacctgtactttcaaagctcagataatgggcctcaaaaccagcgcaacgctccacgtataaccttcggtggcccgtctgactccacaggcagcaaccagaatggtgagcgtagtggagccaggtctaagcagcgccgtccccagggtctgccgaacaacacggcgagctggtttactgcgcttacccaacacggtaaagaagacttaaaattcccgcgtggccagggcgtcccgatcaacactaactctacgccggatgatcagattggttattaccgcagagcaactcgtcggattcgcggcggcgacggtaaaatgaaagatttgtctccgcgttggtacttttactatctcggcaccggtccggaagctggactgccctacggggcaaacaaggacgggatcatttgggtggctaccgaaggtgccctgaatactccaaaagatcatatcggcacccgtaaccctgctaataacgctgcgatcgttctgcaactgcctcagggtacaactctgccaaaaggcttctatgcagaagggtcgcgtggtggcagccaggcgagtagccgtagcagctcccgctctcgcaactcgtcccgtaactccactccgggctcttctcgcggcacgtccccggctcgtatggcaggtaacggtggtgacgctgctctggcgctgctactgctggacaggctgaaccagctggagtcgaagatgagtggtaaaggccaacagcagcagggccagaccgttaccaaaaagagcgcagctgaagcatctaaaaaaccgcgacagaaacgtaccgcgactaaagcgtacaatgtaacacaggccttcggtcgtcgaggtccggagcaaactcaaggaaactttggcgatcaggaattaatccgccaggggaccgactacaaacactggccgcaaattgcccagttcgccccatccgctagtgcattcttcggtatgagccgcatcggcatggaagtaacgccaagtggtacgtggctgacctacaccggtgctatcaagcttgatgacaaggacccgaactttaaagaccaggttattctgcttaacaaacatattgatgcctataaaactttcccgccgaccgaacccaaaaaggacaaaaagaaaaaagctgatgaaacccaggctctaccgcagcgtcagaaaaaacagcaaactgtgactctgctgccagctgcggacctggatgatttttccaagcagctgcaacagtctatgagctctgcggactctacgcaggctggtggttctggtcaccatcatcaccatcattaa

SEQ ID NO: 2732 - DNA, 2421 bp, Artificial Sequence
  Description of Artificial Sequence: Synthetic polynucleotide
atgaaaatcgaagaaggtaaactggtaatctggattaacggcgataaaggctataacggtctcgctgaagtcggtaagaaattcgagaaagataccggaattaaagtcaccgttgagcatccggataaactggaagagaaattcccacaggttgcggcaactggcgatggccctgacattatcttctgggcacacgaccgctttggtggctacgctcaatctggcctgttggctgaaatcaccccggacaaagcgttccaggacaagctgtatccgtttacctgggatgccgtacgttacaacggcaagctgattgcttacccgatcgctgttgaagcgttatcgctgatttataacaaagatctgctgccgaacccgccaaaaacctgggaagagatcccggcgctggataaagaactgaaagcgaaaggtaagagcgcgctgatgttcaacctgcaagaaccgtacttcacctggccgctgattgctgctgacgggggttatgcgttcaagtatgaaaacggcaagtacgacattaaagacgtgggcgtggataacgctggcgcgaaagcgggtctgaccttcctggttgacctgattaaaaacaaacacatgaatgcagacaccgattactccatcgcagaagctgcctttaataaaggcgaaacagcgatgaccatcaacggcccgtgggcatggtccaacatcgacaccagcaaagtgaattatggtgtaacggtactgccgaccttcaagggtcaaccatccaaaccgttcgttggcgtgctgagcgcaggtattaacgccgccagtccgaacaaagagctggcgaaagagttcctcgaaaactatctgctgactgatgaaggtctggaagcggttaataaagacaaaccgctgggtgccgtagcgctgaagtcttacgaggaagagttggcgaaagatccacgtattgccgccaccatggaaaacgcccagaaaggtgaaatcatgccgaacatcccgcagatgtccgctttctggtatgccgtgcgtactgcggtgatcaacgccgccagcggtcgtcagactgtcgatgaagccctgaaagacgcgcagactggtggttctggtgagaacctgtactttcaaagctcagataatgggcctcaaaaccagcgcaacgctccacgtataaccttcggtggcccgtctgactccacaggcagcaaccagaatggtgagcgtagtggagccaggtctaagcagcgccgtccccagggtctgccgaacaacacggcgagctggtttactgcgcttacccaacacggtaaagaagacttaaaattcccgcgtggccagggcgtcccgatcaacactaactcttccccggatgatcagattggttattaccgcagagcaactcgtcggattcgcggcggcgacggtaaaatgaaagatttgtctccgcgttggtacttttactatctcggcaccggtccggaagctggactgccctacggggcaaacaaggacgggatcatttgggtggctaccgaaggtgccctgaatactccaaaagatcatatcggcacccgtaaccctgctaataacgctgcgatcgttctgcaactgcctcagggtacaactctgccaaaaggcttctatgcagaagggtcgcgtggtggcagccaggcgagtagccgtagcagctcccgctctcgcaactcgtcccgtaactccactccgggctcttctcgcggcacgtccccggctcgtatggcaggtaacggtggtgacgctgctctggcgctgctactgctggacaggctgaaccagctggagtcgaagatgagtggtaaaggccaacagcagcagggccagaccgttaccaaaaagagcgcagctgaagcatctaaaaaaccgcgacagaaacgtaccgcgactaaagcgtacaatgtaacacaggccttcggtcgtcgaggtccggagcaaactcaaggaaactttggcgatcaggaattaatccgccaggggaccgactacaaacactggccgcaaattgcccagttcgccccatccgctagtgcattcttcggtatgagccgcatcggcatggaagtaacgccaagtggtacgtggctgacctacaccggtgctatcaagcttgatgacaagaatccgaactttaaagaccaggttattctgcttaacaaacatattgatgcctataaaactttcccgccgaccgaacccaaaaaggacaaaaagaaaaaagctgatgaaacccaggctctaccgcagcgtcagaaaaaacagcaaactgtgactctgctgccagctgcggacctggatgatttttccaagcagctgcaacagtctatgagctctgcggactctacgcaggctggtggttctggtcaccatcatcaccatcattaa

SEQ ID NO: 2733 - DNA, 2421 bp, Artificial Sequence
  Description of Artificial Sequence: Synthetic polynucleotide
atgaaaatcgaagaaggtaaactggtaatctggattaacggcgataaaggctataacggtctcgctgaagtcggtaagaaattcgagaaagataccggaattaaagtcaccgttgagcatccggataaactggaagagaaattcccacaggttgcggcaactggcgatggccctgacattatcttctgggcacacgaccgctttggtggctacgctcaatctggcctgttggctgaaatcaccccggacaaagcgttccaggacaagctgtatccgtttacctgggatgccgtacgttacaacggcaagctgattgcttacccgatcgctgttgaagcgttatcgctgatttataacaaagatctgctgccgaacccgccaaaaacctgggaagagatcccggcgctggataaagaactgaaagcgaaaggtaagagcgcgctgatgttcaacctgcaagaaccgtacttcacctggccgctgattgctgctgacgggggttatgcgttcaagtatgaaaacggcaagtacgacattaaagacgtgggcgtggataacgctggcgcgaaagcgggtctgaccttcctggttgacctgattaaaaacaaacacatgaatgcagacaccgattactccatcgcagaagctgcctttaataaaggcgaaacagcgatgaccatcaacggcccgtgggcatggtccaacatcgacaccagcaaagtgaattatggtgtaacggtactgccgaccttcaagggtcaaccatccaaaccgttcgttggcgtgctgagcgcaggtattaacgccgccagtccgaacaaagagctggcgaaagagttcctcgaaaactatctgctgactgatgaaggtctggaagcggttaataaagacaaaccgctgggtgccgtagcgctgaagtcttacgaggaagagttggcgaaagatccacgtattgccgccaccatggaaaacgcccagaaaggtgaaatcatgccgaacatcccgcagatgtccgctttctggtatgccgtgcgtactgcggtgatcaacgccgccagcggtcgtcagactgtcgatgaagccctgaaagacgcgcagactggtggttctggtgagaacctgtactttcaaagctcagataatgggcctcaaaaccagcgcaacgctccacgtataaccttcggtggcccgtctgactccacaggcagcaaccagaatggtgagcgtagtggagccaggtctaagcagcgccgtccccagggtctgccgaacaacacggcgagctggtttactgcgcttacccaacacggtaaagaagacttaaaattcccgcagggccagggcgtcccgatcaacactaactcttccccggatgatcagattggttattaccgcagagcaactcgtcggattcgcggcggcgacggtaaaatgaaagatttgtctccgcgttggtacttttactatctcggcaccggtccggaagctggactgccctacggggcaaacaaggacgggatcatttgggtggctaccgaaggtgccctgaatactccaaaagatcatatcggcacccgtaaccctgctaataacgctgcgatcgttctgcaactgcctcagggtacaactctgccaaaaggcttctatgcagaagggtcgcgtggtggcagccaggcgagtagccgtagcagctcccgctctcgcaactcgtcccgtaactccactccgggctcttctcgcggcacgtccccggctcgtatggcaggtaacggtggtgacgctgctctggcgctgctactgctggacaggctgaaccagctggagtcgaagatgagtggtaaaggccaacagcagcagggccagaccgttaccaaaaagagcgcagctgaagcatctaaaaaaccgcgacagaaacgtaccgcgactaaagcgtacaatgtaacacaggccttcggtcgtcgaggtccggagcaaactcaaggaaactttggcgatcaggaattaatccgccaggggaccgactacaaacactggccgcaaattgcccagttcgccccatccgctagtgcattcttcggtatgagccgcatcggcatggaagtaacgccaagtggtacgtggctgacctacaccggtgctatcaagcttgatgacaaggacccgaactttaaagaccaggttattctgcttaacaaacatattgatgcctataaaactttcccgccgaccgaacccaaaaaggacaaaaagaaaaaagctgatgaaacccaggctctaccgcagcgtcagaaaaaacagcaaactgtgactctgctgccagctgcggacctggatgatttttccaagcagctgcaacagtctatgagctctgcggactctacgcaggctggtggttctggtcaccatcatcaccatcattaa

SEQ ID NO: 2734 - DNA, 2421 bp, Artificial Sequence
  Description of Artificial Sequence: Synthetic polynucleotide
atgaaaatcgaagaaggtaaactggtaatctggattaacggcgataaaggctataacggtctcgctgaagtcggtaagaaattcgagaaagataccggaattaaagtcaccgttgagcatccggataaactggaagagaaattcccacaggttgcggcaactggcgatggccctgacattatcttctgggcacacgaccgctttggtggctacgctcaatctggcctgttggctgaaatcaccccggacaaagcgttccaggacaagctgtatccgtttacctgggatgccgtacgttacaacggcaagctgattgcttacccgatcgctgttgaagcgttatcgctgatttataacaaagatctgctgccgaacccgccaaaaacctgggaagagatcccggcgctggataaagaactgaaagcgaaaggtaagagcgcgctgatgttcaacctgcaagaaccgtacttcacctggccgctgattgctgctgacgggggttatgcgttcaagtatgaaaacggcaagtacgacattaaagacgtgggcgtggataacgctggcgcgaaagcgggtctgaccttcctggttgacctgattaaaaacaaacacatgaatgcagacaccgattactccatcgcagaagctgcctttaataaaggcgaaacagcgatgaccatcaacggcccgtgggcatggtccaacatcgacaccagcaaagtgaattatggtgtaacggtactgccgaccttcaagggtcaaccatccaaaccgttcgttggcgtgctgagcgcaggtattaacgccgccagtccgaacaaagagctggcgaaagagttcctcgaaaactatctgctgactgatgaaggtctggaagcggttaataaagacaaaccgctgggtgccgtagcgctgaagtcttacgaggaagagttggcgaaagatccacgtattgccgccaccatggaaaacgcccagaaaggtgaaatcatgccgaacatcccgcagatgtccgctttctggtatgccgtgcgtactgcggtgatcaacgccgccagcggtcgtcagactgtcgatgaagccctgaaagacgcgcagactggtggttctggtgagaacctgtactttcaaagctcagataatgggcctcaaaaccagcgcaacgctccacgtataaccttcggtggcccgtctgactccacaggcagcaaccagaatggtgagcgtagtggagccaggtctaagcagcgccgtccccagggtctgccgaacaacacggcgagctggtttactgcgcttacccaacacggtaaagaagacttaaaattcccgcgtggccagggcgtcccgatcaacactaactcttccccggatgatcagattggttattaccgcagagcaactcgtcggattcgcggcggcgacggtaaaatgaaagatttgtctccgcgttggtacttttactatctcggcaccggtccggaagctggactgccctacggggcaaacaaggacgggatcatttgggtggctaccgaaggtgccctgaatactccaaaagatcatatcggcacccgtaaccctgctaataacgctgcgatcgttctgcaactgcctaaaggtacaactctgccaaaaggcttctatgcagaagggtcgcgtggtggcagccaggcgagtagccgtagcagctcccgctctcgcaactcgtcccgtaactccactccgggctcttctcgcggcacgtccccggctcgtatggcaggtaacggtggtgacgctgctctggcgctgctactgctggacaggctgaaccagctggagtcgaagatgagtggtaaaggccaacagcagcagggccagaccgttaccaaaaagagcgcagctgaagcatctaaaaaaccgcgacagaaacgtaccgcgactaaagcgtacaatgtaacacaggccttcggtcgtcgaggtccggagcaaactcaaggaaactttggcgatcaggaattaatccgccaggggaccgactacaaacactggccgcaaattgcccagttcgccccatccgctagtgcattcttcggtatgagccgcatcggcatggaagtaacgccaagtggtacgtggctgacctacaccggtgctatcaagcttgatgacaaggacccgaactttaaagaccaggttattctgcttaacaaacatattgatgcctataaaactttcccgccgaccgaacccaaaaaggacaaaaagaaaaaagctgatgaaacccaggctctaccgcagcgtcagaaaaaacagcaaactgtgactctgctgccagctgcggacctggatgatttttccaagcagctgcaacagtctatgagctctgcggactctacgcaggctggtggttctggtcaccatcatcaccatcattaa

SEQ ID NO: 2735 - DNA, 2421 bp, Artificial Sequence
  Description of Artificial Sequence: Synthetic polynucleotide
atgaaaatcgaagaaggtaaactggtaatctggattaacggcgataaaggctataacggtctcgctgaagtcggtaagaaattcgagaaagataccggaattaaagtcaccgttgagcatccggataaactggaagagaaattcccacaggttgcggcaactggcgatggccctgacattatcttctgggcacacgaccgctttggtggctacgctcaatctggcctgttggctgaaatcaccccggacaaagcgttccaggacaagctgtatccgtttacctgggatgccgtacgttacaacggcaagctgattgcttacccgatcgctgttgaagcgttatcgctgatttataacaaagatctgctgccgaacccgccaaaaacctgggaagagatcccggcgctggataaagaactgaaagcgaaaggtaagagcgcgctgatgttcaacctgcaagaaccgtacttcacctggccgctgattgctgctgacgggggttatgcgttcaagtatgaaaacggcaagtacgacattaaagacgtgggcgtggataacgctggcgcgaaagcgggtctgaccttcctggttgacctgattaaaaacaaacacatgaatgcagacaccgattactccatcgcagaagctgcctttaataaaggcgaaacagcgatgaccatcaacggcccgtgggcatggtccaacatcgacaccagcaaagtgaattatggtgtaacggtactgccgaccttcaagggtcaaccatccaaaccgttcgttggcgtgctgagcgcaggtattaacgccgccagtccgaacaaagagctggcgaaagagttcctcgaaaactatctgctgactgatgaaggtctggaagcggttaataaagacaaaccgctgggtgccgtagcgctgaagtcttacgaggaagagttggcgaaagatccacgtattgccgccaccatggaaaacgcccagaaaggtgaaatcatgccgaacatcccgcagatgtccgctttctggtatgccgtgcgtactgcggtgatcaacgccgccagcggtcgtcagactgtcgatgaagccctgaaagacgcgcagactggtggttctggtgagaacctgtactttcaaagctcagataatgggcctcaaaaccagcgcaacgctccacgtataaccttcggtggcccgtctgactccacaggcagcaaccagaatggtgagcgtagtggagccaggtctaagcagcgccgtccccagggtctgccgaacaacacggcgagctggtttactgcgcttacccaaaaaggtaaagaagacttaaaattcccgcgtggccagggcgtcccgatcaacactaactcttccccggatgatcagattggttattaccgcagagcaactcgtcggattcgcggcggcgacggtaaaatgaaagatttgtctccgcgttggtacttttactatctcggcaccggtccggaagctggactgccctacggggcaaacaaggacgggatcatttgggtggctaccgaaggtgccctgaatactccaaaagatcatatcggcacccgtaaccctgctaataacgctgcgatcgttctgcaactgcctcagggtacaactctgccaaaaggcttctatgcagaagggtcgcgtggtggcagccaggcgagtagccgtagcagctcccgctctcgcaactcgtcccgtaactccactccgggctcttctcgcggcacgtccccggctcgtatggcaggtaacggtggtgacgctgctctggcgctgctactgctggacaggctgaaccagctggagtcgaagatgagtggtaaaggccaacagcagcagggccagaccgttaccaaaaagagcgcagctgaagcatctaaaaaaccgcgacagaaacgtaccgcgactaaagcgtacaatgtaacacaggccttcggtcgtcgaggtccggagcaaactcaaggaaactttggcgatcaggaattaatccgccaggggaccgactacaaacactggccgcaaattgcccagttcgccccatccgctagtgcattcttcggtatgagccgcatcggcatggaagtaacgccaagtggtacgtggctgacctacaccggtgctatcaagcttgatgacaaggacccgaactttaaagaccaggttattctgcttaacaaacatattgatgcctataaaactttcccgccgaccgaacccaaaaaggacaaaaagaaaaaagctgatgaaacccaggctctaccgcagcgtcagaaaaaacagcaaactgtgactctgctgccagctgcggacctggatgatttttccaagcagctgcaacagtctatgagctctgcggactctacgcaggctggtggttctggtcaccatcatcaccatcattaa

SEQ ID NO: 2736 - DNA, 2421 bp, Artificial Sequence
  Description of Artificial Sequence: Synthetic polynucleotide
atgaaaatcgaagaaggtaaactggtaatctggattaacggcgataaaggctataacggtctcgctgaagtcggtaagaaattcgagaaagataccggaattaaagtcaccgttgagcatccggataaactggaagagaaattcccacaggttgcggcaactggcgatggccctgacattatcttctgggcacacgaccgctttggtggctacgctcaatctggcctgttggctgaaatcaccccggacaaagcgttccaggacaagctgtatccgtttacctgggatgccgtacgttacaacggcaagctgattgcttacccgatcgctgttgaagcgttatcgctgatttataacaaagatctgctgccgaacccgccaaaaacctgggaagagatcccggcgctggataaagaactgaaagcgaaaggtaagagcgcgctgatgttcaacctgcaagaaccgtacttcacctggccgctgattgctgctgacgggggttatgcgttcaagtatgaaaacggcaagtacgacattaaagacgtgggcgtggataacgctggcgcgaaagcgggtctgaccttcctggttgacctgattaaaaacaaacacatgaatgcagacaccgattactccatcgcagaagctgcctttaataaaggcgaaacagcgatgaccatcaacggcccgtgggcatggtccaacatcgacaccagcaaagtgaattatggtgtaacggtactgccgaccttcaagggtcaaccatccaaaccgttcgttggcgtgctgagcgcaggtattaacgccgccagtccgaacaaagagctggcgaaagagttcctcgaaaactatctgctgactgatgaaggtctggaagcggttaataaagacaaaccgctgggtgccgtagcgctgaagtcttacgaggaagagttggcgaaagatccacgtattgccgccaccatggaaaacgcccagaaaggtgaaatcatgccgaacatcccgcagatgtccgctttctggtatgccgtgcgtactgcggtgatcaacgccgccagcggtcgtcagactgtcgatgaagccctgaaagacgcgcagactggtggttctggtgagaacctgtactttcaaagctcagataatgggcctcaaaaccagcgcaacgctccacgtataaccttcggtggcccgtctgactccacaggcagcaaccagaatggtgagcgtagtggagccaggtctaagcagcgccgtccccagggtctgccgaacaacacggcgagctggtttactccgcttacccaatttggtaaagaagacttaaaattcccgccaggccagggcgtcccgatcaacactaactcttccccggatgatcagattggttattaccgcagagcaactcgtcggattcgcggcggcgacggtaaaatgaaagatttgcctccgaaatggtacttttactatctcggcaccggtccgcacgctgatctgccctacgggcaaaagcaagacggggttgtatgggtggctcgaccaggtgccctgaatactccaaaagatcatatcggcacccgtaaccctgctaataacgctgcgatcccgctgcaactgcctccgggtacaaaactgccaaaaggcttctatgcagaagggtcgcgtggtggcagccaggcgagtagccgtagcagctcccgctctcgcaactcgtcccgtaactccactccgggctcttctcgcggcacgtccccggctcgtatggcaggtaacggtggtgacgctgctctggcgctgctactgctggacaggctgaaccagctggagtcgaagatgagtggtaaaggccaacagcagcagggccagaccgttaccaaaaagagcgcagctgaagcatctaaaaaaccgcgacagaaacgtaccgcgactaaagcgtacaatgtaacacaggccttcggtcgtcgaggtccggagcaaactcaaggaaactttggcgatcaggaattaatccgccaggggaccgactacaaacactggccgcaaattgcccagttcgccccatccgctagtgcattcttcggtatgagccgcatcggcatggaagtaacgccaagtggtacgtggctgacctacaccggtgctatcaagcttgatgacaaggacccgaactttaaagaccaggttattctgcttaacaaacatattgatgcctataaaactttcccgccgaccgaacccaaaaaggacaaaaagaaaaaagctgatgaaacccaggctctaccgcagcgtcagaaaaaacagcaaactgtgactctgctgccagctgcggacctggatgatttttccaagcagctgcaacagtctatgagctctgcggactctacgcaggctggtggttctggtcaccatcatcaccatcattaa

SEQ ID NO: 2737 - DNA, 2421 bp, Artificial Sequence
  Description of Artificial Sequence: Synthetic polynucleotide
atgaaaatcgaagaaggtaaactggtaatctggattaacggcgataaaggctataacggtctcgctgaagtcggtaagaaattcgagaaagataccggaattaaagtcaccgttgagcatccggataaactggaagagaaattcccacaggttgcggcaactggcgatggccctgacattatcttctgggcacacgaccgctttggtggctacgctcaatctggcctgttggctgaaatcaccccggacaaagcgttccaggacaagctgtatccgtttacctgggatgccgtacgttacaacggcaagctgattgcttacccgatcgctgttgaagcgttatcgctgatttataacaaagatctgctgccgaacccgccaaaaacctgggaagagatcccggcgctggataaagaactgaaagcgaaaggtaagagcgcgctgatgttcaacctgcaagaaccgtacttcacctggccgctgattgctgctgacgggggttatgcgttcaagtatgaaaacggcaagtacgacattaaagacgtgggcgtggataacgctggcgcgaaagcgggtctgaccttcctggttgacctgattaaaaacaaacacatgaatgcagacaccgattactccatcgcagaagctgcctttaataaaggcgaaacagcgatgaccatcaacggcccgtgggcatggtccaacatcgacaccagcaaagtgaattatggtgtaacggtactgccgaccttcaagggtcaaccatccaaaccgttcgttggcgtgctgagcgcaggtattaacgccgccagtccgaacaaagagctggcgaaagagttcctcgaaaactatctgctgactgatgaaggtctggaagcggttaataaagacaaaccgctgggtgccgtagcgctgaagtcttacgaggaagagttggcgaaagatccacgtattgccgccaccatggaaaacgcccagaaaggtgaaatcatgccgaacatcccgcagatgtccgctttctggtatgccgtgcgtactgcggtgatcaacgccgccagcggtcgtcagactgtcgatgaagccctgaaagacgcgcagactggtggttctggtgagaacctgtactttcaaagctcagataatgggcctcaaaaccagcgcaacgctccacgtataaccttcggtggcccgtctgactccacaggcagcaaccagaatggtgagcgtagtggagccaggtctaagcagcgccgtccccagggtctgccgaacaacacggcgagctggtttactccgcttgtgcaatttggtaaagaagacttaaaattcccgccgggccagggcgtcccgatcaacactaactcttccccggatgatcagattggttattaccgcagagcaactcgtcggattcgcggcggcgacggtaaaatgaaagatttgcctccgaagtggtacttttactatctcggcaccggtccgcatgctgatctgccctacgggcaaaaacaagacggggtattctgggtggctcggccaggtgccctgaatactccaaaagatcatatcggcacccgtaaccctgctaataacgctgcgatccctctgcaactgcctccgggtacaaaactgccaaaaggcttctatgcagaagggtcgcgtggtggcagccaggcgagtagccgtagcagctcccgctctcgcaactcgtcccgtaactccactccgggctcttctcgcggcacgtccccggctcgtatggcaggtaacggtggtgacgctgctctggcgctgctactgctggacaggctgaaccagctggagtcgaagatgagtggtaaaggccaacagcagcagggccagaccgttaccaaaaagagcgcagctgaagcatctaaaaaaccgcgacagaaacgtaccgcgactaaagcgtacaatgtaacacaggccttcggtcgtcgaggtccggagcaaactcaaggaaactttggcgatcaggaattaatccgccaggggaccgactacaaacactggccgcaaattgcccagttcgccccatccgctagtgcattcttcggtatgagccgcatcggcatggaagtaacgccaagtggtacgtggctgacctacaccggtgctatcaagcttgatgacaaggacccgaactttaaagaccaggttattctgcttaacaaacatattgatgcctataaaactttcccgccgaccgaacccaaaaaggacaaaaagaaaaaagctgatgaaacccaggctctaccgcagcgtcagaaaaaacagcaaactgtgactctgctgccagctgcggacctggatgatttttccaagcagctgcaacagtctatgagctctgcggactctacgcaggctggtggttctggtcaccatcatcaccatcattaa

SEQ ID NO: 2738 - DNA, 2421 bp, Artificial Sequence
  Description of Artificial Sequence: Synthetic polynucleotide
atgaaaatcgaagaaggtaaactggtaatctggattaacggcgataaaggctataacggtctcgctgaagtcggtaagaaattcgagaaagataccggaattaaagtcaccgttgagcatccggataaactggaagagaaattcccacaggttgcggcaactggcgatggccctgacattatcttctgggcacacgaccgctttggtggctacgctcaatctggcctgttggctgaaatcaccccggacaaagcgttccaggacaagctgtatccgtttacctgggatgccgtacgttacaacggcaagctgattgcttacccgatcgctgttgaagcgttatcgctgatttataacaaagatctgctgccgaacccgccaaaaacctgggaagagatcccggcgctggataaagaactgaaagcgaaaggtaagagcgcgctgatgttcaacctgcaagaaccgtacttcacctggccgctgattgctgctgacgggggttatgcgttcaagtatgaaaacggcaagtacgacattaaagacgtgggcgtggataacgctggcgcgaaagcgggtctgaccttcctggttgacctgattaaaaacaaacacatgaatgcagacaccgattactccatcgcagaagctgcctttaataaaggcgaaacagcgatgaccatcaacggcccgtgggcatggtccaacatcgacaccagcaaagtgaattatggtgtaacggtactgccgaccttcaagggtcaaccatccaaaccgttcgttggcgtgctgagcgcaggtattaacgccgccagtccgaacaaagagctggcgaaagagttcctcgaaaactatctgctgactgatgaaggtctggaagcggttaataaagacaaaccgctgggtgccgtagcgctgaagtcttacgaggaagagttggcgaaagatccacgtattgccgccaccatggaaaacgcccagaaaggtgaaatcatgccgaacatcccgcagatgtccgctttctggtatgccgtgcgtactgcggtgatcaacgccgccagcggtcgtcagactgtcgatgaagccctgaaagacgcgcagactggtggttctggtgagaacctgtactttcaaagctcagataatgggcctcaaaaccagcgcaacgctccacgtataaccttcggtggcccgtctgactccacaggcagcaaccagaatggtgagcgtagtggagccaggtctaagcagcgccgtccccagggtctgccgaacaacacggcgagctggtttactgcgcttacccaacacggtaaagaagacttaaaattcccgcgtggccagggcgtcccgatcaacactaactcttccccggatgatcagattggttattaccgcagagcaactcgtcggattcgcggcggcgacggtaaaatgaaagatttgtctccgcgttggtacttttactatctcggcaccggtccggaagctggactgccctacggggcaaacaaggacgggatcatttgggtggctatggaaggtgccctgaatactccaaaagatcatatcggcacccgtaaccctgctaataacgctgcgatcgttctgcaactgcctcagggtacaactctgccaaaaggcttctatgcagaagggtcgcgtggtggcagccaggcgagtagccgtagcagctcccgctctcgcaactcgtcccgtaactccactccgggctcttctcgcggcacgtccccggctcgtatggcaggtaacggtggtgacgctgctctggcgctgctactgctggacaggctgaaccagctggagtcgaagatgagtggtaaaggccaacagcagcagggccagaccgttaccaaaaagagcgcagctgaagcatctaaaaaaccgcgacagaaacgtaccgcgactaaagcgtacaatgtaacacaggccttcggtcgtcgaggtccggagcaaactcaaggaaactttggcgatcaggaattaatccgccaggggaccgactacaaacactggccgcaaattgcccagttcgccccatccgctagtgcattcttcggtatgagccgcatcggcatggaagtaacgccaagtggtacgtggctgacctacaccggtgctatcaagcttgatgacaaggacccgaactttaaagaccaggttattctgcttaacaaacatattgatgcctataaaactttcccgccgaccgaacccaaaaaggacaaaaagaaaaaagctgatgaaacccaggctctaccgcagcgtcagaaaaaacagcaaactgtgactctgctgccagctgcggacctggatgatttttccaagcagctgcaacagtctatgagctctgcggactctacgcaggctggtggttctggtcaccatcatcaccatcattaa

SEQ ID NO: 2739 - DNA, 2421 bp, Artificial Sequence
  Description of Artificial Sequence: Synthetic polynucleotide
atgaaaatcgaagaaggtaaactggtaatctggattaacggcgataaaggctataacggtctcgctgaagtcggtaagaaattcgagaaagataccggaattaaagtcaccgttgagcatccggataaactggaagagaaattcccacaggttgcggcaactggcgatggccctgacattatcttctgggcacacgaccgctttggtggctacgctcaatctggcctgttggctgaaatcaccccggacaaagcgttccaggacaagctgtatccgtttacctgggatgccgtacgttacaacggcaagctgattgcttacccgatcgctgttgaagcgttatcgctgatttataacaaagatctgctgccgaacccgccaaaaacctgggaagagatcccggcgctggataaagaactgaaagcgaaaggtaagagcgcgctgatgttcaacctgcaagaaccgtacttcacctggccgctgattgctgctgacgggggttatgcgttcaagtatgaaaacggcaagtacgacattaaagacgtgggcgtggataacgctggcgcgaaagcgggtctgaccttcctggttgacctgattaaaaacaaacacatgaatgcagacaccgattactccatcgcagaagctgcctttaataaaggcgaaacagcgatgaccatcaacggcccgtgggcatggtccaacatcgacaccagcaaagtgaattatggtgtaacggtactgccgaccttcaagggtcaaccatccaaaccgttcgttggcgtgctgagcgcaggtattaacgccgccagtccgaacaaagagctggcgaaagagttcctcgaaaactatctgctgactgatgaaggtctggaagcggttaataaagacaaaccgctgggtgccgtagcgctgaagtcttacgaggaagagttggcgaaagatccacgtattgccgccaccatggaaaacgcccagaaaggtgaaatcatgccgaacatcccgcagatgtccgctttctggtatgccgtgcgtactgcggtgatcaacgccgccagcggtcgtcagactgtcgatgaagccctgaaagacgcgcagactggtggttctggtgagaacctgtactttcaaagctcagataatgggcctcaaaaccagcgcaacgctccacgtataaccttcggtggcccgtctgactccacaggcagcaaccagaatggtgagcgtagtggagccaggtctaagcagcgccgtccccagggtctgccgaacaacacggcgagctggtttactgcgcttacccaacacggtaaagaagacttaaaattcccgcgtggccagggcgtcccgatcaacactaactcttccccggatgatcagattggttattaccgcagagcaactcgtcggattcgcggcggcgacggtaaaatgaaagatttgtctccgcgttggtacttttactatctcggcaccggtccggaagctggactgccctacggggcaaacaaggacgggatcatttgggtggctaccgaaggtgccctgaatactccaaaagatcatatcggcacccgtaaccctgctaataacgctgcgatcgttctgcaactgcctcagggtacaactctgccaaaaggcttctatgcagaagggtcgcgtggtggcagccaggcgagtagccgtagcagctcccgctctcgcaactcgtcccgtaactccactccgggctcttctcgcggcacgtccccggctcgtatggcaggtaacggtggtgacgctgctctggcgctgctactgctggacaggctgaaccagctggagtcgaagatgagtggtaaaggccaacagcagcagggccagaccgttaccaaaaagagcgcagctgaagcatctaaaaaaccgcgacagaaacgtaccgcgactaaagcgtacaatgtaacacaggccttcggtcgtcgaggtccggagcaaactcaaggaaactttggcgatcaggaattaatccgccaggggaccgactacaaacactggccgcaaattgcccagttcgccccatccgctagtgcattcttcggtatgagccgcatcggcatggaatgtacgccaagtggtacgtggctgacctacaccggtgctatcaagcttgatgacaaggacccgaactttaaagaccaggttattctgcttaacaaacatattgatgcctataaaactttcccgccgaccgaacccaaaaaggacaaaaagaaaaaagctgatgaaacccaggctctaccgcagcgtcagaaaaaacagcaaactgtgactctgctgccagctgcggacctggatgatttttccaagcagctgcaacagtctatgagctctgcggactctacgcaggctggtggttctggtcaccatcatcaccatcattaa

SEQ ID NO: 2740 - DNA, 2421 bp, Artificial Sequence
  Description of Artificial Sequence: Synthetic polynucleotide
atgaaaatcgaagaaggtaaactggtaatctggattaacggcgataaaggctataacggtctcgctgaagtcggtaagaaattcgagaaagataccggaattaaagtcaccgttgagcatccggataaactggaagagaaattcccacaggttgcggcaactggcgatggccctgacattatcttctgggcacacgaccgctttggtggctacgctcaatctggcctgttggctgaaatcaccccggacaaagcgttccaggacaagctgtatccgtttacctgggatgccgtacgttacaacggcaagctgattgcttacccgatcgctgttgaagcgttatcgctgatttataacaaagatctgctgccgaacccgccaaaaacctgggaagagatcccggcgctggataaagaactgaaagcgaaaggtaagagcgcgctgatgttcaacctgcaagaaccgtacttcacctggccgctgattgctgctgacgggggttatgcgttcaagtatgaaaacggcaagtacgacattaaagacgtgggcgtggataacgctggcgcgaaagcgggtctgaccttcctggttgacctgattaaaaacaaacacatgaatgcagacaccgattactccatcgcagaagctgcctttaataaaggcgaaacagcgatgaccatcaacggcccgtgggcatggtccaacatcgacaccagcaaagtgaattatggtgtaacggtactgccgaccttcaagggtcaaccatccaaaccgttcgttggcgtgctgagcgcaggtattaacgccgccagtccgaacaaagagctggcgaaagagttcctcgaaaactatctgctgactgatgaaggtctggaagcggttaataaagacaaaccgctgggtgccgtagcgctgaagtcttacgaggaagagttggcgaaagatccacgtattgccgccaccatggaaaacgcccagaaaggtgaaatcatgccgaacatcccgcagatgtccgctttctggtatgccgtgcgtactgcggtgatcaacgccgccagcggtcgtcagactgtcgatgaagccctgaaagacgcgcagactggtggttctggtgagaacctgtactttcaaagctcagataatgggcctcaaaaccagcgcaacgctccacgtataaccttcggtggcccgtctgactccacaggcagcaaccagaatggtgagcgtagtggagccaggtctaagcagcgccgtccccagggtctgccgaacaacacggcgagctggtttactgcgcttacccaacacggtaaagaagacttaaaattcccgcgtggccagggcgtcccgatcaacactaactcttccccggatgatcagattggttattaccgcagagcaactcgtcggattcgcggcggcgacggtaaaatgaaagatttgtctccgcgttggtacttttactatctcggcaccggtccggaagctggactgccctacggggcaaacaaggacgggatcatttgggtggctaccgaaggtgccctgaatactccaaaagatcatatcggcacccgtaaccctgctaataacgctgcgatcgttctgcaactgcctcagggtacaactctgccaaaaggcttctatgcagaagggtcgcgtggtggcagccaggcgagtagccgtagcagctcccgctctcgcaactcgtcccgtaactccactccgggctcttctcgcggcacgtccccggctcgtatggcaggtaacggtggtgacgctgctctggcgctgctactgctggacaggctgaaccagctggagtcgaagatgagtggtaaaggccaacagcagcagggccagaccgttaccaaaaagagcgcagctgaagcatctaaaaaaccgcgacagaaacgtaccgcgactaaagcgtacaatgtaacacaggccttcggtcgtcgaggtccggagcaaactcaaggaaactttggcgatcaggaattaatccgccaggggaccgactacaaacactggccgcaaattgcccagttcgccccatccgctagtgcattcttcggtatgagccgcatcggcatggaagtaacgccaagtggtacgtggctgacctacaccggtgctatcaagcttgatgacaaggacccgaactttttggaccaggttattctgcttaacaaacatattgatgcctataaaactttcccgccgaccgaacccaaaaaggacaaaaagaaaaaagctgatgaaacccaggctctaccgcagcgtcagaaaaaacagcaaactgtgactctgctgccagctgcggacctggatgatttttccaagcagctgcaacagtctatgagctctgcggactctacgcaggctggtggttctggtcaccatcatcaccatcattaa

SEQ ID NO: 2741 - DNA, 2421 bp, Artificial Sequence
  Description of Artificial Sequence: Synthetic polynucleotide
atgaaaatcgaagaaggtaaactggtaatctggattaacggcgataaaggctataacggtctcgctgaagtcggtaagaaattcgagaaagataccggaattaaagtcaccgttgagcatccggataaactggaagagaaattcccacaggttgcggcaactggcgatggccctgacattatcttctgggcacacgaccgctttggtggctacgctcaatctggcctgttggctgaaatcaccccggacaaagcgttccaggacaagctgtatccgtttacctgggatgccgtacgttacaacggcaagctgattgcttacccgatcgctgttgaagcgttatcgctgatttataacaaagatctgctgccgaacccgccaaaaacctgggaagagatcccggcgctggataaagaactgaaagcgaaaggtaagagcgcgctgatgttcaacctgcaagaaccgtacttcacctggccgctgattgctgctgacgggggttatgcgttcaagtatgaaaacggcaagtacgacattaaagacgtgggcgtggataacgctggcgcgaaagcgggtctgaccttcctggttgacctgattaaaaacaaacacatgaatgcagacaccgattactccatcgcagaagctgcctttaataaaggcgaaacagcgatgaccatcaacggcccgtgggcatggtccaacatcgacaccagcaaagtgaattatggtgtaacggtactgccgaccttcaagggtcaaccatccaaaccgttcgttggcgtgctgagcgcaggtattaacgccgccagtccgaacaaagagctggcgaaagagttcctcgaaaactatctgctgactgatgaaggtctggaagcggttaataaagacaaaccgctgggtgccgtagcgctgaagtcttacgaggaagagttggcgaaagatccacgtattgccgccaccatggaaaacgcccagaaaggtgaaatcatgccgaacatcccgcagatgtccgctttctggtatgccgtgcgtactgcggtgatcaacgccgccagcggtcgtcagactgtcgatgaagccctgaaagacgcgcagactggtggttctggtgagaacctgtactttcaaagctcagataatgggcctcaaaaccagcgcaacgctccacgtataaccttcggtggcccgtctgactccacaggcagcaaccagaatggtgagcgtagtggagccaggtctaagcagcgccgtccccagggtctgccgaacaacacggcgagctggtttactgcgcttacccaacacggtaaagaagacttaaaattcccgcgtggccagggcgtcccgatcaacactaactcttccccggatgatcagattggttattaccgcagagcaactcgtcggattcgcggcggcgacggtaaaatgaaagatttgtctccgcgttggtacttttactatctcggcaccggtccggaagctggactgccctacggggcagtgaaggacgggatcatttgggtggctaccgaaggtgccctgaatactccaaaagatcatatcggcacccgtaaccctgctaataacgctgcgatcgttctgcaactgcctcagggtacaactctgccaaaaggcttctatgcagaagggtcgcgtggtggcagccaggcgagtagccgtagcagctcccgctctcgcaactcgtcccgtaactccactccgggctcttctcgcggcacgtccccggctcgtatggcaggtaacggtggtgacgctgctctggcgctgctactgctggacaggctgaaccagctggagtcgaagatgagtggtaaaggccaacagcagcagggccagaccgttaccaaaaagagcgcagctgaagcatctaaaaaaccgcgacagaaacgtaccgcgactaaagcgtacaatgtaacacaggccttcggtcgtcgaggtccggagcaaactcaaggaaactttggcgatcaggaattaatccgccaggggaccgactacaaacactggccgcaaattgcccagttcgccccatccgctagtgcattcttcggtatgagccgcatcggcatggaagtaacgccaagtggtacgtggctgacctacaccggtgctatcaagcttgatgacaaggacccgaactttaaagaccaggttattctgcttaacaaacatattgatgcctataaaactttcccgccgaccgaacccaaaaaggacaaaaagaaaaaagctgatgaaacccaggctctaccgcagcgtcagaaaaaacagcaaactgtgactctgctgccagctgcggacctggatgatttttccaagcagctgcaacagtctatgagctctgcggactctacgcaggctggtggttctggtcaccatcatcaccatcattaa

SEQ ID NO: 2742 - DNA, 2421 bp, Artificial Sequence
  Description of Artificial Sequence: Synthetic polynucleotide
atgaaaatcgaagaaggtaaactggtaatctggattaacggcgataaaggctataacggtctcgctgaagtcggtaagaaattcgagaaagataccggaattaaagtcaccgttgagcatccggataaactggaagagaaattcccacaggttgcggcaactggcgatggccctgacattatcttctgggcacacgaccgctttggtggctacgctcaatctggcctgttggctgaaatcaccccggacaaagcgttccaggacaagctgtatccgtttacctgggatgccgtacgttacaacggcaagctgattgcttacccgatcgctgttgaagcgttatcgctgatttataacaaagatctgctgccgaacccgccaaaaacctgggaagagatcccggcgctggataaagaactgaaagcgaaaggtaagagcgcgctgatgttcaacctgcaagaaccgtacttcacctggccgctgattgctgctgacgggggttatgcgttcaagtatgaaaacggcaagtacgacattaaagacgtgggcgtggataacgctggcgcgaaagcgggtctgaccttcctggttgacctgattaaaaacaaacacatgaatgcagacaccgattactccatcgcagaagctgcctttaataaaggcgaaacagcgatgaccatcaacggcccgtgggcatggtccaacatcgacaccagcaaagtgaattatggtgtaacggtactgccgaccttcaagggtcaaccatccaaaccgttcgttggcgtgctgagcgcaggtattaacgccgccagtccgaacaaagagctggcgaaagagttcctcgaaaactatctgctgactgatgaaggtctggaagcggttaataaagacaaaccgctgggtgccgtagcgctgaagtcttacgaggaagagttggcgaaagatccacgtattgccgccaccatggaaaacgcccagaaaggtgaaatcatgccgaacatcccgcagatgtccgctttctggtatgccgtgcgtactgcggtgatcaacgccgccagcggtcgtcagactgtcgatgaagccctgaaagacgcgcagactggtggttctggtgagaacctgtactttcaaagctcagataatgggcctcaaaaccagcgcaacgctccacgtataaccttcggtggcccgtctgactccacaggcagcaaccagaatggtgagcgtagtggagccaggtctaagcagcgccgtccccagggtctgccgaacaacacggcgagctggtttactgcgcttacccaacacggtaaagaagacttaaaattcccgcgtggccagggcgtcccgatcaacactaactcttccccggatgatcagattggttattaccgcagagcaactcgtcggattcgcggcggcgacggtaaaatgaaagatttgtctccggcgtggtacttttactatctcggcaccggtccggaagctggactgccctacggggcaaacaaggacgggatcatttgggtggctaccgaaggtgccctgaatactccaaaagatcatatcggcacccgtaaccctgctaataacgctgcgatcgttctgcaactgcctcagggtacaactctgccaaaaggcttctatgcagaagggtcgcgtggtggcagccaggcgagtagccgtagcagctcccgctctcgcaactcgtcccgtaactccactccgggctcttctcgcggcacgtccccggctcgtatggcaggtaacggtggtgacgctgctctggcgctgctactgctggacaggctgaaccagctggagtcgaagatgagtggtaaaggccaacagcagcagggccagaccgttaccaaaaagagcgcagctgaagcatctaaaaaaccgcgacagaaacgtaccgcgactaaagcgtacaatgtaacacaggccttcggtcgtcgaggtccggagcaaactcaaggaaactttggcgatcaggaattaatccgccaggggaccgactacaaacactggccgcaaattgcccagttcgccccatccgctagtgcattcttcggtatgagccgcatcggcatggaagtaacgccaagtggtacgtggctgacctacaccggtgctatcaagcttgatgacaaggacccgaactttaaagaccaggttattctgcttaacaaacatattgatgcctataaaactttcccgccgaccgaacccaaaaaggacaaaaagaaaaaagctgatgaaacccaggctctaccgcagcgtcagaaaaaacagcaaactgtgactctgctgccagctgcggacctggatgatttttccaagcagctgcaacagtctatgagctctgcggactctacgcaggctggtggttctggtcaccatcatcaccatcattaa

SEQ ID NO: 2743 - DNA, 2421 bp, Artificial Sequence
  Description of Artificial Sequence: Synthetic polynucleotide
atgaaaatcgaagaaggtaaactggtaatctggattaacggcgataaaggctataacggtctcgctgaagtcggtaagaaattcgagaaagataccggaattaaagtcaccgttgagcatccggataaactggaagagaaattcccacaggttgcggcaactggcgatggccctgacattatcttctgggcacacgaccgctttggtggctacgctcaatctggcctgttggctgaaatcaccccggacaaagcgttccaggacaagctgtatccgtttacctgggatgccgtacgttacaacggcaagctgattgcttacccgatcgctgttgaagcgttatcgctgatttataacaaagatctgctgccgaacccgccaaaaacctgggaagagatcccggcgctggataaagaactgaaagcgaaaggtaagagcgcgctgatgttcaacctgcaagaaccgtacttcacctggccgctgattgctgctgacgggggttatgcgttcaagtatgaaaacggcaagtacgacattaaagacgtgggcgtggataacgctggcgcgaaagcgggtctgaccttcctggttgacctgattaaaaacaaacacatgaatgcagacaccgattactccatcgcagaagctgcctttaataaaggcgaaacagcgatgaccatcaacggcccgtgggcatggtccaacatcgacaccagcaaagtgaattatggtgtaacggtactgccgaccttcaagggtcaaccatccaaaccgttcgttggcgtgctgagcgcaggtattaacgccgccagtccgaacaaagagctggcgaaagagttcctcgaaaactatctgctgactgatgaaggtctggaagcggttaataaagacaaaccgctgggtgccgtagcgctgaagtcttacgaggaagagttggcgaaagatccacgtattgccgccaccatggaaaacgcccagaaaggtgaaatcatgccgaacatcccgcagatgtccgctttctggtatgccgtgcgtactgcggtgatcaacgccgccagcggtcgtcagactgtcgatgaagccctgaaagacgcgcagactggtggttctggtgagaacctgtactttcaaagctcagataatgggcctcaaaaccagcgcaacgctccacgtataaccttcggtggcccgtctgactccacaggcagcaaccagaatggtgagcgtagtggagccaggtctaagcagcgccgtccccagggtctgccgaacaacacggcgagctggtttactgcgcttacccaacacggtaaagaagacttaaaattcccgcgtggccagggcgtcccgatcaacactaactcttccccggatgatcagattggttattaccgcagagcaactcgtcggattcgcggcggcgacggtaaaatgaaagatttgtctccgcgttggtacttttactatctcggcaccggtccggaagctggactgccctacggggcaaacaaggacgggatcatttgggtggctaccgaaggtgccctgaatactccaaaagatcatatcggcacccgtaaccctgctaataacgctgcgtgtgttctgcaactgcctcagggtacaactctgccaaaaggcttctatgcagaagggtcgcgtggtggcagccaggcgagtagccgtagcagctcccgctctcgcaactcgtcccgtaactccactccgggctcttctcgcggcacgtccccggctcgtatggcaggtaacggtggtgacgctgctctggcgctgctactgctggacaggctgaaccagctggagtcgaagatgagtggtaaaggccaacagcagcagggccagaccgttaccaaaaagagcgcagctgaagcatctaaaaaaccgcgacagaaacgtaccgcgactaaagcgtacaatgtaacacaggccttcggtcgtcgaggtccggagcaaactcaaggaaactttggcgatcaggaattaatccgccaggggaccgactacaaacactggccgcaaattgcccagttcgccccatccgctagtgcattcttcggtatgagccgcatcggcatggaagtaacgccaagtggtacgtggctgacctacaccggtgctatcaagcttgatgacaaggacccgaactttaaagaccaggttattctgcttaacaaacatattgatgcctataaaactttcccgccgaccgaacccaaaaaggacaaaaagaaaaaagctgatgaaacccaggctctaccgcagcgtcagaaaaaacagcaaactgtgactctgctgccagctgcggacctggatgatttttccaagcagctgcaacagtctatgagctctgcggactctacgcaggctggtggttctggtcaccatcatcaccatcattaa

SEQ ID NO: 2744 - DNA, 2421 bp, Artificial Sequence
  Description of Artificial Sequence: Synthetic polynucleotide
atgaaaatcgaagaaggtaaactggtaatctggattaacggcgataaaggctataacggtctcgctgaagtcggtaagaaattcgagaaagataccggaattaaagtcaccgttgagcatccggataaactggaagagaaattcccacaggttgcggcaactggcgatggccctgacattatcttctgggcacacgaccgctttggtggctacgctcaatctggcctgttggctgaaatcaccccggacaaagcgttccaggacaagctgtatccgtttacctgggatgccgtacgttacaacggcaagctgattgcttacccgatcgctgttgaagcgttatcgctgatttataacaaagatctgctgccgaacccgccaaaaacctgggaagagatcccggcgctggataaagaactgaaagcgaaaggtaagagcgcgctgatgttcaacctgcaagaaccgtacttcacctggccgctgattgctgctgacgggggttatgcgttcaagtatgaaaacggcaagtacgacattaaagacgtgggcgtggataacgctggcgcgaaagcgggtctgaccttcctggttgacctgattaaaaacaaacacatgaatgcagacaccgattactccatcgcagaagctgcctttaataaaggcgaaacagcgatgaccatcaacggcccgtgggcatggtccaacatcgacaccagcaaagtgaattatggtgtaacggtactgccgaccttcaagggtcaaccatccaaaccgttcgttggcgtgctgagcgcaggtattaacgccgccagtccgaacaaagagctggcgaaagagttcctcgaaaactatctgctgactgatgaaggtctggaagcggttaataaagacaaaccgctgggtgccgtagcgctgaagtcttacgaggaagagttggcgaaagatccacgtattgccgccaccatggaaaacgcccagaaaggtgaaatcatgccgaacatcccgcagatgtccgctttctggtatgccgtgcgtactgcggtgatcaacgccgccagcggtcgtcagactgtcgatgaagccctgaaagacgcgcagactggtggttctggtgagaacctgtactttcaaagctcagataatgggcctcaaaaccagcgcaacgctccacgtataaccttcggtggcccgtctgactccacaggcagcaaccagaatggtgagcgtagtggagccaggtctaagcagcgccgtccccagggtctgccgaacaacacggcgagctggtttactggccttgtacaatttggtaaagaagacttaaaattcccgcccggccagggcgtcccgatcaacactaactcttccccggatgatcagattggttattaccgcagagcaactcgtcggattcgcggcggcgacggtaaaatgaaagatttgccaccgaagtggtacttttactatctcggcaccggtccgcatgctgatctgccctacgggcaaaaacaagacggggtgttctgggtggctcgtcctggtgccctgaatactccaaaagatcatatcggcacccgtaaccctgctaataacgctgcgatcccgctgcaactgcctccgggtacaaaactgccaaaaggcttctatgcagaagggtcgcgtggtggcagccaggcgagtagccgtagcagctcccgctctcgcaactcgtcccgtaactccactccgggctcttctcgcggcacgtccccggctcgtatggcaggtaacggtggtgacgctgctctggcgctgctactgctggacaggctgaaccagctggagtcgaagatgagtggtaaaggccaacagcagcagggccagaccgttaccaaaaagagcgcagctgaagcatctaaaaaaccgcgacagaaacgtaccgcgactaaagcgtacaatgtaacacaggccttcggtcgtcgaggtccggagcaaactcaaggaaactttggcgatcaggaattaatccgccaggggaccgactacaaacactggccgcaaattgcccagttcgccccatccgctagtgcattcttcggtatgagccgcatcggcatggaagtaacgccaagtggtacgtggctgacctacaccggtgctatcaagcttgatgacaaggacccgaactttaaagaccaggttattctgcttaacaaacatattgatgcctataaaactttcccgccgaccgaacccaaaaaggacaaaaagaaaaaagctgatgaaacccaggctctaccgcagcgtcagaaaaaacagcaaactgtgactctgctgccagctgcggacctggatgatttttccaagcagctgcaacagtctatgagctctgcggactctacgcaggctggtggttctggtcaccatcatcaccatcattaa

SEQ ID NO: 2745 - DNA, 2421 bp, Artificial Sequence
  Description of Artificial Sequence: Synthetic polynucleotide
atgaaaatcgaagaaggtaaactggtaatctggattaacggcgataaaggctataacggtctcgctgaagtcggtaagaaattcgagaaagataccggaattaaagtcaccgttgagcatccggataaactggaagagaaattcccacaggttgcggcaactggcgatggccctgacattatcttctgggcacacgaccgctttggtggctacgctcaatctggcctgttggctgaaatcaccccggacaaagcgttccaggacaagctgtatccgtttacctgggatgccgtacgttacaacggcaagctgattgcttacccgatcgctgttgaagcgttatcgctgatttataacaaagatctgctgccgaacccgccaaaaacctgggaagagatcccggcgctggataaagaactgaaagcgaaaggtaagagcgcgctgatgttcaacctgcaagaaccgtacttcacctggccgctgattgctgctgacgggggttatgcgttcaagtatgaaaacggcaagtacgacattaaagacgtgggcgtggataacgctggcgcgaaagcgggtctgaccttcctggttgacctgattaaaaacaaacacatgaatgcagacaccgattactccatcgcagaagctgcctttaataaaggcgaaacagcgatgaccatcaacggcccgtgggcatggtccaacatcgacaccagcaaagtgaattatggtgtaacggtactgccgaccttcaagggtcaaccatccaaaccgttcgttggcgtgctgagcgcaggtattaacgccgccagtccgaacaaagagctggcgaaagagttcctcgaaaactatctgctgactgatgaaggtctggaagcggttaataaagacaaaccgctgggtgccgtagcgctgaagtcttacgaggaagagttggcgaaagatccacgtattgccgccaccatggaaaacgcccagaaaggtgaaatcatgccgaacatcccgcagatgtccgctttctggtatgccgtgcgtactgcggtgatcaacgccgccagcggtcgtcagactgtcgatgaagccctgaaagacgcgcagactggtggttctggtgagaacctgtactttcaaagctcagataatgggcctcaaaaccagcgcaacgctccacgtataaccttcggtggcccgtctgactccacaggcagcaaccagaatggtgagcgtagtggagccaggtctaagcagcgccgtccccagggtctgccgaacaacacggcgagctggtttactgcgcttacccaacacggtaaagaagacttaaaattcccgcgtggccagggcgtcccgatcaacactaactcttccccggatgatcagattggttattaccgcagagcaactcgtcggattcgcggcggcgacggtaaaatgaaagatttgtctccgcgttggtacttttactatctcggcaccggtccggaagctggactgccctacggggcaaacaaggacgggatcatttgggtggctaccgaaggtgccctgaatactccaaaagatcatatcggcacccgtaaccctgctaataacgctgcgatggttctgcaactgcctcagggtacaactctgccaaaaggcttctatgcagaagggtcgcgtggtggcagccaggcgagtagccgtagcagctcccgctctcgcaactcgtcccgtaactccactccgggctcttctcgcggcacgtccccggctcgtatggcaggtaacggtggtgacgctgctctggcgctgctactgctggacaggctgaaccagctggagtcgaagatgagtggtaaaggccaacagcagcagggccagaccgttaccaaaaagagcgcagctgaagcatctaaaaaaccgcgacagaaacgtaccgcgactaaagcgtacaatgtaacacaggccttcggtcgtcgaggtccggagcaaactcaaggaaactttggcgatcaggaattaatccgccaggggaccgactacaaacactggccgcaaattgcccagttcgccccatccgctagtgcattcttcggtatgagccgcatcggcatggaagtaacgccaagtggtacgtggctgacctacaccggtgctatcaagcttgatgacaaggacccgaactttaaagaccaggttattctgcttaacaaacatattgatgcctataaaactttcccgccgaccgaacccaaaaaggacaaaaagaaaaaagctgatgaaacccaggctctaccgcagcgtcagaaaaaacagcaaactgtgactctgctgccagctgcggacctggatgatttttccaagcagctgcaacagtctatgagctctgcggactctacgcaggctggtggttctggtcaccatcatcaccatcattaa

SEQ ID NO: 2746 - DNA, 2421 bp, Artificial Sequence
  Description of Artificial Sequence: Synthetic polynucleotide
atgaaaatcgaagaaggtaaactggtaatctggattaacggcgataaaggctataacggtctcgctgaagtcggtaagaaattcgagaaagataccggaattaaagtcaccgttgagcatccggataaactggaagagaaattcccacaggttgcggcaactggcgatggccctgacattatcttctgggcacacgaccgctttggtggctacgctcaatctggcctgttggctgaaatcaccccggacaaagcgttccaggacaagctgtatccgtttacctgggatgccgtacgttacaacggcaagctgattgcttacccgatcgctgttgaagcgttatcgctgatttataacaaagatctgctgccgaacccgccaaaaacctgggaagagatcccggcgctggataaagaactgaaagcgaaaggtaagagcgcgctgatgttcaacctgcaagaaccgtacttcacctggccgctgattgctgctgacgggggttatgcgttcaagtatgaaaacggcaagtacgacattaaagacgtgggcgtggataacgctggcgcgaaagcgggtctgaccttcctggttgacctgattaaaaacaaacacatgaatgcagacaccgattactccatcgcagaagctgcctttaataaaggcgaaacagcgatgaccatcaacggcccgtgggcatggtccaacatcgacaccagcaaagtgaattatggtgtaacggtactgccgaccttcaagggtcaaccatccaaaccgttcgttggcgtgctgagcgcaggtattaacgccgccagtccgaacaaagagctggcgaaagagttcctcgaaaactatctgctgactgatgaaggtctggaagcggttaataaagacaaaccgctgggtgccgtagcgctgaagtcttacgaggaagagttggcgaaagatccacgtattgccgccaccatggaaaacgcccagaaaggtgaaatcatgccgaacatcccgcagatgtccgctttctggtatgccgtgcgtactgcggtgatcaacgccgccagcggtcgtcagactgtcgatgaagccctgaaagacgcgcagactggtggttctggtgagaacctgtactttcaaagctcagataatgggcctcaaaaccagcgcaacgctccacgtataaccttcggtggcccgtctgactccacaggcagcaaccagaatggtgagcgtagtggagccaggtctaagcagcgccgtccccagggtctgccgaacaacacggcgagctggtttactgcgcttacccaacacggtaaagaagacttaaaattcccgcgtggccagggcgtcccgatcaacactaactcttccccggatgatcagattggttattaccgcagagcaactcgtcggattcgcggcggcgacggtaaaatgaaagatttgtctccgcgttggtacttttactatctcggcaccggtccggaagctggactgccctacggggcaaacaaggacgggatcatttgggtggctaccgaaggtgccctgaatactccaaaaggccatatcggcacccgtaaccctgctaataacgctgcgatcgttctgcaactgcctcagggtacaactctgccaaaaggcttctatgcagaagggtcgcgtggtggcagccaggcgagtagccgtagcagctcccgctctcgcaactcgtcccgtaactccactccgggctcttctcgcggcacgtccccggctcgtatggcaggtaacggtggtgacgctgctctggcgctgctactgctggacaggctgaaccagctggagtcgaagatgagtggtaaaggccaacagcagcagggccagaccgttaccaaaaagagcgcagctgaagcatctaaaaaaccgcgacagaaacgtaccgcgactaaagcgtacaatgtaacacaggccttcggtcgtcgaggtccggagcaaactcaaggaaactttggcgatcaggaattaatccgccaggggaccgactacaaacactggccgcaaattgcccagttcgccccatccgctagtgcattcttcggtatgagccgcatcggcatggaagtaacgccaagtggtacgtggctgacctacaccggtgctatcaagcttgatgacaaggacccgaactttaaagaccaggttattctgcttaacaaacatattgatgcctataaaactttcccgccgaccgaacccaaaaaggacaaaaagaaaaaagctgatgaaacccaggctctaccgcagcgtcagaaaaaacagcaaactgtgactctgctgccagctgcggacctggatgatttttccaagcagctgcaacagtctatgagctctgcggactctacgcaggctggtggttctggtcaccatcatcaccatcattaa

SEQ ID NO: 2747 - DNA, 2421 bp, Artificial Sequence
  Description of Artificial Sequence: Synthetic polynucleotide
atgaaaatcgaagaaggtaaactggtaatctggattaacggcgataaaggctataacggtctcgctgaagtcggtaagaaattcgagaaagataccggaattaaagtcaccgttgagcatccggataaactggaagagaaattcccacaggttgcggcaactggcgatggccctgacattatcttctgggcacacgaccgctttggtggctacgctcaatctggcctgttggctgaaatcaccccggacaaagcgttccaggacaagctgtatccgtttacctgggatgccgtacgttacaacggcaagctgattgcttacccgatcgctgttgaagcgttatcgctgatttataacaaagatctgctgccgaacccgccaaaaacctgggaagagatcccggcgctggataaagaactgaaagcgaaaggtaagagcgcgctgatgttcaacctgcaagaaccgtacttcacctggccgctgattgctgctgacgggggttatgcgttcaagtatgaaaacggcaagtacgacattaaagacgtgggcgtggataacgctggcgcgaaagcgggtctgaccttcctggttgacctgattaaaaacaaacacatgaatgcagacaccgattactccatcgcagaagctgcctttaataaaggcgaaacagcgatgaccatcaacggcccgtgggcatggtccaacatcgacaccagcaaagtgaattatggtgtaacggtactgccgaccttcaagggtcaaccatccaaaccgttcgttggcgtgctgagcgcaggtattaacgccgccagtccgaacaaagagctggcgaaagagttcctcgaaaactatctgctgactgatgaaggtctggaagcggttaataaagacaaaccgctgggtgccgtagcgctgaagtcttacgaggaagagttggcgaaagatccacgtattgccgccaccatggaaaacgcccagaaaggtgaaatcatgccgaacatcccgcagatgtccgctttctggtatgccgtgcgtactgcggtgatcaacgccgccagcggtcgtcagactgtcgatgaagccctgaaagacgcgcagactggtggttctggtgagaacctgtactttcaaagctcagataatgggcctcaaaaccagcgcaacgctccacgtataaccttcggtggcccgtctgactccacaggcagcaaccagaatggtgagcgtagtggagccaggtctaagcagcgccgtccccagggtctgccgaacaacacggcgagctggtttactgcgcttacccaacacggtaaagaagacttaaaattcccgcgtggccagggcgtcccgatcaacactaactcttccccggatgatcagattggttattaccgcagacgcactcgtcggattcgcggcggcgacggtaaaatgaaagatttgtctccgcgttggtacttttactatctcggcaccggtccggaagctggactgccctacggggcaaacaaggacgggatcatttgggtggctaccgaaggtgccctgaatactccaaaagatcatatcggcacccgtaaccctgctaataacgctgcgatcgttctgcaactgcctcagggtacaactctgccaaaaggcttctatgcagaagggtcgcgtggtggcagccaggcgagtagccgtagcagctcccgctctcgcaactcgtcccgtaactccactccgggctcttctcgcggcacgtccccggctcgtatggcaggtaacggtggtgacgctgctctggcgctgctactgctggacaggctgaaccagctggagtcgaagatgagtggtaaaggccaacagcagcagggccagaccgttaccaaaaagagcgcagctgaagcatctaaaaaaccgcgacagaaacgtaccgcgactaaagcgtacaatgtaacacaggccttcggtcgtcgaggtccggagcaaactcaaggaaactttggcgatcaggaattaatccgccaggggaccgactacaaacactggccgcaaattgcccagttcgccccatccgctagtgcattcttcggtatgagccgcatcggcatggaagtaacgccaagtggtacgtggctgacctacaccggtgctatcaagcttgatgacaaggacccgaactttaaagaccaggttattctgcttaacaaacatattgatgcctataaaactttcccgccgaccgaacccaaaaaggacaaaaagaaaaaagctgatgaaacccaggctctaccgcagcgtcagaaaaaacagcaaactgtgactctgctgccagctgcggacctggatgatttttccaagcagctgcaacagtctatgagctctgcggactctacgcaggctggtggttctggtcaccatcatcaccatcattaa

SEQ ID NO: 2748 - DNA, 2421 bp, Artificial Sequence
  Description of Artificial Sequence: Synthetic polynucleotide
atgaaaatcgaagaaggtaaactggtaatctggattaacggcgataaaggctataacggtctcgctgaagtcggtaagaaattcgagaaagataccggaattaaagtcaccgttgagcatccggataaactggaagagaaattcccacaggttgcggcaactggcgatggccctgacattatcttctgggcacacgaccgctttggtggctacgctcaatctggcctgttggctgaaatcaccccggacaaagcgttccaggacaagctgtatccgtttacctgggatgccgtacgttacaacggcaagctgattgcttacccgatcgctgttgaagcgttatcgctgatttataacaaagatctgctgccgaacccgccaaaaacctgggaagagatcccggcgctggataaagaactgaaagcgaaaggtaagagcgcgctgatgttcaacctgcaagaaccgtacttcacctggccgctgattgctgctgacgggggttatgcgttcaagtatgaaaacggcaagtacgacattaaagacgtgggcgtggataacgctggcgcgaaagcgggtctgaccttcctggttgacctgattaaaaacaaacacatgaatgcagacaccgattactccatcgcagaagctgcctttaataaaggcgaaacagcgatgaccatcaacggcccgtgggcatggtccaacatcgacaccagcaaagtgaattatggtgtaacggtactgccgaccttcaagggtcaaccatccaaaccgttcgttggcgtgctgagcgcaggtattaacgccgccagtccgaacaaagagctggcgaaagagttcctcgaaaactatctgctgactgatgaaggtctggaagcggttaataaagacaaaccgctgggtgccgtagcgctgaagtcttacgaggaagagttggcgaaagatccacgtattgccgccaccatggaaaacgcccagaaaggtgaaatcatgccgaacatcccgcagatgtccgctttctggtatgccgtgcgtactgcggtgatcaacgccgccagcggtcgtcagactgtcgatgaagccctgaaagacgcgcagactggtggttctggtgagaacctgtactttcaaagctcagataatgggcctcaaaaccagcgcaacgctccacgtataaccttcggtggcccgtctgactccacaggcagcaaccagaatggtgagcgtagtggagccaggtctaagcagcgccgtccccagggtctgccgaacaacacggcgagctggtttactgcgcttacccaacacggtaaagaagacttaaaattcccgcgtggccagggcgtcccgatcaacactaactcttccccggatgatcagattggttattaccgcagagcaactcgtcggattcgcggcggcgacggtaaaatgaaagatttgtctccgcgttggtacttttactatctcggcaccggtccggaagctggactgccctacggggcaaacaaggacgggatcatttgggtggctaccgaaggtgccctgaatactccaaaagatcatatcggcgttcgtaaccctgctaataacgctgcgatcgttctgcaactgcctcagggtacaactctgccaaaaggcttctatgcagaagggtcgcgtggtggcagccaggcgagtagccgtagcagctcccgctctcgcaactcgtcccgtaactccactccgggctcttctcgcggcacgtccccggctcgtatggcaggtaacggtggtgacgctgctctggcgctgctactgctggacaggctgaaccagctggagtcgaagatgagtggtaaaggccaacagcagcagggccagaccgttaccaaaaagagcgcagctgaagcatctaaaaaaccgcgacagaaacgtaccgcgactaaagcgtacaatgtaacacaggccttcggtcgtcgaggtccggagcaaactcaaggaaactttggcgatcaggaattaatccgccaggggaccgactacaaacactggccgcaaattgcccagttcgccccatccgctagtgcattcttcggtatgagccgcatcggcatggaagtaacgccaagtggtacgtggctgacctacaccggtgctatcaagcttgatgacaaggacccgaactttaaagaccaggttattctgcttaacaaacatattgatgcctataaaactttcccgccgaccgaacccaaaaaggacaaaaagaaaaaagctgatgaaacccaggctctaccgcagcgtcagaaaaaacagcaaactgtgactctgctgccagctgcggacctggatgatttttccaagcagctgcaacagtctatgagctctgcggactctacgcaggctggtggttctggtcaccatcatcaccatcattaa

SEQ ID NO: 2749 - DNA, 2421 bp, Artificial Sequence
  Description of Artificial Sequence: Synthetic polynucleotide
atgaaaatcgaagaaggtaaactggtaatctggattaacggcgataaaggctataacggtctcgctgaagtcggtaagaaattcgagaaagataccggaattaaagtcaccgttgagcatccggataaactggaagagaaattcccacaggttgcggcaactggcgatggccctgacattatcttctgggcacacgaccgctttggtggctacgctcaatctggcctgttggctgaaatcaccccggacaaagcgttccaggacaagctgtatccgtttacctgggatgccgtacgttacaacggcaagctgattgcttacccgatcgctgttgaagcgttatcgctgatttataacaaagatctgctgccgaacccgccaaaaacctgggaagagatcccggcgctggataaagaactgaaagcgaaaggtaagagcgcgctgatgttcaacctgcaagaaccgtacttcacctggccgctgattgctgctgacgggggttatgcgttcaagtatgaaaacggcaagtacgacattaaagacgtgggcgtggataacgctggcgcgaaagcgggtctgaccttcctggttgacctgattaaaaacaaacacatgaatgcagacaccgattactccatcgcagaagctgcctttaataaaggcgaaacagcgatgaccatcaacggcccgtgggcatggtccaacatcgacaccagcaaagtgaattatggtgtaacggtactgccgaccttcaagggtcaaccatccaaaccgttcgttggcgtgctgagcgcaggtattaacgccgccagtccgaacaaagagctggcgaaagagttcctcgaaaactatctgctgactgatgaaggtctggaagcggttaataaagacaaaccgctgggtgccgtagcgctgaagtcttacgaggaagagttggcgaaagatccacgtattgccgccaccatggaaaacgcccagaaaggtgaaatcatgccgaacatcccgcagatgtccgctttctggtatgccgtgcgtactgcggtgatcaacgccgccagcggtcgtcagactgtcgatgaagccctgaaagacgcgcagactggtggttctggtgagaacctgtactttcaaagctcagataatgggcctcaaaaccagcgcaacgctccacgtataaccttcggtggcccgtctgactccacaggcagcaaccagaatggtgagcgtagtggagccaggtctaagcagcgccgtccccagggtctgccgaacaacacggcgagctggtttactgcgcttacccaacacggtaaagaagacttaaaattcccgcgtggccagggcgtcccgatcaacactaactcttccccggatgatcagattggttattaccgcagagcaactcgtcggattcgcggcggcgacggtaaaatgaaagatttgtctccgcgttggtacttttactatctcggcaccggtccggaagctggactgccctacggggcaaacaaggacgggatcatttgggtggctaccgaaggtgccctgaatactccaaaagatcatatcggcacccgtaaccctgctaataacgctgcgatcgttctgcaactgcctcagggtacaactctgccaaaaggcttctatgcagaagggtcgcgtggtggcagccaggcgagtagccgtagcagctcccgctctcgcaactcgtcccgtaactccactccgggctcttctcgcggcacgtccccggctcgtatggcaggtaacggtggtgacgctgctctggcgctgctactgctggacaggctgaaccagctggagtcgaagatgagtggtaaaggccaacagcagcagggccagaccgttaccaaaaagagcgcagctgaagcatctaaaaaaccgcgacagaaacgtaccgcgactaaagcgtacaatgtaacacaggccttcggtcgtcgaggtccggagcaaactcaaggaaactttggcgatcaggaattaatccgccaggggaccgactacaaacactggccgcaaattgcccagttcgccccatccgctagtgcattcttcggtatgagccgcatcggcagtgaagtaacgccaagtggtacgtggctgacctacaccggtgctatcaagcttgatgacaaggacccgaactttaaagaccaggttattctgcttaacaaacatattgatgcctataaaactttcccgccgaccgaacccaaaaaggacaaaaagaaaaaagctgatgaaacccaggctctaccgcagcgtcagaaaaaacagcaaactgtgactctgctgccagctgcggacctggatgatttttccaagcagctgcaacagtctatgagctctgcggactctacgcaggctggtggttctggtcaccatcatcaccatcattaa

SEQ ID NO: 2750 - DNA, 2421 bp, Artificial Sequence
  Description of Artificial Sequence: Synthetic polynucleotide
atgaaaatcgaagaaggtaaactggtaatctggattaacggcgataaaggctataacggtctcgctgaagtcggtaagaaattcgagaaagataccggaattaaagtcaccgttgagcatccggataaactggaagagaaattcccacaggttgcggcaactggcgatggccctgacattatcttctgggcacacgaccgctttggtggctacgctcaatctggcctgttggctgaaatcaccccggacaaagcgttccaggacaagctgtatccgtttacctgggatgccgtacgttacaacggcaagctgattgcttacccgatcgctgttgaagcgttatcgctgatttataacaaagatctgctgccgaacccgccaaaaacctgggaagagatcccggcgctggataaagaactgaaagcgaaaggtaagagcgcgctgatgttcaacctgcaagaaccgtacttcacctggccgctgattgctgctgacgggggttatgcgttcaagtatgaaaacggcaagtacgacattaaagacgtgggcgtggataacgctggcgcgaaagcgggtctgaccttcctggttgacctgattaaaaacaaacacatgaatgcagacaccgattactccatcgcagaagctgcctttaataaaggcgaaacagcgatgaccatcaacggcccgtgggcatggtccaacatcgacaccagcaaagtgaattatggtgtaacggtactgccgaccttcaagggtcaaccatccaaaccgttcgttggcgtgctgagcgcaggtattaacgccgccagtccgaacaaagagctggcgaaagagttcctcgaaaactatctgctgactgatgaaggtctggaagcggttaataaagacaaaccgctgggtgccgtagcgctgaagtcttacgaggaagagttggcgaaagatccacgtattgccgccaccatggaaaacgcccagaaaggtgaaatcatgccgaacatcccgcagatgtccgctttctggtatgccgtgcgtactgcggtgatcaacgccgccagcggtcgtcagactgtcgatgaagccctgaaagacgcgcagactggtggttctggtgagaacctgtactttcaaagctcagataatgggcctcaaaaccagcgcaacgctccacgtataaccttcggtggcccgtctgactccacaggcagcaaccagaatggtgagcgtagtggagccaggtctaagcagcgccgtccccagggtctgccgaacaacacggcgagctggtttactgcgcttacccaacacggtaaagaagacttaaaattcccgcgtggccagggcgtcccgatcaacactaactcttccccggatgatcagattggttattaccgcagagcaactcgtcggattcgcggcggcgacggtaaaatgaaagatttgtctccgcgttggtacttttactatctcggcaccggtccggaagctggactgccctacggggcaaacaaggacgggatcatttgggtggctaccgaaggtgccctgaatactccaaaagatcatatcggcacccgtaaccctgctaataacgctgcgatcgttctgcaactgcctcagggtacaactctgccaaaaggcttctatgcagaagggtcgcgtggtggcagccaggcgagtagccgtagcagctcccgctctcgcaactcgtcccgtaactccactccgggctcttctcgcggcacgtccccggctcgtatggcaggtaacggtggtgacgctgctctggcgctgctactgctggacaggctgaaccagctggagtcgaagatgagtggtaaaggccaacagcagcagggccagaccgttaccaaaaagagcgcagctgaagcatctaaaaaaccgcgacagaaacgtaccgcgactaaagcgtacaatgtaacacaggccttcggtcgtcgaggtccgcatcaaactcaaggaaactttggcgatcaggaattaatccgccaggggaccgactacaaacactggccgcaaattgcccagttcgccccatccgctagtgcattcttcggtatgagccgcatcggcatggaagtaacgccaagtggtacgtggctgacctacaccggtgctatcaagcttgatgacaaggacccgaactttaaagaccaggttattctgcttaacaaacatattgatgcctataaaactttcccgccgaccgaacccaaaaaggacaaaaagaaaaaagctgatgaaacccaggctctaccgcagcgtcagaaaaaacagcaaactgtgactctgctgccagctgcggacctggatgatttttccaagcagctgcaacagtctatgagctctgcggactctacgcaggctggtggttctggtcaccatcatcaccatcattaa

SEQ ID NO: 2751 - DNA, 2421 bp, Artificial Sequence
  Description of Artificial Sequence: Synthetic polynucleotide
atgaaaatcgaagaaggtaaactggtaatctggattaacggcgataaaggctataacggtctcgctgaagtcggtaagaaattcgagaaagataccggaattaaagtcaccgttgagcatccggataaactggaagagaaattcccacaggttgcggcaactggcgatggccctgacattatcttctgggcacacgaccgctttggtggctacgctcaatctggcctgttggctgaaatcaccccggacaaagcgttccaggacaagctgtatccgtttacctgggatgccgtacgttacaacggcaagctgattgcttacccgatcgctgttgaagcgttatcgctgatttataacaaagatctgctgccgaacccgccaaaaacctgggaagagatcccggcgctggataaagaactgaaagcgaaaggtaagagcgcgctgatgttcaacctgcaagaaccgtacttcacctggccgctgattgctgctgacgggggttatgcgttcaagtatgaaaacggcaagtacgacattaaagacgtgggcgtggataacgctggcgcgaaagcgggtctgaccttcctggttgacctgattaaaaacaaacacatgaatgcagacaccgattactccatcgcagaagctgcctttaataaaggcgaaacagcgatgaccatcaacggcccgtgggcatggtccaacatcgacaccagcaaagtgaattatggtgtaacggtactgccgaccttcaagggtcaaccatccaaaccgttcgttggcgtgctgagcgcaggtattaacgccgccagtccgaacaaagagctggcgaaagagttcctcgaaaactatctgctgactgatgaaggtctggaagcggttaataaagacaaaccgctgggtgccgtagcgctgaagtcttacgaggaagagttggcgaaagatccacgtattgccgccaccatggaaaacgcccagaaaggtgaaatcatgccgaacatcccgcagatgtccgctttctggtatgccgtgcgtactgcggtgatcaacgccgccagcggtcgtcagactgtcgatgaagccctgaaagacgcgcagactggtggttctggtgagaacctgtactttcaaagctcagataatgggcctcaaaaccagcgcaacgctccacgtataaccttcggtggcccgtctgactccacaggcagcaaccagaatggtgagcgtagtggagccaggtctaagcagcgccgtccccagggtctgccgaacaacacggcgagctggtttactgcgcttacccaacacggtaaagaagacttaaaattcccgcgtggccagggcgtcccgatcaacactaactcttccccggatgatcagattggttattaccgcagagcaactcgtcggattcgcggcggcgacggtaaaatgaaagatttgtctccgcgttggtacttttactatctcggcaccggtccggaagctggactgccctacggggcaaacaaggacgggatcatttgggtggctaccaaaggtgccctgaatactccaaaagatcatatcggcacccgtaaccctgctaataacgctgcgatcgttctgcaactgcctcagggtacaactctgccaaaaggcttctatgcagaagggtcgcgtggtggcagccaggcgagtagccgtagcagctcccgctctcgcaactcgtcccgtaactccactccgggctcttctcgcggcacgtccccggctcgtatggcaggtaacggtggtgacgctgctctggcgctgctactgctggacaggctgaaccagctggagtcgaagatgagtggtaaaggccaacagcagcagggccagaccgttaccaaaaagagcgcagctgaagcatctaaaaaaccgcgacagaaacgtaccgcgactaaagcgtacaatgtaacacaggccttcggtcgtcgaggtccggagcaaactcaaggaaactttggcgatcaggaattaatccgccaggggaccgactacaaacactggccgcaaattgcccagttcgccccatccgctagtgcattcttcggtatgagccgcatcggcatggaagtaacgccaagtggtacgtggctgacctacaccggtgctatcaagcttgatgacaaggacccgaactttaaagaccaggttattctgcttaacaaacatattgatgcctataaaactttcccgccgaccgaacccaaaaaggacaaaaagaaaaaagctgatgaaacccaggctctaccgcagcgtcagaaaaaacagcaaactgtgactctgctgccagctgcggacctggatgatttttccaagcagctgcaacagtctatgagctctgcggactctacgcaggctggtggttctggtcaccatcatcaccatcattaa

SEQ ID NO: 2752 - DNA, 2421 bp, Artificial Sequence
  Description of Artificial Sequence: Synthetic polynucleotide
atgaaaatcgaagaaggtaaactggtaatctggattaacggcgataaaggctataacggtctcgctgaagtcggtaagaaattcgagaaagataccggaattaaagtcaccgttgagcatccggataaactggaagagaaattcccacaggttgcggcaactggcgatggccctgacattatcttctgggcacacgaccgctttggtggctacgctcaatctggcctgttggctgaaatcaccccggacaaagcgttccaggacaagctgtatccgtttacctgggatgccgtacgttacaacggcaagctgattgcttacccgatcgctgttgaagcgttatcgctgatttataacaaagatctgctgccgaacccgccaaaaacctgggaagagatcccggcgctggataaagaactgaaagcgaaaggtaagagcgcgctgatgttcaacctgcaagaaccgtacttcacctggccgctgattgctgctgacgggggttatgcgttcaagtatgaaaacggcaagtacgacattaaagacgtgggcgtggataacgctggcgcgaaagcgggtctgaccttcctggttgacctgattaaaaacaaacacatgaatgcagacaccgattactccatcgcagaagctgcctttaataaaggcgaaacagcgatgaccatcaacggcccgtgggcatggtccaacatcgacaccagcaaagtgaattatggtgtaacggtactgccgaccttcaagggtcaaccatccaaaccgttcgttggcgtgctgagcgcaggtattaacgccgccagtccgaacaaagagctggcgaaagagttcctcgaaaactatctgctgactgatgaaggtctggaagcggttaataaagacaaaccgctgggtgccgtagcgctgaagtcttacgaggaagagttggcgaaagatccacgtattgccgccaccatggaaaacgcccagaaaggtgaaatcatgccgaacatcccgcagatgtccgctttctggtatgccgtgcgtactgcggtgatcaacgccgccagcggtcgtcagactgtcgatgaagccctgaaagacgcgcagactggtggttctggtgagaacctgtactttcaaagctcagataatgggcctcaaaaccagcgcaacgctccacgtataaccttcggtggcccgtctgactccacaggcagcaaccagaatggtgagcgtagtggagccaggtctaagcagcgccgtccccagggtctgccgaacaacacggcgagctggtttactgcgcttacccaacacggtaaagaagacttaaaattcccgcgtggccagggcgtcccgatcaacactaactcttccccggatgatcagattggttattaccgcagagcaactcgtcggattcgcggcggcgacggtaaaatgaaagatttgtctccgcgttggtacttttactatctcggcaccggtccggaagctggactgccctacggggcaaacaaggacgggatcatttgggtggctaccgaaggtgccctgaatactccaaaagatcatatcggcacccgtaaccctgctaataacgctgcgatcgttctgcaactgcctcagggtacaactctgccaaaaggcttctatgcagaagggtcgcgtggtggcagccaggcgagtagccgtagcagctcccgctctcgcaactcgtcccgtaactccactccgggctcttctcgcggcacgtccccggctcgtatggcaggtaacggtggtgacgctgctctggcgctgctactgctggacaggctgaaccagctggagtcgaagatgagtggtaaaggccaacagcagcagggccagaccgttaccaaaaagagcgcagctgaaatgtctaaaaaaccgcgacagaaacgtaccgcgactaaaggatacaatgtaacacagtgcttcggtccccgaggtccggagcaaactcaaggaaactttggcgatgccgatttaatcaagaaagggaccgactacaaacactggccgcaaattgcccagttcgccccatccgctagtgcattcttcggtatgagccgcatctcatcaaaggaaacgccaagtggtacgtggctgacctacaccggtgctatcaagcttgataaagatgacccgaactttaaagaccaggttattctgcttaacaaacatattgatgcctataaaactttcccgccgaccgaacccaaaaaggacaaaaagaaaaaagctgatgaaacccaggctctaccgcagcgtcagaaaaaacagcaaactgtgactctgctgccagctgcggacctggatgatttttccaagcagctgcaacagtctatgagctctgcggactctacgcaggctggtggttctggtcaccatcatcaccatcattaa

SEQ ID NO: 2753 - DNA, 2421 bp, Artificial Sequence
  Description of Artificial Sequence: Synthetic polynucleotide
atgaaaatcgaagaaggtaaactggtaatctggattaacggcgataaaggctataacggtctcgctgaagtcggtaagaaattcgagaaagataccggaattaaagtcaccgttgagcatccggataaactggaagagaaattcccacaggttgcggcaactggcgatggccctgacattatcttctgggcacacgaccgctttggtggctacgctcaatctggcctgttggctgaaatcaccccggacaaagcgttccaggacaagctgtatccgtttacctgggatgccgtacgttacaacggcaagctgattgcttacccgatcgctgttgaagcgttatcgctgatttataacaaagatctgctgccgaacccgccaaaaacctgggaagagatcccggcgctggataaagaactgaaagcgaaaggtaagagcgcgctgatgttcaacctgcaagaaccgtacttcacctggccgctgattgctgctgacgggggttatgcgttcaagtatgaaaacggcaagtacgacattaaagacgtgggcgtggataacgctggcgcgaaagcgggtctgaccttcctggttgacctgattaaaaacaaacacatgaatgcagacaccgattactccatcgcagaagctgcctttaataaaggcgaaacagcgatgaccatcaacggcccgtgggcatggtccaacatcgacaccagcaaagtgaattatggtgtaacggtactgccgaccttcaagggtcaaccatccaaaccgttcgttggcgtgctgagcgcaggtattaacgccgccagtccgaacaaagagctggcgaaagagttcctcgaaaactatctgctgactgatgaaggtctggaagcggttaataaagacaaaccgctgggtgccgtagcgctgaagtcttacgaggaagagttggcgaaagatccacgtattgccgccaccatggaaaacgcccagaaaggtgaaatcatgccgaacatcccgcagatgtccgctttctggtatgccgtgcgtactgcggtgatcaacgccgccagcggtcgtcagactgtcgatgaagccctgaaagacgcgcagactggtggttctggtgagaacctgtactttcaaagctcagataatgggcctcaaaaccagcgcaacgctccacgtataaccttcggtggcccgtctgactccacaggcagcaaccagaatggtgagcgtagtggagccaggtctaagcagcgccgtccccagggtctgccgaacaacacggcgagctggtttactgcgcttacccaacacggtaaagaagacttaaaattcccgcgtggccagggcgtcccgatcaacactaactcttccccggatgatcagattggttattaccgcagagcaactcgtcggattcgcggcggcgacggtaaaatgaaagatttgtctccgcgttggtacttttactatctcggcaccggtccggaagctggactgccctacggggcaaacaaggacgggatcatttgggtggctaccgaaggtgccctgaatactccaaaagatcatatcggcacccgtaaccctgctaataacgctgcgatcgttctgcaactgcctcagggtacaactctgccaaaaggcttctatgcagaagggtcgcgtggtggcagccaggcgagtagccgtagcagctcccgctctcgcaactcgtcccgtaactccactccgggctcttctcgcggcacgtccccggctcgtatggcaggtaacggtggtgacgctgctctggcgctgctactgctggacaggctgaaccagctggagtcgaagatgagtggtaaaggccaacagcagcagggccagaccgttaccaaaaagagcgcagctgaagcatctaaaaaaccgcgacagaaacgtaccgcgactaaagagtacaatgtaacacaggccttcggtcgtcgaggtccggagcaaactcaaggaaactttggcgatcaggatttaatcaaattggggaccgactacaaacactggccgcaaattgcccagttcgccccatccgctagtgcattcttcggtatgagccgcatcagcacggaagaaacgccaagtggtacgtggctgacctacaccggtgctatcaagcttgataaaaaggacccgaactttaaagaccaggttattctgcttaacaaacatattgatgcctataaaactttcccgccgaccgaacccaaaaaggacaaaaagaaaaaagctgatgaaacccaggctctaccgcagcgtcagaaaaaacagcaaactgtgactctgctgccagctgcggacctggatgatttttccaagcagctgcaacagtctatgagctctgcggactctacgcaggctggtggttctggtcaccatcatcaccatcattaa

SEQ ID NO: 2754 - DNA, 2421 bp, Artificial Sequence
  Description of Artificial Sequence: Synthetic polynucleotide
atgaaaatcgaagaaggtaaactggtaatctggattaacggcgataaaggctataacggtctcgctgaagtcggtaagaaattcgagaaagataccggaattaaagtcaccgttgagcatccggataaactggaagagaaattcccacaggttgcggcaactggcgatggccctgacattatcttctgggcacacgaccgctttggtggctacgctcaatctggcctgttggctgaaatcaccccggacaaagcgttccaggacaagctgtatccgtttacctgggatgccgtacgttacaacggcaagctgattgcttacccgatcgctgttgaagcgttatcgctgatttataacaaagatctgctgccgaacccgccaaaaacctgggaagagatcccggcgctggataaagaactgaaagcgaaaggtaagagcgcgctgatgttcaacctgcaagaaccgtacttcacctggccgctgattgctgctgacgggggttatgcgttcaagtatgaaaacggcaagtacgacattaaagacgtgggcgtggataacgctggcgcgaaagcgggtctgaccttcctggttgacctgattaaaaacaaacacatgaatgcagacaccgattactccatcgcagaagctgcctttaataaaggcgaaacagcgatgaccatcaacggcccgtgggcatggtccaacatcgacaccagcaaagtgaattatggtgtaacggtactgccgaccttcaagggtcaaccatccaaaccgttcgttggcgtgctgagcgcaggtattaacgccgccagtccgaacaaagagctggcgaaagagttcctcgaaaactatctgctgactgatgaaggtctggaagcggttaataaagacaaaccgctgggtgccgtagcgctgaagtcttacgaggaagagttggcgaaagatccacgtattgccgccaccatggaaaacgcccagaaaggtgaaatcatgccgaacatcccgcagatgtccgctttctggtatgccgtgcgtactgcggtgatcaacgccgccagcggtcgtcagactgtcgatgaagccctgaaagacgcgcagactggtggttctggtgagaacctgtactttcaaagctcagataatgggcctcaaaaccagcgcaacgctccacgtataaccttcggtggcccgtctgactccacaggcagcaaccagaatggtgagcgtagtggagccaggtctaagcagcgccgtccccagggtctgccgaacaacacggcgagctggtttactgcgcttacccaacacggtaaagaagacttaaaattcccgcgtggccagggcgtcccgatcaacactaactcttccccggatgatcagattggttattaccgcagagcaactcgtcggattcgcggcggcgacggtaaaatgaaagatttgtctccgcgttggtacttttactatctcggcaccggtccggaagctggactgccctacggggcaaacaaggacgggatcatttgggtggctaccgaaggtgccctgaatactccaaaagatcatatcggcacccgtaaccctgctaataacgctgcgatcgttctgcaactgcctcagggtacaactctgccaaaaggcttctatgcagaagggtcgcgtggtggcagccaggcgagtagccgtagcagctcccgctctcgcaactcgtcccgtaactccactccgggctcttctcgcggcacgtccccggctcgtatggcaggtaacggtggtgacgctgctctggcgctgctactgctggacaggctgaaccagctggagtcgaagatgagtggtaaaggccaacagcagcagggccagaccgttaccaaaaagagcgcagctgaagcatctaaaaaaccgcgacagaaacgtaccgcgactaaagattacaatgtaacacaggccttcggtcgtcgaggtccggagcaaactcaaggaaactttggcgatcaggaattaatccgccaggggaccgactacaaacactggccgcaaattgcccagttcgccccatccgctagtgcattcttcggtatgagccgcatcggcatggaagtaacgccaagtggtacgtggctgacctacaccggtgctatcaagcttgatgacaaggacccgaactttaaagaccaggttattctgcttaacaaacatattgatgcctataaaactttcccgccgaccgaacccaaaaaggacaaaaagaaaaaagctgatgaaacccaggctctaccgcagcgtcagaaaaaacagcaaactgtgactctgctgccagctgcggacctggatgatttttccaagcagctgcaacagtctatgagctctgcggactctacgcaggctggtggttctggtcaccatcatcaccatcattaa

SEQ ID NO: 2755 - DNA, 2421 bp, Artificial Sequence
  Description of Artificial Sequence: Synthetic polynucleotide
atgaaaatcgaagaaggtaaactggtaatctggattaacggcgataaaggctataacggtctcgctgaagtcggtaagaaattcgagaaagataccggaattaaagtcaccgttgagcatccggataaactggaagagaaattcccacaggttgcggcaactggcgatggccctgacattatcttctgggcacacgaccgctttggtggctacgctcaatctggcctgttggctgaaatcaccccggacaaagcgttccaggacaagctgtatccgtttacctgggatgccgtacgttacaacggcaagctgattgcttacccgatcgctgttgaagcgttatcgctgatttataacaaagatctgctgccgaacccgccaaaaacctgggaagagatcccggcgctggataaagaactgaaagcgaaaggtaagagcgcgctgatgttcaacctgcaagaaccgtacttcacctggccgctgattgctgctgacgggggttatgcgttcaagtatgaaaacggcaagtacgacattaaagacgtgggcgtggataacgctggcgcgaaagcgggtctgaccttcctggttgacctgattaaaaacaaacacatgaatgcagacaccgattactccatcgcagaagctgcctttaataaaggcgaaacagcgatgaccatcaacggcccgtgggcatggtccaacatcgacaccagcaaagtgaattatggtgtaacggtactgccgaccttcaagggtcaaccatccaaaccgttcgttggcgtgctgagcgcaggtattaacgccgccagtccgaacaaagagctggcgaaagagttcctcgaaaactatctgctgactgatgaaggtctggaagcggttaataaagacaaaccgctgggtgccgtagcgctgaagtcttacgaggaagagttggcgaaagatccacgtattgccgccaccatggaaaacgcccagaaaggtgaaatcatgccgaacatcccgcagatgtccgctttctggtatgccgtgcgtactgcggtgatcaacgccgccagcggtcgtcagactgtcgatgaagccctgaaagacgcgcagactggtggttctggtgagaacctgtactttcaaagctcagataatgggcctcaaaaccagcgcaacgctccacgtataaccttcggtggcccgtctgactccacaggcagcaaccagaatggtgagcgtagtggagccaggtctaagcagcgccgtccccagggtctgccgaacaacacggcgagctggtttactgcgcttacccaacacggtaaagaagacttaaaattcccgcgtggccagggcgtcccgatcaacactaactcttccccggatgatcagattggttattaccgcagagcaactcgtcggattcgcggcggcgacggtaaaatgaaagatttgtctccgcgttggtacttttactatctcggcaccggtccggaagctggactgccctacggggcacaaaaggacgggatcatttgggtggctaccgaaggtgccctgaatactccaaaagatcatatcggcacccgtaaccctgctaataacgctgcgatcgttctgcaactgcctcagggtacaactctgccaaaaggcttctatgcagaagggtcgcgtggtggcagccaggcgagtagccgtagcagctcccgctctcgcaactcgtcccgtaactccactccgggctcttctcgcggcacgtccccggctcgtatggcaggtaacggtggtgacgctgctctggcgctgctactgctggacaggctgaaccagctggagtcgaagatgagtggtaaaggccaacagcagcagggccagaccgttaccaaaaagagcgcagctgaagcatctaaaaaaccgcgacagaaacgtaccgcgactaaagcgtacaatgtaacacaggccttcggtcgtcgaggtccggagcaaactcaaggaaactttggcgatcaggaattaatccgccaggggaccgactacaaacactggccgcaaattgcccagttcgccccatccgctagtgcattcttcggtatgagccgcatcggcatggaagtaacgccaagtggtacgtggctgacctacaccggtgctatcaagcttgatgacaaggacccgaactttaaagaccaggttattctgcttaacaaacatattgatgcctataaaactttcccgccgaccgaacccaaaaaggacaaaaagaaaaaagctgatgaaacccaggctctaccgcagcgtcagaaaaaacagcaaactgtgactctgctgccagctgcggacctggatgatttttccaagcagctgcaacagtctatgagctctgcggactctacgcaggctggtggttctggtcaccatcatcaccatcattaa

SEQ ID NO: 2756 - DNA, 2421 bp, Artificial Sequence
  Description of Artificial Sequence: Synthetic polynucleotide
atgaaaatcgaagaaggtaaactggtaatctggattaacggcgataaaggctataacggtctcgctgaagtcggtaagaaattcgagaaagataccggaattaaagtcaccgttgagcatccggataaactggaagagaaattcccacaggttgcggcaactggcgatggccctgacattatcttctgggcacacgaccgctttggtggctacgctcaatctggcctgttggctgaaatcaccccggacaaagcgttccaggacaagctgtatccgtttacctgggatgccgtacgttacaacggcaagctgattgcttacccgatcgctgttgaagcgttatcgctgatttataacaaagatctgctgccgaacccgccaaaaacctgggaagagatcccggcgctggataaagaactgaaagcgaaaggtaagagcgcgctgatgttcaacctgcaagaaccgtacttcacctggccgctgattgctgctgacgggggttatgcgttcaagtatgaaaacggcaagtacgacattaaagacgtgggcgtggataacgctggcgcgaaagcgggtctgaccttcctggttgacctgattaaaaacaaacacatgaatgcagacaccgattactccatcgcagaagctgcctttaataaaggcgaaacagcgatgaccatcaacggcccgtgggcatggtccaacatcgacaccagcaaagtgaattatggtgtaacggtactgccgaccttcaagggtcaaccatccaaaccgttcgttggcgtgctgagcgcaggtattaacgccgccagtccgaacaaagagctggcgaaagagttcctcgaaaactatctgctgactgatgaaggtctggaagcggttaataaagacaaaccgctgggtgccgtagcgctgaagtcttacgaggaagagttggcgaaagatccacgtattgccgccaccatggaaaacgcccagaaaggtgaaatcatgccgaacatcccgcagatgtccgctttctggtatgccgtgcgtactgcggtgatcaacgccgccagcggtcgtcagactgtcgatgaagccctgaaagacgcgcagactggtggttctggtgagaacctgtactttcaaagctcagataatgggcctcaaaaccagcgcaacgctccacgtataaccttcggtggcccgtctgactccacaggcagcaaccagaatggtgagcgtagtggagccaggtctaagcagcgccgtccccagggtctgccgaacaacacggcgagctggtttactgcgcttacccaacacggtaaagaagacttaaaattcccgcgtggccagggcgtcccgatcaacactaactcttccccggatgatcagattggttattaccgcagagcaactcgtcggattcgcggcggcgacggtaaaatgaaagatttgtctccgcgttggtacttttactatctcggcaccggtccggaagctggactgccctacggggcaaacaaggacgggatcatttgggtggctaccgaaggtgccctgaatactccaaaagatcatatcggcacccgtaaccctgctaataacgctgcgatcgttctgcaatttcctcagggtacaactctgccaaaaggcttctatgcagaagggtcgcgtggtggcagccaggcgagtagccgtagcagctcccgctctcgcaactcgtcccgtaactccactccgggctcttctcgcggcacgtccccggctcgtatggcaggtaacggtggtgacgctgctctggcgctgctactgctggacaggctgaaccagctggagtcgaagatgagtggtaaaggccaacagcagcagggccagaccgttaccaaaaagagcgcagctgaagcatctaaaaaaccgcgacagaaacgtaccgcgactaaagcgtacaatgtaacacaggccttcggtcgtcgaggtccggagcaaactcaaggaaactttggcgatcaggaattaatccgccaggggaccgactacaaacactggccgcaaattgcccagttcgccccatccgctagtgcattcttcggtatgagccgcatcggcatggaagtaacgccaagtggtacgtggctgacctacaccggtgctatcaagcttgatgacaaggacccgaactttaaagaccaggttattctgcttaacaaacatattgatgcctataaaactttcccgccgaccgaacccaaaaaggacaaaaagaaaaaagctgatgaaacccaggctctaccgcagcgtcagaaaaaacagcaaactgtgactctgctgccagctgcggacctggatgatttttccaagcagctgcaacagtctatgagctctgcggactctacgcaggctggtggttctggtcaccatcatcaccatcattaa

SEQ ID NO: 2757 - DNA, 2421 bp, Artificial Sequence
  Description of Artificial Sequence: Synthetic polynucleotide
atgaaaatcgaagaaggtaaactggtaatctggattaacggcgataaaggctataacggtctcgctgaagtcggtaagaaattcgagaaagataccggaattaaagtcaccgttgagcatccggataaactggaagagaaattcccacaggttgcggcaactggcgatggccctgacattatcttctgggcacacgaccgctttggtggctacgctcaatctggcctgttggctgaaatcaccccggacaaagcgttccaggacaagctgtatccgtttacctgggatgccgtacgttacaacggcaagctgattgcttacccgatcgctgttgaagcgttatcgctgatttataacaaagatctgctgccgaacccgccaaaaacctgggaagagatcccggcgctggataaagaactgaaagcgaaaggtaagagcgcgctgatgttcaacctgcaagaaccgtacttcacctggccgctgattgctgctgacgggggttatgcgttcaagtatgaaaacggcaagtacgacattaaagacgtgggcgtggataacgctggcgcgaaagcgggtctgaccttcctggttgacctgattaaaaacaaacacatgaatgcagacaccgattactccatcgcagaagctgcctttaataaaggcgaaacagcgatgaccatcaacggcccgtgggcatggtccaacatcgacaccagcaaagtgaattatggtgtaacggtactgccgaccttcaagggtcaaccatccaaaccgttcgttggcgtgctgagcgcaggtattaacgccgccagtccgaacaaagagctggcgaaagagttcctcgaaaactatctgctgactgatgaaggtctggaagcggttaataaagacaaaccgctgggtgccgtagcgctgaagtcttacgaggaagagttggcgaaagatccacgtattgccgccaccatggaaaacgcccagaaaggtgaaatcatgccgaacatcccgcagatgtccgctttctggtatgccgtgcgtactgcggtgatcaacgccgccagcggtcgtcagactgtcgatgaagccctgaaagacgcgcagactggtggttctggtgagaacctgtactttcaaagctcagataatgggcctcaaaaccagcgcaacgctccacgtataaccttcggtggcccgtctgactccacaggcagcaaccagaatggtgagcgtagtggagccaggtctaagcagcgccgtccccagggtctgccgaacaacacggcgagctggtttactgcgcttacccaacacggtaaagaagacttaaaattcccgcgtggccagggcgtcccgatcaacactaactcttccccggatgatcagattggttattaccgcagagcaactcgtcggattcgcggcggcgacggtaaaatgaaagatttgtctccgcgttggtacttttactatctcggcaccggtccggaagctggactgccctacggggcaaacaaggacgggatcatttgggtggctaccgaaggtgccctgaatactccaaaagatcatatcggcacccgtaaccctgctaataacgctgcgatcgttctgcaactgcctcagggtacaactctgccaaaaggcttctatgcagaagggtcgcgtggtggcagccaggcgagtagccgtagcagctcccgctctcgcaactcgtcccgtaactccactccgggctcttctcgcggcacgtccccggctcgtatggcaggtaacggtggtgacgctgctctggcgctgctactgctggacaggctgaaccagctggagtcgaagatgagtggtaaaggccaacagcagcagggccagaccgttaccaaaaagagcgcagctgaagcatctaaaaaaccgcgacagaaacgtaccgcgactaaagcgtacaatgtaacacaggccttcggtcgtcgaggtccggagcaaactcaaggaaactttggcgatcaggaattaatccgccaggggaccgactacaaacactggccgcaaattgcccagttcgccccatccgctagtgcattcttcggtatgagccgcatcggcatggaaacgacgccaagtggtacgtggctgacctacaccggtgctatcaagcttgatgacaaggacccgaactttaaagaccaggttattctgcttaacaaacatattgatgcctataaaactttcccgccgaccgaacccaaaaaggacaaaaagaaaaaagctgatgaaacccaggctctaccgcagcgtcagaaaaaacagcaaactgtgactctgctgccagctgcggacctggatgatttttccaagcagctgcaacagtctatgagctctgcggactctacgcaggctggtggttctggtcaccatcatcaccatcattaa

SEQ ID NO: 2758 - DNA, 2421 bp, Artificial Sequence
  Description of Artificial Sequence: Synthetic polynucleotide
atgaaaatcgaagaaggtaaactggtaatctggattaacggcgataaaggctataacggtctcgctgaagtcggtaagaaattcgagaaagataccggaattaaagtcaccgttgagcatccggataaactggaagagaaattcccacaggttgcggcaactggcgatggccctgacattatcttctgggcacacgaccgctttggtggctacgctcaatctggcctgttggctgaaatcaccccggacaaagcgttccaggacaagctgtatccgtttacctgggatgccgtacgttacaacggcaagctgattgcttacccgatcgctgttgaagcgttatcgctgatttataacaaagatctgctgccgaacccgccaaaaacctgggaagagatcccggcgctggataaagaactgaaagcgaaaggtaagagcgcgctgatgttcaacctgcaagaaccgtacttcacctggccgctgattgctgctgacgggggttatgcgttcaagtatgaaaacggcaagtacgacattaaagacgtgggcgtggataacgctggcgcgaaagcgggtctgaccttcctggttgacctgattaaaaacaaacacatgaatgcagacaccgattactccatcgcagaagctgcctttaataaaggcgaaacagcgatgaccatcaacggcccgtgggcatggtccaacatcgacaccagcaaagtgaattatggtgtaacggtactgccgaccttcaagggtcaaccatccaaaccgttcgttggcgtgctgagcgcaggtattaacgccgccagtccgaacaaagagctggcgaaagagttcctcgaaaactatctgctgactgatgaaggtctggaagcggttaataaagacaaaccgctgggtgccgtagcgctgaagtcttacgaggaagagttggcgaaagatccacgtattgccgccaccatggaaaacgcccagaaaggtgaaatcatgccgaacatcccgcagatgtccgctttctggtatgccgtgcgtactgcggtgatcaacgccgccagcggtcgtcagactgtcgatgaagccctgaaagacgcgcagactggtggttctggtgagaacctgtactttcaaagctcagataatgggcctcaaaaccagcgcaacgctccacgtataaccttcggtggcccgtctgactccacaggcagcaaccagaatggtgagcgtagtggagccaggtctaagcagcgccgtccccagggtctgccgaacaacacggcgagctggtttactgcgcttacccaacacggtaaagaagacttaaaattcccgcgtggccagggcgtcccgatcaacactaactcttccccggatgatcagattggttattaccgcagagcaactcgtcggattcgcggcggcgacggtaaaatgaaagatttgtctccgcgttggtacttttactatctcggcaccggtccggaagctggactgccctacggggcaaacaaggacgggatcatttgggtggctaccgaaggtgccctgaatactccaaaagatcatatcggcacccgtaaccctgctaataacgctgcgagcgttctgcaactgcctcagggtacaactctgccaaaaggcttctatgcagaagggtcgcgtggtggcagccaggcgagtagccgtagcagctcccgctctcgcaactcgtcccgtaactccactccgggctcttctcgcggcacgtccccggctcgtatggcaggtaacggtggtgacgctgctctggcgctgctactgctggacaggctgaaccagctggagtcgaagatgagtggtaaaggccaacagcagcagggccagaccgttaccaaaaagagcgcagctgaagcatctaaaaaaccgcgacagaaacgtaccgcgactaaagcgtacaatgtaacacaggccttcggtcgtcgaggtccggagcaaactcaaggaaactttggcgatcaggaattaatccgccaggggaccgactacaaacactggccgcaaattgcccagttcgccccatccgctagtgcattcttcggtatgagccgcatcggcatggaagtaacgccaagtggtacgtggctgacctacaccggtgctatcaagcttgatgacaaggacccgaactttaaagaccaggttattctgcttaacaaacatattgatgcctataaaactttcccgccgaccgaacccaaaaaggacaaaaagaaaaaagctgatgaaacccaggctctaccgcagcgtcagaaaaaacagcaaactgtgactctgctgccagctgcggacctggatgatttttccaagcagctgcaacagtctatgagctctgcggactctacgcaggctggtggttctggtcaccatcatcaccatcattaa

SEQ ID NO: 2759 - DNA, 2421 bp, Artificial Sequence
  Description of Artificial Sequence: Synthetic polynucleotide
atgaaaatcgaagaaggtaaactggtaatctggattaacggcgataaaggctataacggtctcgctgaagtcggtaagaaattcgagaaagataccggaattaaagtcaccgttgagcatccggataaactggaagagaaattcccacaggttgcggcaactggcgatggccctgacattatcttctgggcacacgaccgctttggtggctacgctcaatctggcctgttggctgaaatcaccccggacaaagcgttccaggacaagctgtatccgtttacctgggatgccgtacgttacaacggcaagctgattgcttacccgatcgctgttgaagcgttatcgctgatttataacaaagatctgctgccgaacccgccaaaaacctgggaagagatcccggcgctggataaagaactgaaagcgaaaggtaagagcgcgctgatgttcaacctgcaagaaccgtacttcacctggccgctgattgctgctgacgggggttatgcgttcaagtatgaaaacggcaagtacgacattaaagacgtgggcgtggataacgctggcgcgaaagcgggtctgaccttcctggttgacctgattaaaaacaaacacatgaatgcagacaccgattactccatcgcagaagctgcctttaataaaggcgaaacagcgatgaccatcaacggcccgtgggcatggtccaacatcgacaccagcaaagtgaattatggtgtaacggtactgccgaccttcaagggtcaaccatccaaaccgttcgttggcgtgctgagcgcaggtattaacgccgccagtccgaacaaagagctggcgaaagagttcctcgaaaactatctgctgactgatgaaggtctggaagcggttaataaagacaaaccgctgggtgccgtagcgctgaagtcttacgaggaagagttggcgaaagatccacgtattgccgccaccatggaaaacgcccagaaaggtgaaatcatgccgaacatcccgcagatgtccgctttctggtatgccgtgcgtactgcggtgatcaacgccgccagcggtcgtcagactgtcgatgaagccctgaaagacgcgcagactggtggttctggtgagaacctgtactttcaaagctcagataatgggcctcaaaaccagcgcaacgctccacgtataaccttcggtggcccgtctgactccacaggcagcaaccagaatggtgagcgtagtggagccaggtctaagcagcgccgtccccagggtctgccgaacaacacggcgagctggtttactgcgcttacccaacacggtaaagaagacttaaaattcccgcgtggccagggcgtcccgatcaacactaactcttccccggatgatcagattggttattaccgcagagcaactcgtcggattcgcggcggcgacggtaaaatgaaagatttgtctccgcgttggtacttttactatctcggcaccggtccggaagctggactgccctacggggcaaacaaggacgggatcatttgggtggctaccgaaggtgccctgaatactccaaaagatcatatcggcacccgtaaccctgctaataacgctgcgatcgttctgcaactgcctcagggtacaactctgccaaaaggcttctatgcagaagggtcgcgtggtggcagccaggcgagtagccgtagcagctcccgctctcgcaactcgtcccgtaactccactccgggctcttctcgcggcacgtccccggctcgtatggcaggtaacggtggtgacgctgctctggcgctgctactgctggacaggctgaaccagctggagtcgaagatgagtggtaaaggccaacagcagcagggccagaccgttaccaaaaagagcgcagctgaagcatctaaaaaaccgcgacagaaacgtaccgcgactaaagggtacaatgtaacacaggccttcggtcgtcgaggtccggagcaaactcaaggaaactttggcgatcaggatttaatcaaactcgggaccgactacaaacactggccgcaaattgcccagttcgccccatccgctagtgcattcttcggtatgagccgcatcggcacggaagaaacgccaagtggtacgtggctgacctacaccggtgctatcaagcttgataaaaaggacccgaactttaaagaccaggttattctgcttaacaaacatattgatgcctataaaactttcccgccgaccgaacccaaaaaggacaaaaagaaaaaagctgatgaaacccaggctctaccgcagcgtcagaaaaaacagcaaactgtgactctgctgccagctgcggacctggatgatttttccaagcagctgcaacagtctatgagctctgcggactctacgcaggctggtggttctggtcaccatcatcaccatcattaa

SEQ ID NO: 2760 - DNA, 2421 bp, Artificial Sequence
  Description of Artificial Sequence: Synthetic polynucleotide
atgaaaatcgaagaaggtaaactggtaatctggattaacggcgataaaggctataacggtctcgctgaagtcggtaagaaattcgagaaagataccggaattaaagtcaccgttgagcatccggataaactggaagagaaattcccacaggttgcggcaactggcgatggccctgacattatcttctgggcacacgaccgctttggtggctacgctcaatctggcctgttggctgaaatcaccccggacaaagcgttccaggacaagctgtatccgtttacctgggatgccgtacgttacaacggcaagctgattgcttacccgatcgctgttgaagcgttatcgctgatttataacaaagatctgctgccgaacccgccaaaaacctgggaagagatcccggcgctggataaagaactgaaagcgaaaggtaagagcgcgctgatgttcaacctgcaagaaccgtacttcacctggccgctgattgctgctgacgggggttatgcgttcaagtatgaaaacggcaagtacgacattaaagacgtgggcgtggataacgctggcgcgaaagcgggtctgaccttcctggttgacctgattaaaaacaaacacatgaatgcagacaccgattactccatcgcagaagctgcctttaataaaggcgaaacagcgatgaccatcaacggcccgtgggcatggtccaacatcgacaccagcaaagtgaattatggtgtaacggtactgccgaccttcaagggtcaaccatccaaaccgttcgttggcgtgctgagcgcaggtattaacgccgccagtccgaacaaagagctggcgaaagagttcctcgaaaactatctgctgactgatgaaggtctggaagcggttaataaagacaaaccgctgggtgccgtagcgctgaagtcttacgaggaagagttggcgaaagatccacgtattgccgccaccatggaaaacgcccagaaaggtgaaatcatgccgaacatcccgcagatgtccgctttctggtatgccgtgcgtactgcggtgatcaacgccgccagcggtcgtcagactgtcgatgaagccctgaaagacgcgcagactggtggttctggtgagaacctgtactttcaaagctcagataatgggcctcaaaaccagcgcaacgctccacgtataaccttcggtggcccgtctgactccacaggcagcaaccagaatggtgagcgtagtggagccaggtctaagcagcgccgtccccagggtctgccgaacaacacggcgagctggtttactgcgcttacccaacacggtaaagaagacttaaaattcccgcgtggccagggcgtcccgatcaacactaactcttccccggatgatcagattggttattaccgcagagcaactcgtcggattcgcggcggcgacggtaaaatgaaagatttgtctccgcgttggtacttttactatctcggcaccggtccggaagctggactgccctacgggtcgaacaaggacgggatcatttgggtggctaccgaaggtgccctgaatactccaaaagatcatatcggcacccgtaaccctgctaataacgctgcgatcgttctgcaactgcctcagggtacaactctgccaaaaggcttctatgcagaagggtcgcgtggtggcagccaggcgagtagccgtagcagctcccgctctcgcaactcgtcccgtaactccactccgggctcttctcgcggcacgtccccggctcgtatggcaggtaacggtggtgacgctgctctggcgctgctactgctggacaggctgaaccagctggagtcgaagatgagtggtaaaggccaacagcagcagggccagaccgttaccaaaaagagcgcagctgaagcatctaaaaaaccgcgacagaaacgtaccgcgactaaagcgtacaatgtaacacaggccttcggtcgtcgaggtccggagcaaactcaaggaaactttggcgatcaggaattaatccgccaggggaccgactacaaacactggccgcaaattgcccagttcgccccatccgctagtgcattcttcggtatgagccgcatcggcatggaagtaacgccaagtggtacgtggctgacctacaccggtgctatcaagcttgatgacaaggacccgaactttaaagaccaggttattctgcttaacaaacatattgatgcctataaaactttcccgccgaccgaacccaaaaaggacaaaaagaaaaaagctgatgaaacccaggctctaccgcagcgtcagaaaaaacagcaaactgtgactctgctgccagctgcggacctggatgatttttccaagcagctgcaacagtctatgagctctgcggactctacgcaggctggtggttctggtcaccatcatcaccatcattaa

SEQ ID NO: 2761 - DNA, 2421 bp, Artificial Sequence
  Description of Artificial Sequence: Synthetic polynucleotide
atgaaaatcgaagaaggtaaactggtaatctggattaacggcgataaaggctataacggtctcgctgaagtcggtaagaaattcgagaaagataccggaattaaagtcaccgttgagcatccggataaactggaagagaaattcccacaggttgcggcaactggcgatggccctgacattatcttctgggcacacgaccgctttggtggctacgctcaatctggcctgttggctgaaatcaccccggacaaagcgttccaggacaagctgtatccgtttacctgggatgccgtacgttacaacggcaagctgattgcttacccgatcgctgttgaagcgttatcgctgatttataacaaagatctgctgccgaacccgccaaaaacctgggaagagatcccggcgctggataaagaactgaaagcgaaaggtaagagcgcgctgatgttcaacctgcaagaaccgtacttcacctggccgctgattgctgctgacgggggttatgcgttcaagtatgaaaacggcaagtacgacattaaagacgtgggcgtggataacgctggcgcgaaagcgggtctgaccttcctggttgacctgattaaaaacaaacacatgaatgcagacaccgattactccatcgcagaagctgcctttaataaaggcgaaacagcgatgaccatcaacggcccgtgggcatggtccaacatcgacaccagcaaagtgaattatggtgtaacggtactgccgaccttcaagggtcaaccatccaaaccgttcgttggcgtgctgagcgcaggtattaacgccgccagtccgaacaaagagctggcgaaagagttcctcgaaaactatctgctgactgatgaaggtctggaagcggttaataaagacaaaccgctgggtgccgtagcgctgaagtcttacgaggaagagttggcgaaagatccacgtattgccgccaccatggaaaacgcccagaaaggtgaaatcatgccgaacatcccgcagatgtccgctttctggtatgccgtgcgtactgcggtgatcaacgccgccagcggtcgtcagactgtcgatgaagccctgaaagacgcgcagactggtggttctggtgagaacctgtactttcaaagctcagataatgggcctcaaaaccagcgcaacgctccacgtataaccttcggtggcccgtctgactccacaggcagcaaccagaatggtgagcgtagtggagccaggtctaagcagcgccgtccccagggtctgccgaacaacacggcgagctggtttactgcgcttacccaacacggtaaagaagacttaaaattcccgcgtggccagggcgtcccgatcaacactaactcttccccggatgatcagattggttattaccgcagagcaactcgtcggattcgcggcggcgacggtaaaatgaaagatttgtctccgcgttggtacttttactatctcggcaccggtccggaagctggactgccctacggggcaaacaaggacgggatcatttgggtggctaccgaaggtgccctgaatactccaaaagatcatatcggcacccgtaaccctgctaataacgctgcgatcgttctgcaactgcctcagggtacaactctgccaaaaggcttctatgcagaagggtcgcgtggtggcagccaggcgagtagccgtagcagctcccgctctcgcaactcgtcccgtaactccactccgggctcttctcgcggcacgtccccggctcgtatggcaggtaacggtggtgacgctgctctggcgctgctactgctggacaggctgaaccagctggagtcgaagatgagtggtaaaggccaacagcagcagggccagaccgttaccaaaaagagcgcagctgaagcatctaaaaaaccgcgacagaaacgtaccgcgactaaagcgtacaatgtaacacaggccttcggtcgtcgaggtccggagcaaactcaaggaaactttggcgatcaggaattaatccgccaggggaccgactacaaacactggccgcaaattgcccagttcgccccatccgctagtgcattcttcggtatgagccgcatcggcatggaagtaacgccaagtggtacgtggctgacctacaccggtgctatcaagcttgataaaaaggacccgaactttaaagaccaggttattctgcttaacaaacatattgatgcctataaaactttcccgccgaccgaacccaaaaaggacaaaaagaaaaaagctgatgaaacccaggctctaccgcagcgtcagaaaaaacagcaaactgtgactctgctgccagctgcggacctggatgatttttccaagcagctgcaacagtctatgagctctgcggactctacgcaggctggtggttctggtcaccatcatcaccatcattaa

SEQ ID NO: 2762 - DNA, 2421 bp, Artificial Sequence
  Description of Artificial Sequence: Synthetic polynucleotide
atgaaaatcgaagaaggtaaactggtaatctggattaacggcgataaaggctataacggtctcgctgaagtcggtaagaaattcgagaaagataccggaattaaagtcaccgttgagcatccggataaactggaagagaaattcccacaggttgcggcaactggcgatggccctgacattatcttctgggcacacgaccgctttggtggctacgctcaatctggcctgttggctgaaatcaccccggacaaagcgttccaggacaagctgtatccgtttacctgggatgccgtacgttacaacggcaagctgattgcttacccgatcgctgttgaagcgttatcgctgatttataacaaagatctgctgccgaacccgccaaaaacctgggaagagatcccggcgctggataaagaactgaaagcgaaaggtaagagcgcgctgatgttcaacctgcaagaaccgtacttcacctggccgctgattgctgctgacgggggttatgcgttcaagtatgaaaacggcaagtacgacattaaagacgtgggcgtggataacgctggcgcgaaagcgggtctgaccttcctggttgacctgattaaaaacaaacacatgaatgcagacaccgattactccatcgcagaagctgcctttaataaaggcgaaacagcgatgaccatcaacggcccgtgggcatggtccaacatcgacaccagcaaagtgaattatggtgtaacggtactgccgaccttcaagggtcaaccatccaaaccgttcgttggcgtgctgagcgcaggtattaacgccgccagtccgaacaaagagctggcgaaagagttcctcgaaaactatctgctgactgatgaaggtctggaagcggttaataaagacaaaccgctgggtgccgtagcgctgaagtcttacgaggaagagttggcgaaagatccacgtattgccgccaccatggaaaacgcccagaaaggtgaaatcatgccgaacatcccgcagatgtccgctttctggtatgccgtgcgtactgcggtgatcaacgccgccagcggtcgtcagactgtcgatgaagccctgaaagacgcgcagactggtggttctggtgagaacctgtactttcaaagctcagataatgggcctcaaaaccagcgcaacgctccacgtataaccttcggtggcccgtctgactccacaggcagcaaccagaatggtgagcgtagtggagccaggtctaagcagcgccgtccccagggtctgccgaacaacacggcgagctggtttactgcgcttacccaacacggtaaagaagacttaaaattcccgcgtggccagggcgtcccgatcaacactaactcttccccggatgatcagattggttattaccgcagagcaactcgtcggattcgcggcggcgacggtaaaatgaaagatttgtctccgcgttggtacttttactatctcggcaccggtccggaagctggactgccctacggggcaaacaaggacgggatcatttgggtggctaccgaaggtgccctgaatactccaaaagatcatatcggcacccgtaaccctgctaataacgctgcgatcgttctgcaactgcctcagggtacaactctgccaaaaggcttctatgcagaagggtcgcgtggtggcagccaggcgagtagccgtagcagctcccgctctcgcaactcgtcccgtaactccactccgggctcttctcgcggcacgtccccggctcgtatggcaggtaacggtggtgacgctgctctggcgctgctactgctggacaggctgaaccagctggagtcgaagatgagtggtaaaggccaacagcagcagggccagaccgttaccaaaaagagcgcagctgaagcatctaaaaaaccgcgacagaaacgtaccgcgactaaagggtacaatgtaacacaggccttcggtcgtcgaggtccggagcaaactcaaggaaactttggcgatcaggaattaatccgccaggggaccgactacaaacactggccgcaaattgcccagttcgccccatccgctagtgcattcttcggtatgagccgcatcggcatggaagtaacgccaagtggtacgtggctgacctacaccggtgctatcaagcttgatgacaaggacccgaactttaaagaccaggttattctgcttaacaaacatattgatgcctataaaactttcccgccgaccgaacccaaaaaggacaaaaagaaaaaagctgatgaaacccaggctctaccgcagcgtcagaaaaaacagcaaactgtgactctgctgccagctgcggacctggatgatttttccaagcagctgcaacagtctatgagctctgcggactctacgcaggctggtggttctggtcaccatcatcaccatcattaa

SEQ ID NO: 2763 - DNA, 2421 bp, Artificial Sequence
  Description of Artificial Sequence: Synthetic polynucleotide
atgaaaatcgaagaaggtaaactggtaatctggattaacggcgataaaggctataacggtctcgctgaagtcggtaagaaattcgagaaagataccggaattaaagtcaccgttgagcatccggataaactggaagagaaattcccacaggttgcggcaactggcgatggccctgacattatcttctgggcacacgaccgctttggtggctacgctcaatctggcctgttggctgaaatcaccccggacaaagcgttccaggacaagctgtatccgtttacctgggatgccgtacgttacaacggcaagctgattgcttacccgatcgctgttgaagcgttatcgctgatttataacaaagatctgctgccgaacccgccaaaaacctgggaagagatcccggcgctggataaagaactgaaagcgaaaggtaagagcgcgctgatgttcaacctgcaagaaccgtacttcacctggccgctgattgctgctgacgggggttatgcgttcaagtatgaaaacggcaagtacgacattaaagacgtgggcgtggataacgctggcgcgaaagcgggtctgaccttcctggttgacctgattaaaaacaaacacatgaatgcagacaccgattactccatcgcagaagctgcctttaataaaggcgaaacagcgatgaccatcaacggcccgtgggcatggtccaacatcgacaccagcaaagtgaattatggtgtaacggtactgccgaccttcaagggtcaaccatccaaaccgttcgttggcgtgctgagcgcaggtattaacgccgccagtccgaacaaagagctggcgaaagagttcctcgaaaactatctgctgactgatgaaggtctggaagcggttaataaagacaaaccgctgggtgccgtagcgctgaagtcttacgaggaagagttggcgaaagatccacgtattgccgccaccatggaaaacgcccagaaaggtgaaatcatgccgaacatcccgcagatgtccgctttctggtatgccgtgcgtactgcggtgatcaacgccgccagcggtcgtcagactgtcgatgaagccctgaaagacgcgcagactggtggttctggtgagaacctgtactttcaaagctcagataatgggcctcaaaaccagcgcaacgctccacgtataaccttcggtggcccgtctgactccacaggcagcaaccagaatggtgagcgtagtggagccaggtctaagcagcgccgtccccagggtctgccgaacaacacggcgagctggtttactgcgcttacccaacacggtaaagaagacttaaaattcccgcgtggccagggcgtcccgatcaacactaactcttccccggatgatcagattggttattaccgcagaaaaactcgtcggattcgcggcggcgacggtaaaatgaaagatttgtctccgcgttggtacttttactatctcggcaccggtccggaagctggactgccctacggggcaaacaaggacgggatcatttgggtggctaccgaaggtgccctgaatactccaaaagatcatatcggcacccgtaaccctgctaataacgctgcgatcgttctgcaactgcctcagggtacaactctgccaaaaggcttctatgcagaagggtcgcgtggtggcagccaggcgagtagccgtagcagctcccgctctcgcaactcgtcccgtaactccactccgggctcttctcgcggcacgtccccggctcgtatggcaggtaacggtggtgacgctgctctggcgctgctactgctggacaggctgaaccagctggagtcgaagatgagtggtaaaggccaacagcagcagggccagaccgttaccaaaaagagcgcagctgaagcatctaaaaaaccgcgacagaaacgtaccgcgactaaagcgtacaatgtaacacaggccttcggtcgtcgaggtccggagcaaactcaaggaaactttggcgatcaggaattaatccgccaggggaccgactacaaacactggccgcaaattgcccagttcgccccatccgctagtgcattcttcggtatgagccgcatcggcatggaagtaacgccaagtggtacgtggctgacctacaccggtgctatcaagcttgatgacaaggacccgaactttaaagaccaggttattctgcttaacaaacatattgatgcctataaaactttcccgccgaccgaacccaaaaaggacaaaaagaaaaaagctgatgaaacccaggctctaccgcagcgtcagaaaaaacagcaaactgtgactctgctgccagctgcggacctggatgatttttccaagcagctgcaacagtctatgagctctgcggactctacgcaggctggtggttctggtcaccatcatcaccatcattaa

SEQ ID NO: 2764 - DNA, 2421 bp, Artificial Sequence
  Description of Artificial Sequence: Synthetic polynucleotide
atgaaaatcgaagaaggtaaactggtaatctggattaacggcgataaaggctataacggtctcgctgaagtcggtaagaaattcgagaaagataccggaattaaagtcaccgttgagcatccggataaactggaagagaaattcccacaggttgcggcaactggcgatggccctgacattatcttctgggcacacgaccgctttggtggctacgctcaatctggcctgttggctgaaatcaccccggacaaagcgttccaggacaagctgtatccgtttacctgggatgccgtacgttacaacggcaagctgattgcttacccgatcgctgttgaagcgttatcgctgatttataacaaagatctgctgccgaacccgccaaaaacctgggaagagatcccggcgctggataaagaactgaaagcgaaaggtaagagcgcgctgatgttcaacctgcaagaaccgtacttcacctggccgctgattgctgctgacgggggttatgcgttcaagtatgaaaacggcaagtacgacattaaagacgtgggcgtggataacgctggcgcgaaagcgggtctgaccttcctggttgacctgattaaaaacaaacacatgaatgcagacaccgattactccatcgcagaagctgcctttaataaaggcgaaacagcgatgaccatcaacggcccgtgggcatggtccaacatcgacaccagcaaagtgaattatggtgtaacggtactgccgaccttcaagggtcaaccatccaaaccgttcgttggcgtgctgagcgcaggtattaacgccgccagtccgaacaaagagctggcgaaagagttcctcgaaaactatctgctgactgatgaaggtctggaagcggttaataaagacaaaccgctgggtgccgtagcgctgaagtcttacgaggaagagttggcgaaagatccacgtattgccgccaccatggaaaacgcccagaaaggtgaaatcatgccgaacatcccgcagatgtccgctttctggtatgccgtgcgtactgcggtgatcaacgccgccagcggtcgtcagactgtcgatgaagccctgaaagacgcgcagactggtggttctggtgagaacctgtactttcaaagctcagataatgggcctcaaaaccagcgcaacgctccacgtataaccttcggtggcccgtctgactccacaggcagcaaccagaatggtgagcgtagtggagccaggtctaagcagcgccgtccccagggtctgccgaacaacacggcgagctggtttactgcgcttacccaacacggtaaagaagacttaaaattcccgcgtggccagggcgtcccgatcaacactaactcttccccggatgatcagattggttattaccgcagagcaactcgtcggattcgcggcggcgacggtaaaatgaaagatttgtctccgcgttggtacttttactatctcggcaccggtccggaagctggactgccctacggggcaaacaaggacgggatcatttgggtggctaccgaaggtgccctgaatactccaaaagatcatatcggcacccgtaaccctgctaataacgctgcgatcgccctgcaactgcctcagggtacaactctgccaaaaggcttctatgcagaagggtcgcgtggtggcagccaggcgagtagccgtagcagctcccgctctcgcaactcgtcccgtaactccactccgggctcttctcgcggcacgtccccggctcgtatggcaggtaacggtggtgacgctgctctggcgctgctactgctggacaggctgaaccagctggagtcgaagatgagtggtaaaggccaacagcagcagggccagaccgttaccaaaaagagcgcagctgaagcatctaaaaaaccgcgacagaaacgtaccgcgactaaagcgtacaatgtaacacaggccttcggtcgtcgaggtccggagcaaactcaaggaaactttggcgatcaggaattaatccgccaggggaccgactacaaacactggccgcaaattgcccagttcgccccatccgctagtgcattcttcggtatgagccgcatcggcatggaagtaacgccaagtggtacgtggctgacctacaccggtgctatcaagcttgatgacaaggacccgaactttaaagaccaggttattctgcttaacaaacatattgatgcctataaaactttcccgccgaccgaacccaaaaaggacaaaaagaaaaaagctgatgaaacccaggctctaccgcagcgtcagaaaaaacagcaaactgtgactctgctgccagctgcggacctggatgatttttccaagcagctgcaacagtctatgagctctgcggactctacgcaggctggtggttctggtcaccatcatcaccatcattaa

SEQ ID NO: 2765 - DNA, 2421 bp, Artificial Sequence
  Description of Artificial Sequence: Synthetic polynucleotide
atgaaaatcgaagaaggtaaactggtaatctggattaacggcgataaaggctataacggtctcgctgaagtcggtaagaaattcgagaaagataccggaattaaagtcaccgttgagcatccggataaactggaagagaaattcccacaggttgcggcaactggcgatggccctgacattatcttctgggcacacgaccgctttggtggctacgctcaatctggcctgttggctgaaatcaccccggacaaagcgttccaggacaagctgtatccgtttacctgggatgccgtacgttacaacggcaagctgattgcttacccgatcgctgttgaagcgttatcgctgatttataacaaagatctgctgccgaacccgccaaaaacctgggaagagatcccggcgctggataaagaactgaaagcgaaaggtaagagcgcgctgatgttcaacctgcaagaaccgtacttcacctggccgctgattgctgctgacgggggttatgcgttcaagtatgaaaacggcaagtacgacattaaagacgtgggcgtggataacgctggcgcgaaagcgggtctgaccttcctggttgacctgattaaaaacaaacacatgaatgcagacaccgattactccatcgcagaagctgcctttaataaaggcgaaacagcgatgaccatcaacggcccgtgggcatggtccaacatcgacaccagcaaagtgaattatggtgtaacggtactgccgaccttcaagggtcaaccatccaaaccgttcgttggcgtgctgagcgcaggtattaacgccgccagtccgaacaaagagctggcgaaagagttcctcgaaaactatctgctgactgatgaaggtctggaagcggttaataaagacaaaccgctgggtgccgtagcgctgaagtcttacgaggaagagttggcgaaagatccacgtattgccgccaccatggaaaacgcccagaaaggtgaaatcatgccgaacatcccgcagatgtccgctttctggtatgccgtgcgtactgcggtgatcaacgccgccagcggtcgtcagactgtcgatgaagccctgaaagacgcgcagactggtggttctggtgagaacctgtactttcaaagctcagataatgggcctcaaaaccagcgcaacgctccacgtataaccttcggtggcccgtctgactccacaggcagcaaccagaatggtgagcgtagtggagccaggtctaagcagcgccgtccccagggtctgccgaacaacacggcgagctggtttactgcgcttacccaacacggtaaagaagacttaaaattcccgcgtggccagggcgtcccgatcaacactaactcttccccggatgatcagattggttattaccgcagagcaactcgtcggattcgcggcggcgacggtaaaatgaaagatttgtctccgcgttggtacttttactatctcggcaccggtccggaagctggactgccctacggggcaaacaaggacgggatcatttgggtggctaccgaaggtgccctgaatactccaaaagatcatatcggcacccgtaaccctgctaataacgctgcgatcgttattcaactgcctcagggtacaactctgccaaaaggcttctatgcagaagggtcgcgtggtggcagccaggcgagtagccgtagcagctcccgctctcgcaactcgtcccgtaactccactccgggctcttctcgcggcacgtccccggctcgtatggcaggtaacggtggtgacgctgctctggcgctgctactgctggacaggctgaaccagctggagtcgaagatgagtggtaaaggccaacagcagcagggccagaccgttaccaaaaagagcgcagctgaagcatctaaaaaaccgcgacagaaacgtaccgcgactaaagcgtacaatgtaacacaggccttcggtcgtcgaggtccggagcaaactcaaggaaactttggcgatcaggaattaatccgccaggggaccgactacaaacactggccgcaaattgcccagttcgccccatccgctagtgcattcttcggtatgagccgcatcggcatggaagtaacgccaagtggtacgtggctgacctacaccggtgctatcaagcttgatgacaaggacccgaactttaaagaccaggttattctgcttaacaaacatattgatgcctataaaactttcccgccgaccgaacccaaaaaggacaaaaagaaaaaagctgatgaaacccaggctctaccgcagcgtcagaaaaaacagcaaactgtgactctgctgccagctgcggacctggatgatttttccaagcagctgcaacagtctatgagctctgcggactctacgcaggctggtggttctggtcaccatcatcaccatcattaa

SEQ ID NO: 2766 - DNA, 2421 bp, Artificial Sequence
  Description of Artificial Sequence: Synthetic polynucleotide
atgaaaatcgaagaaggtaaactggtaatctggattaacggcgataaaggctataacggtctcgctgaagtcggtaagaaattcgagaaagataccggaattaaagtcaccgttgagcatccggataaactggaagagaaattcccacaggttgcggcaactggcgatggccctgacattatcttctgggcacacgaccgctttggtggctacgctcaatctggcctgttggctgaaatcaccccggacaaagcgttccaggacaagctgtatccgtttacctgggatgccgtacgttacaacggcaagctgattgcttacccgatcgctgttgaagcgttatcgctgatttataacaaagatctgctgccgaacccgccaaaaacctgggaagagatcccggcgctggataaagaactgaaagcgaaaggtaagagcgcgctgatgttcaacctgcaagaaccgtacttcacctggccgctgattgctgctgacgggggttatgcgttcaagtatgaaaacggcaagtacgacattaaagacgtgggcgtggataacgctggcgcgaaagcgggtctgaccttcctggttgacctgattaaaaacaaacacatgaatgcagacaccgattactccatcgcagaagctgcctttaataaaggcgaaacagcgatgaccatcaacggcccgtgggcatggtccaacatcgacaccagcaaagtgaattatggtgtaacggtactgccgaccttcaagggtcaaccatccaaaccgttcgttggcgtgctgagcgcaggtattaacgccgccagtccgaacaaagagctggcgaaagagttcctcgaaaactatctgctgactgatgaaggtctggaagcggttaataaagacaaaccgctgggtgccgtagcgctgaagtcttacgaggaagagttggcgaaagatccacgtattgccgccaccatggaaaacgcccagaaaggtgaaatcatgccgaacatcccgcagatgtccgctttctggtatgccgtgcgtactgcggtgatcaacgccgccagcggtcgtcagactgtcgatgaagccctgaaagacgcgcagactggtggttctggtgagaacctgtactttcaaagctcagataatgggcctcaaaaccagcgcaacgctccacgtataaccttcggtggcccgtctgactccacaggcagcaaccagaatggtgagcgtagtggagccaggtctaagcagcgccgtccccagggtctgccgaacaacacggcgagctggtttactgcgcttacccaacacggtaaagaagacttaaaattcccgcgtggccagggcgtcccgatcaacactaactcttccccggatgatcagattggttattaccgcagagcaactcgtcggattcgcggcggcgacggtaaaatgaaagatttgtctccgcgttggttcttttactatctcggcaccggtccggaagctggactgccctacggggcaaacaaggacgggatcatttgggtggctaccgaaggtgccctgaatactccaaaagatcatatcggcacccgtaaccctgctaataacgctgcgatcgttctgcaactgcctcagggtacaactctgccaaaaggcttctatgcagaagggtcgcgtggtggcagccaggcgagtagccgtagcagctcccgctctcgcaactcgtcccgtaactccactccgggctcttctcgcggcacgtccccggctcgtatggcaggtaacggtggtgacgctgctctggcgctgctactgctggacaggctgaaccagctggagtcgaagatgagtggtaaaggccaacagcagcagggccagaccgttaccaaaaagagcgcagctgaagcatctaaaaaaccgcgacagaaacgtaccgcgactaaagcgtacaatgtaacacaggccttcggtcgtcgaggtccggagcaaactcaaggaaactttggcgatcaggaattaatccgccaggggaccgactacaaacactggccgcaaattgcccagttcgccccatccgctagtgcattcttcggtatgagccgcatcggcatggaagtaacgccaagtggtacgtggctgacctacaccggtgctatcaagcttgatgacaaggacccgaactttaaagaccaggttattctgcttaacaaacatattgatgcctataaaactttcccgccgaccgaacccaaaaaggacaaaaagaaaaaagctgatgaaacccaggctctaccgcagcgtcagaaaaaacagcaaactgtgactctgctgccagctgcggacctggatgatttttccaagcagctgcaacagtctatgagctctgcggactctacgcaggctggtggttctggtcaccatcatcaccatcattaa

SEQ ID NO: 2767 - DNA, 2421 bp, Artificial Sequence
  Description of Artificial Sequence: Synthetic polynucleotide
atgaaaatcgaagaaggtaaactggtaatctggattaacggcgataaaggctataacggtctcgctgaagtcggtaagaaattcgagaaagataccggaattaaagtcaccgttgagcatccggataaactggaagagaaattcccacaggttgcggcaactggcgatggccctgacattatcttctgggcacacgaccgctttggtggctacgctcaatctggcctgttggctgaaatcaccccggacaaagcgttccaggacaagctgtatccgtttacctgggatgccgtacgttacaacggcaagctgattgcttacccgatcgctgttgaagcgttatcgctgatttataacaaagatctgctgccgaacccgccaaaaacctgggaagagatcccggcgctggataaagaactgaaagcgaaaggtaagagcgcgctgatgttcaacctgcaagaaccgtacttcacctggccgctgattgctgctgacgggggttatgcgttcaagtatgaaaacggcaagtacgacattaaagacgtgggcgtggataacgctggcgcgaaagcgggtctgaccttcctggttgacctgattaaaaacaaacacatgaatgcagacaccgattactccatcgcagaagctgcctttaataaaggcgaaacagcgatgaccatcaacggcccgtgggcatggtccaacatcgacaccagcaaagtgaattatggtgtaacggtactgccgaccttcaagggtcaaccatccaaaccgttcgttggcgtgctgagcgcaggtattaacgccgccagtccgaacaaagagctggcgaaagagttcctcgaaaactatctgctgactgatgaaggtctggaagcggttaataaagacaaaccgctgggtgccgtagcgctgaagtcttacgaggaagagttggcgaaagatccacgtattgccgccaccatggaaaacgcccagaaaggtgaaatcatgccgaacatcccgcagatgtccgctttctggtatgccgtgcgtactgcggtgatcaacgccgccagcggtcgtcagactgtcgatgaagccctgaaagacgcgcagactggtggttctggtgagaacctgtactttcaaagctcagataatgggcctcaaaaccagcgcaacgctccacgtataaccttcggtggcccgtctgactccacaggcagcaaccagaatggtgagcgtagtggagccaggtctaagcagcgccgtccccagggtctgccgaacaacacggcgagctggtttactggccttacccaacacggtaaagaagacttaaaattcccgcccggccagggcgtcccgatcaacactaactcttccccggatgatcagattggttattaccgcagagcaactcgtcggattcgcggcggcgacggtaaaatgaaagatttgccaccgcgttggtacttttactatctcggcaccggtccggaagctgatctgccctacggggcagttaaggacgggatcttttgggtggctgaggaaggtgccctgaatactccaaaagatcatatcggcacccgtaaccctgctaataacgctgcgatccctctgcaactgcctccgggtacaactctgccaaaaggcttctatgcagaagggtcgcgtggtggcagccaggcgagtagccgtagcagctcccgctctcgcaactcgtcccgtaactccactccgggctcttctcgcggcacgtccccggctcgtatggcaggtaacggtggtgacgctgctctggcgctgctactgctggacaggctgaaccagctggagtcgaagatgagtggtaaaggccaacagcagcagggccagaccgttaccaaaaagagcgcagctgaagcatctaaaaaaccgcgacagaaacgtaccgcgactaaagcgtacaatgtaacacaggccttcggtcgtcgaggtccggagcaaactcaaggaaactttggcgatcaggaattaatccgccaggggaccgactacaaacactggccgcaaattgcccagttcgccccatccgctagtgcattcttcggtatgagccgcatcggcatggaagtaacgccaagtggtacgtggctgacctacaccggtgctatcaagcttgatgacaaggacccgaactttaaagaccaggttattctgcttaacaaacatattgatgcctataaaactttcccgccgaccgaacccaaaaaggacaaaaagaaaaaagctgatgaaacccaggctctaccgcagcgtcagaaaaaacagcaaactgtgactctgctgccagctgcggacctggatgatttttccaagcagctgcaacagtctatgagctctgcggactctacgcaggctggtggttctggtcaccatcatcaccatcattaa

SEQ ID NO: 2768 - DNA, 2421 bp, Artificial Sequence
  Description of Artificial Sequence: Synthetic polynucleotide
atgaaaatcgaagaaggtaaactggtaatctggattaacggcgataaaggctataacggtctcgctgaagtcggtaagaaattcgagaaagataccggaattaaagtcaccgttgagcatccggataaactggaagagaaattcccacaggttgcggcaactggcgatggccctgacattatcttctgggcacacgaccgctttggtggctacgctcaatctggcctgttggctgaaatcaccccggacaaagcgttccaggacaagctgtatccgtttacctgggatgccgtacgttacaacggcaagctgattgcttacccgatcgctgttgaagcgttatcgctgatttataacaaagatctgctgccgaacccgccaaaaacctgggaagagatcccggcgctggataaagaactgaaagcgaaaggtaagagcgcgctgatgttcaacctgcaagaaccgtacttcacctggccgctgattgctgctgacgggggttatgcgttcaagtatgaaaacggcaagtacgacattaaagacgtgggcgtggataacgctggcgcgaaagcgggtctgaccttcctggttgacctgattaaaaacaaacacatgaatgcagacaccgattactccatcgcagaagctgcctttaataaaggcgaaacagcgatgaccatcaacggcccgtgggcatggtccaacatcgacaccagcaaagtgaattatggtgtaacggtactgccgaccttcaagggtcaaccatccaaaccgttcgttggcgtgctgagcgcaggtattaacgccgccagtccgaacaaagagctggcgaaagagttcctcgaaaactatctgctgactgatgaaggtctggaagcggttaataaagacaaaccgctgggtgccgtagcgctgaagtcttacgaggaagagttggcgaaagatccacgtattgccgccaccatggaaaacgcccagaaaggtgaaatcatgccgaacatcccgcagatgtccgctttctggtatgccgtgcgtactgcggtgatcaacgccgccagcggtcgtcagactgtcgatgaagccctgaaagacgcgcagactggtggttctggtgagaacctgtactttcaaagctcagataatgggcctcaaaaccagcgcaacgctccacgtataaccttcggtggcccgtctgactccacaggcagcaaccagaatggtgagcgtagtggagccaggtctaagcagcgccgtccccagggtctgccgaacaacacggcgagctggtttactgcgcttacccaacacggtaaagaagacttaaaattcccgcgtggccagggcgtcccgatcaacactaactcttccccggatgatcagattggttattaccgcagagcaactcgtcggattcgcggcggcgacggtaaaatgaaagatttgtctccgcgttggtacttttactatctcggcaccggtccgcatgctggactgccctacggggcaaacaaggacgggatcatttgggtggctaccgaaggtgccctgaatactccaaaagatcatatcggcacccgtaaccctgctaataacgctgcgatcgttctgcaactgcctcagggtacaactctgccaaaaggcttctatgcagaagggtcgcgtggtggcagccaggcgagtagccgtagcagctcccgctctcgcaactcgtcccgtaactccactccgggctcttctcgcggcacgtccccggctcgtatggcaggtaacggtggtgacgctgctctggcgctgctactgctggacaggctgaaccagctggagtcgaagatgagtggtaaaggccaacagcagcagggccagaccgttaccaaaaagagcgcagctgaagcatctaaaaaaccgcgacagaaacgtaccgcgactaaagcgtacaatgtaacacaggccttcggtcgtcgaggtccggagcaaactcaaggaaactttggcgatcaggaattaatccgccaggggaccgactacaaacactggccgcaaattgcccagttcgccccatccgctagtgcattcttcggtatgagccgcatcggcatggaagtaacgccaagtggtacgtggctgacctacaccggtgctatcaagcttgatgacaaggacccgaactttaaagaccaggttattctgcttaacaaacatattgatgcctataaaactttcccgccgaccgaacccaaaaaggacaaaaagaaaaaagctgatgaaacccaggctctaccgcagcgtcagaaaaaacagcaaactgtgactctgctgccagctgcggacctggatgatttttccaagcagctgcaacagtctatgagctctgcggactctacgcaggctggtggttctggtcaccatcatcaccatcattaa

SEQ ID NO: 2769 - DNA, 2421 bp, Artificial Sequence
  Description of Artificial Sequence: Synthetic polynucleotide
atgaaaatcgaagaaggtaaactggtaatctggattaacggcgataaaggctataacggtctcgctgaagtcggtaagaaattcgagaaagataccggaattaaagtcaccgttgagcatccggataaactggaagagaaattcccacaggttgcggcaactggcgatggccctgacattatcttctgggcacacgaccgctttggtggctacgctcaatctggcctgttggctgaaatcaccccggacaaagcgttccaggacaagctgtatccgtttacctgggatgccgtacgttacaacggcaagctgattgcttacccgatcgctgttgaagcgttatcgctgatttataacaaagatctgctgccgaacccgccaaaaacctgggaagagatcccggcgctggataaagaactgaaagcgaaaggtaagagcgcgctgatgttcaacctgcaagaaccgtacttcacctggccgctgattgctgctgacgggggttatgcgttcaagtatgaaaacggcaagtacgacattaaagacgtgggcgtggataacgctggcgcgaaagcgggtctgaccttcctggttgacctgattaaaaacaaacacatgaatgcagacaccgattactccatcgcagaagctgcctttaataaaggcgaaacagcgatgaccatcaacggcccgtgggcatggtccaacatcgacaccagcaaagtgaattatggtgtaacggtactgccgaccttcaagggtcaaccatccaaaccgttcgttggcgtgctgagcgcaggtattaacgccgccagtccgaacaaagagctggcgaaagagttcctcgaaaactatctgctgactgatgaaggtctggaagcggttaataaagacaaaccgctgggtgccgtagcgctgaagtcttacgaggaagagttggcgaaagatccacgtattgccgccaccatggaaaacgcccagaaaggtgaaatcatgccgaacatcccgcagatgtccgctttctggtatgccgtgcgtactgcggtgatcaacgccgccagcggtcgtcagactgtcgatgaagccctgaaagacgcgcagactggtggttctggtgagaacctgtactttcaaagctcagataatgggcctcaaaaccagcgcaacgctccacgtataaccttcggtggcccgtctgactccacaggcagcaaccagaatggtgagcgtagtggagccaggtctaagcagcgccgtccccagggtctgccgaacaacacggcgagctggtttactgcgcttacccaacacggtaaagaagacttaaaattcccgcgtggccagggcgtcccgatcaacactaactcttccccggatgatcagattggttattaccgcagagcaactcgtcggattcgcggcggcgacggtaaaatgaaagatttgtctccgcgttggtacttttactatctcggcaccggtccggaagctggactgccctacggggcaaacaaggacgggatcatttgggtggctaccgaaggtgccctgaatactccaaaagatcatatcggcacccgtaaccctgctaataacgctgcgatcgttctgcaactgcctcagggtacaactctgccaaaaggcttctatgcagaagggtcgcgtggtggcagccaggcgagtagccgtagcagctcccgctctcgcaactcgtcccgtaactccactccgggctcttctcgcggcacgtccccggctcgtatggcaggtaacggtggtgacgctgctctggcgctgctactgctggacaggctgaaccagctggagtcgaagatgagtggtaaaggccaacagcagcagggccagaccgttaccaaaaagagcgcagctgaagcatctaaaaaaccgcgacagaaacgtaccgcgactaaagggtacaatgtaacacaggccttcggtcgtcgaggtccggagcaaactcaaggaaactttggcgatcaggatttaatccgcttggggaccgactacaaacactggccgcaaattgcccagttcgccccatccgctagtgcattcttcggtatgagccgcatcggcatggaagtaacgccaagtggtacgtggctgacctacaccggtgctatcaagcttgatgacaaggacccgaactttaaagaccaggttattctgcttaacaaacatattgatgcctataaaactttcccgccgaccgaacccaaaaaggacaaaaagaaaaaagctgatgaaacccaggctctaccgcagcgtcagaaaaaacagcaaactgtgactctgctgccagctgcggacctggatgatttttccaagcagctgcaacagtctatgagctctgcggactctacgcaggctggtggttctggtcaccatcatcaccatcattaa

SEQ ID NO: 2770 - DNA, 2421 bp, Artificial Sequence
  Description of Artificial Sequence: Synthetic polynucleotide
atgaaaatcgaagaaggtaaactggtaatctggattaacggcgataaaggctataacggtctcgctgaagtcggtaagaaattcgagaaagataccggaattaaagtcaccgttgagcatccggataaactggaagagaaattcccacaggttgcggcaactggcgatggccctgacattatcttctgggcacacgaccgctttggtggctacgctcaatctggcctgttggctgaaatcaccccggacaaagcgttccaggacaagctgtatccgtttacctgggatgccgtacgttacaacggcaagctgattgcttacccgatcgctgttgaagcgttatcgctgatttataacaaagatctgctgccgaacccgccaaaaacctgggaagagatcccggcgctggataaagaactgaaagcgaaaggtaagagcgcgctgatgttcaacctgcaagaaccgtacttcacctggccgctgattgctgctgacgggggttatgcgttcaagtatgaaaacggcaagtacgacattaaagacgtgggcgtggataacgctggcgcgaaagcgggtctgaccttcctggttgacctgattaaaaacaaacacatgaatgcagacaccgattactccatcgcagaagctgcctttaataaaggcgaaacagcgatgaccatcaacggcccgtgggcatggtccaacatcgacaccagcaaagtgaattatggtgtaacggtactgccgaccttcaagggtcaaccatccaaaccgttcgttggcgtgctgagcgcaggtattaacgccgccagtccgaacaaagagctggcgaaagagttcctcgaaaactatctgctgactgatgaaggtctggaagcggttaataaagacaaaccgctgggtgccgtagcgctgaagtcttacgaggaagagttggcgaaagatccacgtattgccgccaccatggaaaacgcccagaaaggtgaaatcatgccgaacatcccgcagatgtccgctttctggtatgccgtgcgtactgcggtgatcaacgccgccagcggtcgtcagactgtcgatgaagccctgaaagacgcgcagactggtggttctggtgagaacctgtactttcaaagctcagataatgggcctcaaaaccagcgcaacgctccacgtataaccttcggtggcccgtctgactccacaggcagcaaccagaatggtgagcgtagtggagccaggtctaagcagcgccgtccccagggtctgccgaacaacacggcgagctggtttactccgcttgttcaatttggtaaagaagacttaaaattcccgccgggccagggcgtcccgatcaacactaactcttccccggatgatcagattggttattaccgcagagcaactcgtcggattcgcggcggcgacggtaaaatgaaagatttgccaccgaagtggtacttttactatctcggcaccggtccgcacgctgatctgccctacgggcaaaagaaggacggggtagtgtgggtggctcgacctggtgccctgaatactccaaaagatcatatcggcacccgtaaccctgctaataacgctgcgatcccactgcaactgcctccgggtacaaaactgccaaaaggcttctatgcagaagggtcgcgtggtggcagccaggcgagtagccgtagcagctcccgctctcgcaactcgtcccgtaactccactccgggctcttctcgcggcacgtccccggctcgtatggcaggtaacggtggtgacgctgctctggcgctgctactgctggacaggctgaaccagctggagtcgaagatgagtggtaaaggccaacagcagcagggccagaccgttaccaaaaagagcgcagctgaagcatctaaaaaaccgcgacagaaacgtaccgcgactaaagcgtacaatgtaacacaggccttcggtcgtcgaggtccggagcaaactcaaggaaactttggcgatcaggaattaatccgccaggggaccgactacaaacactggccgcaaattgcccagttcgccccatccgctagtgcattcttcggtatgagccgcatcggcatggaagtaacgccaagtggtacgtggctgacctacaccggtgctatcaagcttgatgacaaggacccgaactttaaagaccaggttattctgcttaacaaacatattgatgcctataaaactttcccgccgaccgaacccaaaaaggacaaaaagaaaaaagctgatgaaacccaggctctaccgcagcgtcagaaaaaacagcaaactgtgactctgctgccagctgcggacctggatgatttttccaagcagctgcaacagtctatgagctctgcggactctacgcaggctggtggttctggtcaccatcatcaccatcattaa

SEQ ID NO: 2771 - DNA, 2421 bp, Artificial Sequence
  Description of Artificial Sequence: Synthetic polynucleotide
atgaaaatcgaagaaggtaaactggtaatctggattaacggcgataaaggctataacggtctcgctgaagtcggtaagaaattcgagaaagataccggaattaaagtcaccgttgagcatccggataaactggaagagaaattcccacaggttgcggcaactggcgatggccctgacattatcttctgggcacacgaccgctttggtggctacgctcaatctggcctgttggctgaaatcaccccggacaaagcgttccaggacaagctgtatccgtttacctgggatgccgtacgttacaacggcaagctgattgcttacccgatcgctgttgaagcgttatcgctgatttataacaaagatctgctgccgaacccgccaaaaacctgggaagagatcccggcgctggataaagaactgaaagcgaaaggtaagagcgcgctgatgttcaacctgcaagaaccgtacttcacctggccgctgattgctgctgacgggggttatgcgttcaagtatgaaaacggcaagtacgacattaaagacgtgggcgtggataacgctggcgcgaaagcgggtctgaccttcctggttgacctgattaaaaacaaacacatgaatgcagacaccgattactccatcgcagaagctgcctttaataaaggcgaaacagcgatgaccatcaacggcccgtgggcatggtccaacatcgacaccagcaaagtgaattatggtgtaacggtactgccgaccttcaagggtcaaccatccaaaccgttcgttggcgtgctgagcgcaggtattaacgccgccagtccgaacaaagagctggcgaaagagttcctcgaaaactatctgctgactgatgaaggtctggaagcggttaataaagacaaaccgctgggtgccgtagcgctgaagtcttacgaggaagagttggcgaaagatccacgtattgccgccaccatggaaaacgcccagaaaggtgaaatcatgccgaacatcccgcagatgtccgctttctggtatgccgtgcgtactgcggtgatcaacgccgccagcggtcgtcagactgtcgatgaagccctgaaagacgcgcagactggtggttctggtgagaacctgtactttcaaagctcagataatgggcctcaaaaccagcgcaacgctccacgtataaccttcggtggcccgtctgactccacaggcagcaaccagaatggtgagcgtagtggagccaggtctaagcagcgccgtccccagggtctgccgaacaacacggcgagctggtttactgcgcttacccaacacggtaaagaagacttaaaattcccgcgtggccagggcgtcccgatcaacactaactcttccccggatgatcagattggttattaccgcagagcaactcgtcggattcgcggcggcgacggtaaaatgaaagatttgtctccgcgttggtacttttactatctcggcaccggtccggaagctggactgccctacggggcaaacaaggacgggatcatttgggtggctaccgaaggtgccctgaatactccaaaagatcatatcggcacccgtaaccctgctaataacgctgcgatcgttctgcaactgcctcagggtacaactctgccaaaaggcttctatgcagaagggtcgcgtggtggcagccaggcgagtagccgtagcagctcccgctctcgcaactcgtcccgtaactccactccgggctcttctcgcggcacgtccccggctcgtatggcaggtaacggtggtgacgctgctctggcgctgctactgctggacaggctgaaccagctggagtcgaagatgagtggtaaaggccaacagcagcagggccagaccgttaccaaaaagagcgcagctgaagcatctaaaaaaccgcgacagaaacgtaccgcgactaaagcgtacaatgtaacacaggccttcggtcgtcgaggtccggagcaaactcaaggaaactttggcgatcaggaattaatccgccaggggaccgactacaaacactggccgcaaattgcccagttcgccccatccgctagtgcattcttcggtatgagccgcatcggcatggaagtaacgccaagtggtacgtggctgacctacaccggtgctatcaagcttgatgacaaggacccgaactttaaagaccaggttgagctgcttaacaaacatattgatgcctataaaactttcccgccgaccgaacccaaaaaggacaaaaagaaaaaagctgatgaaacccaggctctaccgcagcgtcagaaaaaacagcaaactgtgactctgctgccagctgcggacctggatgatttttccaagcagctgcaacagtctatgagctctgcggactctacgcaggctggtggttctggtcaccatcatcaccatcattaa

SEQ ID NO: 2772 - DNA, 2421 bp, Artificial Sequence
  Description of Artificial Sequence: Synthetic polynucleotide
atgaaaatcgaagaaggtaaactggtaatctggattaacggcgataaaggctataacggtctcgctgaagtcggtaagaaattcgagaaagataccggaattaaagtcaccgttgagcatccggataaactggaagagaaattcccacaggttgcggcaactggcgatggccctgacattatcttctgggcacacgaccgctttggtggctacgctcaatctggcctgttggctgaaatcaccccggacaaagcgttccaggacaagctgtatccgtttacctgggatgccgtacgttacaacggcaagctgattgcttacccgatcgctgttgaagcgttatcgctgatttataacaaagatctgctgccgaacccgccaaaaacctgggaagagatcccggcgctggataaagaactgaaagcgaaaggtaagagcgcgctgatgttcaacctgcaagaaccgtacttcacctggccgctgattgctgctgacgggggttatgcgttcaagtatgaaaacggcaagtacgacattaaagacgtgggcgtggataacgctggcgcgaaagcgggtctgaccttcctggttgacctgattaaaaacaaacacatgaatgcagacaccgattactccatcgcagaagctgcctttaataaaggcgaaacagcgatgaccatcaacggcccgtgggcatggtccaacatcgacaccagcaaagtgaattatggtgtaacggtactgccgaccttcaagggtcaaccatccaaaccgttcgttggcgtgctgagcgcaggtattaacgccgccagtccgaacaaagagctggcgaaagagttcctcgaaaactatctgctgactgatgaaggtctggaagcggttaataaagacaaaccgctgggtgccgtagcgctgaagtcttacgaggaagagttggcgaaagatccacgtattgccgccaccatggaaaacgcccagaaaggtgaaatcatgccgaacatcccgcagatgtccgctttctggtatgccgtgcgtactgcggtgatcaacgccgccagcggtcgtcagactgtcgatgaagccctgaaagacgcgcagactggtggttctggtgagaacctgtactttcaaagctcagataatgggcctcaaaaccagcgcaacgctccacgtataaccttcggtggcccgtctgactccacaggcagcaaccagaatggtgagcgtagtggagccaggtctaagcagcgccgtccccagggtctgccgaacaacacggcgagctggtttactgcgcttacccaacacggtaaagaagacttaaaattcccgcgtggccagggcgtcccgatcaacactaactcttccccggatgatcagattggttattaccgcagagcaactcgtcggattcgcggcggcgacggtaaaatgaaagatttgtctccgcgttggtacttttactatctcggcaccggtccggaagctggactgccctacggggcaaacaaggacgggatcatttgggtggctaccgaaggtgccctgaatactccaaaagatcatatcggcacccgtaaccctgctaataacgctgcgatcgttctgcaactgcctcagggtacaactctgccaaaaggcttctatgcagaagggtcgcgtggtggcagccaggcgagtagccgtagcagcgagcgctctcgcaactcgtcccgtaactccactccgggcgaagagcgcggcacgtccccggctcgtatggcaggtaacggtggtgacgctgctctggcgctgctactgctggacaggctgaaccagctggagtcgaagatgagtggtaaaggccaacagcagcagggccagaccgttaccaaaaagagcgcagctgaagcatctaaaaaaccgcgacagaaacgtaccgcgactaaagcgtacaatgtaacacaggccttcggtcgtcgaggtccggagcaaactcaaggaaactttggcgatcaggaattaatccgccaggggaccgactacaaacactggccgcaaattgcccagttcgccccatccgctagtgcattcttcggtatgagccgcatcggcatggaagtaacgccaagtggtacgtggctgacctacaccggtgctatcaagcttgatgacaaggacccgaactttaaagaccaggttattctgcttaacaaacatattgatgcctataaaactttcccgccgaccgaacccaaaaaggacaaaaagaaaaaagctgatgaaacccaggctctaccgcagcgtcagaaaaaacagcaaactgtgactctgctgccagctgcggacctggatgatttttccaagcagctgcaacagtctatgagctctgcggactctacgcaggctggtggttctggtcaccatcatcaccatcattaa

SEQ ID NO: 2773 - DNA, 2421 bp, Artificial Sequence
  Description of Artificial Sequence: Synthetic polynucleotide
atgaaaatcgaagaaggtaaactggtaatctggattaacggcgataaaggctataacggtctcgctgaagtcggtaagaaattcgagaaagataccggaattaaagtcaccgttgagcatccggataaactggaagagaaattcccacaggttgcggcaactggcgatggccctgacattatcttctgggcacacgaccgctttggtggctacgctcaatctggcctgttggctgaaatcaccccggacaaagcgttccaggacaagctgtatccgtttacctgggatgccgtacgttacaacggcaagctgattgcttacccgatcgctgttgaagcgttatcgctgatttataacaaagatctgctgccgaacccgccaaaaacctgggaagagatcccggcgctggataaagaactgaaagcgaaaggtaagagcgcgctgatgttcaacctgcaagaaccgtacttcacctggccgctgattgctgctgacgggggttatgcgttcaagtatgaaaacggcaagtacgacattaaagacgtgggcgtggataacgctggcgcgaaagcgggtctgaccttcctggttgacctgattaaaaacaaacacatgaatgcagacaccgattactccatcgcagaagctgcctttaataaaggcgaaacagcgatgaccatcaacggcccgtgggcatggtccaacatcgacaccagcaaagtgaattatggtgtaacggtactgccgaccttcaagggtcaaccatccaaaccgttcgttggcgtgctgagcgcaggtattaacgccgccagtccgaacaaagagctggcgaaagagttcctcgaaaactatctgctgactgatgaaggtctggaagcggttaataaagacaaaccgctgggtgccgtagcgctgaagtcttacgaggaagagttggcgaaagatccacgtattgccgccaccatggaaaacgcccagaaaggtgaaatcatgccgaacatcccgcagatgtccgctttctggtatgccgtgcgtactgcggtgatcaacgccgccagcggtcgtcagactgtcgatgaagccctgaaagacgcgcagactggtggttctggtgagaacctgtactttcaaagctcagataatgggcctcaaaaccagcgcaacgctccacgtataaccttcggtggcccgtctgactccacaggcagcaaccagaatggtgagcgtagtggagccaggtctaagcagcgccgtccccagggtctgccgaacaacacggcgagctggtttactcctcttacccaacacggtaaagaagacttaaaattcccgccgggccagggcgtcccgatcaacactaactcttccccggatgatcagattggttattaccgcagagcaactcgtcggattcgcggcggcgacggtaaaatgaaagatttgccaccgcgttggtacttttactatctcggcaccggtccggaagctgatctgccctacggggcagtaaaggacgggatcttttgggtggctgaagaaggtgccctgaatactccaaaagatcatatcggcacccgtaaccctgctaataacgctgcgatcccactgcaactgcctccgggtacaactctgccaaaaggcttctatgcagaagggtcgcgtggtggcagccaggcgagtagccgtagcagctcccgctctcgcaactcgtcccgtaactccactccgggctcttctcgcggcacgtccccggctcgtatggcaggtaacggtggtgacgctgctctggcgctgctactgctggacaggctgaaccagctggagtcgaagatgagtggtaaaggccaacagcagcagggccagaccgttaccaaaaagagcgcagctgaagcatctaaaaaaccgcgacagaaacgtaccgcgactaaagcgtacaatgtaacacaggccttcggtcgtcgaggtccggagcaaactcaaggaaactttggcgatcaggaattaatccgccaggggaccgactacaaacactggccgcaaattgcccagttcgccccatccgctagtgcattcttcggtatgagccgcatcggcatggaagtaacgccaagtggtacgtggctgacctacaccggtgctatcaagcttgatgacaaggacccgaactttaaagaccaggttattctgcttaacaaacatattgatgcctataaaactttcccgccgaccgaacccaaaaaggacaaaaagaaaaaagctgatgaaacccaggctctaccgcagcgtcagaaaaaacagcaaactgtgactctgctgccagctgcggacctggatgatttttccaagcagctgcaacagtctatgagctctgcggactctacgcaggctggtggttctggtcaccatcatcaccatcattaa

SEQ ID NO: 2774 - DNA, 2421 bp, Artificial Sequence
  Description of Artificial Sequence: Synthetic polynucleotide
atgaaaatcgaagaaggtaaactggtaatctggattaacggcgataaaggctataacggtctcgctgaagtcggtaagaaattcgagaaagataccggaattaaagtcaccgttgagcatccggataaactggaagagaaattcccacaggttgcggcaactggcgatggccctgacattatcttctgggcacacgaccgctttggtggctacgctcaatctggcctgttggctgaaatcaccccggacaaagcgttccaggacaagctgtatccgtttacctgggatgccgtacgttacaacggcaagctgattgcttacccgatcgctgttgaagcgttatcgctgatttataacaaagatctgctgccgaacccgccaaaaacctgggaagagatcccggcgctggataaagaactgaaagcgaaaggtaagagcgcgctgatgttcaacctgcaagaaccgtacttcacctggccgctgattgctgctgacgggggttatgcgttcaagtatgaaaacggcaagtacgacattaaagacgtgggcgtggataacgctggcgcgaaagcgggtctgaccttcctggttgacctgattaaaaacaaacacatgaatgcagacaccgattactccatcgcagaagctgcctttaataaaggcgaaacagcgatgaccatcaacggcccgtgggcatggtccaacatcgacaccagcaaagtgaattatggtgtaacggtactgccgaccttcaagggtcaaccatccaaaccgttcgttggcgtgctgagcgcaggtattaacgccgccagtccgaacaaagagctggcgaaagagttcctcgaaaactatctgctgactgatgaaggtctggaagcggttaataaagacaaaccgctgggtgccgtagcgctgaagtcttacgaggaagagttggcgaaagatccacgtattgccgccaccatggaaaacgcccagaaaggtgaaatcatgccgaacatcccgcagatgtccgctttctggtatgccgtgcgtactgcggtgatcaacgccgccagcggtcgtcagactgtcgatgaagccctgaaagacgcgcagactggtggttctggtgagaacctgtactttcaaagctcagataatgggcctcaaaaccagcgcaacgctccacgtataaccttcggtggcccgtctgactccacaggcagcaaccagaatggtgagcgtagtggagccaggtctaagcagcgccgtccccagggtctgccgaacaacacggcgagctggtttactgcgcttacccaacacggtaaagaagacttaaaattcccgcgtggccagggctggccgatcaacactaactcttccccggatgatcagattggttattaccgcagagcaactcgtcggattcgcggcggcgacggtaaaatgaaagatttgtctccgcgttggtacttttactatctcggcaccggtccggaagctggactgccctacggggcaaacaaggacgggatcatttgggtggctaccgaaggtgccctgaatactccaaaagatcatatcggcacccgtaaccctgctaataacgctgcgatcgttctgcaactgcctcagggtacaactctgccaaaaggcttctatgcagaagggtcgcgtggtggcagccaggcgagtagccgtagcagctcccgctctcgcaactcgtcccgtaactccactccgggctcttctcgcggcacgtccccggctcgtatggcaggtaacggtggtgacgctgctctggcgctgctactgctggacaggctgaaccagctggagtcgaagatgagtggtaaaggccaacagcagcagggccagaccgttaccaaaaagagcgcagctgaagcatctaaaaaaccgcgacagaaacgtaccgcgactaaagcgtacaatgtaacacaggccttcggtcgtcgaggtccggagcaaactcaaggaaactttggcgatcaggaattaatccgccaggggaccgactacaaacactggccgcaaattgcccagttcgccccatccgctagtgcattcttcggtatgagccgcatcggcatggaagtaacgccaagtggtacgtggctgacctacaccggtgctatcaagcttgatgacaaggacccgaactttaaagaccaggttattctgcttaacaaacatattgatgcctataaaactttcccgccgaccgaacccaaaaaggacaaaaagaaaaaagctgatgaaacccaggctctaccgcagcgtcagaaaaaacagcaaactgtgactctgctgccagctgcggacctggatgatttttccaagcagctgcaacagtctatgagctctgcggactctacgcaggctggtggttctggtcaccatcatcaccatcattaa

SEQ ID NO: 2775 - DNA, 2421 bp, Artificial Sequence
  Description of Artificial Sequence: Synthetic polynucleotide
atgaaaatcgaagaaggtaaactggtaatctggattaacggcgataaaggctataacggtctcgctgaagtcggtaagaaattcgagaaagataccggaattaaagtcaccgttgagcatccggataaactggaagagaaattcccacaggttgcggcaactggcgatggccctgacattatcttctgggcacacgaccgctttggtggctacgctcaatctggcctgttggctgaaatcaccccggacaaagcgttccaggacaagctgtatccgtttacctgggatgccgtacgttacaacggcaagctgattgcttacccgatcgctgttgaagcgttatcgctgatttataacaaagatctgctgccgaacccgccaaaaacctgggaagagatcccggcgctggataaagaactgaaagcgaaaggtaagagcgcgctgatgttcaacctgcaagaaccgtacttcacctggccgctgattgctgctgacgggggttatgcgttcaagtatgaaaacggcaagtacgacattaaagacgtgggcgtggataacgctggcgcgaaagcgggtctgaccttcctggttgacctgattaaaaacaaacacatgaatgcagacaccgattactccatcgcagaagctgcctttaataaaggcgaaacagcgatgaccatcaacggcccgtgggcatggtccaacatcgacaccagcaaagtgaattatggtgtaacggtactgccgaccttcaagggtcaaccatccaaaccgttcgttggcgtgctgagcgcaggtattaacgccgccagtccgaacaaagagctggcgaaagagttcctcgaaaactatctgctgactgatgaaggtctggaagcggttaataaagacaaaccgctgggtgccgtagcgctgaagtcttacgaggaagagttggcgaaagatccacgtattgccgccaccatggaaaacgcccagaaaggtgaaatcatgccgaacatcccgcagatgtccgctttctggtatgccgtgcgtactgcggtgatcaacgccgccagcggtcgtcagactgtcgatgaagccctgaaagacgcgcagactggtggttctggtgagaacctgtactttcaaagctcagataatgggcctcaaaaccagcgcaacgctccacgtataaccttcggtggcccgtctgactccacaggcagcaaccagaatggtgagcgtagtggagccaggtctaagcagcgccgtccccagggtctgccgaacaacacggcgagctggtttactgcgcttacccaacacggtaaagaagacttaaaattcccgcgtggccagggcgtcccgatcaacactaactcttccccggatgatcagattggttattaccgcagagcaactcgtcggattcgcggcggcgacggtaaaatgaaagatttgtctccgcgttggtacttttactatctcggcaccggtccggaagctggactgccctacggggcaaacaaggacgggatcatttgggtggctaccgaaggtgccctgaatactccaaaagatcatatcggcacccgtaaccctgctaataacgctgcgatctcactgcaactgcctcagggtacaactctgccaaaaggcttctatgcagaagggtcgcgtggtggcagccaggcgagtagccgtagcagctcccgctctcgcaactcgtcccgtaactccactccgggctcttctcgcggcacgtccccggctcgtatggcaggtaacggtggtgacgctgctctggcgctgctactgctggacaggctgaaccagctggagtcgaagatgagtggtaaaggccaacagcagcagggccagaccgttaccaaaaagagcgcagctgaagcatctaaaaaaccgcgacagaaacgtaccgcgactaaagcgtacaatgtaacacaggccttcggtcgtcgaggtccggagcaaactcaaggaaactttggcgatcaggaattaatccgccaggggaccgactacaaacactggccgcaaattgcccagttcgccccatccgctagtgcattcttcggtatgagccgcatcggcatggaagtaacgccaagtggtacgtggctgacctacaccggtgctatcaagcttgatgacaaggacccgaactttaaagaccaggttattctgcttaacaaacatattgatgcctataaaactttcccgccgaccgaacccaaaaaggacaaaaagaaaaaagctgatgaaacccaggctctaccgcagcgtcagaaaaaacagcaaactgtgactctgctgccagctgcggacctggatgatttttccaagcagctgcaacagtctatgagctctgcggactctacgcaggctggtggttctggtcaccatcatcaccatcattaa

SEQ ID NO: 2776 - DNA, 2421 bp, Artificial Sequence
  Description of Artificial Sequence: Synthetic polynucleotide
atgaaaatcgaagaaggtaaactggtaatctggattaacggcgataaaggctataacggtctcgctgaagtcggtaagaaattcgagaaagataccggaattaaagtcaccgttgagcatccggataaactggaagagaaattcccacaggttgcggcaactggcgatggccctgacattatcttctgggcacacgaccgctttggtggctacgctcaatctggcctgttggctgaaatcaccccggacaaagcgttccaggacaagctgtatccgtttacctgggatgccgtacgttacaacggcaagctgattgcttacccgatcgctgttgaagcgttatcgctgatttataacaaagatctgctgccgaacccgccaaaaacctgggaagagatcccggcgctggataaagaactgaaagcgaaaggtaagagcgcgctgatgttcaacctgcaagaaccgtacttcacctggccgctgattgctgctgacgggggttatgcgttcaagtatgaaaacggcaagtacgacattaaagacgtgggcgtggataacgctggcgcgaaagcgggtctgaccttcctggttgacctgattaaaaacaaacacatgaatgcagacaccgattactccatcgcagaagctgcctttaataaaggcgaaacagcgatgaccatcaacggcccgtgggcatggtccaacatcgacaccagcaaagtgaattatggtgtaacggtactgccgaccttcaagggtcaaccatccaaaccgttcgttggcgtgctgagcgcaggtattaacgccgccagtccgaacaaagagctggcgaaagagttcctcgaaaactatctgctgactgatgaaggtctggaagcggttaataaagacaaaccgctgggtgccgtagcgctgaagtcttacgaggaagagttggcgaaagatccacgtattgccgccaccatggaaaacgcccagaaaggtgaaatcatgccgaacatcccgcagatgtccgctttctggtatgccgtgcgtactgcggtgatcaacgccgccagcggtcgtcagactgtcgatgaagccctgaaagacgcgcagactggtggttctggtgagaacctgtactttcaaagctcagataatgggcctcaaaaccagcgcaacgctccacgtataaccttcggtggcccgtctgactccacaggcagcaaccagaatggtgagcgtagtggagccaggtctaagcagcgccgtccccagggtctgccgaacaacacggcgagctggtttactgcgcttacccaacacggtaaagaagacttaaaattcccgcgtggccagggcgtcccgatcaacactaactcttccccggatgatcagattggttattaccgcagagcaactcgtcggattcgcggcggcgacggtaaaatgaaagatttgtctccgcgttggtacttttactatctcggcaccggtccggaagctggactgccctacggggcaaacaaggacgggatcatttgggtggctaccgaaggtgccctgaatactccaaaagatcatatcggcacccgtaaccctgctaataacgctgcggaggttctgcaactgcctcagggtacaactctgccaaaaggcttctatgcagaagggtcgcgtggtggcagccaggcgagtagccgtagcagctcccgctctcgcaactcgtcccgtaactccactccgggctcttctcgcggcacgtccccggctcgtatggcaggtaacggtggtgacgctgctctggcgctgctactgctggacaggctgaaccagctggagtcgaagatgagtggtaaaggccaacagcagcagggccagaccgttaccaaaaagagcgcagctgaagcatctaaaaaaccgcgacagaaacgtaccgcgactaaagcgtacaatgtaacacaggccttcggtcgtcgaggtccggagcaaactcaaggaaactttggcgatcaggaattaatccgccaggggaccgactacaaacactggccgcaaattgcccagttcgccccatccgctagtgcattcttcggtatgagccgcatcggcatggaagtaacgccaagtggtacgtggctgacctacaccggtgctatcaagcttgatgacaaggacccgaactttaaagaccaggttattctgcttaacaaacatattgatgcctataaaactttcccgccgaccgaacccaaaaaggacaaaaagaaaaaagctgatgaaacccaggctctaccgcagcgtcagaaaaaacagcaaactgtgactctgctgccagctgcggacctggatgatttttccaagcagctgcaacagtctatgagctctgcggactctacgcaggctggtggttctggtcaccatcatcaccatcattaa

SEQ ID NO: 2777 - DNA, 2421 bp, Artificial Sequence
  Description of Artificial Sequence: Synthetic polynucleotide
atgaaaatcgaagaaggtaaactggtaatctggattaacggcgataaaggctataacggtctcgctgaagtcggtaagaaattcgagaaagataccggaattaaagtcaccgttgagcatccggataaactggaagagaaattcccacaggttgcggcaactggcgatggccctgacattatcttctgggcacacgaccgctttggtggctacgctcaatctggcctgttggctgaaatcaccccggacaaagcgttccaggacaagctgtatccgtttacctgggatgccgtacgttacaacggcaagctgattgcttacccgatcgctgttgaagcgttatcgctgatttataacaaagatctgctgccgaacccgccaaaaacctgggaagagatcccggcgctggataaagaactgaaagcgaaaggtaagagcgcgctgatgttcaacctgcaagaaccgtacttcacctggccgctgattgctgctgacgggggttatgcgttcaagtatgaaaacggcaagtacgacattaaagacgtgggcgtggataacgctggcgcgaaagcgggtctgaccttcctggttgacctgattaaaaacaaacacatgaatgcagacaccgattactccatcgcagaagctgcctttaataaaggcgaaacagcgatgaccatcaacggcccgtgggcatggtccaacatcgacaccagcaaagtgaattatggtgtaacggtactgccgaccttcaagggtcaaccatccaaaccgttcgttggcgtgctgagcgcaggtattaacgccgccagtccgaacaaagagctggcgaaagagttcctcgaaaactatctgctgactgatgaaggtctggaagcggttaataaagacaaaccgctgggtgccgtagcgctgaagtcttacgaggaagagttggcgaaagatccacgtattgccgccaccatggaaaacgcccagaaaggtgaaatcatgccgaacatcccgcagatgtccgctttctggtatgccgtgcgtactgcggtgatcaacgccgccagcggtcgtcagactgtcgatgaagccctgaaagacgcgcagactggtggttctggtgagaacctgtactttcaaagctcagataatgggcctcaaaaccagcgcaacgctccacgtataaccttcggtggcccgtctgactccacaggcagcaaccagaatggtgagcgtagtggagccaggtctaagcagcgccgtccccagggtctgccgaacaacacggcgagctggtttactgcgcttacccaacacggtaaagaagacttaaaattcccgcgtggccagggcgtcccgatcaacactaactcttccccggatgatcagattggttattaccgcagagcaactcgtcggattcgcggcggcgacggtaaaatgaaagatttgtctccgcgttggtacttttactatctcggcaccggtccggaagctggactgccctacggggcaaacaaggacgggatcttttgggtggctaccgaaggtgccctgaatactccaaaagatcatatcggcacccgtaaccctgctaataacgctgcgatcgttctgcaactgcctcagggtacaactctgccaaaaggcttctatgcagaagggtcgcgtggtggcagccaggcgagtagccgtagcagctcccgctctcgcaactcgtcccgtaactccactccgggctcttctcgcggcacgtccccggctcgtatggcaggtaacggtggtgacgctgctctggcgctgctactgctggacaggctgaaccagctggagtcgaagatgagtggtaaaggccaacagcagcagggccagaccgttaccaaaaagagcgcagctgaagcatctaaaaaaccgcgacagaaacgtaccgcgactaaagcgtacaatgtaacacaggccttcggtcgtcgaggtccggagcaaactcaaggaaactttggcgatcaggaattaatccgccaggggaccgactacaaacactggccgcaaattgcccagttcgccccatccgctagtgcattcttcggtatgagccgcatcggcatggaagtaacgccaagtggtacgtggctgacctacaccggtgctatcaagcttgatgacaaggacccgaactttaaagaccaggttattctgcttaacaaacatattgatgcctataaaactttcccgccgaccgaacccaaaaaggacaaaaagaaaaaagctgatgaaacccaggctctaccgcagcgtcagaaaaaacagcaaactgtgactctgctgccagctgcggacctggatgatttttccaagcagctgcaacagtctatgagctctgcggactctacgcaggctggtggttctggtcaccatcatcaccatcattaa

SEQ ID NO: 2778 - DNA, 2421 bp, Artificial Sequence
  Description of Artificial Sequence: Synthetic polynucleotide
atgaaaatcgaagaaggtaaactggtaatctggattaacggcgataaaggctataacggtctcgctgaagtcggtaagaaattcgagaaagataccggaattaaagtcaccgttgagcatccggataaactggaagagaaattcccacaggttgcggcaactggcgatggccctgacattatcttctgggcacacgaccgctttggtggctacgctcaatctggcctgttggctgaaatcaccccggacaaagcgttccaggacaagctgtatccgtttacctgggatgccgtacgttacaacggcaagctgattgcttacccgatcgctgttgaagcgttatcgctgatttataacaaagatctgctgccgaacccgccaaaaacctgggaagagatcccggcgctggataaagaactgaaagcgaaaggtaagagcgcgctgatgttcaacctgcaagaaccgtacttcacctggccgctgattgctgctgacgggggttatgcgttcaagtatgaaaacggcaagtacgacattaaagacgtgggcgtggataacgctggcgcgaaagcgggtctgaccttcctggttgacctgattaaaaacaaacacatgaatgcagacaccgattactccatcgcagaagctgcctttaataaaggcgaaacagcgatgaccatcaacggcccgtgggcatggtccaacatcgacaccagcaaagtgaattatggtgtaacggtactgccgaccttcaagggtcaaccatccaaaccgttcgttggcgtgctgagcgcaggtattaacgccgccagtccgaacaaagagctggcgaaagagttcctcgaaaactatctgctgactgatgaaggtctggaagcggttaataaagacaaaccgctgggtgccgtagcgctgaagtcttacgaggaagagttggcgaaagatccacgtattgccgccaccatggaaaacgcccagaaaggtgaaatcatgccgaacatcccgcagatgtccgctttctggtatgccgtgcgtactgcggtgatcaacgccgccagcggtcgtcagactgtcgatgaagccctgaaagacgcgcagactggtggttctggtgagaacctgtactttcaaagctcagataatgggcctcaaaaccagcgcaacgctccacgtataaccttcggtggcccgtctgactccacaggcagcaaccagaatggtgagcgtagtggagccaggtctaagcagcgccgtccccagggtctgccgaacaacacggcgagctggtttactgcgcttacccaacacggtaaagaagacttaaaattcccgcgtggccagggcgtcccgatcaacactaactcttccccggatgatcagattggttattaccgcagagcaactcgtcggattcgcggcggcgacggtaaaatgaaagatttgtctccgcgttggtacttttactatctcggcaccggtccggaagctggactgccctacggggcaaacaaggacgggatcatttgggtggctaccgaaggtgccctgaatactccaaaagatcatatcggcacccgtaaccctgctaataacgctgcgatcgttctgcaactgcctcagggtacaactctgccaaaaggcttctatgcagaagggtcgcgtggtggcagccaggcgagtagccgtagcagctcccgctctcgcaactcgtcccgtaactccactccgggctcttctcgcggcacgtccccggctcgtatggcaggtaacggtggtgacgctgctctggcgctgctactgctggacaggctgaaccagctggagtcgaagatgagtggtaaaggccaacagcagcagggccagaccgttaccaaaaagagcgcagctgaagcatctaaaaaaccgcgacagaaacgtaccgcgactaaagcgtacaatgtaacacaggccttcggtcgtcgaggtccggagcaaactcaaggaaactttggcgatcaggaattaatccgccaggggaccgactacaaacactggccgcaaattgcccagttcgccccatccgctagtgcattcttcggtatgagccgcatcggcatggaagtaaatccaagtggtacgtggctgacctacaccggtgctatcaagcttgatgacaaggacccgaactttaaagaccaggttattctgcttaacaaacatattgatgcctataaaactttcccgccgaccgaacccaaaaaggacaaaaagaaaaaagctgatgaaacccaggctctaccgcagcgtcagaaaaaacagcaaactgtgactctgctgccagctgcggacctggatgatttttccaagcagctgcaacagtctatgagctctgcggactctacgcaggctggtggttctggtcaccatcatcaccatcattaa

SEQ ID NO: 2779 - DNA, 2421 bp, Artificial Sequence
  Description of Artificial Sequence: Synthetic polynucleotide
atgaaaatcgaagaaggtaaactggtaatctggattaacggcgataaaggctataacggtctcgctgaagtcggtaagaaattcgagaaagataccggaattaaagtcaccgttgagcatccggataaactggaagagaaattcccacaggttgcggcaactggcgatggccctgacattatcttctgggcacacgaccgctttggtggctacgctcaatctggcctgttggctgaaatcaccccggacaaagcgttccaggacaagctgtatccgtttacctgggatgccgtacgttacaacggcaagctgattgcttacccgatcgctgttgaagcgttatcgctgatttataacaaagatctgctgccgaacccgccaaaaacctgggaagagatcccggcgctggataaagaactgaaagcgaaaggtaagagcgcgctgatgttcaacctgcaagaaccgtacttcacctggccgctgattgctgctgacgggggttatgcgttcaagtatgaaaacggcaagtacgacattaaagacgtgggcgtggataacgctggcgcgaaagcgggtctgaccttcctggttgacctgattaaaaacaaacacatgaatgcagacaccgattactccatcgcagaagctgcctttaataaaggcgaaacagcgatgaccatcaacggcccgtgggcatggtccaacatcgacaccagcaaagtgaattatggtgtaacggtactgccgaccttcaagggtcaaccatccaaaccgttcgttggcgtgctgagcgcaggtattaacgccgccagtccgaacaaagagctggcgaaagagttcctcgaaaactatctgctgactgatgaaggtctggaagcggttaataaagacaaaccgctgggtgccgtagcgctgaagtcttacgaggaagagttggcgaaagatccacgtattgccgccaccatggaaaacgcccagaaaggtgaaatcatgccgaacatcccgcagatgtccgctttctggtatgccgtgcgtactgcggtgatcaacgccgccagcggtcgtcagactgtcgatgaagccctgaaagacgcgcagactggtggttctggtgagaacctgtactttcaaagctcagataatgggcctcaaaaccagcgcaacgctccacgtataaccttcggtggcccgtctgactccacaggcagcaaccagaatggtgagcgtagtggagccaggtctaagcagcgccgtccccagggtctgccgaacaacacggcgagctggtttactgcgcttacccaacacggtaaagaagacttaaaattcccgcgtggccagggcgtcccgatcaacactaactcttccccggatgatcagattggttattaccgcagagcaactcgtcggattcgcggcggcgacggtaaaatgaaagatttggcaccgcgttggtacttttactatctcggcaccggtccggaagctggactgccctacggggcaaacaaggacgggatcatttgggtggctaccgaaggtgccctgaatactccaaaagatcatatcggcacccgtaaccctgctaataacgctgcgatcgttctgcaactgcctcagggtacaactctgccaaaaggcttctatgcagaagggtcgcgtggtggcagccaggcgagtagccgtagcagctcccgctctcgcaactcgtcccgtaactccactccgggctcttctcgcggcacgtccccggctcgtatggcaggtaacggtggtgacgctgctctggcgctgctactgctggacaggctgaaccagctggagtcgaagatgagtggtaaaggccaacagcagcagggccagaccgttaccaaaaagagcgcagctgaagcatctaaaaaaccgcgacagaaacgtaccgcgactaaagcgtacaatgtaacacaggccttcggtcgtcgaggtccggagcaaactcaaggaaactttggcgatcaggaattaatccgccaggggaccgactacaaacactggccgcaaattgcccagttcgccccatccgctagtgcattcttcggtatgagccgcatcggcatggaagtaacgccaagtggtacgtggctgacctacaccggtgctatcaagcttgatgacaaggacccgaactttaaagaccaggttattctgcttaacaaacatattgatgcctataaaactttcccgccgaccgaacccaaaaaggacaaaaagaaaaaagctgatgaaacccaggctctaccgcagcgtcagaaaaaacagcaaactgtgactctgctgccagctgcggacctggatgatttttccaagcagctgcaacagtctatgagctctgcggactctacgcaggctggtggttctggtcaccatcatcaccatcattaa

SEQ ID NO: 2780 - DNA, 2421 bp, Artificial Sequence
  Description of Artificial Sequence: Synthetic polynucleotide
atgaaaatcgaagaaggtaaactggtaatctggattaacggcgataaaggctataacggtctcgctgaagtcggtaagaaattcgagaaagataccggaattaaagtcaccgttgagcatccggataaactggaagagaaattcccacaggttgcggcaactggcgatggccctgacattatcttctgggcacacgaccgctttggtggctacgctcaatctggcctgttggctgaaatcaccccggacaaagcgttccaggacaagctgtatccgtttacctgggatgccgtacgttacaacggcaagctgattgcttacccgatcgctgttgaagcgttatcgctgatttataacaaagatctgctgccgaacccgccaaaaacctgggaagagatcccggcgctggataaagaactgaaagcgaaaggtaagagcgcgctgatgttcaacctgcaagaaccgtacttcacctggccgctgattgctgctgacgggggttatgcgttcaagtatgaaaacggcaagtacgacattaaagacgtgggcgtggataacgctggcgcgaaagcgggtctgaccttcctggttgacctgattaaaaacaaacacatgaatgcagacaccgattactccatcgcagaagctgcctttaataaaggcgaaacagcgatgaccatcaacggcccgtgggcatggtccaacatcgacaccagcaaagtgaattatggtgtaacggtactgccgaccttcaagggtcaaccatccaaaccgttcgttggcgtgctgagcgcaggtattaacgccgccagtccgaacaaagagctggcgaaagagttcctcgaaaactatctgctgactgatgaaggtctggaagcggttaataaagacaaaccgctgggtgccgtagcgctgaagtcttacgaggaagagttggcgaaagatccacgtattgccgccaccatggaaaacgcccagaaaggtgaaatcatgccgaacatcccgcagatgtccgctttctggtatgccgtgcgtactgcggtgatcaacgccgccagcggtcgtcagactgtcgatgaagccctgaaagacgcgcagactggtggttctggtgagaacctgtactttcaaagctcagataatgggcctcaaaaccagcgcaacgctccacgtataaccttcggtggcccgtctgactccacaggcagcaaccagaatggtgagcgtagtggagccaggtctaagcagcgccgtccccagggtctgccgaacaacacggcgagctggtttactgcgcttacccaacacggtaaagaagacttaaaattcccgcgtggccagggcgtcccgatcaacactaactcttccccggatgatcagattggttattaccgcagagcaactcgtcggattcgcggcggcgacggtaaaatgaaagatttgtctccgcgttggtacttttactatctcggcaccggtccggaagctggactgccctacgggcataacaaggacgggatcatttgggtggctaccgaaggtgccctgaatactccaaaagatcatatcggcacccgtaaccctgctaataacgctgcgatcgttctgcaactgcctcagggtacaactctgccaaaaggcttctatgcagaagggtcgcgtggtggcagccaggcgagtagccgtagcagctcccgctctcgcaactcgtcccgtaactccactccgggctcttctcgcggcacgtccccggctcgtatggcaggtaacggtggtgacgctgctctggcgctgctactgctggacaggctgaaccagctggagtcgaagatgagtggtaaaggccaacagcagcagggccagaccgttaccaaaaagagcgcagctgaagcatctaaaaaaccgcgacagaaacgtaccgcgactaaagcgtacaatgtaacacaggccttcggtcgtcgaggtccggagcaaactcaaggaaactttggcgatcaggaattaatccgccaggggaccgactacaaacactggccgcaaattgcccagttcgccccatccgctagtgcattcttcggtatgagccgcatcggcatggaagtaacgccaagtggtacgtggctgacctacaccggtgctatcaagcttgatgacaaggacccgaactttaaagaccaggttattctgcttaacaaacatattgatgcctataaaactttcccgccgaccgaacccaaaaaggacaaaaagaaaaaagctgatgaaacccaggctctaccgcagcgtcagaaaaaacagcaaactgtgactctgctgccagctgcggacctggatgatttttccaagcagctgcaacagtctatgagctctgcggactctacgcaggctggtggttctggtcaccatcatcaccatcattaa

SEQ ID NO: 2781 - DNA, 2421 bp, Artificial Sequence
  Description of Artificial Sequence: Synthetic polynucleotide
atgaaaatcgaagaaggtaaactggtaatctggattaacggcgataaaggctataacggtctcgctgaagtcggtaagaaattcgagaaagataccggaattaaagtcaccgttgagcatccggataaactggaagagaaattcccacaggttgcggcaactggcgatggccctgacattatcttctgggcacacgaccgctttggtggctacgctcaatctggcctgttggctgaaatcaccccggacaaagcgttccaggacaagctgtatccgtttacctgggatgccgtacgttacaacggcaagctgattgcttacccgatcgctgttgaagcgttatcgctgatttataacaaagatctgctgccgaacccgccaaaaacctgggaagagatcccggcgctggataaagaactgaaagcgaaaggtaagagcgcgctgatgttcaacctgcaagaaccgtacttcacctggccgctgattgctgctgacgggggttatgcgttcaagtatgaaaacggcaagtacgacattaaagacgtgggcgtggataacgctggcgcgaaagcgggtctgaccttcctggttgacctgattaaaaacaaacacatgaatgcagacaccgattactccatcgcagaagctgcctttaataaaggcgaaacagcgatgaccatcaacggcccgtgggcatggtccaacatcgacaccagcaaagtgaattatggtgtaacggtactgccgaccttcaagggtcaaccatccaaaccgttcgttggcgtgctgagcgcaggtattaacgccgccagtccgaacaaagagctggcgaaagagttcctcgaaaactatctgctgactgatgaaggtctggaagcggttaataaagacaaaccgctgggtgccgtagcgctgaagtcttacgaggaagagttggcgaaagatccacgtattgccgccaccatggaaaacgcccagaaaggtgaaatcatgccgaacatcccgcagatgtccgctttctggtatgccgtgcgtactgcggtgatcaacgccgccagcggtcgtcagactgtcgatgaagccctgaaagacgcgcagactggtggttctggtgagaacctgtactttcaaagctcagataatgggcctcaaaaccagcgcaacgctccacgtataaccttcggtggcccgtctgactccacaggcagcaaccagaatggtgagcgtagtggagccaggtctaagcagcgccgtccccagggtctgccgaacaacacggcgagctggtttactgcgcttacccaacacggtaaagaagacttaaaattcccgcgtggccagggcgtcccgatcaacactaactcttccccggatgatcagattggttattaccgcagagcaactcgtcggattcgcggcggcgacggtaaaatgaaagatttgtctccgcgttggtacttttactatctcggcaccggtccggaagctggactgccctacggggcaaacaaggacgggatcatttgggtggctaccgaaggtgccctgaatactccaaaagatcatatcggcacccgtaaccctgctaataacgctgcgatcgttctgcaactgcctccaggtacaactctgccaaaaggcttctatgcagaagggtcgcgtggtggcagccaggcgagtagccgtagcagctcccgctctcgcaactcgtcccgtaactccactccgggctcttctcgcggcacgtccccggctcgtatggcaggtaacggtggtgacgctgctctggcgctgctactgctggacaggctgaaccagctggagtcgaagatgagtggtaaaggccaacagcagcagggccagaccgttaccaaaaagagcgcagctgaagcatctaaaaaaccgcgacagaaacgtaccgcgactaaagcgtacaatgtaacacaggccttcggtcgtcgaggtccggagcaaactcaaggaaactttggcgatcaggaattaatccgccaggggaccgactacaaacactggccgcaaattgcccagttcgccccatccgctagtgcattcttcggtatgagccgcatcggcatggaagtaacgccaagtggtacgtggctgacctacaccggtgctatcaagcttgatgacaaggacccgaactttaaagaccaggttattctgcttaacaaacatattgatgcctataaaactttcccgccgaccgaacccaaaaaggacaaaaagaaaaaagctgatgaaacccaggctctaccgcagcgtcagaaaaaacagcaaactgtgactctgctgccagctgcggacctggatgatttttccaagcagctgcaacagtctatgagctctgcggactctacgcaggctggtggttctggtcaccatcatcaccatcattaa

SEQ ID NO: 2782 - DNA, 2421 bp, Artificial Sequence
  Description of Artificial Sequence: Synthetic polynucleotide
atgaaaatcgaagaaggtaaactggtaatctggattaacggcgataaaggctataacggtctcgctgaagtcggtaagaaattcgagaaagataccggaattaaagtcaccgttgagcatccggataaactggaagagaaattcccacaggttgcggcaactggcgatggccctgacattatcttctgggcacacgaccgctttggtggctacgctcaatctggcctgttggctgaaatcaccccggacaaagcgttccaggacaagctgtatccgtttacctgggatgccgtacgttacaacggcaagctgattgcttacccgatcgctgttgaagcgttatcgctgatttataacaaagatctgctgccgaacccgccaaaaacctgggaagagatcccggcgctggataaagaactgaaagcgaaaggtaagagcgcgctgatgttcaacctgcaagaaccgtacttcacctggccgctgattgctgctgacgggggttatgcgttcaagtatgaaaacggcaagtacgacattaaagacgtgggcgtggataacgctggcgcgaaagcgggtctgaccttcctggttgacctgattaaaaacaaacacatgaatgcagacaccgattactccatcgcagaagctgcctttaataaaggcgaaacagcgatgaccatcaacggcccgtgggcatggtccaacatcgacaccagcaaagtgaattatggtgtaacggtactgccgaccttcaagggtcaaccatccaaaccgttcgttggcgtgctgagcgcaggtattaacgccgccagtccgaacaaagagctggcgaaagagttcctcgaaaactatctgctgactgatgaaggtctggaagcggttaataaagacaaaccgctgggtgccgtagcgctgaagtcttacgaggaagagttggcgaaagatccacgtattgccgccaccatggaaaacgcccagaaaggtgaaatcatgccgaacatcccgcagatgtccgctttctggtatgccgtgcgtactgcggtgatcaacgccgccagcggtcgtcagactgtcgatgaagccctgaaagacgcgcagactggtggttctggtgagaacctgtactttcaaagctcagataatgggcctcaaaaccagcgcaacgctccacgtataaccttcggtggcccgtctgactccacaggcagcaaccagaatggtgagcgtagtggagccaggtctaagcagcgccgtccccagggtctgccgaacaacacggcgagctggtttactccgcttacccaattcggtaaagaagacttaaaattcccgccaggccagggcgtcccgatcaacactaactcttccccggatgatcagattggttattaccgcagagcaactcgtcggattcgcggcggcgacggtaaaatgaaagatttgcctccgaagtggtacttttactatctcggcaccggtccgcatgctgatctgccctacgggcaaaaacacgacggggtagtgtgggtggctcgcccaggtgccctgaatactccaaaagatcatatcggcacccgtaaccctgctaataacgctgcgatcccgctgcaactgcctccgggtacaaaactgccaaaaggcttctatgcagaagggtcgcgtggtggcagccaggcgagtagccgtagcagctcccgctctcgcaactcgtcccgtaactccactccgggctcttctcgcggcacgtccccggctcgtatggcaggtaacggtggtgacgctgctctggcgctgctactgctggacaggctgaaccagctggagtcgaagatgagtggtaaaggccaacagcagcagggccagaccgttaccaaaaagagcgcagctgaagcatctaaaaaaccgcgacagaaacgtaccgcgactaaagcgtacaatgtaacacaggccttcggtcgtcgaggtccggagcaaactcaaggaaactttggcgatcaggaattaatccgccaggggaccgactacaaacactggccgcaaattgcccagttcgccccatccgctagtgcattcttcggtatgagccgcatcggcatggaagtaacgccaagtggtacgtggctgacctacaccggtgctatcaagcttgatgacaaggacccgaactttaaagaccaggttattctgcttaacaaacatattgatgcctataaaactttcccgccgaccgaacccaaaaaggacaaaaagaaaaaagctgatgaaacccaggctctaccgcagcgtcagaaaaaacagcaaactgtgactctgctgccagctgcggacctggatgatttttccaagcagctgcaacagtctatgagctctgcggactctacgcaggctggtggttctggtcaccatcatcaccatcattaa

SEQ ID NO: 2783 - DNA, 2421 bp, Artificial Sequence
  Description of Artificial Sequence: Synthetic polynucleotide
atgaaaatcgaagaaggtaaactggtaatctggattaacggcgataaaggctataacggtctcgctgaagtcggtaagaaattcgagaaagataccggaattaaagtcaccgttgagcatccggataaactggaagagaaattcccacaggttgcggcaactggcgatggccctgacattatcttctgggcacacgaccgctttggtggctacgctcaatctggcctgttggctgaaatcaccccggacaaagcgttccaggacaagctgtatccgtttacctgggatgccgtacgttacaacggcaagctgattgcttacccgatcgctgttgaagcgttatcgctgatttataacaaagatctgctgccgaacccgccaaaaacctgggaagagatcccggcgctggataaagaactgaaagcgaaaggtaagagcgcgctgatgttcaacctgcaagaaccgtacttcacctggccgctgattgctgctgacgggggttatgcgttcaagtatgaaaacggcaagtacgacattaaagacgtgggcgtggataacgctggcgcgaaagcgggtctgaccttcctggttgacctgattaaaaacaaacacatgaatgcagacaccgattactccatcgcagaagctgcctttaataaaggcgaaacagcgatgaccatcaacggcccgtgggcatggtccaacatcgacaccagcaaagtgaattatggtgtaacggtactgccgaccttcaagggtcaaccatccaaaccgttcgttggcgtgctgagcgcaggtattaacgccgccagtccgaacaaagagctggcgaaagagttcctcgaaaactatctgctgactgatgaaggtctggaagcggttaataaagacaaaccgctgggtgccgtagcgctgaagtcttacgaggaagagttggcgaaagatccacgtattgccgccaccatggaaaacgcccagaaaggtgaaatcatgccgaacatcccgcagatgtccgctttctggtatgccgtgcgtactgcggtgatcaacgccgccagcggtcgtcagactgtcgatgaagccctgaaagacgcgcagactggtggttctggtgagaacctgtactttcaaagctcagataatgggcctcaaaaccagcgcaacgctccacgtataaccttcggtggcccgtctgactccacaggcagcaaccagaatggtgagcgtagtggagccaggtctaagcagcgccgtccccagggtctgccgaacaacacggcgagctggtttactgcgcttacccaacacggtaaagaagacttaaaattcccgcgtggccagggcgtcccgacgaacactaactcttccccggatgatcagattggttattaccgcagagcaactcgtcggattcgcggcggcgacggtaaaatgaaagatttgtctccgcgttggtacttttactatctcggcaccggtccggaagctggactgccctacggggcaaacaaggacgggatcatttgggtggctaccgaaggtgccctgaatactccaaaagatcatatcggcacccgtaaccctgctaataacgctgcgatcgttctgcaactgcctcagggtacaactctgccaaaaggcttctatgcagaagggtcgcgtggtggcagccaggcgagtagccgtagcagctcccgctctcgcaactcgtcccgtaactccactccgggctcttctcgcggcacgtccccggctcgtatggcaggtaacggtggtgacgctgctctggcgctgctactgctggacaggctgaaccagctggagtcgaagatgagtggtaaaggccaacagcagcagggccagaccgttaccaaaaagagcgcagctgaagcatctaaaaaaccgcgacagaaacgtaccgcgactaaagcgtacaatgtaacacaggccttcggtcgtcgaggtccggagcaaactcaaggaaactttggcgatcaggaattaatccgccaggggaccgactacaaacactggccgcaaattgcccagttcgccccatccgctagtgcattcttcggtatgagccgcatcggcatggaagtaacgccaagtggtacgtggctgacctacaccggtgctatcaagcttgatgacaaggacccgaactttaaagaccaggttattctgcttaacaaacatattgatgcctataaaactttcccgccgaccgaacccaaaaaggacaaaaagaaaaaagctgatgaaacccaggctctaccgcagcgtcagaaaaaacagcaaactgtgactctgctgccagctgcggacctggatgatttttccaagcagctgcaacagtctatgagctctgcggactctacgcaggctggtggttctggtcaccatcatcaccatcattaa

SEQ ID NO: 2784 - DNA, 2421 bp, Artificial Sequence
  Description of Artificial Sequence: Synthetic polynucleotide
atgaaaatcgaagaaggtaaactggtaatctggattaacggcgataaaggctataacggtctcgctgaagtcggtaagaaattcgagaaagataccggaattaaagtcaccgttgagcatccggataaactggaagagaaattcccacaggttgcggcaactggcgatggccctgacattatcttctgggcacacgaccgctttggtggctacgctcaatctggcctgttggctgaaatcaccccggacaaagcgttccaggacaagctgtatccgtttacctgggatgccgtacgttacaacggcaagctgattgcttacccgatcgctgttgaagcgttatcgctgatttataacaaagatctgctgccgaacccgccaaaaacctgggaagagatcccggcgctggataaagaactgaaagcgaaaggtaagagcgcgctgatgttcaacctgcaagaaccgtacttcacctggccgctgattgctgctgacgggggttatgcgttcaagtatgaaaacggcaagtacgacattaaagacgtgggcgtggataacgctggcgcgaaagcgggtctgaccttcctggttgacctgattaaaaacaaacacatgaatgcagacaccgattactccatcgcagaagctgcctttaataaaggcgaaacagcgatgaccatcaacggcccgtgggcatggtccaacatcgacaccagcaaagtgaattatggtgtaacggtactgccgaccttcaagggtcaaccatccaaaccgttcgttggcgtgctgagcgcaggtattaacgccgccagtccgaacaaagagctggcgaaagagttcctcgaaaactatctgctgactgatgaaggtctggaagcggttaataaagacaaaccgctgggtgccgtagcgctgaagtcttacgaggaagagttggcgaaagatccacgtattgccgccaccatggaaaacgcccagaaaggtgaaatcatgccgaacatcccgcagatgtccgctttctggtatgccgtgcgtactgcggtgatcaacgccgccagcggtcgtcagactgtcgatgaagccctgaaagacgcgcagactggtggttctggtgagaacctgtactttcaaagctcagataatgggcctcaaaaccagcgcaacgctccacgtataaccttcggtggcccgtctgactccacaggcagcaaccagaatggtgagcgtagtggagccaggtctaagcagcgccgtccccagggtctgccgaacaacacggcgagctggtttactgcgcttacccaacacggtaaagaagacttaaaattcccgcgtggccagggcgtcccgatcaacactaactcttccccggatgatcagattggttattaccgcagagcaactcgtcggattcgcggcggcgacggtcagatgaaagatttgtctccgcgttggtacttttactatctcggcaccggtccggaagctggactgccctacggggcaaacaaggacgggatcatttgggtggctaccgaaggtgccctgaatactccaaaagatcatatcggcacccgtaaccctgctaataacgctgcgatcgttctgcaactgcctcagggtacaactctgccaaaaggcttctatgcagaagggtcgcgtggtggcagccaggcgagtagccgtagcagctcccgctctcgcaactcgtcccgtaactccactccgggctcttctcgcggcacgtccccggctcgtatggcaggtaacggtggtgacgctgctctggcgctgctactgctggacaggctgaaccagctggagtcgaagatgagtggtaaaggccaacagcagcagggccagaccgttaccaaaaagagcgcagctgaagcatctaaaaaaccgcgacagaaacgtaccgcgactaaagcgtacaatgtaacacaggccttcggtcgtcgaggtccggagcaaactcaaggaaactttggcgatcaggaattaatccgccaggggaccgactacaaacactggccgcaaattgcccagttcgccccatccgctagtgcattcttcggtatgagccgcatcggcatggaagtaacgccaagtggtacgtggctgacctacaccggtgctatcaagcttgatgacaaggacccgaactttaaagaccaggttattctgcttaacaaacatattgatgcctataaaactttcccgccgaccgaacccaaaaaggacaaaaagaaaaaagctgatgaaacccaggctctaccgcagcgtcagaaaaaacagcaaactgtgactctgctgccagctgcggacctggatgatttttccaagcagctgcaacagtctatgagctctgcggactctacgcaggctggtggttctggtcaccatcatcaccatcattaa

SEQ ID NO: 2785 - DNA, 2421 bp, Artificial Sequence
  Description of Artificial Sequence: Synthetic polynucleotide
atgaaaatcgaagaaggtaaactggtaatctggattaacggcgataaaggctataacggtctcgctgaagtcggtaagaaattcgagaaagataccggaattaaagtcaccgttgagcatccggataaactggaagagaaattcccacaggttgcggcaactggcgatggccctgacattatcttctgggcacacgaccgctttggtggctacgctcaatctggcctgttggctgaaatcaccccggacaaagcgttccaggacaagctgtatccgtttacctgggatgccgtacgttacaacggcaagctgattgcttacccgatcgctgttgaagcgttatcgctgatttataacaaagatctgctgccgaacccgccaaaaacctgggaagagatcccggcgctggataaagaactgaaagcgaaaggtaagagcgcgctgatgttcaacctgcaagaaccgtacttcacctggccgctgattgctgctgacgggggttatgcgttcaagtatgaaaacggcaagtacgacattaaagacgtgggcgtggataacgctggcgcgaaagcgggtctgaccttcctggttgacctgattaaaaacaaacacatgaatgcagacaccgattactccatcgcagaagctgcctttaataaaggcgaaacagcgatgaccatcaacggcccgtgggcatggtccaacatcgacaccagcaaagtgaattatggtgtaacggtactgccgaccttcaagggtcaaccatccaaaccgttcgttggcgtgctgagcgcaggtattaacgccgccagtccgaacaaagagctggcgaaagagttcctcgaaaactatctgctgactgatgaaggtctggaagcggttaataaagacaaaccgctgggtgccgtagcgctgaagtcttacgaggaagagttggcgaaagatccacgtattgccgccaccatggaaaacgcccagaaaggtgaaatcatgccgaacatcccgcagatgtccgctttctggtatgccgtgcgtactgcggtgatcaacgccgccagcggtcgtcagactgtcgatgaagccctgaaagacgcgcagactggtggttctggtgagaacctgtactttcaaagctcagataatgggcctcaaaaccagcgcaacgctccacgtataaccttcggtggcccgtctgactccacaggcagcaaccagaatggtgagcgtagtggagccaggtctaagcagcgccgtccccagggtctgccgaacaacacggcgagctggtttactgcgcttacccaacacggtaaagaagacttaaaattcccgcgtggccagggcgtcccgatcaacactaactcttccccggatgatcagattggttattaccgcagagcaactcgtcggtatcgcggcggcgacggtaaaatgaaagatttgtctccgcgttggtacttttactatctcggcaccggtccggaagctggactgccctacggggcaaacaaggacgggatcatttgggtggctaccgaaggtgccctgaatactccaaaagatcatatcggcacccgtaaccctgctaataacgctgcgatcgttctgcaactgcctcagggtacaactctgccaaaaggcttctatgcagaagggtcgcgtggtggcagccaggcgagtagccgtagcagctcccgctctcgcaactcgtcccgtaactccactccgggctcttctcgcggcacgtccccggctcgtatggcaggtaacggtggtgacgctgctctggcgctgctactgctggacaggctgaaccagctggagtcgaagatgagtggtaaaggccaacagcagcagggccagaccgttaccaaaaagagcgcagctgaagcatctaaaaaaccgcgacagaaacgtaccgcgactaaagcgtacaatgtaacacaggccttcggtcgtcgaggtccggagcaaactcaaggaaactttggcgatcaggaattaatccgccaggggaccgactacaaacactggccgcaaattgcccagttcgccccatccgctagtgcattcttcggtatgagccgcatcggcatggaagtaacgccaagtggtacgtggctgacctacaccggtgctatcaagcttgatgacaaggacccgaactttaaagaccaggttattctgcttaacaaacatattgatgcctataaaactttcccgccgaccgaacccaaaaaggacaaaaagaaaaaagctgatgaaacccaggctctaccgcagcgtcagaaaaaacagcaaactgtgactctgctgccagctgcggacctggatgatttttccaagcagctgcaacagtctatgagctctgcggactctacgcaggctggtggttctggtcaccatcatcaccatcattaa

SEQ ID NO: 2786 - DNA, 2421 bp, Artificial Sequence
  Description of Artificial Sequence: Synthetic polynucleotide
atgaaaatcgaagaaggtaaactggtaatctggattaacggcgataaaggctataacggtctcgctgaagtcggtaagaaattcgagaaagataccggaattaaagtcaccgttgagcatccggataaactggaagagaaattcccacaggttgcggcaactggcgatggccctgacattatcttctgggcacacgaccgctttggtggctacgctcaatctggcctgttggctgaaatcaccccggacaaagcgttccaggacaagctgtatccgtttacctgggatgccgtacgttacaacggcaagctgattgcttacccgatcgctgttgaagcgttatcgctgatttataacaaagatctgctgccgaacccgccaaaaacctgggaagagatcccggcgctggataaagaactgaaagcgaaaggtaagagcgcgctgatgttcaacctgcaagaaccgtacttcacctggccgctgattgctgctgacgggggttatgcgttcaagtatgaaaacggcaagtacgacattaaagacgtgggcgtggataacgctggcgcgaaagcgggtctgaccttcctggttgacctgattaaaaacaaacacatgaatgcagacaccgattactccatcgcagaagctgcctttaataaaggcgaaacagcgatgaccatcaacggcccgtgggcatggtccaacatcgacaccagcaaagtgaattatggtgtaacggtactgccgaccttcaagggtcaaccatccaaaccgttcgttggcgtgctgagcgcaggtattaacgccgccagtccgaacaaagagctggcgaaagagttcctcgaaaactatctgctgactgatgaaggtctggaagcggttaataaagacaaaccgctgggtgccgtagcgctgaagtcttacgaggaagagttggcgaaagatccacgtattgccgccaccatggaaaacgcccagaaaggtgaaatcatgccgaacatcccgcagatgtccgctttctggtatgccgtgcgtactgcggtgatcaacgccgccagcggtcgtcagactgtcgatgaagccctgaaagacgcgcagactggtggttctggtgagaacctgtactttcaaagctcagataatgggcctcaaaaccagcgcaacgctccacgtataaccttcggtggcccgtctgactccacaggcagcaaccagaatggtgagcgtagtggagccaggtctaagcagcgccgtccccagggtctgccgaacaacacggcgagctggtttactgcgcttacccaacacggtaaagaagacttaaaattcccgcgtggccagggcgtcccgatcaacactaactcttccccggatgatcagattggttattaccgcagagcaactcgtcggattcgcggcggcgacggtaaaatgaaagatttgtctccgcgttggtacttttactatctcggcaccggtccggaagctggactgccctacggggcaaacaaggacgggatcatttgggtggctaccgaaggtgccctgaatactccaaaagatcatatcggcacccgtaaccctgctaataacgctgcgatcgttctgcaactgcctcagggtacaactctgccaaaaggcttctatgcagaagggtcgcgtggtggcagccaggcgagtagccgtagcagctcccgctctcgcaactcgtcccgtaactccactccgggctcttctcgcggcacgtccccggctcgtatggcaggtaacggtggtgacgctgctctggcgctgctactgctggacaggctgaaccagctggagtcgaagatgagtggtaaaggccaacagcagcagggccagaccgttaccaaaaagagcgcagctgaagcatctaaaaaaccgcgacagaaacgtaccgcgactaaagcgtacaatgtaacacaggccttcggtcgtcgaggtccggagcaaactcaaggaaactttggcgatgccgaattaatccgccaggggaccgactacaaacactggccgcaaattgcccagttcgccccatccgctagtgcattcttcggtatgagccgcatcggcatggaagtaacgccaagtggtacgtggctgacctacaccggtgctatcaagcttgatgacaaggacccgaactttaaagaccaggttattctgcttaacaaacatattgatgcctataaaactttcccgccgaccgaacccaaaaaggacaaaaagaaaaaagctgatgaaacccaggctctaccgcagcgtcagaaaaaacagcaaactgtgactctgctgccagctgcggacctggatgatttttccaagcagctgcaacagtctatgagctctgcggactctacgcaggctggtggttctggtcaccatcatcaccatcattaa

SEQ ID NO: 2787 - DNA, 2421 bp, Artificial Sequence
  Description of Artificial Sequence: Synthetic polynucleotide
atgaaaatcgaagaaggtaaactggtaatctggattaacggcgataaaggctataacggtctcgctgaagtcggtaagaaattcgagaaagataccggaattaaagtcaccgttgagcatccggataaactggaagagaaattcccacaggttgcggcaactggcgatggccctgacattatcttctgggcacacgaccgctttggtggctacgctcaatctggcctgttggctgaaatcaccccggacaaagcgttccaggacaagctgtatccgtttacctgggatgccgtacgttacaacggcaagctgattgcttacccgatcgctgttgaagcgttatcgctgatttataacaaagatctgctgccgaacccgccaaaaacctgggaagagatcccggcgctggataaagaactgaaagcgaaaggtaagagcgcgctgatgttcaacctgcaagaaccgtacttcacctggccgctgattgctgctgacgggggttatgcgttcaagtatgaaaacggcaagtacgacattaaagacgtgggcgtggataacgctggcgcgaaagcgggtctgaccttcctggttgacctgattaaaaacaaacacatgaatgcagacaccgattactccatcgcagaagctgcctttaataaaggcgaaacagcgatgaccatcaacggcccgtgggcatggtccaacatcgacaccagcaaagtgaattatggtgtaacggtactgccgaccttcaagggtcaaccatccaaaccgttcgttggcgtgctgagcgcaggtattaacgccgccagtccgaacaaagagctggcgaaagagttcctcgaaaactatctgctgactgatgaaggtctggaagcggttaataaagacaaaccgctgggtgccgtagcgctgaagtcttacgaggaagagttggcgaaagatccacgtattgccgccaccatggaaaacgcccagaaaggtgaaatcatgccgaacatcccgcagatgtccgctttctggtatgccgtgcgtactgcggtgatcaacgccgccagcggtcgtcagactgtcgatgaagccctgaaagacgcgcagactggtggttctggtgagaacctgtactttcaaagctcagataatgggcctcaaaaccagcgcaacgctccacgtataaccttcggtggcccgtctgactccacaggcagcaaccagaatggtgagcgtagtggagccaggtctaagcagcgccgtccccagggtctgccgaacaacacggcgagctggtttactgcgcttacccaacacggtaaagaagacttaaaattcccgcgtggccagggcgtcccgatcaacactaactcttccccggatgatcagattggttattaccgcagagcaactcgtcggattcgcggcggcgacggtaaaatgaaagatttgtctccgcgttggtacttttactatctcggcaccggtccggaagctggactgccctacggggcaaacaaggacgggatcatttgggtggctaccgaaggtgccctgaatactccaaaagatcatatcggcacccgtaaccctaataataacgctgcgatcgttctgcaactgcctcagggtacaactctgccaaaaggcttctatgcagaagggtcgcgtggtggcagccaggcgagtagccgtagcagctcccgctctcgcaactcgtcccgtaactccactccgggctcttctcgcggcacgtccccggctcgtatggcaggtaacggtggtgacgctgctctggcgctgctactgctggacaggctgaaccagctggagtcgaagatgagtggtaaaggccaacagcagcagggccagaccgttaccaaaaagagcgcagctgaagcatctaaaaaaccgcgacagaaacgtaccgcgactaaagcgtacaatgtaacacaggccttcggtcgtcgaggtccggagcaaactcaaggaaactttggcgatcaggaattaatccgccaggggaccgactacaaacactggccgcaaattgcccagttcgccccatccgctagtgcattcttcggtatgagccgcatcggcatggaagtaacgccaagtggtacgtggctgacctacaccggtgctatcaagcttgatgacaaggacccgaactttaaagaccaggttattctgcttaacaaacatattgatgcctataaaactttcccgccgaccgaacccaaaaaggacaaaaagaaaaaagctgatgaaacccaggctctaccgcagcgtcagaaaaaacagcaaactgtgactctgctgccagctgcggacctggatgatttttccaagcagctgcaacagtctatgagctctgcggactctacgcaggctggtggttctggtcaccatcatcaccatcattaa

SEQ ID NO: 2788 - DNA, 2421 bp, Artificial Sequence
  Description of Artificial Sequence: Synthetic polynucleotide
atgaaaatcgaagaaggtaaactggtaatctggattaacggcgataaaggctataacggtctcgctgaagtcggtaagaaattcgagaaagataccggaattaaagtcaccgttgagcatccggataaactggaagagaaattcccacaggttgcggcaactggcgatggccctgacattatcttctgggcacacgaccgctttggtggctacgctcaatctggcctgttggctgaaatcaccccggacaaagcgttccaggacaagctgtatccgtttacctgggatgccgtacgttacaacggcaagctgattgcttacccgatcgctgttgaagcgttatcgctgatttataacaaagatctgctgccgaacccgccaaaaacctgggaagagatcccggcgctggataaagaactgaaagcgaaaggtaagagcgcgctgatgttcaacctgcaagaaccgtacttcacctggccgctgattgctgctgacgggggttatgcgttcaagtatgaaaacggcaagtacgacattaaagacgtgggcgtggataacgctggcgcgaaagcgggtctgaccttcctggttgacctgattaaaaacaaacacatgaatgcagacaccgattactccatcgcagaagctgcctttaataaaggcgaaacagcgatgaccatcaacggcccgtgggcatggtccaacatcgacaccagcaaagtgaattatggtgtaacggtactgccgaccttcaagggtcaaccatccaaaccgttcgttggcgtgctgagcgcaggtattaacgccgccagtccgaacaaagagctggcgaaagagttcctcgaaaactatctgctgactgatgaaggtctggaagcggttaataaagacaaaccgctgggtgccgtagcgctgaagtcttacgaggaagagttggcgaaagatccacgtattgccgccaccatggaaaacgcccagaaaggtgaaatcatgccgaacatcccgcagatgtccgctttctggtatgccgtgcgtactgcggtgatcaacgccgccagcggtcgtcagactgtcgatgaagccctgaaagacgcgcagactggtggttctggtgagaacctgtactttcaaagctcagataatgggcctcaaaaccagcgcaacgctccacgtataaccttcggtggcccgtctgactccacaggcagcaaccagaatggtgagcgtagtggagccaggtctaagcagcgccgtccccagggtctgccgaacaacacggcgagctggtttactgcgcttacccaacacggtaaagaagacttaaaattcccgcgtggccagggcgtcccgatcaacactaactcttccccggatgatcagattggttattaccgcagagcaactcgtcggattcgcggcggcgacggtaaaatgaaagatttgtctccgcgttggtacttttactatctcggcaccggtccggaagctggactgccctacggggcaaacaaggacgggatcatttgggtggctaccgaaggtgccctgaatactccaaaagatcatatcggcacccgtaaccctgctaataacgctgcgatcgttctgcaactgcctcagggtacaactctgccaaaaggcttctatgcagaagggtcgcgtggtggcagccaggcgagtagccgtagcagctcccgctctcgcaactcgtcccgtaactccactccgggctcttctcgcggcacgtccccggctcgtatggcaggtaacggtggtgacgctgctctggcgctgctactgctggacaggctgaaccagctggagtcgaagatgagtggtaaaggccaacagcagcagggccagaccgttaccaaaaagagcgcagctgaagcatctaaaaaaccgcgacagaaacgtaccgcgactaaagcgtacaatgtaacacaggccttcggtcgtcgaggtccggagcaaactcaaggaaactttggcgatcaggaattaatccgccaggggaccgactacaaacactggccgcaaattgcccagttcgccccatccgctagtgcattcttcggtatgagccgcatcggcatggaacaaacgccaagtggtacgtggctgacctacaccggtgctatcaagcttgatgacaaggacccgaactttaaagaccaggttattctgcttaacaaacatattgatgcctataaaactttcccgccgaccgaacccaaaaaggacaaaaagaaaaaagctgatgaaacccaggctctaccgcagcgtcagaaaaaacagcaaactgtgactctgctgccagctgcggacctggatgatttttccaagcagctgcaacagtctatgagctctgcggactctacgcaggctggtggttctggtcaccatcatcaccatcattaa

SEQ ID NO: 2789 - DNA, 2421 bp, Artificial Sequence
  Description of Artificial Sequence: Synthetic polynucleotide
atgaaaatcgaagaaggtaaactggtaatctggattaacggcgataaaggctataacggtctcgctgaagtcggtaagaaattcgagaaagataccggaattaaagtcaccgttgagcatccggataaactggaagagaaattcccacaggttgcggcaactggcgatggccctgacattatcttctgggcacacgaccgctttggtggctacgctcaatctggcctgttggctgaaatcaccccggacaaagcgttccaggacaagctgtatccgtttacctgggatgccgtacgttacaacggcaagctgattgcttacccgatcgctgttgaagcgttatcgctgatttataacaaagatctgctgccgaacccgccaaaaacctgggaagagatcccggcgctggataaagaactgaaagcgaaaggtaagagcgcgctgatgttcaacctgcaagaaccgtacttcacctggccgctgattgctgctgacgggggttatgcgttcaagtatgaaaacggcaagtacgacattaaagacgtgggcgtggataacgctggcgcgaaagcgggtctgaccttcctggttgacctgattaaaaacaaacacatgaatgcagacaccgattactccatcgcagaagctgcctttaataaaggcgaaacagcgatgaccatcaacggcccgtgggcatggtccaacatcgacaccagcaaagtgaattatggtgtaacggtactgccgaccttcaagggtcaaccatccaaaccgttcgttggcgtgctgagcgcaggtattaacgccgccagtccgaacaaagagctggcgaaagagttcctcgaaaactatctgctgactgatgaaggtctggaagcggttaataaagacaaaccgctgggtgccgtagcgctgaagtcttacgaggaagagttggcgaaagatccacgtattgccgccaccatggaaaacgcccagaaaggtgaaatcatgccgaacatcccgcagatgtccgctttctggtatgccgtgcgtactgcggtgatcaacgccgccagcggtcgtcagactgtcgatgaagccctgaaagacgcgcagactggtggttctggtgagaacctgtactttcaaagctcagataatgggcctcaaaaccagcgcaacgctccacgtataaccttcggtggcccgtctgactccacaggcagcaaccagaatggtgagcgtagtggagccaggtctaagcagcgccgtccccagggtctgccgaacaacacggcgagctggtacactgcgcttacccaacacggtaaagaagacttaaaattcccgcgtggccagggcgtcccgatcaacactaactcttccccggatgatcagattggttattaccgcagagcaactcgtcggattcgcggcggcgacggtaaaatgaaagatttgtctccgcgttggtacttttactatctcggcaccggtccggaagctggactgccctacggggcaaacaaggacgggatcatttgggtggctaccgaaggtgccctgaatactccaaaagatcatatcggcacccgtaaccctgctaataacgctgcgatcgttctgcaactgcctcagggtacaactctgccaaaaggcttctatgcagaagggtcgcgtggtggcagccaggcgagtagccgtagcagctcccgctctcgcaactcgtcccgtaactccactccgggctcttctcgcggcacgtccccggctcgtatggcaggtaacggtggtgacgctgctctggcgctgctactgctggacaggctgaaccagctggagtcgaagatgagtggtaaaggccaacagcagcagggccagaccgttaccaaaaagagcgcagctgaagcatctaaaaaaccgcgacagaaacgtaccgcgactaaagcgtacaatgtaacacaggccttcggtcgtcgaggtccggagcaaactcaaggaaactttggcgatcaggaattaatccgccaggggaccgactacaaacactggccgcaaattgcccagttcgccccatccgctagtgcattcttcggtatgagccgcatcggcatggaagtaacgccaagtggtacgtggctgacctacaccggtgctatcaagcttgatgacaaggacccgaactttaaagaccaggttattctgcttaacaaacatattgatgcctataaaactttcccgccgaccgaacccaaaaaggacaaaaagaaaaaagctgatgaaacccaggctctaccgcagcgtcagaaaaaacagcaaactgtgactctgctgccagctgcggacctggatgatttttccaagcagctgcaacagtctatgagctctgcggactctacgcaggctggtggttctggtcaccatcatcaccatcattaa

SEQ ID NO: 2790 - DNA, 2421 bp, Artificial Sequence
  Description of Artificial Sequence: Synthetic polynucleotide
atgaaaatcgaagaaggtaaactggtaatctggattaacggcgataaaggctataacggtctcgctgaagtcggtaagaaattcgagaaagataccggaattaaagtcaccgttgagcatccggataaactggaagagaaattcccacaggttgcggcaactggcgatggccctgacattatcttctgggcacacgaccgctttggtggctacgctcaatctggcctgttggctgaaatcaccccggacaaagcgttccaggacaagctgtatccgtttacctgggatgccgtacgttacaacggcaagctgattgcttacccgatcgctgttgaagcgttatcgctgatttataacaaagatctgctgccgaacccgccaaaaacctgggaagagatcccggcgctggataaagaactgaaagcgaaaggtaagagcgcgctgatgttcaacctgcaagaaccgtacttcacctggccgctgattgctgctgacgggggttatgcgttcaagtatgaaaacggcaagtacgacattaaagacgtgggcgtggataacgctggcgcgaaagcgggtctgaccttcctggttgacctgattaaaaacaaacacatgaatgcagacaccgattactccatcgcagaagctgcctttaataaaggcgaaacagcgatgaccatcaacggcccgtgggcatggtccaacatcgacaccagcaaagtgaattatggtgtaacggtactgccgaccttcaagggtcaaccatccaaaccgttcgttggcgtgctgagcgcaggtattaacgccgccagtccgaacaaagagctggcgaaagagttcctcgaaaactatctgctgactgatgaaggtctggaagcggttaataaagacaaaccgctgggtgccgtagcgctgaagtcttacgaggaagagttggcgaaagatccacgtattgccgccaccatggaaaacgcccagaaaggtgaaatcatgccgaacatcccgcagatgtccgctttctggtatgccgtgcgtactgcggtgatcaacgccgccagcggtcgtcagactgtcgatgaagccctgaaagacgcgcagactggtggttctggtgagaacctgtactttcaaagctcagataatgggcctcaaaaccagcgcaacgctccacgtataaccttcggtggcccgtctgactccacaggcagcaaccagaatggtgagcgtagtggagccaggtctaagcagcgccgtccccagggtctgccgaacaacacggcgagctggtttactgcgcttacccaacacggtaaagaagacttaaaattcccgcgtggccagggcgtcccgatcaacactaactcttccccggatgatcagattggttattaccgcagaacgactcgtcggattcgcggcggcgacggtaaaatgaaagatttgtctccgcgttggtacttttactatctcggcaccggtccggaagctggactgccctacggggcaaacaaggacgggatcatttgggtggctaccgaaggtgccctgaatactccaaaagatcatatcggcacccgtaaccctgctaataacgctgcgatcgttctgcaactgcctcagggtacaactctgccaaaaggcttctatgcagaagggtcgcgtggtggcagccaggcgagtagccgtagcagctcccgctctcgcaactcgtcccgtaactccactccgggctcttctcgcggcacgtccccggctcgtatggcaggtaacggtggtgacgctgctctggcgctgctactgctggacaggctgaaccagctggagtcgaagatgagtggtaaaggccaacagcagcagggccagaccgttaccaaaaagagcgcagctgaagcatctaaaaaaccgcgacagaaacgtaccgcgactaaagcgtacaatgtaacacaggccttcggtcgtcgaggtccggagcaaactcaaggaaactttggcgatcaggaattaatccgccaggggaccgactacaaacactggccgcaaattgcccagttcgccccatccgctagtgcattcttcggtatgagccgcatcggcatggaagtaacgccaagtggtacgtggctgacctacaccggtgctatcaagcttgatgacaaggacccgaactttaaagaccaggttattctgcttaacaaacatattgatgcctataaaactttcccgccgaccgaacccaaaaaggacaaaaagaaaaaagctgatgaaacccaggctctaccgcagcgtcagaaaaaacagcaaactgtgactctgctgccagctgcggacctggatgatttttccaagcagctgcaacagtctatgagctctgcggactctacgcaggctggtggttctggtcaccatcatcaccatcattaa

SEQ ID NO: 2791 - DNA, 2421 bp, Artificial Sequence
  Description of Artificial Sequence: Synthetic polynucleotide
atgaaaatcgaagaaggtaaactggtaatctggattaacggcgataaaggctataacggtctcgctgaagtcggtaagaaattcgagaaagataccggaattaaagtcaccgttgagcatccggataaactggaagagaaattcccacaggttgcggcaactggcgatggccctgacattatcttctgggcacacgaccgctttggtggctacgctcaatctggcctgttggctgaaatcaccccggacaaagcgttccaggacaagctgtatccgtttacctgggatgccgtacgttacaacggcaagctgattgcttacccgatcgctgttgaagcgttatcgctgatttataacaaagatctgctgccgaacccgccaaaaacctgggaagagatcccggcgctggataaagaactgaaagcgaaaggtaagagcgcgctgatgttcaacctgcaagaaccgtacttcacctggccgctgattgctgctgacgggggttatgcgttcaagtatgaaaacggcaagtacgacattaaagacgtgggcgtggataacgctggcgcgaaagcgggtctgaccttcctggttgacctgattaaaaacaaacacatgaatgcagacaccgattactccatcgcagaagctgcctttaataaaggcgaaacagcgatgaccatcaacggcccgtgggcatggtccaacatcgacaccagcaaagtgaattatggtgtaacggtactgccgaccttcaagggtcaaccatccaaaccgttcgttggcgtgctgagcgcaggtattaacgccgccagtccgaacaaagagctggcgaaagagttcctcgaaaactatctgctgactgatgaaggtctggaagcggttaataaagacaaaccgctgggtgccgtagcgctgaagtcttacgaggaagagttggcgaaagatccacgtattgccgccaccatggaaaacgcccagaaaggtgaaatcatgccgaacatcccgcagatgtccgctttctggtatgccgtgcgtactgcggtgatcaacgccgccagcggtcgtcagactgtcgatgaagccctgaaagacgcgcagactggtggttctggtgagaacctgtactttcaaagctcagataatgggcctcaaaaccagcgcaacgctccacgtataaccttcggtggcccgtctgactccacaggcagcaaccagaatggtgagcgtagtggagccaggtctaagcagcgccgtccccagggtctgccgaacaacacggcgagctggtttactgcgcttacccaacacggtaaagaagacttaaaattcccgcgtggccagggcgtcccgatcaacactaactcttccccggatgatcagattggttattaccgcagagcaactcgtcggattcgcggcggcgacggtaaaatgaaagatttgtctccgcgttggtacttttactatctcggcagtggtccggaagctggactgccctacggggcaaacaaggacgggatcatttgggtggctaccgaaggtgccctgaatactccaaaagatcatatcggcacccgtaaccctgctaataacgctgcgatcgttctgcaactgcctcagggtacaactctgccaaaaggcttctatgcagaagggtcgcgtggtggcagccaggcgagtagccgtagcagctcccgctctcgcaactcgtcccgtaactccactccgggctcttctcgcggcacgtccccggctcgtatggcaggtaacggtggtgacgctgctctggcgctgctactgctggacaggctgaaccagctggagtcgaagatgagtggtaaaggccaacagcagcagggccagaccgttaccaaaaagagcgcagctgaagcatctaaaaaaccgcgacagaaacgtaccgcgactaaagcgtacaatgtaacacaggccttcggtcgtcgaggtccggagcaaactcaaggaaactttggcgatcaggaattaatccgccaggggaccgactacaaacactggccgcaaattgcccagttcgccccatccgctagtgcattcttcggtatgagccgcatcggcatggaagtaacgccaagtggtacgtggctgacctacaccggtgctatcaagcttgatgacaaggacccgaactttaaagaccaggttattctgcttaacaaacatattgatgcctataaaactttcccgccgaccgaacccaaaaaggacaaaaagaaaaaagctgatgaaacccaggctctaccgcagcgtcagaaaaaacagcaaactgtgactctgctgccagctgcggacctggatgatttttccaagcagctgcaacagtctatgagctctgcggactctacgcaggctggtggttctggtcaccatcatcaccatcattaa

SEQ ID NO: 2792 - DNA, 2421 bp, Artificial Sequence
  Description of Artificial Sequence: Synthetic polynucleotide
atgaaaatcgaagaaggtaaactggtaatctggattaacggcgataaaggctataacggtctcgctgaagtcggtaagaaattcgagaaagataccggaattaaagtcaccgttgagcatccggataaactggaagagaaattcccacaggttgcggcaactggcgatggccctgacattatcttctgggcacacgaccgctttggtggctacgctcaatctggcctgttggctgaaatcaccccggacaaagcgttccaggacaagctgtatccgtttacctgggatgccgtacgttacaacggcaagctgattgcttacccgatcgctgttgaagcgttatcgctgatttataacaaagatctgctgccgaacccgccaaaaacctgggaagagatcccggcgctggataaagaactgaaagcgaaaggtaagagcgcgctgatgttcaacctgcaagaaccgtacttcacctggccgctgattgctgctgacgggggttatgcgttcaagtatgaaaacggcaagtacgacattaaagacgtgggcgtggataacgctggcgcgaaagcgggtctgaccttcctggttgacctgattaaaaacaaacacatgaatgcagacaccgattactccatcgcagaagctgcctttaataaaggcgaaacagcgatgaccatcaacggcccgtgggcatggtccaacatcgacaccagcaaagtgaattatggtgtaacggtactgccgaccttcaagggtcaaccatccaaaccgttcgttggcgtgctgagcgcaggtattaacgccgccagtccgaacaaagagctggcgaaagagttcctcgaaaactatctgctgactgatgaaggtctggaagcggttaataaagacaaaccgctgggtgccgtagcgctgaagtcttacgaggaagagttggcgaaagatccacgtattgccgccaccatggaaaacgcccagaaaggtgaaatcatgccgaacatcccgcagatgtccgctttctggtatgccgtgcgtactgcggtgatcaacgccgccagcggtcgtcagactgtcgatgaagccctgaaagacgcgcagactggtggttctggtgagaacctgtactttcaaagctcagataatgggcctcaaaaccagcgcaacgctccacgtataaccttcggtggcccgtctgactccacaggcagcaaccagaatggtgagcgtagtggagccaggtctaagcagcgccgtccccagggtctgccgaacaacacggcgagctggtttactgcgcttacccaacacggtaaagaagacttaaaattcccgcgtggccagggcgtcccgatcaacactaactcttccccggatgatcagattggttattaccgcagagcaactcgtcggattcgcggcggcgacggtaaaatgaaagatttgtctccgcgttggtacttttactatctcggcaccggtccggaagctggactgccctacggggcaaacaaggacgggatcatttgggtggctgtagaaggtgccctgaatactccaaaagatcatatcggcacccgtaaccctgctaataacgctgcgatcgttctgcaactgcctcagggtacaactctgccaaaaggcttctatgcagaagggtcgcgtggtggcagccaggcgagtagccgtagcagctcccgctctcgcaactcgtcccgtaactccactccgggctcttctcgcggcacgtccccggctcgtatggcaggtaacggtggtgacgctgctctggcgctgctactgctggacaggctgaaccagctggagtcgaagatgagtggtaaaggccaacagcagcagggccagaccgttaccaaaaagagcgcagctgaagcatctaaaaaaccgcgacagaaacgtaccgcgactaaagcgtacaatgtaacacaggccttcggtcgtcgaggtccggagcaaactcaaggaaactttggcgatcaggaattaatccgccaggggaccgactacaaacactggccgcaaattgcccagttcgccccatccgctagtgcattcttcggtatgagccgcatcggcatggaagtaacgccaagtggtacgtggctgacctacaccggtgctatcaagcttgatgacaaggacccgaactttaaagaccaggttattctgcttaacaaacatattgatgcctataaaactttcccgccgaccgaacccaaaaaggacaaaaagaaaaaagctgatgaaacccaggctctaccgcagcgtcagaaaaaacagcaaactgtgactctgctgccagctgcggacctggatgatttttccaagcagctgcaacagtctatgagctctgcggactctacgcaggctggtggttctggtcaccatcatcaccatcattaa

SEQ ID NO: 2793 - DNA, 2421 bp, Artificial Sequence
  Description of Artificial Sequence: Synthetic polynucleotide
atgaaaatcgaagaaggtaaactggtaatctggattaacggcgataaaggctataacggtctcgctgaagtcggtaagaaattcgagaaagataccggaattaaagtcaccgttgagcatccggataaactggaagagaaattcccacaggttgcggcaactggcgatggccctgacattatcttctgggcacacgaccgctttggtggctacgctcaatctggcctgttggctgaaatcaccccggacaaagcgttccaggacaagctgtatccgtttacctgggatgccgtacgttacaacggcaagctgattgcttacccgatcgctgttgaagcgttatcgctgatttataacaaagatctgctgccgaacccgccaaaaacctgggaagagatcccggcgctggataaagaactgaaagcgaaaggtaagagcgcgctgatgttcaacctgcaagaaccgtacttcacctggccgctgattgctgctgacgggggttatgcgttcaagtatgaaaacggcaagtacgacattaaagacgtgggcgtggataacgctggcgcgaaagcgggtctgaccttcctggttgacctgattaaaaacaaacacatgaatgcagacaccgattactccatcgcagaagctgcctttaataaaggcgaaacagcgatgaccatcaacggcccgtgggcatggtccaacatcgacaccagcaaagtgaattatggtgtaacggtactgccgaccttcaagggtcaaccatccaaaccgttcgttggcgtgctgagcgcaggtattaacgccgccagtccgaacaaagagctggcgaaagagttcctcgaaaactatctgctgactgatgaaggtctggaagcggttaataaagacaaaccgctgggtgccgtagcgctgaagtcttacgaggaagagttggcgaaagatccacgtattgccgccaccatggaaaacgcccagaaaggtgaaatcatgccgaacatcccgcagatgtccgctttctggtatgccgtgcgtactgcggtgatcaacgccgccagcggtcgtcagactgtcgatgaagccctgaaagacgcgcagactggtggttctggtgagaacctgtactttcaaagctcagataatgggcctcaaaaccagcgcaacgctccacgtataaccttcggtggcccgtctgactccacaggcagcaaccagaatggtgagcgtagtggagccaggtctaagcagcgccgtccccagggtctgccgaacaacacggcgagctggtttactgcgcttacccaacacggtaaagaagacttaacgttcccgcgtggccagggcgtcccgatcaacactaactcttccccggatgatcagattggttattaccgcagagcaactcgtcggattcgcggcggcgacggtaaaatgaaagatttgtctccgcgttggtacttttactatctcggcaccggtccggaagctggactgccctacggggcaaacaaggacgggatcatttgggtggctaccgaaggtgccctgaatactccaaaagatcatatcggcacccgtaaccctgctaataacgctgcgatcgttctgcaactgcctcagggtacaactctgccaaaaggcttctatgcagaagggtcgcgtggtggcagccaggcgagtagccgtagcagctcccgctctcgcaactcgtcccgtaactccactccgggctcttctcgcggcacgtccccggctcgtatggcaggtaacggtggtgacgctgctctggcgctgctactgctggacaggctgaaccagctggagtcgaagatgagtggtaaaggccaacagcagcagggccagaccgttaccaaaaagagcgcagctgaagcatctaaaaaaccgcgacagaaacgtaccgcgactaaagcgtacaatgtaacacaggccttcggtcgtcgaggtccggagcaaactcaaggaaactttggcgatcaggaattaatccgccaggggaccgactacaaacactggccgcaaattgcccagttcgccccatccgctagtgcattcttcggtatgagccgcatcggcatggaagtaacgccaagtggtacgtggctgacctacaccggtgctatcaagcttgatgacaaggacccgaactttaaagaccaggttattctgcttaacaaacatattgatgcctataaaactttcccgccgaccgaacccaaaaaggacaaaaagaaaaaagctgatgaaacccaggctctaccgcagcgtcagaaaaaacagcaaactgtgactctgctgccagctgcggacctggatgatttttccaagcagctgcaacagtctatgagctctgcggactctacgcaggctggtggttctggtcaccatcatcaccatcattaa

SEQ ID NO: 2794 - DNA, 2421 bp, Artificial Sequence
  Description of Artificial Sequence: Synthetic polynucleotide
atgaaaatcgaagaaggtaaactggtaatctggattaacggcgataaaggctataacggtctcgctgaagtcggtaagaaattcgagaaagataccggaattaaagtcaccgttgagcatccggataaactggaagagaaattcccacaggttgcggcaactggcgatggccctgacattatcttctgggcacacgaccgctttggtggctacgctcaatctggcctgttggctgaaatcaccccggacaaagcgttccaggacaagctgtatccgtttacctgggatgccgtacgttacaacggcaagctgattgcttacccgatcgctgttgaagcgttatcgctgatttataacaaagatctgctgccgaacccgccaaaaacctgggaagagatcccggcgctggataaagaactgaaagcgaaaggtaagagcgcgctgatgttcaacctgcaagaaccgtacttcacctggccgctgattgctgctgacgggggttatgcgttcaagtatgaaaacggcaagtacgacattaaagacgtgggcgtggataacgctggcgcgaaagcgggtctgaccttcctggttgacctgattaaaaacaaacacatgaatgcagacaccgattactccatcgcagaagctgcctttaataaaggcgaaacagcgatgaccatcaacggcccgtgggcatggtccaacatcgacaccagcaaagtgaattatggtgtaacggtactgccgaccttcaagggtcaaccatccaaaccgttcgttggcgtgctgagcgcaggtattaacgccgccagtccgaacaaagagctggcgaaagagttcctcgaaaactatctgctgactgatgaaggtctggaagcggttaataaagacaaaccgctgggtgccgtagcgctgaagtcttacgaggaagagttggcgaaagatccacgtattgccgccaccatggaaaacgcccagaaaggtgaaatcatgccgaacatcccgcagatgtccgctttctggtatgccgtgcgtactgcggtgatcaacgccgccagcggtcgtcagactgtcgatgaagccctgaaagacgcgcagactggtggttctggtgagaacctgtactttcaaagctcagataatgggcctcaaaaccagcgcaacgctccacgtataaccttcggtggcccgtctgactccacaggcagcaaccagaatggtgagcgtagtggagccaggtctaagcagcgccgtccccagggtctgccgaacaacacggcgagctggtttactgcgcttacccaacacggtaaagaagacttaaaattcccgcgtggccagggcgtcccgatcaacactaactcttccccggatgatcagattggttattaccgcagagcaactcgtcggattcgcggcggcgacggtaaaatgaaagatttgtctccgcgttggtacttttactatacgggcaccggtccggaagctggactgccctacggggcaaacaaggacgggatcatttgggtggctaccgaaggtgccctgaatactccaaaagatcatatcggcacccgtaaccctgctaataacgctgcgatcgttctgcaactgcctcagggtacaactctgccaaaaggcttctatgcagaagggtcgcgtggtggcagccaggcgagtagccgtagcagctcccgctctcgcaactcgtcccgtaactccactccgggctcttctcgcggcacgtccccggctcgtatggcaggtaacggtggtgacgctgctctggcgctgctactgctggacaggctgaaccagctggagtcgaagatgagtggtaaaggccaacagcagcagggccagaccgttaccaaaaagagcgcagctgaagcatctaaaaaaccgcgacagaaacgtaccgcgactaaagcgtacaatgtaacacaggccttcggtcgtcgaggtccggagcaaactcaaggaaactttggcgatcaggaattaatccgccaggggaccgactacaaacactggccgcaaattgcccagttcgccccatccgctagtgcattcttcggtatgagccgcatcggcatggaagtaacgccaagtggtacgtggctgacctacaccggtgctatcaagcttgatgacaaggacccgaactttaaagaccaggttattctgcttaacaaacatattgatgcctataaaactttcccgccgaccgaacccaaaaaggacaaaaagaaaaaagctgatgaaacccaggctctaccgcagcgtcagaaaaaacagcaaactgtgactctgctgccagctgcggacctggatgatttttccaagcagctgcaacagtctatgagctctgcggactctacgcaggctggtggttctggtcaccatcatcaccatcattaa

SEQ ID NO: 2795 - DNA, 2421 bp, Artificial Sequence
  Description of Artificial Sequence: Synthetic polynucleotide
atgaaaatcgaagaaggtaaactggtaatctggattaacggcgataaaggctataacggtctcgctgaagtcggtaagaaattcgagaaagataccggaattaaagtcaccgttgagcatccggataaactggaagagaaattcccacaggttgcggcaactggcgatggccctgacattatcttctgggcacacgaccgctttggtggctacgctcaatctggcctgttggctgaaatcaccccggacaaagcgttccaggacaagctgtatccgtttacctgggatgccgtacgttacaacggcaagctgattgcttacccgatcgctgttgaagcgttatcgctgatttataacaaagatctgctgccgaacccgccaaaaacctgggaagagatcccggcgctggataaagaactgaaagcgaaaggtaagagcgcgctgatgttcaacctgcaagaaccgtacttcacctggccgctgattgctgctgacgggggttatgcgttcaagtatgaaaacggcaagtacgacattaaagacgtgggcgtggataacgctggcgcgaaagcgggtctgaccttcctggttgacctgattaaaaacaaacacatgaatgcagacaccgattactccatcgcagaagctgcctttaataaaggcgaaacagcgatgaccatcaacggcccgtgggcatggtccaacatcgacaccagcaaagtgaattatggtgtaacggtactgccgaccttcaagggtcaaccatccaaaccgttcgttggcgtgctgagcgcaggtattaacgccgccagtccgaacaaagagctggcgaaagagttcctcgaaaactatctgctgactgatgaaggtctggaagcggttaataaagacaaaccgctgggtgccgtagcgctgaagtcttacgaggaagagttggcgaaagatccacgtattgccgccaccatggaaaacgcccagaaaggtgaaatcatgccgaacatcccgcagatgtccgctttctggtatgccgtgcgtactgcggtgatcaacgccgccagcggtcgtcagactgtcgatgaagccctgaaagacgcgcagactggtggttctggtgagaacctgtactttcaaagctcagataatgggcctcaaaaccagcgcaacgctccacgtataaccttcggtggcccgtctgactccacaggcagcaaccagaatggtgagcgtagtggagccaggtctaagcagcgccgtccccagggtctgccgaacaacacggcgagctggtttactgcgcttacccaacacggtaaagaagacttaaaattcccgcgtggccagggcgtcccgatcaacactaactcttccccggatgatcagattggtgactaccgcagagcaactcgtcggattcgcggcggcgacggtaaaatgaaagatttgtctccgcgttggtacttttactatctcggcaccggtccggaagctggactgccctacggggcaaacaaggacgggatcatttgggtggctaccgaaggtgccctgaatactccaaaagatcatatcggcacccgtaaccctgctaataacgctgcgatcgttctgcaactgcctcagggtacaactctgccaaaaggcttctatgcagaagggtcgcgtggtggcagccaggcgagtagccgtagcagctcccgctctcgcaactcgtcccgtaactccactccgggctcttctcgcggcacgtccccggctcgtatggcaggtaacggtggtgacgctgctctggcgctgctactgctggacaggctgaaccagctggagtcgaagatgagtggtaaaggccaacagcagcagggccagaccgttaccaaaaagagcgcagctgaagcatctaaaaaaccgcgacagaaacgtaccgcgactaaagcgtacaatgtaacacaggccttcggtcgtcgaggtccggagcaaactcaaggaaactttggcgatcaggaattaatccgccaggggaccgactacaaacactggccgcaaattgcccagttcgccccatccgctagtgcattcttcggtatgagccgcatcggcatggaagtaacgccaagtggtacgtggctgacctacaccggtgctatcaagcttgatgacaaggacccgaactttaaagaccaggttattctgcttaacaaacatattgatgcctataaaactttcccgccgaccgaacccaaaaaggacaaaaagaaaaaagctgatgaaacccaggctctaccgcagcgtcagaaaaaacagcaaactgtgactctgctgccagctgcggacctggatgatttttccaagcagctgcaacagtctatgagctctgcggactctacgcaggctggtggttctggtcaccatcatcaccatcattaa

SEQ ID NO: 2796 - DNA, 2421 bp, Artificial Sequence
  Description of Artificial Sequence: Synthetic polynucleotide
atgaaaatcgaagaaggtaaactggtaatctggattaacggcgataaaggctataacggtctcgctgaagtcggtaagaaattcgagaaagataccggaattaaagtcaccgttgagcatccggataaactggaagagaaattcccacaggttgcggcaactggcgatggccctgacattatcttctgggcacacgaccgctttggtggctacgctcaatctggcctgttggctgaaatcaccccggacaaagcgttccaggacaagctgtatccgtttacctgggatgccgtacgttacaacggcaagctgattgcttacccgatcgctgttgaagcgttatcgctgatttataacaaagatctgctgccgaacccgccaaaaacctgggaagagatcccggcgctggataaagaactgaaagcgaaaggtaagagcgcgctgatgttcaacctgcaagaaccgtacttcacctggccgctgattgctgctgacgggggttatgcgttcaagtatgaaaacggcaagtacgacattaaagacgtgggcgtggataacgctggcgcgaaagcgggtctgaccttcctggttgacctgattaaaaacaaacacatgaatgcagacaccgattactccatcgcagaagctgcctttaataaaggcgaaacagcgatgaccatcaacggcccgtgggcatggtccaacatcgacaccagcaaagtgaattatggtgtaacggtactgccgaccttcaagggtcaaccatccaaaccgttcgttggcgtgctgagcgcaggtattaacgccgccagtccgaacaaagagctggcgaaagagttcctcgaaaactatctgctgactgatgaaggtctggaagcggttaataaagacaaaccgctgggtgccgtagcgctgaagtcttacgaggaagagttggcgaaagatccacgtattgccgccaccatggaaaacgcccagaaaggtgaaatcatgccgaacatcccgcagatgtccgctttctggtatgccgtgcgtactgcggtgatcaacgccgccagcggtcgtcagactgtcgatgaagccctgaaagacgcgcagactggtggttctggtgagaacctgtactttcaaagctcagataatgggcctcaaaaccagcgcaacgctccacgtataaccttcggtggcccgtctgactccacaggcagcaaccagaatggtgagcgtagtggagccaggtctaagcagcgccgtccccagggtctgccgaacaacacggcgagctggtttactgcgcttacccaacacggtaaagaagacttaaaattcccgcgtggccagggcgtcccgatcaacactaactcttccccggatgatcagattggttattaccgcagagcaactcgtcggattcgcggcggcgacggtaaaatgaaagatttgtctccgcgttggtacttttactatctcggcaccggtccggaagctggactgccctacggggcaaacaaggacgggatcatttgggtggctaccgaaggtgccctgaatactccaaaagatcatatcggcacccgtaaccctgctaataacgctgcgatcgttctgcaactgcctcagggtacaactctgccaaaaggcttctatgcagaagggtcgcgtggtggcagccaggcgagtagccgtagcagctcccgctctcgcaactcgtcccgtaactccactccgggctcttctcgcggcacgtccccggctcgtatggcaggtaacggtggtgacgctgctctggcgctgctactgctggacaggctgaaccagctggagtcgaagatgagtggtaaaggccaacagcagcagggccagaccgttaccaaaaagagcgcagctgaagcatctaaaaaaccgcgacagaaacgtaccgcgactaaagaatacaatgtaacacaggccttcggtcgtcgaggtccggagcaaactcaaggaaactttggcgatcaggatttaatcaaattggggaccgactacaaacactggccgcaaattgcccagttcgccccatccgctagtgcattcttcggtatgagccgcatcggcacggaagaaacgccaagtggtacgtggctgacctacaccggtgctatcaagcttgataaaaaggacccgaactttaaagaccaggttattctgcttaacaaacatattgatgcctataaaactttcccgccgaccgaacccaaaaaggacaaaaagaaaaaagctgatgaaacccaggctctaccgcagcgtcagaaaaaacagcaaactgtgactctgctgccagctgcggacctggatgatttttccaagcagctgcaacagtctatgagctctgcggactctacgcaggctggtggttctggtcaccatcatcaccatcattaa

SEQ ID NO: 2797 - DNA, 2421 bp, Artificial Sequence
  Description of Artificial Sequence: Synthetic polynucleotide
atgaaaatcgaagaaggtaaactggtaatctggattaacggcgataaaggctataacggtctcgctgaagtcggtaagaaattcgagaaagataccggaattaaagtcaccgttgagcatccggataaactggaagagaaattcccacaggttgcggcaactggcgatggccctgacattatcttctgggcacacgaccgctttggtggctacgctcaatctggcctgttggctgaaatcaccccggacaaagcgttccaggacaagctgtatccgtttacctgggatgccgtacgttacaacggcaagctgattgcttacccgatcgctgttgaagcgttatcgctgatttataacaaagatctgctgccgaacccgccaaaaacctgggaagagatcccggcgctggataaagaactgaaagcgaaaggtaagagcgcgctgatgttcaacctgcaagaaccgtacttcacctggccgctgattgctgctgacgggggttatgcgttcaagtatgaaaacggcaagtacgacattaaagacgtgggcgtggataacgctggcgcgaaagcgggtctgaccttcctggttgacctgattaaaaacaaacacatgaatgcagacaccgattactccatcgcagaagctgcctttaataaaggcgaaacagcgatgaccatcaacggcccgtgggcatggtccaacatcgacaccagcaaagtgaattatggtgtaacggtactgccgaccttcaagggtcaaccatccaaaccgttcgttggcgtgctgagcgcaggtattaacgccgccagtccgaacaaagagctggcgaaagagttcctcgaaaactatctgctgactgatgaaggtctggaagcggttaataaagacaaaccgctgggtgccgtagcgctgaagtcttacgaggaagagttggcgaaagatccacgtattgccgccaccatggaaaacgcccagaaaggtgaaatcatgccgaacatcccgcagatgtccgctttctggtatgccgtgcgtactgcggtgatcaacgccgccagcggtcgtcagactgtcgatgaagccctgaaagacgcgcagactggtggttctggtgagaacctgtactttcaaagctcagataatgggcctcaaaaccagcgcaacgctccacgtataaccttcggtggcccgtctgactccacaggcagcaaccagaatggtgagcgtagtggagccaggtctaagcagcgccgtccccagggtctgccgaacaacacggcgagctggtttactgcgcttacccaacacggtaaagaagacttaaaattcccgcgtggccagggcgtcccgatcaacactaactcttccccggatgatcagattggttattaccgcagagcaactcgtcggattcgcggcggcgacggtaaaatgaaagatttgtctccgcgttggtacttttactatctcggcaccggtccggaagctggactgccctacggggcaaacaaggacgggatcatttgggtggctaccgaaggtgccctgaatactccaaaagatcatatcggcacccgtaaccctgctaataacgctgcgatcgttctgcaactgcctcagggtacaactctgccaaaaggcttctatgcagaagggtcgcgtggtggcagccaggcgagtagccgtagcagctcccgctctcgcaactcgtcccgtaactccactccgggcgaggaacgcggcacgtccccggctcgtatggcaggtaacggtggtgacgctgctctggcgctgctactgctggacaggctgaaccagctggagtcgaagatgagtggtaaaggccaacagcagcagggccagaccgttaccaaaaagagcgcagctgaagcatctaaaaaaccgcgacagaaacgtaccgcgactaaagcgtacaatgtaacacaggccttcggtcgtcgaggtccggagcaaactcaaggaaactttggcgatcaggaattaatccgccaggggaccgactacaaacactggccgcaaattgcccagttcgccccatccgctagtgcattcttcggtatgagccgcatcggcatggaagtaacgccaagtggtacgtggctgacctacaccggtgctatcaagcttgatgacaaggacccgaactttaaagaccaggttattctgcttaacaaacatattgatgcctataaaactttcccgccgaccgaacccaaaaaggacaaaaagaaaaaagctgatgaaacccaggctctaccgcagcgtcagaaaaaacagcaaactgtgactctgctgccagctgcggacctggatgatttttccaagcagctgcaacagtctatgagctctgcggactctacgcaggctggtggttctggtcaccatcatcaccatcattaa

SEQ ID NO: 2798 - DNA, 2421 bp, Artificial Sequence
  Description of Artificial Sequence: Synthetic polynucleotide
atgaaaatcgaagaaggtaaactggtaatctggattaacggcgataaaggctataacggtctcgctgaagtcggtaagaaattcgagaaagataccggaattaaagtcaccgttgagcatccggataaactggaagagaaattcccacaggttgcggcaactggcgatggccctgacattatcttctgggcacacgaccgctttggtggctacgctcaatctggcctgttggctgaaatcaccccggacaaagcgttccaggacaagctgtatccgtttacctgggatgccgtacgttacaacggcaagctgattgcttacccgatcgctgttgaagcgttatcgctgatttataacaaagatctgctgccgaacccgccaaaaacctgggaagagatcccggcgctggataaagaactgaaagcgaaaggtaagagcgcgctgatgttcaacctgcaagaaccgtacttcacctggccgctgattgctgctgacgggggttatgcgttcaagtatgaaaacggcaagtacgacattaaagacgtgggcgtggataacgctggcgcgaaagcgggtctgaccttcctggttgacctgattaaaaacaaacacatgaatgcagacaccgattactccatcgcagaagctgcctttaataaaggcgaaacagcgatgaccatcaacggcccgtgggcatggtccaacatcgacaccagcaaagtgaattatggtgtaacggtactgccgaccttcaagggtcaaccatccaaaccgttcgttggcgtgctgagcgcaggtattaacgccgccagtccgaacaaagagctggcgaaagagttcctcgaaaactatctgctgactgatgaaggtctggaagcggttaataaagacaaaccgctgggtgccgtagcgctgaagtcttacgaggaagagttggcgaaagatccacgtattgccgccaccatggaaaacgcccagaaaggtgaaatcatgccgaacatcccgcagatgtccgctttctggtatgccgtgcgtactgcggtgatcaacgccgccagcggtcgtcagactgtcgatgaagccctgaaagacgcgcagactggtggttctggtgagaacctgtactttcaaagctcagataatgggcctcaaaaccagcgcaacgctccacgtataaccttcggtggcccgtctgactccacaggcagcaaccagaatggtgagcgtagtggagccaggtctaagcagcgccgtccccagggtctgccgaacaacacggcgagctggtttactgcgcttacccaacacggtaaagaagacttaaaattcccgcgtggccagggcgtcccgatcaacactaactcttccccggatgatcagattggttattaccgcagagcaactcgtcggattcgcggcggcgacggtaaaatgaaagatttgtctccgcgttggtacttttactatctcggcaccggtccggaagctggactgccctacggggcaaacaaggacgggatcatttgggtggctaccgaaggtgccctgaatactccaaaagatcatatcggcacccgtaaccctgctaataacgctgcgatcgttctgcaactgcctcagggtacaactctgccaaaaggcttctatgcagaagggtcgcgtggtggcagccaggcgagtagccgtagcagctcccgctctcgcaactcgtcccgtaactccactccgggctcttctcgcggcacgtccccggctcgtatggcaggtaacggtggtgacgctgctctggcgctgctactgctggacaggctgaaccagctggagtcgaagatgagtggtaaaggccaacagcagcagggccagaccgttaccaaaaagagcgcagctgaaatgtctaaaaaaccgcgacagaaacgtaccgcgactaaaggatgtaatgtaacacagtgcttcggtccacgaggtccggagcaaactcaaggaaactttggcgatgccgaattaatcaaaaaagggaccgactacaaacactggccgcaaattgcccagttcgccccatccgctagtgcattcttcggtatgagccgcatctcaagtaaggaaacgccaagtggtacgtggctgacctacaccggtgctatcaagcttgataaagatgacccgaactttaaagaccaggttattctgcttaacaaacatattgatgcctataaaactttcccgccgaccgaacccaaaaaggacaaaaagaaaaaagctgatgaaacccaggctctaccgcagcgtcagaaaaaacagcaaactgtgactctgctgccagctgcggacctggatgatttttccaagcagctgcaacagtctatgagctctgcggactctacgcaggctggtggttctggtcaccatcatcaccatcattaa

SEQ ID NO: 2799 - DNA, 2421 bp, Artificial Sequence
  Description of Artificial Sequence: Synthetic polynucleotide
atgaaaatcgaagaaggtaaactggtaatctggattaacggcgataaaggctataacggtctcgctgaagtcggtaagaaattcgagaaagataccggaattaaagtcaccgttgagcatccggataaactggaagagaaattcccacaggttgcggcaactggcgatggccctgacattatcttctgggcacacgaccgctttggtggctacgctcaatctggcctgttggctgaaatcaccccggacaaagcgttccaggacaagctgtatccgtttacctgggatgccgtacgttacaacggcaagctgattgcttacccgatcgctgttgaagcgttatcgctgatttataacaaagatctgctgccgaacccgccaaaaacctgggaagagatcccggcgctggataaagaactgaaagcgaaaggtaagagcgcgctgatgttcaacctgcaagaaccgtacttcacctggccgctgattgctgctgacgggggttatgcgttcaagtatgaaaacggcaagtacgacattaaagacgtgggcgtggataacgctggcgcgaaagcgggtctgaccttcctggttgacctgattaaaaacaaacacatgaatgcagacaccgattactccatcgcagaagctgcctttaataaaggcgaaacagcgatgaccatcaacggcccgtgggcatggtccaacatcgacaccagcaaagtgaattatggtgtaacggtactgccgaccttcaagggtcaaccatccaaaccgttcgttggcgtgctgagcgcaggtattaacgccgccagtccgaacaaagagctggcgaaagagttcctcgaaaactatctgctgactgatgaaggtctggaagcggttaataaagacaaaccgctgggtgccgtagcgctgaagtcttacgaggaagagttggcgaaagatccacgtattgccgccaccatggaaaacgcccagaaaggtgaaatcatgccgaacatcccgcagatgtccgctttctggtatgccgtgcgtactgcggtgatcaacgccgccagcggtcgtcagactgtcgatgaagccctgaaagacgcgcagactggtggttctggtgagaacctgtactttcaaagctcagataatgggcctcaaaaccagcgcaacgctccacgtataaccttcggtggcccgtctgactccacaggcagcaaccagaatggtgagcgtagtggagccaggtctaagcagcgccgtccccagggtctgccgaacaacacggcgagctggtttactccgcttacccaaaatggtaaagaagacttaaaattcccgcctggccagggcgtcccgatcaacactaactcttccccggatgatcagattggttattaccgcagagcaactcgtcggattcgcggcggcgacggtaaaatgaaagatttgccaccgaaatggtacttttactatctcggcaccggtccgcatgctgatctgccctacgggcaaaagcaacctggggttttttgggtggctcggcctggtgccctgaatactccaaaagatcatatcggcacccgtaaccctgctaataacgctgcgatcccgctgcaactgcctcccggtacaaaactgccaaaaggcttctatgcagaagggtcgcgtggtggcagccaggcgagtagccgtagcagctcccgctctcgcaactcgtcccgtaactccactccgggctcttctcgcggcacgtccccggctcgtatggcaggtaacggtggtgacgctgctctggcgctgctactgctggacaggctgaaccagctggagtcgaagatgagtggtaaaggccaacagcagcagggccagaccgttaccaaaaagagcgcagctgaagcatctaaaaaaccgcgacagaaacgtaccgcgactaaagcgtacaatgtaacacaggccttcggtcgtcgaggtccggagcaaactcaaggaaactttggcgatcaggaattaatccgccaggggaccgactacaaacactggccgcaaattgcccagttcgccccatccgctagtgcattcttcggtatgagccgcatcggcatggaagtaacgccaagtggtacgtggctgacctacaccggtgctatcaagcttgatgacaaggacccgaactttaaagaccaggttattctgcttaacaaacatattgatgcctataaaactttcccgccgaccgaacccaaaaaggacaaaaagaaaaaagctgatgaaacccaggctctaccgcagcgtcagaaaaaacagcaaactgtgactctgctgccagctgcggacctggatgatttttccaagcagctgcaacagtctatgagctctgcggactctacgcaggctggtggttctggtcaccatcatcaccatcattaa

SEQ ID NO: 2800 - DNA, 2421 bp, Artificial Sequence
  Description of Artificial Sequence: Synthetic polynucleotide
atgaaaatcgaagaaggtaaactggtaatctggattaacggcgataaaggctataacggtctcgctgaagtcggtaagaaattcgagaaagataccggaattaaagtcaccgttgagcatccggataaactggaagagaaattcccacaggttgcggcaactggcgatggccctgacattatcttctgggcacacgaccgctttggtggctacgctcaatctggcctgttggctgaaatcaccccggacaaagcgttccaggacaagctgtatccgtttacctgggatgccgtacgttacaacggcaagctgattgcttacccgatcgctgttgaagcgttatcgctgatttataacaaagatctgctgccgaacccgccaaaaacctgggaagagatcccggcgctggataaagaactgaaagcgaaaggtaagagcgcgctgatgttcaacctgcaagaaccgtacttcacctggccgctgattgctgctgacgggggttatgcgttcaagtatgaaaacggcaagtacgacattaaagacgtgggcgtggataacgctggcgcgaaagcgggtctgaccttcctggttgacctgattaaaaacaaacacatgaatgcagacaccgattactccatcgcagaagctgcctttaataaaggcgaaacagcgatgaccatcaacggcccgtgggcatggtccaacatcgacaccagcaaagtgaattatggtgtaacggtactgccgaccttcaagggtcaaccatccaaaccgttcgttggcgtgctgagcgcaggtattaacgccgccagtccgaacaaagagctggcgaaagagttcctcgaaaactatctgctgactgatgaaggtctggaagcggttaataaagacaaaccgctgggtgccgtagcgctgaagtcttacgaggaagagttggcgaaagatccacgtattgccgccaccatggaaaacgcccagaaaggtgaaatcatgccgaacatcccgcagatgtccgctttctggtatgccgtgcgtactgcggtgatcaacgccgccagcggtcgtcagactgtcgatgaagccctgaaagacgcgcagactggtggttctggtgagaacctgtactttcaaagctcagataatgggcctcaaaaccagcgcaacgctccacgtataaccttcggtggcccgtctgactccacaggcagcaaccagaatggtgagcgtagtggagccaggtctaagcagcgccgtccccagggtctgccgaacaacacggcgagctggtttactgcgcttacccaacacggtaaagaagacttaaaattcccgcgtggccagggcgtcccgatcaacactaactcttccccggatgatcagattggttattaccgcagagcaactcgtcggattcgcggcggcgacggtaaaatgaaagatttgtctccgcgttggtacttttactatctcggcaccggtccggaagctggactgccctacggggcaaacaaggacgggatcatttgggtggctgaagaaggtgccctgaatactccaaaagatcatatcggcacccgtaaccctgctaataacgctgcgatcgttctgcaactgcctcagggtacaactctgccaaaaggcttctatgcagaagggtcgcgtggtggcagccaggcgagtagccgtagcagctcccgctctcgcaactcgtcccgtaactccactccgggctcttctcgcggcacgtccccggctcgtatggcaggtaacggtggtgacgctgctctggcgctgctactgctggacaggctgaaccagctggagtcgaagatgagtggtaaaggccaacagcagcagggccagaccgttaccaaaaagagcgcagctgaagcatctaaaaaaccgcgacagaaacgtaccgcgactaaagcgtacaatgtaacacaggccttcggtcgtcgaggtccggagcaaactcaaggaaactttggcgatcaggaattaatccgccaggggaccgactacaaacactggccgcaaattgcccagttcgccccatccgctagtgcattcttcggtatgagccgcatcggcatggaagtaacgccaagtggtacgtggctgacctacaccggtgctatcaagcttgatgacaaggacccgaactttaaagaccaggttattctgcttaacaaacatattgatgcctataaaactttcccgccgaccgaacccaaaaaggacaaaaagaaaaaagctgatgaaacccaggctctaccgcagcgtcagaaaaaacagcaaactgtgactctgctgccagctgcggacctggatgatttttccaagcagctgcaacagtctatgagctctgcggactctacgcaggctggtggttctggtcaccatcatcaccatcattaa

SEQ ID NO: 2801 - DNA, 2421 bp, Artificial Sequence
  Description of Artificial Sequence: Synthetic polynucleotide
atgaaaatcgaagaaggtaaactggtaatctggattaacggcgataaaggctataacggtctcgctgaagtcggtaagaaattcgagaaagataccggaattaaagtcaccgttgagcatccggataaactggaagagaaattcccacaggttgcggcaactggcgatggccctgacattatcttctgggcacacgaccgctttggtggctacgctcaatctggcctgttggctgaaatcaccccggacaaagcgttccaggacaagctgtatccgtttacctgggatgccgtacgttacaacggcaagctgattgcttacccgatcgctgttgaagcgttatcgctgatttataacaaagatctgctgccgaacccgccaaaaacctgggaagagatcccggcgctggataaagaactgaaagcgaaaggtaagagcgcgctgatgttcaacctgcaagaaccgtacttcacctggccgctgattgctgctgacgggggttatgcgttcaagtatgaaaacggcaagtacgacattaaagacgtgggcgtggataacgctggcgcgaaagcgggtctgaccttcctggttgacctgattaaaaacaaacacatgaatgcagacaccgattactccatcgcagaagctgcctttaataaaggcgaaacagcgatgaccatcaacggcccgtgggcatggtccaacatcgacaccagcaaagtgaattatggtgtaacggtactgccgaccttcaagggtcaaccatccaaaccgttcgttggcgtgctgagcgcaggtattaacgccgccagtccgaacaaagagctggcgaaagagttcctcgaaaactatctgctgactgatgaaggtctggaagcggttaataaagacaaaccgctgggtgccgtagcgctgaagtcttacgaggaagagttggcgaaagatccacgtattgccgccaccatggaaaacgcccagaaaggtgaaatcatgccgaacatcccgcagatgtccgctttctggtatgccgtgcgtactgcggtgatcaacgccgccagcggtcgtcagactgtcgatgaagccctgaaagacgcgcagactggtggttctggtgagaacctgtactttcaaagctcagataatgggcctcaaaaccagcgcaacgctccacgtataaccttcggtggcccgtctgactccacaggcagcaaccagaatggtgagcgtagtggagccaggtctaagcagcgccgtccccagggtctgccgaacaacacggcgagctggtttactccgcttacccaacacggtaaagaagacttaaaattcccgccaggccagggcgtcccgatcaacactaactcttccccggatgatcagattggttattaccgcagagcaactcgtcggattcgcggcggcgacggtaaaatgaaagatttgcctccgcgttggtacttttactatctcggcaccggtccggaagctgatctgccctacggggcagtgaaggacgggatcgtatgggtggctgaagaaggtgccctgaatactccaaaagatcatatcggcacccgtaaccctgctaataacgctgcgatccccctgcaactgcctccaggtacaactctgccaaaaggcttctatgcagaagggtcgcgtggtggcagccaggcgagtagccgtagcagctcccgctctcgcaactcgtcccgtaactccactccgggctcttctcgcggcacgtccccggctcgtatggcaggtaacggtggtgacgctgctctggcgctgctactgctggacaggctgaaccagctggagtcgaagatgagtggtaaaggccaacagcagcagggccagaccgttaccaaaaagagcgcagctgaagcatctaaaaaaccgcgacagaaacgtaccgcgactaaagcgtacaatgtaacacaggccttcggtcgtcgaggtccggagcaaactcaaggaaactttggcgatcaggaattaatccgccaggggaccgactacaaacactggccgcaaattgcccagttcgccccatccgctagtgcattcttcggtatgagccgcatcggcatggaagtaacgccaagtggtacgtggctgacctacaccggtgctatcaagcttgatgacaaggacccgaactttaaagaccaggttattctgcttaacaaacatattgatgcctataaaactttcccgccgaccgaacccaaaaaggacaaaaagaaaaaagctgatgaaacccaggctctaccgcagcgtcagaaaaaacagcaaactgtgactctgctgccagctgcggacctggatgatttttccaagcagctgcaacagtctatgagctctgcggactctacgcaggctggtggttctggtcaccatcatcaccatcattaa

SEQ ID NO: 2802 - DNA, 2421 bp, Artificial Sequence
  Description of Artificial Sequence: Synthetic polynucleotide
atgaaaatcgaagaaggtaaactggtaatctggattaacggcgataaaggctataacggtctcgctgaagtcggtaagaaattcgagaaagataccggaattaaagtcaccgttgagcatccggataaactggaagagaaattcccacaggttgcggcaactggcgatggccctgacattatcttctgggcacacgaccgctttggtggctacgctcaatctggcctgttggctgaaatcaccccggacaaagcgttccaggacaagctgtatccgtttacctgggatgccgtacgttacaacggcaagctgattgcttacccgatcgctgttgaagcgttatcgctgatttataacaaagatctgctgccgaacccgccaaaaacctgggaagagatcccggcgctggataaagaactgaaagcgaaaggtaagagcgcgctgatgttcaacctgcaagaaccgtacttcacctggccgctgattgctgctgacgggggttatgcgttcaagtatgaaaacggcaagtacgacattaaagacgtgggcgtggataacgctggcgcgaaagcgggtctgaccttcctggttgacctgattaaaaacaaacacatgaatgcagacaccgattactccatcgcagaagctgcctttaataaaggcgaaacagcgatgaccatcaacggcccgtgggcatggtccaacatcgacaccagcaaagtgaattatggtgtaacggtactgccgaccttcaagggtcaaccatccaaaccgttcgttggcgtgctgagcgcaggtattaacgccgccagtccgaacaaagagctggcgaaagagttcctcgaaaactatctgctgactgatgaaggtctggaagcggttaataaagacaaaccgctgggtgccgtagcgctgaagtcttacgaggaagagttggcgaaagatccacgtattgccgccaccatggaaaacgcccagaaaggtgaaatcatgccgaacatcccgcagatgtccgctttctggtatgccgtgcgtactgcggtgatcaacgccgccagcggtcgtcagactgtcgatgaagccctgaaagacgcgcagactggtggttctggtgagaacctgtactttcaaagctcagataatgggcctcaaaaccagcgcaacgctccacgtataaccttcggtggcccgtctgactccacaggcagcaaccagaatggtgagcgtagtggagccaggtctaagcagcgccgtccccagggtctgccgaacaacacggcgagctggtttactggccttacccaaaatggtaaagaagacttaaaattcccgccgggccagggcgtcccgatcaacactaactcttccccggatgatcagattggttattaccgcagagcaactcgtcggattcgcggcggcgacggtaaaatgaaagatttgccaccgaagtggtacttttactatctcggcaccggtccgcatgctgatctgccctacgggcaaaaacacgacggggtggtttgggtggctcgacctggtgccctgaatactccaaaagatcatatcggcacccgtaaccctgctaataacgctgcgatccccctgcaactgcctccgggtacaaaactgccaaaaggcttctatgcagaagggtcgcgtggtggcagccaggcgagtagccgtagcagctcccgctctcgcaactcgtcccgtaactccactccgggctcttctcgcggcacgtccccggctcgtatggcaggtaacggtggtgacgctgctctggcgctgctactgctggacaggctgaaccagctggagtcgaagatgagtggtaaaggccaacagcagcagggccagaccgttaccaaaaagagcgcagctgaagcatctaaaaaaccgcgacagaaacgtaccgcgactaaagcgtacaatgtaacacaggccttcggtcgtcgaggtccggagcaaactcaaggaaactttggcgatcaggaattaatccgccaggggaccgactacaaacactggccgcaaattgcccagttcgccccatccgctagtgcattcttcggtatgagccgcatcggcatggaagtaacgccaagtggtacgtggctgacctacaccggtgctatcaagcttgatgacaaggacccgaactttaaagaccaggttattctgcttaacaaacatattgatgcctataaaactttcccgccgaccgaacccaaaaaggacaaaaagaaaaaagctgatgaaacccaggctctaccgcagcgtcagaaaaaacagcaaactgtgactctgctgccagctgcggacctggatgatttttccaagcagctgcaacagtctatgagctctgcggactctacgcaggctggtggttctggtcaccatcatcaccatcattaa

SEQ ID NO: 2803 - DNA, 2421 bp, Artificial Sequence
  Description of Artificial Sequence: Synthetic polynucleotide
atgaaaatcgaagaaggtaaactggtaatctggattaacggcgataaaggctataacggtctcgctgaagtcggtaagaaattcgagaaagataccggaattaaagtcaccgttgagcatccggataaactggaagagaaattcccacaggttgcggcaactggcgatggccctgacattatcttctgggcacacgaccgctttggtggctacgctcaatctggcctgttggctgaaatcaccccggacaaagcgttccaggacaagctgtatccgtttacctgggatgccgtacgttacaacggcaagctgattgcttacccgatcgctgttgaagcgttatcgctgatttataacaaagatctgctgccgaacccgccaaaaacctgggaagagatcccggcgctggataaagaactgaaagcgaaaggtaagagcgcgctgatgttcaacctgcaagaaccgtacttcacctggccgctgattgctgctgacgggggttatgcgttcaagtatgaaaacggcaagtacgacattaaagacgtgggcgtggataacgctggcgcgaaagcgggtctgaccttcctggttgacctgattaaaaacaaacacatgaatgcagacaccgattactccatcgcagaagctgcctttaataaaggcgaaacagcgatgaccatcaacggcccgtgggcatggtccaacatcgacaccagcaaagtgaattatggtgtaacggtactgccgaccttcaagggtcaaccatccaaaccgttcgttggcgtgctgagcgcaggtattaacgccgccagtccgaacaaagagctggcgaaagagttcctcgaaaactatctgctgactgatgaaggtctggaagcggttaataaagacaaaccgctgggtgccgtagcgctgaagtcttacgaggaagagttggcgaaagatccacgtattgccgccaccatggaaaacgcccagaaaggtgaaatcatgccgaacatcccgcagatgtccgctttctggtatgccgtgcgtactgcggtgatcaacgccgccagcggtcgtcagactgtcgatgaagccctgaaagacgcgcagactggtggttctggtgagaacctgtactttcaaagctcagataatgggcctcaaaaccagcgcaacgctccacgtataaccttcggtggcccgtctgactccacaggcagcaaccagaatggtgagcgtagtggagccaggtctaagcagcgccgtccccagggtctgccgaacaacacggcgagctggtttactgcgcttacccaacacggtaaagaagacttaaaattcccgcgtggccagggcgtcccgatcaacactaactcttccccggatgatcagattggttattaccgcagagcaactcgtcggattcgcggcggcgacggtaaaatgaaagatttgtctccgcgttggtacttttactatctcggcaccggtccggaagctggactgccctacggggcaaacaaggacgggatcatttgggtggctaccgaaggtgccctgaatactccaaaagatcatatcggcacccgtaaccctgctaataacgctgcgatcgttctgcaactgcctcagggtacaactctgccaaaaggcttctatgcagaagggtcgcgtggtggcagccaggcgagtagccgtagcagctcccgctctcgcaactcgtcccgtaactccactccgggctcttctcgcggcacgtccccggctcgtatggcaggtaacggtggtgacgctgctctggcgctgctactgctggacaggctgaaccagctggagtcgaagatgagtggtaaaggccaacagcagcagggccagaccgttaccaaaaagagcgcagctgaagcatctaaaaaaccgcgacagaaacgtaccgcgactaaagaatacaatgtaacacaggccttcggtcgtcgaggtccggagcaaactcaaggaaactttggcgatcaggatttaaataaacttgggaccgactacaaacactggccgcaaattgcccagttcgccccatccgctagtgcattcttcggtatgagccgcatcagtacggaagaaacgccaagtggtacgtggctgacctacaccggtgctatcaagcttgataaaaaggacccgaactttaaagaccaggttattctgcttaacaaacatattgatgcctataaaactttcccgccgaccgaacccaaaaaggacaaaaagaaaaaagctgatgaaacccaggctctaccgcagcgtcagaaaaaacagcaaactgtgactctgctgccagctgcggacctggatgatttttccaagcagctgcaacagtctatgagctctgcggactctacgcaggctggtggttctggtcaccatcatcaccatcattaa

SEQ ID NO: 2804 - DNA, 2421 bp, Artificial Sequence
  Description of Artificial Sequence: Synthetic polynucleotide
atgaaaatcgaagaaggtaaactggtaatctggattaacggcgataaaggctataacggtctcgctgaagtcggtaagaaattcgagaaagataccggaattaaagtcaccgttgagcatccggataaactggaagagaaattcccacaggttgcggcaactggcgatggccctgacattatcttctgggcacacgaccgctttggtggctacgctcaatctggcctgttggctgaaatcaccccggacaaagcgttccaggacaagctgtatccgtttacctgggatgccgtacgttacaacggcaagctgattgcttacccgatcgctgttgaagcgttatcgctgatttataacaaagatctgctgccgaacccgccaaaaacctgggaagagatcccggcgctggataaagaactgaaagcgaaaggtaagagcgcgctgatgttcaacctgcaagaaccgtacttcacctggccgctgattgctgctgacgggggttatgcgttcaagtatgaaaacggcaagtacgacattaaagacgtgggcgtggataacgctggcgcgaaagcgggtctgaccttcctggttgacctgattaaaaacaaacacatgaatgcagacaccgattactccatcgcagaagctgcctttaataaaggcgaaacagcgatgaccatcaacggcccgtgggcatggtccaacatcgacaccagcaaagtgaattatggtgtaacggtactgccgaccttcaagggtcaaccatccaaaccgttcgttggcgtgctgagcgcaggtattaacgccgccagtccgaacaaagagctggcgaaagagttcctcgaaaactatctgctgactgatgaaggtctggaagcggttaataaagacaaaccgctgggtgccgtagcgctgaagtcttacgaggaagagttggcgaaagatccacgtattgccgccaccatggaaaacgcccagaaaggtgaaatcatgccgaacatcccgcagatgtccgctttctggtatgccgtgcgtactgcggtgatcaacgccgccagcggtcgtcagactgtcgatgaagccctgaaagacgcgcagactggtggttctggtgagaacctgtactttcaaagctcagataatgggcctcaaaaccagcgcaacgctccacgtataaccttcggtggcccgtctgactccacaggcagcaaccagaatggtgagcgtagtggagccaggtctaagcagcgccgtccccagggtctgccgaacaacacggcgagctggtttactgcgcttacccaacacggtaaagaagacttaaaattcccgcgtggccagggcgtcccgatcaacactaactcttccccggatgatcagattggttattaccgcagagcaactcgtcggattcgcggcggcgacggtaaaatgaaagatttgtctccgcgttggtacttttactatctcggcaccggtccggaagctggactgccctacggggcaaacaaggacgggatcatttgggtggctaccgaaggtgccctgaatactccaaaagatcatatcggcacccgtaaccctgctaataacgctgcgatcgttctgcaactgcctcagggtacaactctgccaaaaggcttctatgcagaagggtcgcgtggtggcagccaggcgagtagccgtagcagctcccgctctcgcaactcgtcccgtaactccactccgggctcttctcgcggcacgtccccggctcgtatggcaggtaacggtggtgacgctgctctggcgctgctactgctggacaggctgaaccagctggagtcgaagatgagtggtaaaggccaacagcagcagggccagaccgttaccaaaaagagcgcagctgaagcatctaaaaaaccgcgacagaaacgtaccgcgactaaaggctacaatgtaacacaggccttcggtcgtcgaggtccggagcaaactcaaggaaactttggcgatcaggatttaaataagctcgggaccgactacaaacactggccgcaaattgcccagttcgccccatccgctagtgcattcttcggtatgagccgcatcggcacgcgcgaaacgccaagtggtacgtggctgacctacaccggtgctatcaagcttgataaaaaggacccgaactttaaagaccaggttattctgcttaacaaacatattgatgcctataaaactttcccgccgaccgaacccaaaaaggacaaaaagaaaaaagctgatgaaacccaggctctaccgcagcgtcagaaaaaacagcaaactgtgactctgctgccagctgcggacctggatgatttttccaagcagctgcaacagtctatgagctctgcggactctacgcaggctggtggttctggtcaccatcatcaccatcattaa

SEQ ID NO: 2805 - DNA, 2421 bp, Artificial Sequence
  Description of Artificial Sequence: Synthetic polynucleotide
atgaaaatcgaagaaggtaaactggtaatctggattaacggcgataaaggctataacggtctcgctgaagtcggtaagaaattcgagaaagataccggaattaaagtcaccgttgagcatccggataaactggaagagaaattcccacaggttgcggcaactggcgatggccctgacattatcttctgggcacacgaccgctttggtggctacgctcaatctggcctgttggctgaaatcaccccggacaaagcgttccaggacaagctgtatccgtttacctgggatgccgtacgttacaacggcaagctgattgcttacccgatcgctgttgaagcgttatcgctgatttataacaaagatctgctgccgaacccgccaaaaacctgggaagagatcccggcgctggataaagaactgaaagcgaaaggtaagagcgcgctgatgttcaacctgcaagaaccgtacttcacctggccgctgattgctgctgacgggggttatgcgttcaagtatgaaaacggcaagtacgacattaaagacgtgggcgtggataacgctggcgcgaaagcgggtctgaccttcctggttgacctgattaaaaacaaacacatgaatgcagacaccgattactccatcgcagaagctgcctttaataaaggcgaaacagcgatgaccatcaacggcccgtgggcatggtccaacatcgacaccagcaaagtgaattatggtgtaacggtactgccgaccttcaagggtcaaccatccaaaccgttcgttggcgtgctgagcgcaggtattaacgccgccagtccgaacaaagagctggcgaaagagttcctcgaaaactatctgctgactgatgaaggtctggaagcggttaataaagacaaaccgctgggtgccgtagcgctgaagtcttacgaggaagagttggcgaaagatccacgtattgccgccaccatggaaaacgcccagaaaggtgaaatcatgccgaacatcccgcagatgtccgctttctggtatgccgtgcgtactgcggtgatcaacgccgccagcggtcgtcagactgtcgatgaagccctgaaagacgcgcagactggtggttctggtgagaacctgtactttcaaagctcagataatgggcctcaaaaccagcgcaacgctccacgtataaccttcggtggcccgtctgactccacaggcagcaaccagaatggtgagcgtagtggagccaggtctaagcagcgccgtccccagggtctgccgaacaacacggcgagctggtttactgcgcttacccaacacggtaaagaagacttaaaattcccgcgtggccagggcgtcccgatcaacactaactcttccccggatgatcagattggttattaccgcagagcaactcgtcggattcgcggcggcgacggtaaaatgaaagatttgtctccgcgttggtacttttactatctcggcaccggtccggaagctggactgccctacggggcaaacaaggacgggatcatttgggtggctaccgaaggtgccctgaatactccaaaagatcatatcggcacccgtaaccctgctaataacgctgcgatcgttctgcaactgcctcagggtacaactctgccaaaaggcttctatgcagaagggtcgcgtggtggcagccaggcgagtagccgtagcagctcccgctctcgcaactcgtcccgtaactccactccgggctcttctcgcggcacgtccccggctcgtatggcaggtaacggtggtgacgctgctctggcgctgctactgctggacaggctgaaccagctggagtcgaagatgagtggtaaaggccaacagcagcagggccagaccgttaccaaaaagagcgcagctgaagcatctaaaaaaccgcgacagaaacgtaccgcgactaaagcgtacaatgtaacacaggccttcggtcgtcgaggtccggagcaaactcaaggaaactttggcgatcaggaattaatccgccaggggaccgactacaaacactggccgcaaattgcccagttcgccccatccgctagtgcattcttcggtatgagccgcatcggcatggaagtaacgccaagtggtacgtggctgacctacaccggtgctatcaagcttgatgacaaggacccgaactttgatgaccaggttattctgcttaacaaacatattgatgcctataaaactttcccgccgaccgaacccaaaaaggacaaaaagaaaaaagctgatgaaacccaggctctaccgcagcgtcagaaaaaacagcaaactgtgactctgctgccagctgcggacctggatgatttttccaagcagctgcaacagtctatgagctctgcggactctacgcaggctggtggttctggtcaccatcatcaccatcattaa

SEQ ID NO: 2806 - DNA, 2421 bp, Artificial Sequence
  Description of Artificial Sequence: Synthetic polynucleotide
atgaaaatcgaagaaggtaaactggtaatctggattaacggcgataaaggctataacggtctcgctgaagtcggtaagaaattcgagaaagataccggaattaaagtcaccgttgagcatccggataaactggaagagaaattcccacaggttgcggcaactggcgatggccctgacattatcttctgggcacacgaccgctttggtggctacgctcaatctggcctgttggctgaaatcaccccggacaaagcgttccaggacaagctgtatccgtttacctgggatgccgtacgttacaacggcaagctgattgcttacccgatcgctgttgaagcgttatcgctgatttataacaaagatctgctgccgaacccgccaaaaacctgggaagagatcccggcgctggataaagaactgaaagcgaaaggtaagagcgcgctgatgttcaacctgcaagaaccgtacttcacctggccgctgattgctgctgacgggggttatgcgttcaagtatgaaaacggcaagtacgacattaaagacgtgggcgtggataacgctggcgcgaaagcgggtctgaccttcctggttgacctgattaaaaacaaacacatgaatgcagacaccgattactccatcgcagaagctgcctttaataaaggcgaaacagcgatgaccatcaacggcccgtgggcatggtccaacatcgacaccagcaaagtgaattatggtgtaacggtactgccgaccttcaagggtcaaccatccaaaccgttcgttggcgtgctgagcgcaggtattaacgccgccagtccgaacaaagagctggcgaaagagttcctcgaaaactatctgctgactgatgaaggtctggaagcggttaataaagacaaaccgctgggtgccgtagcgctgaagtcttacgaggaagagttggcgaaagatccacgtattgccgccaccatggaaaacgcccagaaaggtgaaatcatgccgaacatcccgcagatgtccgctttctggtatgccgtgcgtactgcggtgatcaacgccgccagcggtcgtcagactgtcgatgaagccctgaaagacgcgcagactggtggttctggtgagaacctgtactttcaaagctcagataatgggcctcaaaaccagcgcaacgctccacgtataaccttcggtggcccgtctgactccacaggcagcaaccagaatggtgagcgtagtggagccaggtctaagcagcgccgtccccagggtctgccgaacaacacggcgagctggtttactgcgcttacccaacacggtaaagaagacttaaaattcccgcgtggccagggcgtcccgatcaacactaactcttccccggatgatcagattggttattaccgcagagcaactcgtcggattcgcggcggcgacggtaaaatgaaagatttgtctccgcgttggtacttttactatctcggcaccggtccggaagctggactgccctacggggcaaacaaggacgggatcatttgggtggctaccgaaggtgccctgaatactccaaaagatcatatcggcacccgtaaccctgctaataacgctgcgatcgttctgcaactgcctcagggtacaactctgccaaaaggcttctatgcagaagggtcgcgtggtggcagccaggcgagtagccgtagcagctcccgctctcgcaactcgtcccgtaactccactccgggctcttctcgcggcacgtccccggctcgtatggcaggtaacggtggtgacgctgctctggcgctgctactgctggacaggctgaaccagctggagtcgaagatgagtggtaaaggccaacagcagcagggccagaccgttaccaaaaagagcgcagctgaagcatctaaaaaaccgcgacagaaacgtaccgcgactaaagcgtacaatgtaacacaggccttcggtttacgaggtccggagcaaactcaaggaaactttggcgatcaggaattaatccgccaggggaccgactacaaacactggccgcaaattgcccagttcgccccatccgctagtgcattcttcggtatgagccgcatcggcatggaagtaacgccaagtggtacgtggctgacctacaccggtgctatcaagcttgatgacaaggacccgaactttaaagaccaggttattctgcttaacaaacatattgatgcctataaaactttcccgccgaccgaacccaaaaaggacaaaaagaaaaaagctgatgaaacccaggctctaccgcagcgtcagaaaaaacagcaaactgtgactctgctgccagctgcggacctggatgatttttccaagcagctgcaacagtctatgagctctgcggactctacgcaggctggtggttctggtcaccatcatcaccatcattaa

SEQ ID NO: 2807 - DNA, 2421 bp, Artificial Sequence
  Description of Artificial Sequence: Synthetic polynucleotide
atgaaaatcgaagaaggtaaactggtaatctggattaacggcgataaaggctataacggtctcgctgaagtcggtaagaaattcgagaaagataccggaattaaagtcaccgttgagcatccggataaactggaagagaaattcccacaggttgcggcaactggcgatggccctgacattatcttctgggcacacgaccgctttggtggctacgctcaatctggcctgttggctgaaatcaccccggacaaagcgttccaggacaagctgtatccgtttacctgggatgccgtacgttacaacggcaagctgattgcttacccgatcgctgttgaagcgttatcgctgatttataacaaagatctgctgccgaacccgccaaaaacctgggaagagatcccggcgctggataaagaactgaaagcgaaaggtaagagcgcgctgatgttcaacctgcaagaaccgtacttcacctggccgctgattgctgctgacgggggttatgcgttcaagtatgaaaacggcaagtacgacattaaagacgtgggcgtggataacgctggcgcgaaagcgggtctgaccttcctggttgacctgattaaaaacaaacacatgaatgcagacaccgattactccatcgcagaagctgcctttaataaaggcgaaacagcgatgaccatcaacggcccgtgggcatggtccaacatcgacaccagcaaagtgaattatggtgtaacggtactgccgaccttcaagggtcaaccatccaaaccgttcgttggcgtgctgagcgcaggtattaacgccgccagtccgaacaaagagctggcgaaagagttcctcgaaaactatctgctgactgatgaaggtctggaagcggttaataaagacaaaccgctgggtgccgtagcgctgaagtcttacgaggaagagttggcgaaagatccacgtattgccgccaccatggaaaacgcccagaaaggtgaaatcatgccgaacatcccgcagatgtccgctttctggtatgccgtgcgtactgcggtgatcaacgccgccagcggtcgtcagactgtcgatgaagccctgaaagacgcgcagactggtggttctggtgagaacctgtactttcaaagctcagataatgggcctcaaaaccagcgcaacgctccacgtataaccttcggtggcccgtctgactccacaggcagcaaccagaatggtgagcgtagtggagccaggtctaagcagcgccgtccccagggtctgccgaacaacacggcgagctggtttactccgcttacccaatttggtaaagaagacttaaaattcccgcctggccagggcgtcccgatcaacactaactcttccccggatgatcagattggttattaccgcagagcaactcgtcggattcgcggcggcgacggtaaaatgaaagatttgccaccgaaatggtacttttactatctcggcaccggtccgcatgctgatctgccctacgggcaaaagcacccaggggtattttgggtggctcgacctggtgccctgaatactccaaaagatcatatcggcacccgtaaccctgctaataacgctgcgatcccgctgcaactgcctccgggtacaaagctgccaaaaggcttctatgcagaagggtcgcgtggtggcagccaggcgagtagccgtagcagctcccgctctcgcaactcgtcccgtaactccactccgggctcttctcgcggcacgtccccggctcgtatggcaggtaacggtggtgacgctgctctggcgctgctactgctggacaggctgaaccagctggagtcgaagatgagtggtaaaggccaacagcagcagggccagaccgttaccaaaaagagcgcagctgaagcatctaaaaaaccgcgacagaaacgtaccgcgactaaagcgtacaatgtaacacaggccttcggtcgtcgaggtccggagcaaactcaaggaaactttggcgatcaggaattaatccgccaggggaccgactacaaacactggccgcaaattgcccagttcgccccatccgctagtgcattcttcggtatgagccgcatcggcatggaagtaacgccaagtggtacgtggctgacctacaccggtgctatcaagcttgatgacaaggacccgaactttaaagaccaggttattctgcttaacaaacatattgatgcctataaaactttcccgccgaccgaacccaaaaaggacaaaaagaaaaaagctgatgaaacccaggctctaccgcagcgtcagaaaaaacagcaaactgtgactctgctgccagctgcggacctggatgatttttccaagcagctgcaacagtctatgagctctgcggactctacgcaggctggtggttctggtcaccatcatcaccatcattaa

SEQ ID NO: 2808 - DNA, 2421 bp, Artificial Sequence
  Description of Artificial Sequence: Synthetic polynucleotide
atgaaaatcgaagaaggtaaactggtaatctggattaacggcgataaaggctataacggtctcgctgaagtcggtaagaaattcgagaaagataccggaattaaagtcaccgttgagcatccggataaactggaagagaaattcccacaggttgcggcaactggcgatggccctgacattatcttctgggcacacgaccgctttggtggctacgctcaatctggcctgttggctgaaatcaccccggacaaagcgttccaggacaagctgtatccgtttacctgggatgccgtacgttacaacggcaagctgattgcttacccgatcgctgttgaagcgttatcgctgatttataacaaagatctgctgccgaacccgccaaaaacctgggaagagatcccggcgctggataaagaactgaaagcgaaaggtaagagcgcgctgatgttcaacctgcaagaaccgtacttcacctggccgctgattgctgctgacgggggttatgcgttcaagtatgaaaacggcaagtacgacattaaagacgtgggcgtggataacgctggcgcgaaagcgggtctgaccttcctggttgacctgattaaaaacaaacacatgaatgcagacaccgattactccatcgcagaagctgcctttaataaaggcgaaacagcgatgaccatcaacggcccgtgggcatggtccaacatcgacaccagcaaagtgaattatggtgtaacggtactgccgaccttcaagggtcaaccatccaaaccgttcgttggcgtgctgagcgcaggtattaacgccgccagtccgaacaaagagctggcgaaagagttcctcgaaaactatctgctgactgatgaaggtctggaagcggttaataaagacaaaccgctgggtgccgtagcgctgaagtcttacgaggaagagttggcgaaagatccacgtattgccgccaccatggaaaacgcccagaaaggtgaaatcatgccgaacatcccgcagatgtccgctttctggtatgccgtgcgtactgcggtgatcaacgccgccagcggtcgtcagactgtcgatgaagccctgaaagacgcgcagactggtggttctggtgagaacctgtactttcaaagctcagataatgggcctcaaaaccagcgcaacgctccacgtataaccttcggtggcccgtctgactccacaggcagcaaccagaatggtgagcgtagtggagccaggtctaagcagcgccgtccccagggtctgccgaacaacacggcgagctggtttactgcgcttacccaacacggtaaagaagacttaaaattcccgcgtggccagggcgtcccgatcaacactaactcttccccggatgatcagattggttattaccgcagagcaactcgtcggattcgcggcggcgacggtaaaatgaaagatttgtctccgcgttggtacttttactatctcggcaccggtccggaagctggactgccctacggggcaaacaaggacgggatcatttgggtggctaccgaaggtgccctgaatactccaaaagatcatatcggcacccgtaaccctgctaataacgctgcgatcgttctgcaactgcctcagggtacaactctgccaaaaggcttctatgcagaagggtcgcgtggtggcagccaggcgagtagccgtagcagcgagcgctctcgcaactcgtcccgtaactccactccgggcgaagagcgcggcacggaaccggctcgtatggcaggtaacggtggtgacgctgctctggcgctgctactgctggacaggctgaaccagctggagtcgaagatgagtggtaaaggccaacagcagcagggccagaccgttaccaaaaagagcgcagctgaagcatctaaaaaaccgcgacagaaacgtaccgcgactaaagcgtacaatgtaacacaggccttcggtcgtcgaggtccggagcaaactcaaggaaactttggcgatcaggaattaatccgccaggggaccgactacaaacactggccgcaaattgcccagttcgccccatccgctagtgcattcttcggtatgagccgcatcggcatggaagtaacgccaagtggtacgtggctgacctacaccggtgctatcaagcttgatgacaaggacccgaactttaaagaccaggttattctgcttaacaaacatattgatgcctataaaactttcccgccgaccgaacccaaaaaggacaaaaagaaaaaagctgatgaaacccaggctctaccgcagcgtcagaaaaaacagcaaactgtgactctgctgccagctgcggacctggatgatttttccaagcagctgcaacagtctatgagctctgcggactctacgcaggctggtggttctggtcaccatcatcaccatcattaa

SEQ ID NO: 2809 - DNA, 2421 bp, Artificial Sequence
  Description of Artificial Sequence: Synthetic polynucleotide
atgaaaatcgaagaaggtaaactggtaatctggattaacggcgataaaggctataacggtctcgctgaagtcggtaagaaattcgagaaagataccggaattaaagtcaccgttgagcatccggataaactggaagagaaattcccacaggttgcggcaactggcgatggccctgacattatcttctgggcacacgaccgctttggtggctacgctcaatctggcctgttggctgaaatcaccccggacaaagcgttccaggacaagctgtatccgtttacctgggatgccgtacgttacaacggcaagctgattgcttacccgatcgctgttgaagcgttatcgctgatttataacaaagatctgctgccgaacccgccaaaaacctgggaagagatcccggcgctggataaagaactgaaagcgaaaggtaagagcgcgctgatgttcaacctgcaagaaccgtacttcacctggccgctgattgctgctgacgggggttatgcgttcaagtatgaaaacggcaagtacgacattaaagacgtgggcgtggataacgctggcgcgaaagcgggtctgaccttcctggttgacctgattaaaaacaaacacatgaatgcagacaccgattactccatcgcagaagctgcctttaataaaggcgaaacagcgatgaccatcaacggcccgtgggcatggtccaacatcgacaccagcaaagtgaattatggtgtaacggtactgccgaccttcaagggtcaaccatccaaaccgttcgttggcgtgctgagcgcaggtattaacgccgccagtccgaacaaagagctggcgaaagagttcctcgaaaactatctgctgactgatgaaggtctggaagcggttaataaagacaaaccgctgggtgccgtagcgctgaagtcttacgaggaagagttggcgaaagatccacgtattgccgccaccatggaaaacgcccagaaaggtgaaatcatgccgaacatcccgcagatgtccgctttctggtatgccgtgcgtactgcggtgatcaacgccgccagcggtcgtcagactgtcgatgaagccctgaaagacgcgcagactggtggttctggtgagaacctgtactttcaaagctcagataatgggcctcaaaaccagcgcaacgctccacgtataaccttcggtggcccgtctgactccacaggcagcaaccagaatggtgagcgtagtggagccaggtctaagcagcgccgtccccagggtctgccgaacaacacggcgagctggtttactgcgcttacccaacacggtaaagaagacttaaaattcccgcgtggccagggcgtcccgatcaacactaactcttccccggatgatcagattggttattaccgcagagcaactcgtcggattcgcggcggcgacggtaaaatgaaagatttgtctccgcgttggtacttttactatctcggcaccggtccggaagctggactgccctacggggcaaacaaggacgggatcatttgggtggctaccgaaggtgccctgaatactccaaaagatcatatcggcacccgtaaccctgctaataacgctgcgatcgttctgcaactgcctcagggtacaactctgccaaaaggcttctatgcagaagggtcgcgtggtggcagccaggcgagtagccgtagcagctcccgctctcgcaactcgtcccgtaactccactccgggctcttctcgcggcacgtccccggctcgtatggcaggtaacggtggtgacgctgctctggcgctgctactgctggacaggctgaaccagctggagtcgaagatgagtggtaaaggccaacagcagcagggccagaccgttaccaaaaagagcgcagctgaagcatctaaaaaaccgcgacagaaacgtaccgcgactaaacaatacaatgtaacacaggccttcggtcgtcgaggtccggagcaaactcaaggaaactttggcgatcaggaattaatccgccaggggaccgactacaaacactggccgcaaattgcccagttcgccccatccgctagtgcattcttcggtatgagccgcatcggcatggaagtaacgccaagtggtacgtggctgacctacaccggtgctatcaagcttgatgacaaggacccgaactttaaagaccaggttattctgcttaacaaacatattgatgcctataaaactttcccgccgaccgaacccaaaaaggacaaaaagaaaaaagctgatgaaacccaggctctaccgcagcgtcagaaaaaacagcaaactgtgactctgctgccagctgcggacctggatgatttttccaagcagctgcaacagtctatgagctctgcggactctacgcaggctggtggttctggtcaccatcatcaccatcattaa

SEQ ID NO: 2810 - DNA, 2421 bp, Artificial Sequence
  Description of Artificial Sequence: Synthetic polynucleotide
atgaaaatcgaagaaggtaaactggtaatctggattaacggcgataaaggctataacggtctcgctgaagtcggtaagaaattcgagaaagataccggaattaaagtcaccgttgagcatccggataaactggaagagaaattcccacaggttgcggcaactggcgatggccctgacattatcttctgggcacacgaccgctttggtggctacgctcaatctggcctgttggctgaaatcaccccggacaaagcgttccaggacaagctgtatccgtttacctgggatgccgtacgttacaacggcaagctgattgcttacccgatcgctgttgaagcgttatcgctgatttataacaaagatctgctgccgaacccgccaaaaacctgggaagagatcccggcgctggataaagaactgaaagcgaaaggtaagagcgcgctgatgttcaacctgcaagaaccgtacttcacctggccgctgattgctgctgacgggggttatgcgttcaagtatgaaaacggcaagtacgacattaaagacgtgggcgtggataacgctggcgcgaaagcgggtctgaccttcctggttgacctgattaaaaacaaacacatgaatgcagacaccgattactccatcgcagaagctgcctttaataaaggcgaaacagcgatgaccatcaacggcccgtgggcatggtccaacatcgacaccagcaaagtgaattatggtgtaacggtactgccgaccttcaagggtcaaccatccaaaccgttcgttggcgtgctgagcgcaggtattaacgccgccagtccgaacaaagagctggcgaaagagttcctcgaaaactatctgctgactgatgaaggtctggaagcggttaataaagacaaaccgctgggtgccgtagcgctgaagtcttacgaggaagagttggcgaaagatccacgtattgccgccaccatggaaaacgcccagaaaggtgaaatcatgccgaacatcccgcagatgtccgctttctggtatgccgtgcgtactgcggtgatcaacgccgccagcggtcgtcagactgtcgatgaagccctgaaagacgcgcagactggtggttctggtgagaacctgtactttcaaagctcagataatgggcctcaaaaccagcgcaacgctccacgtataaccttcggtggcccgtctgactccacaggcagcaaccagaatggtgagcgtagtggagccaggtctaagcagcgccgtccccagggtctgccgaacaacacggcgagctggtttactgcgcttacccaacacggtaaagaagacttaaaattcccgcgtggccagggcgtcccgatcaacgaaaactcttccccggatgatcagattggttattaccgcagagcaactcgtcggattcgcggcggcgacggtaaaatgaaagatttgtctccgcgttggtacttttactatctcggcaccggtccggaagctggactgccctacggggcaaacaaggacgggatcatttgggtggctaccgaaggtgccctgaatactccaaaagatcatatcggcacccgtaaccctgctaataacgctgcgatcgttctgcaactgcctcagggtacaactctgccaaaaggcttctatgcagaagggtcgcgtggtggcagccaggcgagtagccgtagcagctcccgctctcgcaactcgtcccgtaactccactccgggctcttctcgcggcacgtccccggctcgtatggcaggtaacggtggtgacgctgctctggcgctgctactgctggacaggctgaaccagctggagtcgaagatgagtggtaaaggccaacagcagcagggccagaccgttaccaaaaagagcgcagctgaagcatctaaaaaaccgcgacagaaacgtaccgcgactaaagcgtacaatgtaacacaggccttcggtcgtcgaggtccggagcaaactcaaggaaactttggcgatcaggaattaatccgccaggggaccgactacaaacactggccgcaaattgcccagttcgccccatccgctagtgcattcttcggtatgagccgcatcggcatggaagtaacgccaagtggtacgtggctgacctacaccggtgctatcaagcttgatgacaaggacccgaactttaaagaccaggttattctgcttaacaaacatattgatgcctataaaactttcccgccgaccgaacccaaaaaggacaaaaagaaaaaagctgatgaaacccaggctctaccgcagcgtcagaaaaaacagcaaactgtgactctgctgccagctgcggacctggatgatttttccaagcagctgcaacagtctatgagctctgcggactctacgcaggctggtggttctggtcaccatcatcaccatcattaa

SEQ ID NO: 2811 - DNA, 2421 bp, Artificial Sequence
  Description of Artificial Sequence: Synthetic polynucleotide
atgaaaatcgaagaaggtaaactggtaatctggattaacggcgataaaggctataacggtctcgctgaagtcggtaagaaattcgagaaagataccggaattaaagtcaccgttgagcatccggataaactggaagagaaattcccacaggttgcggcaactggcgatggccctgacattatcttctgggcacacgaccgctttggtggctacgctcaatctggcctgttggctgaaatcaccccggacaaagcgttccaggacaagctgtatccgtttacctgggatgccgtacgttacaacggcaagctgattgcttacccgatcgctgttgaagcgttatcgctgatttataacaaagatctgctgccgaacccgccaaaaacctgggaagagatcccggcgctggataaagaactgaaagcgaaaggtaagagcgcgctgatgttcaacctgcaagaaccgtacttcacctggccgctgattgctgctgacgggggttatgcgttcaagtatgaaaacggcaagtacgacattaaagacgtgggcgtggataacgctggcgcgaaagcgggtctgaccttcctggttgacctgattaaaaacaaacacatgaatgcagacaccgattactccatcgcagaagctgcctttaataaaggcgaaacagcgatgaccatcaacggcccgtgggcatggtccaacatcgacaccagcaaagtgaattatggtgtaacggtactgccgaccttcaagggtcaaccatccaaaccgttcgttggcgtgctgagcgcaggtattaacgccgccagtccgaacaaagagctggcgaaagagttcctcgaaaactatctgctgactgatgaaggtctggaagcggttaataaagacaaaccgctgggtgccgtagcgctgaagtcttacgaggaagagttggcgaaagatccacgtattgccgccaccatggaaaacgcccagaaaggtgaaatcatgccgaacatcccgcagatgtccgctttctggtatgccgtgcgtactgcggtgatcaacgccgccagcggtcgtcagactgtcgatgaagccctgaaagacgcgcagactggtggttctggtgagaacctgtactttcaaagctcagataatgggcctcaaaaccagcgcaacgctccacgtataaccttcggtggcccgtctgactccacaggcagcaaccagaatggtgagcgtagtggagccaggtctaagcagcgccgtccccagggtctgccgaacaacacggcgagctggtttactgcgcttacccaacacggtaaagaagacttaaaattcccgcgtggccagggcgtcccgatcaacactaactcttccccggatgatcagattggttattaccgcagagcaactcgtcggattcgcggcggcgacggtaaaatgaaagatttgtctccgcgttggtacttttactatctcggcaccggtccggaagctggactgccctacggggcaaacaaggacgggatcatttgggtggctaccgaaggtgccctgaatactccaaaagatcatatcggcgatcgtaaccctgctaataacgctgcgatcgttctgcaactgcctcagggtacaactctgccaaaaggcttctatgcagaagggtcgcgtggtggcagccaggcgagtagccgtagcagctcccgctctcgcaactcgtcccgtaactccactccgggctcttctcgcggcacgtccccggctcgtatggcaggtaacggtggtgacgctgctctggcgctgctactgctggacaggctgaaccagctggagtcgaagatgagtggtaaaggccaacagcagcagggccagaccgttaccaaaaagagcgcagctgaagcatctaaaaaaccgcgacagaaacgtaccgcgactaaagcgtacaatgtaacacaggccttcggtcgtcgaggtccggagcaaactcaaggaaactttggcgatcaggaattaatccgccaggggaccgactacaaacactggccgcaaattgcccagttcgccccatccgctagtgcattcttcggtatgagccgcatcggcatggaagtaacgccaagtggtacgtggctgacctacaccggtgctatcaagcttgatgacaaggacccgaactttaaagaccaggttattctgcttaacaaacatattgatgcctataaaactttcccgccgaccgaacccaaaaaggacaaaaagaaaaaagctgatgaaacccaggctctaccgcagcgtcagaaaaaacagcaaactgtgactctgctgccagctgcggacctggatgatttttccaagcagctgcaacagtctatgagctctgcggactctacgcaggctggtggttctggtcaccatcatcaccatcattaa

SEQ ID NO: 2812 - DNA, 2421 bp, Artificial Sequence
  Description of Artificial Sequence: Synthetic polynucleotide
atgaaaatcgaagaaggtaaactggtaatctggattaacggcgataaaggctataacggtctcgctgaagtcggtaagaaattcgagaaagataccggaattaaagtcaccgttgagcatccggataaactggaagagaaattcccacaggttgcggcaactggcgatggccctgacattatcttctgggcacacgaccgctttggtggctacgctcaatctggcctgttggctgaaatcaccccggacaaagcgttccaggacaagctgtatccgtttacctgggatgccgtacgttacaacggcaagctgattgcttacccgatcgctgttgaagcgttatcgctgatttataacaaagatctgctgccgaacccgccaaaaacctgggaagagatcccggcgctggataaagaactgaaagcgaaaggtaagagcgcgctgatgttcaacctgcaagaaccgtacttcacctggccgctgattgctgctgacgggggttatgcgttcaagtatgaaaacggcaagtacgacattaaagacgtgggcgtggataacgctggcgcgaaagcgggtctgaccttcctggttgacctgattaaaaacaaacacatgaatgcagacaccgattactccatcgcagaagctgcctttaataaaggcgaaacagcgatgaccatcaacggcccgtgggcatggtccaacatcgacaccagcaaagtgaattatggtgtaacggtactgccgaccttcaagggtcaaccatccaaaccgttcgttggcgtgctgagcgcaggtattaacgccgccagtccgaacaaagagctggcgaaagagttcctcgaaaactatctgctgactgatgaaggtctggaagcggttaataaagacaaaccgctgggtgccgtagcgctgaagtcttacgaggaagagttggcgaaagatccacgtattgccgccaccatggaaaacgcccagaaaggtgaaatcatgccgaacatcccgcagatgtccgctttctggtatgccgtgcgtactgcggtgatcaacgccgccagcggtcgtcagactgtcgatgaagccctgaaagacgcgcagactggtggttctggtgagaacctgtactttcaaagctcagataatgggcctcaaaaccagcgcaacgctccacgtataaccttcggtggcccgtctgactccacaggcagcaaccagaatggtgagcgtagtggagccaggtctaagcagcgccgtccccagggtctgccgaacaacacggcgagctggtttactgcgcttacccaacacggtaaagaagacttaaaattcccgcgtggccagggcgtcccgatcaacactaactcttccccggatgatcagattggttattaccgcagagcaactcgtcggattcgcggcggcgacggtaaaatgaaagatttgtctccgcgttggtacttttactatctcggcaccggtccggaagctggactgccctacggggcaaacaaggacgggatcatttgggtggctaccgaaggtgccctgaatactccaaaagatcatatcggcacccgtaaccctgctaataacgctgcgcaagttctgcaactgcctcagggtacaactctgccaaaaggcttctatgcagaagggtcgcgtggtggcagccaggcgagtagccgtagcagctcccgctctcgcaactcgtcccgtaactccactccgggctcttctcgcggcacgtccccggctcgtatggcaggtaacggtggtgacgctgctctggcgctgctactgctggacaggctgaaccagctggagtcgaagatgagtggtaaaggccaacagcagcagggccagaccgttaccaaaaagagcgcagctgaagcatctaaaaaaccgcgacagaaacgtaccgcgactaaagcgtacaatgtaacacaggccttcggtcgtcgaggtccggagcaaactcaaggaaactttggcgatcaggaattaatccgccaggggaccgactacaaacactggccgcaaattgcccagttcgccccatccgctagtgcattcttcggtatgagccgcatcggcatggaagtaacgccaagtggtacgtggctgacctacaccggtgctatcaagcttgatgacaaggacccgaactttaaagaccaggttattctgcttaacaaacatattgatgcctataaaactttcccgccgaccgaacccaaaaaggacaaaaagaaaaaagctgatgaaacccaggctctaccgcagcgtcagaaaaaacagcaaactgtgactctgctgccagctgcggacctggatgatttttccaagcagctgcaacagtctatgagctctgcggactctacgcaggctggtggttctggtcaccatcatcaccatcattaa

SEQ ID NO: 2813 - DNA, 2421 bp, Artificial Sequence
  Description of Artificial Sequence: Synthetic polynucleotide
atgaaaatcgaagaaggtaaactggtaatctggattaacggcgataaaggctataacggtctcgctgaagtcggtaagaaattcgagaaagataccggaattaaagtcaccgttgagcatccggataaactggaagagaaattcccacaggttgcggcaactggcgatggccctgacattatcttctgggcacacgaccgctttggtggctacgctcaatctggcctgttggctgaaatcaccccggacaaagcgttccaggacaagctgtatccgtttacctgggatgccgtacgttacaacggcaagctgattgcttacccgatcgctgttgaagcgttatcgctgatttataacaaagatctgctgccgaacccgccaaaaacctgggaagagatcccggcgctggataaagaactgaaagcgaaaggtaagagcgcgctgatgttcaacctgcaagaaccgtacttcacctggccgctgattgctgctgacgggggttatgcgttcaagtatgaaaacggcaagtacgacattaaagacgtgggcgtggataacgctggcgcgaaagcgggtctgaccttcctggttgacctgattaaaaacaaacacatgaatgcagacaccgattactccatcgcagaagctgcctttaataaaggcgaaacagcgatgaccatcaacggcccgtgggcatggtccaacatcgacaccagcaaagtgaattatggtgtaacggtactgccgaccttcaagggtcaaccatccaaaccgttcgttggcgtgctgagcgcaggtattaacgccgccagtccgaacaaagagctggcgaaagagttcctcgaaaactatctgctgactgatgaaggtctggaagcggttaataaagacaaaccgctgggtgccgtagcgctgaagtcttacgaggaagagttggcgaaagatccacgtattgccgccaccatggaaaacgcccagaaaggtgaaatcatgccgaacatcccgcagatgtccgctttctggtatgccgtgcgtactgcggtgatcaacgccgccagcggtcgtcagactgtcgatgaagccctgaaagacgcgcagactggtggttctggtgagaacctgtactttcaaagctcagataatgggcctcaaaaccagcgcaacgctccacgtataaccttcggtggcccgtctgactccacaggcagcaaccagaatggtgagcgtagtggagccaggtctaagcagcgccgtccccagggtctgccgaacaacacggcgagctggtttactgcgcttacccaacacggtaaagaagacttaaaattcccgcgtggccagggcgtcccgatcaacactaactcttccccggatgatcagattggttattaccgcagagtgactcgtcggattcgcggcggcgacggtaaaatgaaagatttgtctccgcgttggtacttttactatctcggcaccggtccggaagctggactgccctacggggcaaacaaggacgggatcatttgggtggctaccgaaggtgccctgaatactccaaaagatcatatcggcacccgtaaccctgctaataacgctgcgatcgttctgcaactgcctcagggtacaactctgccaaaaggcttctatgcagaagggtcgcgtggtggcagccaggcgagtagccgtagcagctcccgctctcgcaactcgtcccgtaactccactccgggctcttctcgcggcacgtccccggctcgtatggcaggtaacggtggtgacgctgctctggcgctgctactgctggacaggctgaaccagctggagtcgaagatgagtggtaaaggccaacagcagcagggccagaccgttaccaaaaagagcgcagctgaagcatctaaaaaaccgcgacagaaacgtaccgcgactaaagcgtacaatgtaacacaggccttcggtcgtcgaggtccggagcaaactcaaggaaactttggcgatcaggaattaatccgccaggggaccgactacaaacactggccgcaaattgcccagttcgccccatccgctagtgcattcttcggtatgagccgcatcggcatggaagtaacgccaagtggtacgtggctgacctacaccggtgctatcaagcttgatgacaaggacccgaactttaaagaccaggttattctgcttaacaaacatattgatgcctataaaactttcccgccgaccgaacccaaaaaggacaaaaagaaaaaagctgatgaaacccaggctctaccgcagcgtcagaaaaaacagcaaactgtgactctgctgccagctgcggacctggatgatttttccaagcagctgcaacagtctatgagctctgcggactctacgcaggctggtggttctggtcaccatcatcaccatcattaa

SEQ ID NO: 2814 - DNA, 2421 bp, Artificial Sequence
  Description of Artificial Sequence: Synthetic polynucleotide
atgaaaatcgaagaaggtaaactggtaatctggattaacggcgataaaggctataacggtctcgctgaagtcggtaagaaattcgagaaagataccggaattaaagtcaccgttgagcatccggataaactggaagagaaattcccacaggttgcggcaactggcgatggccctgacattatcttctgggcacacgaccgctttggtggctacgctcaatctggcctgttggctgaaatcaccccggacaaagcgttccaggacaagctgtatccgtttacctgggatgccgtacgttacaacggcaagctgattgcttacccgatcgctgttgaagcgttatcgctgatttataacaaagatctgctgccgaacccgccaaaaacctgggaagagatcccggcgctggataaagaactgaaagcgaaaggtaagagcgcgctgatgttcaacctgcaagaaccgtacttcacctggccgctgattgctgctgacgggggttatgcgttcaagtatgaaaacggcaagtacgacattaaagacgtgggcgtggataacgctggcgcgaaagcgggtctgaccttcctggttgacctgattaaaaacaaacacatgaatgcagacaccgattactccatcgcagaagctgcctttaataaaggcgaaacagcgatgaccatcaacggcccgtgggcatggtccaacatcgacaccagcaaagtgaattatggtgtaacggtactgccgaccttcaagggtcaaccatccaaaccgttcgttggcgtgctgagcgcaggtattaacgccgccagtccgaacaaagagctggcgaaagagttcctcgaaaactatctgctgactgatgaaggtctggaagcggttaataaagacaaaccgctgggtgccgtagcgctgaagtcttacgaggaagagttggcgaaagatccacgtattgccgccaccatggaaaacgcccagaaaggtgaaatcatgccgaacatcccgcagatgtccgctttctggtatgccgtgcgtactgcggtgatcaacgccgccagcggtcgtcagactgtcgatgaagccctgaaagacgcgcagactggtggttctggtgagaacctgtactttcaaagctcagataatgggcctcaaaaccagcgcaacgctccacgtataaccttcggtggcccgtctgactccacaggcagcaaccagaatggtgagcgtagtggagccaggtctaagcagcgccgtccccagggtctgccgaacaacacggcgagctggtttactgcgcttacccaacacggtaaagaagacttaaaattcccgcgtggccagggcgtcccgatcaacactaactcttccccggatgatcagattggttattaccgcagagcaactcgtcggattcgcggcggcgacggtaaaatgaaagatttgtctccgcgttggtacttttactatctcggcaccggtccggaagctggactgccctacggggcaaacaaggacgggatcatttgggtggctaccgaaggtgccctgaatactccaaaagatcatatcggcacccgtaaccctgctaataacgctgcgatcgttctgcaactgcctcagggtacaactctgccaaaaggcttctatgcagaagggtcgcgtggtggcagccaggcgagtagccgtagcagctcccgctctcgcaactcgtcccgtaactccactccgggctcttctcgcggcacgtccccggctcgtatggcaggtaacggtggtgacgctgctctggcgctgctactgctggacaggctgaaccagctggagtcgaagatgagtggtaaaggccaacagcagcagggccagaccgttaccaaaaagagcgcagctgaagcatctaaaaaaccgcgacagaaacgtaccgcgactaaagcgtacaatgtaacacaggccttcggtcgtcgaggtccggagcaaactcaaggaaactttggcgatcaggaattaatccgcgaagggaccgactacaaacactggccgcaaattgcccagttcgccccatccgctagtgcattcttcggtatgagccgcatcggcatggaagtaacgccaagtggtacgtggctgacctacaccggtgctatcaagcttgatgacaaggacccgaactttaaagaccaggttattctgcttaacaaacatattgatgcctataaaactttcccgccgaccgaacccaaaaaggacaaaaagaaaaaagctgatgaaacccaggctctaccgcagcgtcagaaaaaacagcaaactgtgactctgctgccagctgcggacctggatgatttttccaagcagctgcaacagtctatgagctctgcggactctacgcaggctggtggttctggtcaccatcatcaccatcattaa

SEQ ID NO: 2815 - DNA, 2421 bp, Artificial Sequence
  Description of Artificial Sequence: Synthetic polynucleotide
atgaaaatcgaagaaggtaaactggtaatctggattaacggcgataaaggctataacggtctcgctgaagtcggtaagaaattcgagaaagataccggaattaaagtcaccgttgagcatccggataaactggaagagaaattcccacaggttgcggcaactggcgatggccctgacattatcttctgggcacacgaccgctttggtggctacgctcaatctggcctgttggctgaaatcaccccggacaaagcgttccaggacaagctgtatccgtttacctgggatgccgtacgttacaacggcaagctgattgcttacccgatcgctgttgaagcgttatcgctgatttataacaaagatctgctgccgaacccgccaaaaacctgggaagagatcccggcgctggataaagaactgaaagcgaaaggtaagagcgcgctgatgttcaacctgcaagaaccgtacttcacctggccgctgattgctgctgacgggggttatgcgttcaagtatgaaaacggcaagtacgacattaaagacgtgggcgtggataacgctggcgcgaaagcgggtctgaccttcctggttgacctgattaaaaacaaacacatgaatgcagacaccgattactccatcgcagaagctgcctttaataaaggcgaaacagcgatgaccatcaacggcccgtgggcatggtccaacatcgacaccagcaaagtgaattatggtgtaacggtactgccgaccttcaagggtcaaccatccaaaccgttcgttggcgtgctgagcgcaggtattaacgccgccagtccgaacaaagagctggcgaaagagttcctcgaaaactatctgctgactgatgaaggtctggaagcggttaataaagacaaaccgctgggtgccgtagcgctgaagtcttacgaggaagagttggcgaaagatccacgtattgccgccaccatggaaaacgcccagaaaggtgaaatcatgccgaacatcccgcagatgtccgctttctggtatgccgtgcgtactgcggtgatcaacgccgccagcggtcgtcagactgtcgatgaagccctgaaagacgcgcagactggtggttctggtgagaacctgtactttcaaagctcagataatgggcctcaaaaccagcgcaacgctccacgtataaccttcggtggcccgtctgactccacaggcagcaaccagaatggtgagcgtagtggagccaggtctaagcagcgccgtccccagggtctgccgaacaacacggcgagctggtttactgcgcttacccaacacggtaaagaagacttaaaattcccgcgtggccagggcgtcccgatcaacactaactcttccccggatgatcagattggttattaccgcagagcaactcgtcggattcgcggcggcgacggtaaaatgaaagatttgtctccgcgttggtacttttactatctcggcaccggtccggaagctggactgccctacggggcaaacaaggacgggatcatttgggtggctaccgaaggtgccctgaatactccaaaagatcatatcggcacccgtaaccctgctaataacgctgcgatctgcctgcaactgcctcagggtacaactctgccaaaaggcttctatgcagaagggtcgcgtggtggcagccaggcgagtagccgtagcagctcccgctctcgcaactcgtcccgtaactccactccgggctcttctcgcggcacgtccccggctcgtatggcaggtaacggtggtgacgctgctctggcgctgctactgctggacaggctgaaccagctggagtcgaagatgagtggtaaaggccaacagcagcagggccagaccgttaccaaaaagagcgcagctgaagcatctaaaaaaccgcgacagaaacgtaccgcgactaaagcgtacaatgtaacacaggccttcggtcgtcgaggtccggagcaaactcaaggaaactttggcgatcaggaattaatccgccaggggaccgactacaaacactggccgcaaattgcccagttcgccccatccgctagtgcattcttcggtatgagccgcatcggcatggaagtaacgccaagtggtacgtggctgacctacaccggtgctatcaagcttgatgacaaggacccgaactttaaagaccaggttattctgcttaacaaacatattgatgcctataaaactttcccgccgaccgaacccaaaaaggacaaaaagaaaaaagctgatgaaacccaggctctaccgcagcgtcagaaaaaacagcaaactgtgactctgctgccagctgcggacctggatgatttttccaagcagctgcaacagtctatgagctctgcggactctacgcaggctggtggttctggtcaccatcatcaccatcattaa

SEQ ID NO: 2816 - DNA, 2421 bp, Artificial Sequence
  Description of Artificial Sequence: Synthetic polynucleotide
atgaaaatcgaagaaggtaaactggtaatctggattaacggcgataaaggctataacggtctcgctgaagtcggtaagaaattcgagaaagataccggaattaaagtcaccgttgagcatccggataaactggaagagaaattcccacaggttgcggcaactggcgatggccctgacattatcttctgggcacacgaccgctttggtggctacgctcaatctggcctgttggctgaaatcaccccggacaaagcgttccaggacaagctgtatccgtttacctgggatgccgtacgttacaacggcaagctgattgcttacccgatcgctgttgaagcgttatcgctgatttataacaaagatctgctgccgaacccgccaaaaacctgggaagagatcccggcgctggataaagaactgaaagcgaaaggtaagagcgcgctgatgttcaacctgcaagaaccgtacttcacctggccgctgattgctgctgacgggggttatgcgttcaagtatgaaaacggcaagtacgacattaaagacgtgggcgtggataacgctggcgcgaaagcgggtctgaccttcctggttgacctgattaaaaacaaacacatgaatgcagacaccgattactccatcgcagaagctgcctttaataaaggcgaaacagcgatgaccatcaacggcccgtgggcatggtccaacatcgacaccagcaaagtgaattatggtgtaacggtactgccgaccttcaagggtcaaccatccaaaccgttcgttggcgtgctgagcgcaggtattaacgccgccagtccgaacaaagagctggcgaaagagttcctcgaaaactatctgctgactgatgaaggtctggaagcggttaataaagacaaaccgctgggtgccgtagcgctgaagtcttacgaggaagagttggcgaaagatccacgtattgccgccaccatggaaaacgcccagaaaggtgaaatcatgccgaacatcccgcagatgtccgctttctggtatgccgtgcgtactgcggtgatcaacgccgccagcggtcgtcagactgtcgatgaagccctgaaagacgcgcagactggtggttctggtgagaacctgtactttcaaagctcagataatgggcctcaaaaccagcgcaacgctccacgtataaccttcggtggcccgtctgactccacaggcagcaaccagaatggtgagcgtagtggagccaggtctaagcagcgccgtccccagggtctgccgaacaacacggcgagctggtttactccgcttacccaaaatggtaaagaagacttaaaattcccgccaggccagggcgtcccgatcaacactaactcttccccggatgatcagattggttattaccgcagagcaactcgtcggattcgcggcggcgacggtaaaatgaaagatttgcctccgaaatggtacttttactatctcggcaccggtccgcacgctgatctgccctacgggcaaaagcatgacggggtagtgtgggtggctcgaccgggtgccctgaatactccaaaagatcatatcggcacccgtaaccctgctaataacgctgcgatccccctgcaactgcctccgggtacaaagctgccaaaaggcttctatgcagaagggtcgcgtggtggcagccaggcgagtagccgtagcagctcccgctctcgcaactcgtcccgtaactccactccgggctcttctcgcggcacgtccccggctcgtatggcaggtaacggtggtgacgctgctctggcgctgctactgctggacaggctgaaccagctggagtcgaagatgagtggtaaaggccaacagcagcagggccagaccgttaccaaaaagagcgcagctgaagcatctaaaaaaccgcgacagaaacgtaccgcgactaaagcgtacaatgtaacacaggccttcggtcgtcgaggtccggagcaaactcaaggaaactttggcgatcaggaattaatccgccaggggaccgactacaaacactggccgcaaattgcccagttcgccccatccgctagtgcattcttcggtatgagccgcatcggcatggaagtaacgccaagtggtacgtggctgacctacaccggtgctatcaagcttgatgacaaggacccgaactttaaagaccaggttattctgcttaacaaacatattgatgcctataaaactttcccgccgaccgaacccaaaaaggacaaaaagaaaaaagctgatgaaacccaggctctaccgcagcgtcagaaaaaacagcaaactgtgactctgctgccagctgcggacctggatgatttttccaagcagctgcaacagtctatgagctctgcggactctacgcaggctggtggttctggtcaccatcatcaccatcattaa

SEQ ID NO: 2817 - DNA, 2421 bp, Artificial Sequence
  Description of Artificial Sequence: Synthetic polynucleotide
atgaaaatcgaagaaggtaaactggtaatctggattaacggcgataaaggctataacggtctcgctgaagtcggtaagaaattcgagaaagataccggaattaaagtcaccgttgagcatccggataaactggaagagaaattcccacaggttgcggcaactggcgatggccctgacattatcttctgggcacacgaccgctttggtggctacgctcaatctggcctgttggctgaaatcaccccggacaaagcgttccaggacaagctgtatccgtttacctgggatgccgtacgttacaacggcaagctgattgcttacccgatcgctgttgaagcgttatcgctgatttataacaaagatctgctgccgaacccgccaaaaacctgggaagagatcccggcgctggataaagaactgaaagcgaaaggtaagagcgcgctgatgttcaacctgcaagaaccgtacttcacctggccgctgattgctgctgacgggggttatgcgttcaagtatgaaaacggcaagtacgacattaaagacgtgggcgtggataacgctggcgcgaaagcgggtctgaccttcctggttgacctgattaaaaacaaacacatgaatgcagacaccgattactccatcgcagaagctgcctttaataaaggcgaaacagcgatgaccatcaacggcccgtgggcatggtccaacatcgacaccagcaaagtgaattatggtgtaacggtactgccgaccttcaagggtcaaccatccaaaccgttcgttggcgtgctgagcgcaggtattaacgccgccagtccgaacaaagagctggcgaaagagttcctcgaaaactatctgctgactgatgaaggtctggaagcggttaataaagacaaaccgctgggtgccgtagcgctgaagtcttacgaggaagagttggcgaaagatccacgtattgccgccaccatggaaaacgcccagaaaggtgaaatcatgccgaacatcccgcagatgtccgctttctggtatgccgtgcgtactgcggtgatcaacgccgccagcggtcgtcagactgtcgatgaagccctgaaagacgcgcagactggtggttctggtgagaacctgtactttcaaagctcagataatgggcctcaaaaccagcgcaacgctccacgtataaccttcggtggcccgtctgactccacaggcagcaaccagaatggtgagcgtagtggagccaggtctaagcagcgccgtccccagggtctgccgaacaacacggcgagctggtttactgcgcttacccaacacggtaaagaagacttaaaattcccgcgtggccagggcgtcccgatcaacactaactcttccccggatgatcagattggttattaccgcagagcaactcgtcggattcgcggcggcgacggtaaaatgaaagatttgtctccgcgttggtacttttactatctcggcaccggtccggaagctggactgccctacggggcaaacaaggacgggatcatttgggtggctaccgaaggtgccctgaatactccaaaagatcatatcggcacccgtaaccctgctaataacgctgcgatcgttctgcaactgcctcagggtacaactctgccaaaaggcttctatgcagaagggtcgcgtggtggcagccaggcgagtagccgtagcagctcccgctctcgcaactcgtcccgtaactccactccgggctcttctcgcggcacgtccccggctcgtatggcaggtaacggtggtgacgctgctctggcgctgctactgctggacaggctgaaccagctggagtcgaagatgagtggtaaaggccaacagcagcagggccagaccgttaccaaaaagagcgcagctgaagcatctaaaaaaccgcgacagaaacgtaccgcgactaaagcgtacaatgtaacacaggccttcggtcgtcgaggtccggagaaaactcaaggaaactttggcgatcaggaattaatccgccaggggaccgactacaaacactggccgcaaattgcccagttcgccccatccgctagtgcattcttcggtatgagccgcatcggcatggaagtaacgccaagtggtacgtggctgacctacaccggtgctatcaagcttgatgacaaggacccgaactttaaagaccaggttattctgcttaacaaacatattgatgcctataaaactttcccgccgaccgaacccaaaaaggacaaaaagaaaaaagctgatgaaacccaggctctaccgcagcgtcagaaaaaacagcaaactgtgactctgctgccagctgcggacctggatgatttttccaagcagctgcaacagtctatgagctctgcggactctacgcaggctggtggttctggtcaccatcatcaccatcattaa

SEQ ID NO: 2818 - DNA, 2421 bp, Artificial Sequence
  Description of Artificial Sequence: Synthetic polynucleotide
atgaaaatcgaagaaggtaaactggtaatctggattaacggcgataaaggctataacggtctcgctgaagtcggtaagaaattcgagaaagataccggaattaaagtcaccgttgagcatccggataaactggaagagaaattcccacaggttgcggcaactggcgatggccctgacattatcttctgggcacacgaccgctttggtggctacgctcaatctggcctgttggctgaaatcaccccggacaaagcgttccaggacaagctgtatccgtttacctgggatgccgtacgttacaacggcaagctgattgcttacccgatcgctgttgaagcgttatcgctgatttataacaaagatctgctgccgaacccgccaaaaacctgggaagagatcccggcgctggataaagaactgaaagcgaaaggtaagagcgcgctgatgttcaacctgcaagaaccgtacttcacctggccgctgattgctgctgacgggggttatgcgttcaagtatgaaaacggcaagtacgacattaaagacgtgggcgtggataacgctggcgcgaaagcgggtctgaccttcctggttgacctgattaaaaacaaacacatgaatgcagacaccgattactccatcgcagaagctgcctttaataaaggcgaaacagcgatgaccatcaacggcccgtgggcatggtccaacatcgacaccagcaaagtgaattatggtgtaacggtactgccgaccttcaagggtcaaccatccaaaccgttcgttggcgtgctgagcgcaggtattaacgccgccagtccgaacaaagagctggcgaaagagttcctcgaaaactatctgctgactgatgaaggtctggaagcggttaataaagacaaaccgctgggtgccgtagcgctgaagtcttacgaggaagagttggcgaaagatccacgtattgccgccaccatggaaaacgcccagaaaggtgaaatcatgccgaacatcccgcagatgtccgctttctggtatgccgtgcgtactgcggtgatcaacgccgccagcggtcgtcagactgtcgatgaagccctgaaagacgcgcagactggtggttctggtgagaacctgtactttcaaagctcagataatgggcctcaaaaccagcgcaacgctccacgtataaccttcggtggcccgtctgactccacaggcagcaaccagaatggtgagcgtagtggagccaggtctaagcagcgccgtccccagggtctgccgaacaacacgtatagctggtttactgcgcttacccaacacggtaaagaagacttaaaattcccgcgtggccagggcgtcccgatcaacactaactcttccccggatgatcagattggttattaccgcagagcaactcgtcggattcgcggcggcgacggtaaaatgaaagatttgtctccgcgttggtacttttactatctcggcaccggtccggaagctggactgccctacggggcaaacaaggacgggatcatttgggtggctaccgaaggtgccctgaatactccaaaagatcatatcggcacccgtaaccctgctaataacgctgcgatcgttctgcaactgcctcagggtacaactctgccaaaaggcttctatgcagaagggtcgcgtggtggcagccaggcgagtagccgtagcagctcccgctctcgcaactcgtcccgtaactccactccgggctcttctcgcggcacgtccccggctcgtatggcaggtaacggtggtgacgctgctctggcgctgctactgctggacaggctgaaccagctggagtcgaagatgagtggtaaaggccaacagcagcagggccagaccgttaccaaaaagagcgcagctgaagcatctaaaaaaccgcgacagaaacgtaccgcgactaaagcgtacaatgtaacacaggccttcggtcgtcgaggtccggagcaaactcaaggaaactttggcgatcaggaattaatccgccaggggaccgactacaaacactggccgcaaattgcccagttcgccccatccgctagtgcattcttcggtatgagccgcatcggcatggaagtaacgccaagtggtacgtggctgacctacaccggtgctatcaagcttgatgacaaggacccgaactttaaagaccaggttattctgcttaacaaacatattgatgcctataaaactttcccgccgaccgaacccaaaaaggacaaaaagaaaaaagctgatgaaacccaggctctaccgcagcgtcagaaaaaacagcaaactgtgactctgctgccagctgcggacctggatgatttttccaagcagctgcaacagtctatgagctctgcggactctacgcaggctggtggttctggtcaccatcatcaccatcattaa

SEQ ID NO: 2819 - DNA, 2421 bp, Artificial Sequence
  Description of Artificial Sequence: Synthetic polynucleotide
atgaaaatcgaagaaggtaaactggtaatctggattaacggcgataaaggctataacggtctcgctgaagtcggtaagaaattcgagaaagataccggaattaaagtcaccgttgagcatccggataaactggaagagaaattcccacaggttgcggcaactggcgatggccctgacattatcttctgggcacacgaccgctttggtggctacgctcaatctggcctgttggctgaaatcaccccggacaaagcgttccaggacaagctgtatccgtttacctgggatgccgtacgttacaacggcaagctgattgcttacccgatcgctgttgaagcgttatcgctgatttataacaaagatctgctgccgaacccgccaaaaacctgggaagagatcccggcgctggataaagaactgaaagcgaaaggtaagagcgcgctgatgttcaacctgcaagaaccgtacttcacctggccgctgattgctgctgacgggggttatgcgttcaagtatgaaaacggcaagtacgacattaaagacgtgggcgtggataacgctggcgcgaaagcgggtctgaccttcctggttgacctgattaaaaacaaacacatgaatgcagacaccgattactccatcgcagaagctgcctttaataaaggcgaaacagcgatgaccatcaacggcccgtgggcatggtccaacatcgacaccagcaaagtgaattatggtgtaacggtactgccgaccttcaagggtcaaccatccaaaccgttcgttggcgtgctgagcgcaggtattaacgccgccagtccgaacaaagagctggcgaaagagttcctcgaaaactatctgctgactgatgaaggtctggaagcggttaataaagacaaaccgctgggtgccgtagcgctgaagtcttacgaggaagagttggcgaaagatccacgtattgccgccaccatggaaaacgcccagaaaggtgaaatcatgccgaacatcccgcagatgtccgctttctggtatgccgtgcgtactgcggtgatcaacgccgccagcggtcgtcagactgtcgatgaagccctgaaagacgcgcagactggtggttctggtgagaacctgtactttcaaagctcagataatgggcctcaaaaccagcgcaacgctccacgtataaccttcggtggcccgtctgactccacaggcagcaaccagaatggtgagcgtagtggagccaggtctaagcagcgccgtccccagggtctgccgaacaacacggcgagctggtttactgcgcttacccaacacggtaaagaagacttaaaattcccgccaggccagggcgtcccgatcaacccgaactctaaaccggatgatcagattggttattggcgcagacaaactcgtcggtaccgcggcggcgacggtcaaatgaaagatttgcctccgcgttggtacttttactatctcggcaccggtccggaagctggactgccctacggggcaaacaaggacgggatcatttgggtggctaccgaaggtgccctgaatactccaaaagatcatatcggcacccgtaaccctgctaataacgctgcgatcgttctgcaactgcctcagggtacaactctgccaaaaggcttctatgcagaagggtcgcgtggtggcagccaggcgagtagccgtagcagctcccgctctcgcaactcgtcccgtaactccactccgggctcttctcgcggcacgtccccggctcgtatggcaggtaacggtggtgacgctgctctggcgctgctactgctggacaggctgaaccagctggagtcgaagatgagtggtaaaggccaacagcagcagggccagaccgttaccaaaaagagcgcagctgaagcatctaaaaaaccgcgacagaaacgtaccgcgactaaagcgtacaatgtaacacaggccttcggtcgtcgaggtccggagcaaactcaaggaaactttggcgatcaggaattaatccgccaggggaccgactacaaacactggccgcaaattgcccagttcgccccatccgctagtgcattcttcggtatgagccgcatcggcatggaagtaacgccaagtggtacgtggctgacctacaccggtgctatcaagcttgatgacaaggacccgaactttaaagaccaggttattctgcttaacaaacatattgatgcctataaaactttcccgccgaccgaacccaaaaaggacaaaaagaaaaaagctgatgaaacccaggctctaccgcagcgtcagaaaaaacagcaaactgtgactctgctgccagctgcggacctggatgatttttccaagcagctgcaacagtctatgagctctgcggactctacgcaggctggtggttctggtcaccatcatcaccatcattaa

SEQ ID NO: 2820 - DNA, 2421 bp, Artificial Sequence
  Description of Artificial Sequence: Synthetic polynucleotide
atgaaaatcgaagaaggtaaactggtaatctggattaacggcgataaaggctataacggtctcgctgaagtcggtaagaaattcgagaaagataccggaattaaagtcaccgttgagcatccggataaactggaagagaaattcccacaggttgcggcaactggcgatggccctgacattatcttctgggcacacgaccgctttggtggctacgctcaatctggcctgttggctgaaatcaccccggacaaagcgttccaggacaagctgtatccgtttacctgggatgccgtacgttacaacggcaagctgattgcttacccgatcgctgttgaagcgttatcgctgatttataacaaagatctgctgccgaacccgccaaaaacctgggaagagatcccggcgctggataaagaactgaaagcgaaaggtaagagcgcgctgatgttcaacctgcaagaaccgtacttcacctggccgctgattgctgctgacgggggttatgcgttcaagtatgaaaacggcaagtacgacattaaagacgtgggcgtggataacgctggcgcgaaagcgggtctgaccttcctggttgacctgattaaaaacaaacacatgaatgcagacaccgattactccatcgcagaagctgcctttaataaaggcgaaacagcgatgaccatcaacggcccgtgggcatggtccaacatcgacaccagcaaagtgaattatggtgtaacggtactgccgaccttcaagggtcaaccatccaaaccgttcgttggcgtgctgagcgcaggtattaacgccgccagtccgaacaaagagctggcgaaagagttcctcgaaaactatctgctgactgatgaaggtctggaagcggttaataaagacaaaccgctgggtgccgtagcgctgaagtcttacgaggaagagttggcgaaagatccacgtattgccgccaccatggaaaacgcccagaaaggtgaaatcatgccgaacatcccgcagatgtccgctttctggtatgccgtgcgtactgcggtgatcaacgccgccagcggtcgtcagactgtcgatgaagccctgaaagacgcgcagactggtggttctggtgagaacctgtactttcaaagctcagataatgggcctcaaaaccagcgcaacgctccacgtataaccttcggtggcccgtctgactccacaggcagcaaccagaatggtgagcgtagtggagccaggtctaagcagcgccgtccccagggtctgccgaacaacacggcgagctggtttactgcgcttacccaacacggtaaagaagacttaaaattcccgcgtggccagggcgtcccgatcaacactaactcttccccggatgatcagattggttattaccgcagagcaactcgtcggattcgcggcggcgacggtaaaatgaaagatttgtctccgcgttggtacttttactatctcggcaccggtccggaagctggactgccctacggggcaaacaaggacgggatcatttgggtggctaccgaaggtgccctgaatactccaaaagatcatatcggcacccgtaaccctgctaataacgctgcgatcgttctgcaactgcctcagggtacaactctgccaaaaggcttctatgcagaagggtcgcgtggtggcagccaggcgagtagccgtagcagctcccgctctcgcaactcgtcccgtaactccactccgggctcttctcgcggcacgtccccggctcgtatggcaggtaacggtggtgacgctgctctggcgctgctactgctggacaggctgaaccagctggagtcgaagatgagtggtaaaggccaacagcagcagggccagaccgttaccaaaaagagcgcagctgaagcatctaaaaaaccgcgacagaaacgtaccgcgactaaagcgtacaatgtaacacaggccttcggtcgtcgaggtccggagcaaactcaaggaaactttggcgatcaggaattaatccgccaggggaccgactacccacactggccgcaaattgcccagttcgccccatccgctagtgcattcttcggtatgagccgcatcggcatggaagtaacgccaagtggtacgtggctgacctacaccggtgctatcaagcttgatgacaaggacccgaactttaaagaccaggttattctgcttaacaaacatattgatgcctataaaactttcccgccgaccgaacccaaaaaggacaaaaagaaaaaagctgatgaaacccaggctctaccgcagcgtcagaaaaaacagcaaactgtgactctgctgccagctgcggacctggatgatttttccaagcagctgcaacagtctatgagctctgcggactctacgcaggctggtggttctggtcaccatcatcaccatcattaa

SEQ ID NO: 2821 - DNA, 2421 bp, Artificial Sequence
  Description of Artificial Sequence: Synthetic polynucleotide
atgaaaatcgaagaaggtaaactggtaatctggattaacggcgataaaggctataacggtctcgctgaagtcggtaagaaattcgagaaagataccggaattaaagtcaccgttgagcatccggataaactggaagagaaattcccacaggttgcggcaactggcgatggccctgacattatcttctgggcacacgaccgctttggtggctacgctcaatctggcctgttggctgaaatcaccccggacaaagcgttccaggacaagctgtatccgtttacctgggatgccgtacgttacaacggcaagctgattgcttacccgatcgctgttgaagcgttatcgctgatttataacaaagatctgctgccgaacccgccaaaaacctgggaagagatcccggcgctggataaagaactgaaagcgaaaggtaagagcgcgctgatgttcaacctgcaagaaccgtacttcacctggccgctgattgctgctgacgggggttatgcgttcaagtatgaaaacggcaagtacgacattaaagacgtgggcgtggataacgctggcgcgaaagcgggtctgaccttcctggttgacctgattaaaaacaaacacatgaatgcagacaccgattactccatcgcagaagctgcctttaataaaggcgaaacagcgatgaccatcaacggcccgtgggcatggtccaacatcgacaccagcaaagtgaattatggtgtaacggtactgccgaccttcaagggtcaaccatccaaaccgttcgttggcgtgctgagcgcaggtattaacgccgccagtccgaacaaagagctggcgaaagagttcctcgaaaactatctgctgactgatgaaggtctggaagcggttaataaagacaaaccgctgggtgccgtagcgctgaagtcttacgaggaagagttggcgaaagatccacgtattgccgccaccatggaaaacgcccagaaaggtgaaatcatgccgaacatcccgcagatgtccgctttctggtatgccgtgcgtactgcggtgatcaacgccgccagcggtcgtcagactgtcgatgaagccctgaaagacgcgcagactggtggttctggtgagaacctgtactttcaaagctcagataatgggcctcaaaaccagcgcaacgctccacgtataaccttcggtggcccgtctgactccacaggcagcaaccagaatggtgagcgtagtggagccaggtctaagcagcgccgtccccagggtctgccgaacaacacggcgagctggtttactgcgcttacccaacacggtaaagaagacttaaaattcccgcgtggccagggcgtcccgatcaacactaactcttccccggatgatcagattggttattaccgcagagcaactcgtcggattcgcggcggcgacggtaaaatgaaagatttgtctccgcgttggtacttttactatctcggcaccggtccggaagctggactgccctacggggcaaacaaggacgggatcatttgggtggctaccgaaggtgccctgaatactccaaaagatcatatcggcacccgtaaccctgctaataacgctgcgatcgttctgcaactgcctcagggtacaactctgccaaaaggcttctatgcagaagggtcgcgtggtggcagccaggcgagtagccgtagcagctcccgctctcgcaactcgtcccgtaactccactccgggctcttctcgcggcacgtccccggctcgtatggcaggtaacggtggtgacgctgctctggcgctgctactgctggacaggctgaaccagctggagtcgaagatgagtggtaaaggccaacagcagcagggccagaccgttaccaaaaagagcgcagctgaagcatctaaacgaccgcgacagaaacgtaccgcgactaaagcgtacaatgtaacacaggccttcggtcgtcgaggtccggagcaaactcaaggaaactttggcgatcaggaattaatccgccaggggaccgactacaaacactggccgcaaattgcccagttcgccccatccgctagtgcattcttcggtatgagccgcatcggcatggaagtaacgccaagtggtacgtggctgacctacaccggtgctatcaagcttgatgacaaggacccgaactttaaagaccaggttattctgcttaacaaacatattgatgcctataaaactttcccgccgaccgaacccaaaaaggacaaaaagaaaaaagctgatgaaacccaggctctaccgcagcgtcagaaaaaacagcaaactgtgactctgctgccagctgcggacctggatgatttttccaagcagctgcaacagtctatgagctctgcggactctacgcaggctggtggttctggtcaccatcatcaccatcattaa

SEQ ID NO: 2822 - DNA, 2421 bp, Artificial Sequence
  Description of Artificial Sequence: Synthetic polynucleotide
atgaaaatcgaagaaggtaaactggtaatctggattaacggcgataaaggctataacggtctcgctgaagtcggtaagaaattcgagaaagataccggaattaaagtcaccgttgagcatccggataaactggaagagaaattcccacaggttgcggcaactggcgatggccctgacattatcttctgggcacacgaccgctttggtggctacgctcaatctggcctgttggctgaaatcaccccggacaaagcgttccaggacaagctgtatccgtttacctgggatgccgtacgttacaacggcaagctgattgcttacccgatcgctgttgaagcgttatcgctgatttataacaaagatctgctgccgaacccgccaaaaacctgggaagagatcccggcgctggataaagaactgaaagcgaaaggtaagagcgcgctgatgttcaacctgcaagaaccgtacttcacctggccgctgattgctgctgacgggggttatgcgttcaagtatgaaaacggcaagtacgacattaaagacgtgggcgtggataacgctggcgcgaaagcgggtctgaccttcctggttgacctgattaaaaacaaacacatgaatgcagacaccgattactccatcgcagaagctgcctttaataaaggcgaaacagcgatgaccatcaacggcccgtgggcatggtccaacatcgacaccagcaaagtgaattatggtgtaacggtactgccgaccttcaagggtcaaccatccaaaccgttcgttggcgtgctgagcgcaggtattaacgccgccagtccgaacaaagagctggcgaaagagttcctcgaaaactatctgctgactgatgaaggtctggaagcggttaataaagacaaaccgctgggtgccgtagcgctgaagtcttacgaggaagagttggcgaaagatccacgtattgccgccaccatggaaaacgcccagaaaggtgaaatcatgccgaacatcccgcagatgtccgctttctggtatgccgtgcgtactgcggtgatcaacgccgccagcggtcgtcagactgtcgatgaagccctgaaagacgcgcagactggtggttctggtgagaacctgtactttcaaagctcagataatgggcctcaaaaccagcgcaacgctccacgtataaccttcggtggcccgtctgactccacaggcagcaaccagaatggtgagcgtagtggagccaggtctaagcagcgccgtccccagggtctgccgaacaacacggcgagctggtttactgcgcttacccaacacggtaaagaagacttaaaattcccgcgtggccagggcgtcccgatcaacactaactcttccccggatgatcagattggttattaccgcagagcaactcgtcggattcgcggcggcgacggtaaaatgaaagatttgtctccgcgttggtacttttactatctcggcaccggtccggaagctggactgccctacggggcaaacaagacggggatcatttgggtggctaccgaaggtgccctgaatactccaaaagatcatatcggcacccgtaaccctgctaataacgctgcgatcgttctgcaactgcctcagggtacaactctgccaaaaggcttctatgcagaagggtcgcgtggtggcagccaggcgagtagccgtagcagctcccgctctcgcaactcgtcccgtaactccactccgggctcttctcgcggcacgtccccggctcgtatggcaggtaacggtggtgacgctgctctggcgctgctactgctggacaggctgaaccagctggagtcgaagatgagtggtaaaggccaacagcagcagggccagaccgttaccaaaaagagcgcagctgaagcatctaaaaaaccgcgacagaaacgtaccgcgactaaagcgtacaatgtaacacaggccttcggtcgtcgaggtccggagcaaactcaaggaaactttggcgatcaggaattaatccgccaggggaccgactacaaacactggccgcaaattgcccagttcgccccatccgctagtgcattcttcggtatgagccgcatcggcatggaagtaacgccaagtggtacgtggctgacctacaccggtgctatcaagcttgatgacaaggacccgaactttaaagaccaggttattctgcttaacaaacatattgatgcctataaaactttcccgccgaccgaacccaaaaaggacaaaaagaaaaaagctgatgaaacccaggctctaccgcagcgtcagaaaaaacagcaaactgtgactctgctgccagctgcggacctggatgatttttccaagcagctgcaacagtctatgagctctgcggactctacgcaggctggtggttctggtcaccatcatcaccatcattaa

SEQ ID NO: 2823 - DNA, 2421 bp, Artificial Sequence
  Description of Artificial Sequence: Synthetic polynucleotide
atgaaaatcgaagaaggtaaactggtaatctggattaacggcgataaaggctataacggtctcgctgaagtcggtaagaaattcgagaaagataccggaattaaagtcaccgttgagcatccggataaactggaagagaaattcccacaggttgcggcaactggcgatggccctgacattatcttctgggcacacgaccgctttggtggctacgctcaatctggcctgttggctgaaatcaccccggacaaagcgttccaggacaagctgtatccgtttacctgggatgccgtacgttacaacggcaagctgattgcttacccgatcgctgttgaagcgttatcgctgatttataacaaagatctgctgccgaacccgccaaaaacctgggaagagatcccggcgctggataaagaactgaaagcgaaaggtaagagcgcgctgatgttcaacctgcaagaaccgtacttcacctggccgctgattgctgctgacgggggttatgcgttcaagtatgaaaacggcaagtacgacattaaagacgtgggcgtggataacgctggcgcgaaagcgggtctgaccttcctggttgacctgattaaaaacaaacacatgaatgcagacaccgattactccatcgcagaagctgcctttaataaaggcgaaacagcgatgaccatcaacggcccgtgggcatggtccaacatcgacaccagcaaagtgaattatggtgtaacggtactgccgaccttcaagggtcaaccatccaaaccgttcgttggcgtgctgagcgcaggtattaacgccgccagtccgaacaaagagctggcgaaagagttcctcgaaaactatctgctgactgatgaaggtctggaagcggttaataaagacaaaccgctgggtgccgtagcgctgaagtcttacgaggaagagttggcgaaagatccacgtattgccgccaccatggaaaacgcccagaaaggtgaaatcatgccgaacatcccgcagatgtccgctttctggtatgccgtgcgtactgcggtgatcaacgccgccagcggtcgtcagactgtcgatgaagccctgaaagacgcgcagactggtggttctggtgagaacctgtactttcaaagctcagataatgggcctcaaaaccagcgcaacgctccacgtataaccttcggtggcccgtctgactccacaggcagcaaccagaatggtgagcgtagtggagccaggtctaagcagcgccgtccccagggtctgccgaacaacacggcgagctggtttactgcgcttacccaacacggtaaagaagacttaaaattcccgcgtggccagggcgtcccgatcaacactaactcttccccggatgatcagattggttattaccgcagagcaactcgtcggattcgcggcggcgacggtaaaatgaaagatttgtctccgcgttggtacttttactatctcggcaccggtccggaagctggactgccctacggggcaaacaaggacgggatcatttgggtggctaccgaaggtgccctgaatactccaaaagatcatatcggcaaacgtaaccctgctaataacgctgcgatcgttctgcaactgcctcagggtacaactctgccaaaaggcttctatgcagaagggtcgcgtggtggcagccaggcgagtagccgtagcagctcccgctctcgcaactcgtcccgtaactccactccgggctcttctcgcggcacgtccccggctcgtatggcaggtaacggtggtgacgctgctctggcgctgctactgctggacaggctgaaccagctggagtcgaagatgagtggtaaaggccaacagcagcagggccagaccgttaccaaaaagagcgcagctgaagcatctaaaaaaccgcgacagaaacgtaccgcgactaaagcgtacaatgtaacacaggccttcggtcgtcgaggtccggagcaaactcaaggaaactttggcgatcaggaattaatccgccaggggaccgactacaaacactggccgcaaattgcccagttcgccccatccgctagtgcattcttcggtatgagccgcatcggcatggaagtaacgccaagtggtacgtggctgacctacaccggtgctatcaagcttgatgacaaggacccgaactttaaagaccaggttattctgcttaacaaacatattgatgcctataaaactttcccgccgaccgaacccaaaaaggacaaaaagaaaaaagctgatgaaacccaggctctaccgcagcgtcagaaaaaacagcaaactgtgactctgctgccagctgcggacctggatgatttttccaagcagctgcaacagtctatgagctctgcggactctacgcaggctggtggttctggtcaccatcatcaccatcattaa

SEQ ID NO: 2824 - DNA, 2421 bp, Artificial Sequence
  Description of Artificial Sequence: Synthetic polynucleotide
atgaaaatcgaagaaggtaaactggtaatctggattaacggcgataaaggctataacggtctcgctgaagtcggtaagaaattcgagaaagataccggaattaaagtcaccgttgagcatccggataaactggaagagaaattcccacaggttgcggcaactggcgatggccctgacattatcttctgggcacacgaccgctttggtggctacgctcaatctggcctgttggctgaaatcaccccggacaaagcgttccaggacaagctgtatccgtttacctgggatgccgtacgttacaacggcaagctgattgcttacccgatcgctgttgaagcgttatcgctgatttataacaaagatctgctgccgaacccgccaaaaacctgggaagagatcccggcgctggataaagaactgaaagcgaaaggtaagagcgcgctgatgttcaacctgcaagaaccgtacttcacctggccgctgattgctgctgacgggggttatgcgttcaagtatgaaaacggcaagtacgacattaaagacgtgggcgtggataacgctggcgcgaaagcgggtctgaccttcctggttgacctgattaaaaacaaacacatgaatgcagacaccgattactccatcgcagaagctgcctttaataaaggcgaaacagcgatgaccatcaacggcccgtgggcatggtccaacatcgacaccagcaaagtgaattatggtgtaacggtactgccgaccttcaagggtcaaccatccaaaccgttcgttggcgtgctgagcgcaggtattaacgccgccagtccgaacaaagagctggcgaaagagttcctcgaaaactatctgctgactgatgaaggtctggaagcggttaataaagacaaaccgctgggtgccgtagcgctgaagtcttacgaggaagagttggcgaaagatccacgtattgccgccaccatggaaaacgcccagaaaggtgaaatcatgccgaacatcccgcagatgtccgctttctggtatgccgtgcgtactgcggtgatcaacgccgccagcggtcgtcagactgtcgatgaagccctgaaagacgcgcagactggtggttctggtgagaacctgtactttcaaagctcagataatgggcctcaaaaccagcgcaacgctccacgtataaccttcggtggcccgtctgactccacaggcagcaaccagaatggtgagcgtagtggagccaggtctaagcagcgccgtccccagggtctgccgaacaacacggcgagctggtttactgcgcttacccaacacggtaaagaagacttaaaattcccgcgtggccagggcgtcccgatcaacactaactcttccccggatgatcagattggttattaccgcagagcaactcgtcggattcgcggcggcgacggtaaaatgaaagatttgtctccgcgttggtacttttactatctcggcaccggtccggaagctggactgccctacggggcaaacaaggacgggatcatttgggtggctaccgaaggtgccctgaatactccaaaagatcatatcggcacccgtaaccctgctaataacgctgcgatcgttctgcaactgcctcagggtacaactctgccaaaaggcttctatgcagaagggtcgcgtggtggcagccaggcgagtagccgtagcagctcccgctctcgcaactcgtcccgtaactccactccgggctcttctcgcggcacgtccccggctcgtatggcaggtaacggtggtgacgctgctctggcgctgctactgctggacaggctgaaccagctggagtcgaagatgagtggtaaaggccaacagcagcagggccagaccgttaccaaaaagagcgcagctgaaatgtctaaaaaaccgcgacagaaacgtaccgcgactaaaggatacaatgtaacacagtgtttcggtccacgaggtccggagcaaactcaaggaaactttggcgatgaagaattaatccgcaaggggaccgactacaaacactggccgcaaattgcccagttcgccccatccgctagtgcattcttcggtatgagccgcatctcgagtaaagaaacgccaagtggtacgtggctgacctacaccggtgctatcaagcttgataaagatgacccgaactttaaagaccaggttattctgcttaacaaacatattgatgcctataaaactttcccgccgaccgaacccaaaaaggacaaaaagaaaaaagctgatgaaacccaggctctaccgcagcgtcagaaaaaacagcaaactgtgactctgctgccagctgcggacctggatgatttttccaagcagctgcaacagtctatgagctctgcggactctacgcaggctggtggttctggtcaccatcatcaccatcattaa

SEQ ID NO: 2825 - DNA, 2421 bp, Artificial Sequence
  Description of Artificial Sequence: Synthetic polynucleotide
atgaaaatcgaagaaggtaaactggtaatctggattaacggcgataaaggctataacggtctcgctgaagtcggtaagaaattcgagaaagataccggaattaaagtcaccgttgagcatccggataaactggaagagaaattcccacaggttgcggcaactggcgatggccctgacattatcttctgggcacacgaccgctttggtggctacgctcaatctggcctgttggctgaaatcaccccggacaaagcgttccaggacaagctgtatccgtttacctgggatgccgtacgttacaacggcaagctgattgcttacccgatcgctgttgaagcgttatcgctgatttataacaaagatctgctgccgaacccgccaaaaacctgggaagagatcccggcgctggataaagaactgaaagcgaaaggtaagagcgcgctgatgttcaacctgcaagaaccgtacttcacctggccgctgattgctgctgacgggggttatgcgttcaagtatgaaaacggcaagtacgacattaaagacgtgggcgtggataacgctggcgcgaaagcgggtctgaccttcctggttgacctgattaaaaacaaacacatgaatgcagacaccgattactccatcgcagaagctgcctttaataaaggcgaaacagcgatgaccatcaacggcccgtgggcatggtccaacatcgacaccagcaaagtgaattatggtgtaacggtactgccgaccttcaagggtcaaccatccaaaccgttcgttggcgtgctgagcgcaggtattaacgccgccagtccgaacaaagagctggcgaaagagttcctcgaaaactatctgctgactgatgaaggtctggaagcggttaataaagacaaaccgctgggtgccgtagcgctgaagtcttacgaggaagagttggcgaaagatccacgtattgccgccaccatggaaaacgcccagaaaggtgaaatcatgccgaacatcccgcagatgtccgctttctggtatgccgtgcgtactgcggtgatcaacgccgccagcggtcgtcagactgtcgatgaagccctgaaagacgcgcagactggtggttctggtgagaacctgtactttcaaagctcagataatgggcctcaaaaccagcgcaacgctccacgtataaccttcggtggcccgtctgactccacaggcagcaaccagaatggtgagcgtagtggagccaggtctaagcagcgccgtccccagggtctgccgaacaacacggcgagctggtttactgcgcttacccaacacggtaaagaagacttaaaattcccgcgtggccagggcgtcccgatcaacactaactcttccccggatgatcagattggttattaccgcagagcaactcgtcggattcgcggcggcgacggtaaaatgaaagatttgtctccgcgttggtacttttactatctcggcaccggtccggaagctggactgccctacggggcaaacaaggacgggatcatttgggtggctaccgaaggtgccctgaatactccaaaagatcatatcggcacccgtaaccctgctaataacgctgcgatcgttctgcaactgcctcagggtacaactctgccaaaaggcttctatgcagaagggtcgcgtggtggcagccaggcgagtagccgtagcagctcccgctctcgcaactcgtcccgtaactccactccgggctcttctcgcggcacgtccccggctcgtatggcaggtaacggtggtgacgctgctctggcgctgctactgctggacaggctgaaccagctggagtcgaagatgagtggtaaaggccaacagcagcagggccagaccgttaccaaaaagagcgcagctgaagcatctaaaattccgcgacagaaacgtaccgcgactaaagcgtacaatgtaacacaggccttcggtcgtcgaggtccggagcaaactcaaggaaactttggcgatcaggaattaatccgccaggggaccgactacaaacactggccgcaaattgcccagttcgccccatccgctagtgcattcttcggtatgagccgcatcggcatggaagtaacgccaagtggtacgtggctgacctacaccggtgctatcaagcttgatgacaaggacccgaactttaaagaccaggttattctgcttaacaaacatattgatgcctataaaactttcccgccgaccgaacccaaaaaggacaaaaagaaaaaagctgatgaaacccaggctctaccgcagcgtcagaaaaaacagcaaactgtgactctgctgccagctgcggacctggatgatttttccaagcagctgcaacagtctatgagctctgcggactctacgcaggctggtggttctggtcaccatcatcaccatcattaa

SEQ ID NO: 2826 - DNA, 2421 bp, Artificial Sequence
  Description of Artificial Sequence: Synthetic polynucleotide
atgaaaatcgaagaaggtaaactggtaatctggattaacggcgataaaggctataacggtctcgctgaagtcggtaagaaattcgagaaagataccggaattaaagtcaccgttgagcatccggataaactggaagagaaattcccacaggttgcggcaactggcgatggccctgacattatcttctgggcacacgaccgctttggtggctacgctcaatctggcctgttggctgaaatcaccccggacaaagcgttccaggacaagctgtatccgtttacctgggatgccgtacgttacaacggcaagctgattgcttacccgatcgctgttgaagcgttatcgctgatttataacaaagatctgctgccgaacccgccaaaaacctgggaagagatcccggcgctggataaagaactgaaagcgaaaggtaagagcgcgctgatgttcaacctgcaagaaccgtacttcacctggccgctgattgctgctgacgggggttatgcgttcaagtatgaaaacggcaagtacgacattaaagacgtgggcgtggataacgctggcgcgaaagcgggtctgaccttcctggttgacctgattaaaaacaaacacatgaatgcagacaccgattactccatcgcagaagctgcctttaataaaggcgaaacagcgatgaccatcaacggcccgtgggcatggtccaacatcgacaccagcaaagtgaattatggtgtaacggtactgccgaccttcaagggtcaaccatccaaaccgttcgttggcgtgctgagcgcaggtattaacgccgccagtccgaacaaagagctggcgaaagagttcctcgaaaactatctgctgactgatgaaggtctggaagcggttaataaagacaaaccgctgggtgccgtagcgctgaagtcttacgaggaagagttggcgaaagatccacgtattgccgccaccatggaaaacgcccagaaaggtgaaatcatgccgaacatcccgcagatgtccgctttctggtatgccgtgcgtactgcggtgatcaacgccgccagcggtcgtcagactgtcgatgaagccctgaaagacgcgcagactggtggttctggtgagaacctgtactttcaaagctcagataatgggcctcaaaaccagcgcaacgctccacgtataaccttcggtggcccgtctgactccacaggcagcaaccagaatggtgagcgtagtggagccaggtctaagcagcgccgtccccagggtctgccgaacaacacggcgagctggtttactgcgcttacccaacacggtaaagaagacttaaaattcccgcgtggccagggcgtcccgatcaacactaactcttccccggatgatcagattggttattaccgcagagcaactcgtcggattcgcggcggcgacggtaaaatgaaagatttgtctccgcgttggtacttttactatctcggcaccggtccggaagctggactgccctacggggcaaacaaggacgggatcatttgggtggctaccgaaggtgccctgaatactccaaaagatcatatcggcacccgtaaccctgctaataacgctgcgatcgttctgcaactgcctcagggtacaactctgccaaaaggcttctatgcagaagggtcgcgtggtggcagccaggcgagtagccgtagcagctcccgctctcgcaactcgtcccgtaactccactccgggctcttctcgcggcacgtccccggctcgtatggcaggtaacggtggtgacgctgctctggcgctgctactgctggacaggctgaaccagctggagtcgaagatgagtggtaaaggccaacagcagcagggccagaccgttaccaaaaagagcgcagctgaagcatctaaaaaaccgcgacagaaacgtaccgcgactaaagcgtacaatgtaacacaggccttcggtcgtcgaggtccggagcaaactcaaggaaactttggcgatcaggaattaatccgccaggggaccgactacaaacactggccgcaaattgcccagttcgccccatccgctagtgcattcttcggtatgagccgcatcggcatggaaattacgccaagtggtacgtggctgacctacaccggtgctatcaagcttgatgacaaggacccgaactttaaagaccaggttattctgcttaacaaacatattgatgcctataaaactttcccgccgaccgaacccaaaaaggacaaaaagaaaaaagctgatgaaacccaggctctaccgcagcgtcagaaaaaacagcaaactgtgactctgctgccagctgcggacctggatgatttttccaagcagctgcaacagtctatgagctctgcggactctacgcaggctggtggttctggtcaccatcatcaccatcattaa

SEQ ID NO: 2827 - DNA, 2421 bp, Artificial Sequence
  Description of Artificial Sequence: Synthetic polynucleotide
atgaaaatcgaagaaggtaaactggtaatctggattaacggcgataaaggctataacggtctcgctgaagtcggtaagaaattcgagaaagataccggaattaaagtcaccgttgagcatccggataaactggaagagaaattcccacaggttgcggcaactggcgatggccctgacattatcttctgggcacacgaccgctttggtggctacgctcaatctggcctgttggctgaaatcaccccggacaaagcgttccaggacaagctgtatccgtttacctgggatgccgtacgttacaacggcaagctgattgcttacccgatcgctgttgaagcgttatcgctgatttataacaaagatctgctgccgaacccgccaaaaacctgggaagagatcccggcgctggataaagaactgaaagcgaaaggtaagagcgcgctgatgttcaacctgcaagaaccgtacttcacctggccgctgattgctgctgacgggggttatgcgttcaagtatgaaaacggcaagtacgacattaaagacgtgggcgtggataacgctggcgcgaaagcgggtctgaccttcctggttgacctgattaaaaacaaacacatgaatgcagacaccgattactccatcgcagaagctgcctttaataaaggcgaaacagcgatgaccatcaacggcccgtgggcatggtccaacatcgacaccagcaaagtgaattatggtgtaacggtactgccgaccttcaagggtcaaccatccaaaccgttcgttggcgtgctgagcgcaggtattaacgccgccagtccgaacaaagagctggcgaaagagttcctcgaaaactatctgctgactgatgaaggtctggaagcggttaataaagacaaaccgctgggtgccgtagcgctgaagtcttacgaggaagagttggcgaaagatccacgtattgccgccaccatggaaaacgcccagaaaggtgaaatcatgccgaacatcccgcagatgtccgctttctggtatgccgtgcgtactgcggtgatcaacgccgccagcggtcgtcagactgtcgatgaagccctgaaagacgcgcagactggtggttctggtgagaacctgtactttcaaagctcagataatgggcctcaaaaccagcgcaacgctccacgtataaccttcggtggcccgtctgactccacaggcagcaaccagaatggtgagcgtagtggagccaggtctaagcagcgccgtccccagggtctgccgaacaacacggcgagctggtttactgcgcttacccaacacggtaaagaagacttaaaattcccgcgtggccagggcgtcccgatcaacactaactcttccccggatgatcagattggttattaccgcagagcacaacgtcggattcgcggcggcgacggtaaaatgaaagatttgtctccgcgttggtacttttactatctcggcaccggtccggaagctggactgccctacggggcaaacaaggacgggatcatttgggtggctaccgaaggtgccctgaatactccaaaagatcatatcggcacccgtaaccctgctaataacgctgcgatcgttctgcaactgcctcagggtacaactctgccaaaaggcttctatgcagaagggtcgcgtggtggcagccaggcgagtagccgtagcagctcccgctctcgcaactcgtcccgtaactccactccgggctcttctcgcggcacgtccccggctcgtatggcaggtaacggtggtgacgctgctctggcgctgctactgctggacaggctgaaccagctggagtcgaagatgagtggtaaaggccaacagcagcagggccagaccgttaccaaaaagagcgcagctgaagcatctaaaaaaccgcgacagaaacgtaccgcgactaaagcgtacaatgtaacacaggccttcggtcgtcgaggtccggagcaaactcaaggaaactttggcgatcaggaattaatccgccaggggaccgactacaaacactggccgcaaattgcccagttcgccccatccgctagtgcattcttcggtatgagccgcatcggcatggaagtaacgccaagtggtacgtggctgacctacaccggtgctatcaagcttgatgacaaggacccgaactttaaagaccaggttattctgcttaacaaacatattgatgcctataaaactttcccgccgaccgaacccaaaaaggacaaaaagaaaaaagctgatgaaacccaggctctaccgcagcgtcagaaaaaacagcaaactgtgactctgctgccagctgcggacctggatgatttttccaagcagctgcaacagtctatgagctctgcggactctacgcaggctggtggttctggtcaccatcatcaccatcattaa

SEQ ID NO: 2828 - DNA, 2421 bp, Artificial Sequence
  Description of Artificial Sequence: Synthetic polynucleotide
atgaaaatcgaagaaggtaaactggtaatctggattaacggcgataaaggctataacggtctcgctgaagtcggtaagaaattcgagaaagataccggaattaaagtcaccgttgagcatccggataaactggaagagaaattcccacaggttgcggcaactggcgatggccctgacattatcttctgggcacacgaccgctttggtggctacgctcaatctggcctgttggctgaaatcaccccggacaaagcgttccaggacaagctgtatccgtttacctgggatgccgtacgttacaacggcaagctgattgcttacccgatcgctgttgaagcgttatcgctgatttataacaaagatctgctgccgaacccgccaaaaacctgggaagagatcccggcgctggataaagaactgaaagcgaaaggtaagagcgcgctgatgttcaacctgcaagaaccgtacttcacctggccgctgattgctgctgacgggggttatgcgttcaagtatgaaaacggcaagtacgacattaaagacgtgggcgtggataacgctggcgcgaaagcgggtctgaccttcctggttgacctgattaaaaacaaacacatgaatgcagacaccgattactccatcgcagaagctgcctttaataaaggcgaaacagcgatgaccatcaacggcccgtgggcatggtccaacatcgacaccagcaaagtgaattatggtgtaacggtactgccgaccttcaagggtcaaccatccaaaccgttcgttggcgtgctgagcgcaggtattaacgccgccagtccgaacaaagagctggcgaaagagttcctcgaaaactatctgctgactgatgaaggtctggaagcggttaataaagacaaaccgctgggtgccgtagcgctgaagtcttacgaggaagagttggcgaaagatccacgtattgccgccaccatggaaaacgcccagaaaggtgaaatcatgccgaacatcccgcagatgtccgctttctggtatgccgtgcgtactgcggtgatcaacgccgccagcggtcgtcagactgtcgatgaagccctgaaagacgcgcagactggtggttctggtgagaacctgtactttcaaagctcagataatgggcctcaaaaccagcgcaacgctccacgtataaccttcggtggcccgtctgactccacaggcagcaaccagaatggtgagcgtagtggagccaggtctaagcagcgccgtccccagggtctgccgaacaacacggcgagctggtttactgcgcttacccaacacggtaaagaagacttaaaattcccgcgtggccagggcgtcccgatcaacactaactcttccccggatgatcagattggttattaccgcagagcaactcgtcggattcgcggcggcgacggtaaaatgaaagatttgtctccgcgttggtacttttactatctcggcaccggtccggaagctggactgccctacggggaaaacaaggacgggatcatttgggtggctaccgaaggtgccctgaatactccaaaagatcatatcggcacccgtaaccctgctaataacgctgcgatcgttctgcaactgcctcagggtacaactctgccaaaaggcttctatgcagaagggtcgcgtggtggcagccaggcgagtagccgtagcagctcccgctctcgcaactcgtcccgtaactccactccgggctcttctcgcggcacgtccccggctcgtatggcaggtaacggtggtgacgctgctctggcgctgctactgctggacaggctgaaccagctggagtcgaagatgagtggtaaaggccaacagcagcagggccagaccgttaccaaaaagagcgcagctgaagcatctaaaaaaccgcgacagaaacgtaccgcgactaaagcgtacaatgtaacacaggccttcggtcgtcgaggtccggagcaaactcaaggaaactttggcgatcaggaattaatccgccaggggaccgactacaaacactggccgcaaattgcccagttcgccccatccgctagtgcattcttcggtatgagccgcatcggcatggaagtaacgccaagtggtacgtggctgacctacaccggtgctatcaagcttgatgacaaggacccgaactttaaagaccaggttattctgcttaacaaacatattgatgcctataaaactttcccgccgaccgaacccaaaaaggacaaaaagaaaaaagctgatgaaacccaggctctaccgcagcgtcagaaaaaacagcaaactgtgactctgctgccagctgcggacctggatgatttttccaagcagctgcaacagtctatgagctctgcggactctacgcaggctggtggttctggtcaccatcatcaccatcattaa

SEQ ID NO: 2829 - DNA, 2421 bp, Artificial Sequence
  Description of Artificial Sequence: Synthetic polynucleotide
atgaaaatcgaagaaggtaaactggtaatctggattaacggcgataaaggctataacggtctcgctgaagtcggtaagaaattcgagaaagataccggaattaaagtcaccgttgagcatccggataaactggaagagaaattcccacaggttgcggcaactggcgatggccctgacattatcttctgggcacacgaccgctttggtggctacgctcaatctggcctgttggctgaaatcaccccggacaaagcgttccaggacaagctgtatccgtttacctgggatgccgtacgttacaacggcaagctgattgcttacccgatcgctgttgaagcgttatcgctgatttataacaaagatctgctgccgaacccgccaaaaacctgggaagagatcccggcgctggataaagaactgaaagcgaaaggtaagagcgcgctgatgttcaacctgcaagaaccgtacttcacctggccgctgattgctgctgacgggggttatgcgttcaagtatgaaaacggcaagtacgacattaaagacgtgggcgtggataacgctggcgcgaaagcgggtctgaccttcctggttgacctgattaaaaacaaacacatgaatgcagacaccgattactccatcgcagaagctgcctttaataaaggcgaaacagcgatgaccatcaacggcccgtgggcatggtccaacatcgacaccagcaaagtgaattatggtgtaacggtactgccgaccttcaagggtcaaccatccaaaccgttcgttggcgtgctgagcgcaggtattaacgccgccagtccgaacaaagagctggcgaaagagttcctcgaaaactatctgctgactgatgaaggtctggaagcggttaataaagacaaaccgctgggtgccgtagcgctgaagtcttacgaggaagagttggcgaaagatccacgtattgccgccaccatggaaaacgcccagaaaggtgaaatcatgccgaacatcccgcagatgtccgctttctggtatgccgtgcgtactgcggtgatcaacgccgccagcggtcgtcagactgtcgatgaagccctgaaagacgcgcagactggtggttctggtgagaacctgtactttcaaagctcagataatgggcctcaaaaccagcgcaacgctccacgtataaccttcggtggcccgtctgactccacaggcagcaaccagaatggtgagcgtagtggagccaggtctaagcagcgccgtccccagggtctgccgaacaacacggcgagctggtttactgcgcttacccaacacggtaaagaagacttaaaattcccgcgtggccagggcgtcccgatcaacactaactcttccccggatgatcagattggttattaccgcagagcaactcgtcggattcgcggcggcgacggtaaaatgaaagatttgtctccgcgttggtacttttactatctcggcaccggtccggaagctggactgccctacggggcaaacaaggacgggatcatttgggtggctaccgaaggtgccctgaatactccaaaagatcatatcggcacccgtaaccctgctaataacgctgcgaaagttctgcaactgcctcagggtacaactctgccaaaaggcttctatgcagaagggtcgcgtggtggcagccaggcgagtagccgtagcagctcccgctctcgcaactcgtcccgtaactccactccgggctcttctcgcggcacgtccccggctcgtatggcaggtaacggtggtgacgctgctctggcgctgctactgctggacaggctgaaccagctggagtcgaagatgagtggtaaaggccaacagcagcagggccagaccgttaccaaaaagagcgcagctgaagcatctaaaaaaccgcgacagaaacgtaccgcgactaaagcgtacaatgtaacacaggccttcggtcgtcgaggtccggagcaaactcaaggaaactttggcgatcaggaattaatccgccaggggaccgactacaaacactggccgcaaattgcccagttcgccccatccgctagtgcattcttcggtatgagccgcatcggcatggaagtaacgccaagtggtacgtggctgacctacaccggtgctatcaagcttgatgacaaggacccgaactttaaagaccaggttattctgcttaacaaacatattgatgcctataaaactttcccgccgaccgaacccaaaaaggacaaaaagaaaaaagctgatgaaacccaggctctaccgcagcgtcagaaaaaacagcaaactgtgactctgctgccagctgcggacctggatgatttttccaagcagctgcaacagtctatgagctctgcggactctacgcaggctggtggttctggtcaccatcatcaccatcattaa

SEQ ID NO: 2830 - DNA, 2421 bp, Artificial Sequence
  Description of Artificial Sequence: Synthetic polynucleotide
atgaaaatcgaagaaggtaaactggtaatctggattaacggcgataaaggctataacggtctcgctgaagtcggtaagaaattcgagaaagataccggaattaaagtcaccgttgagcatccggataaactggaagagaaattcccacaggttgcggcaactggcgatggccctgacattatcttctgggcacacgaccgctttggtggctacgctcaatctggcctgttggctgaaatcaccccggacaaagcgttccaggacaagctgtatccgtttacctgggatgccgtacgttacaacggcaagctgattgcttacccgatcgctgttgaagcgttatcgctgatttataacaaagatctgctgccgaacccgccaaaaacctgggaagagatcccggcgctggataaagaactgaaagcgaaaggtaagagcgcgctgatgttcaacctgcaagaaccgtacttcacctggccgctgattgctgctgacgggggttatgcgttcaagtatgaaaacggcaagtacgacattaaagacgtgggcgtggataacgctggcgcgaaagcgggtctgaccttcctggttgacctgattaaaaacaaacacatgaatgcagacaccgattactccatcgcagaagctgcctttaataaaggcgaaacagcgatgaccatcaacggcccgtgggcatggtccaacatcgacaccagcaaagtgaattatggtgtaacggtactgccgaccttcaagggtcaaccatccaaaccgttcgttggcgtgctgagcgcaggtattaacgccgccagtccgaacaaagagctggcgaaagagttcctcgaaaactatctgctgactgatgaaggtctggaagcggttaataaagacaaaccgctgggtgccgtagcgctgaagtcttacgaggaagagttggcgaaagatccacgtattgccgccaccatggaaaacgcccagaaaggtgaaatcatgccgaacatcccgcagatgtccgctttctggtatgccgtgcgtactgcggtgatcaacgccgccagcggtcgtcagactgtcgatgaagccctgaaagacgcgcagactggtggttctggtgagaacctgtactttcaaagctcagataatgggcctcaaaaccagcgcaacgctccacgtataaccttcggtggcccgtctgactccacaggcagcaaccagaatggtgagcgtagtggagccaggtctaagcagcgccgtccccagggtctgccgaacaacacgctcagctggtttactgcgcttacccaacacggtaaagaagacttaaaattcccgcgtggccagggcgtcccgatcaacactaactcttccccggatgatcagattggttattaccgcagagcaactcgtcggattcgcggcggcgacggtaaaatgaaagatttgtctccgcgttggtacttttactatctcggcaccggtccggaagctggactgccctacggggcaaacaaggacgggatcatttgggtggctaccgaaggtgccctgaatactccaaaagatcatatcggcacccgtaaccctgctaataacgctgcgatcgttctgcaactgcctcagggtacaactctgccaaaaggcttctatgcagaagggtcgcgtggtggcagccaggcgagtagccgtagcagctcccgctctcgcaactcgtcccgtaactccactccgggctcttctcgcggcacgtccccggctcgtatggcaggtaacggtggtgacgctgctctggcgctgctactgctggacaggctgaaccagctggagtcgaagatgagtggtaaaggccaacagcagcagggccagaccgttaccaaaaagagcgcagctgaagcatctaaaaaaccgcgacagaaacgtaccgcgactaaagcgtacaatgtaacacaggccttcggtcgtcgaggtccggagcaaactcaaggaaactttggcgatcaggaattaatccgccaggggaccgactacaaacactggccgcaaattgcccagttcgccccatccgctagtgcattcttcggtatgagccgcatcggcatggaagtaacgccaagtggtacgtggctgacctacaccggtgctatcaagcttgatgacaaggacccgaactttaaagaccaggttattctgcttaacaaacatattgatgcctataaaactttcccgccgaccgaacccaaaaaggacaaaaagaaaaaagctgatgaaacccaggctctaccgcagcgtcagaaaaaacagcaaactgtgactctgctgccagctgcggacctggatgatttttccaagcagctgcaacagtctatgagctctgcggactctacgcaggctggtggttctggtcaccatcatcaccatcattaa

SEQ ID NO: 2831 - DNA, 2421 bp, Artificial Sequence
  Description of Artificial Sequence: Synthetic polynucleotide
atgaaaatcgaagaaggtaaactggtaatctggattaacggcgataaaggctataacggtctcgctgaagtcggtaagaaattcgagaaagataccggaattaaagtcaccgttgagcatccggataaactggaagagaaattcccacaggttgcggcaactggcgatggccctgacattatcttctgggcacacgaccgctttggtggctacgctcaatctggcctgttggctgaaatcaccccggacaaagcgttccaggacaagctgtatccgtttacctgggatgccgtacgttacaacggcaagctgattgcttacccgatcgctgttgaagcgttatcgctgatttataacaaagatctgctgccgaacccgccaaaaacctgggaagagatcccggcgctggataaagaactgaaagcgaaaggtaagagcgcgctgatgttcaacctgcaagaaccgtacttcacctggccgctgattgctgctgacgggggttatgcgttcaagtatgaaaacggcaagtacgacattaaagacgtgggcgtggataacgctggcgcgaaagcgggtctgaccttcctggttgacctgattaaaaacaaacacatgaatgcagacaccgattactccatcgcagaagctgcctttaataaaggcgaaacagcgatgaccatcaacggcccgtgggcatggtccaacatcgacaccagcaaagtgaattatggtgtaacggtactgccgaccttcaagggtcaaccatccaaaccgttcgttggcgtgctgagcgcaggtattaacgccgccagtccgaacaaagagctggcgaaagagttcctcgaaaactatctgctgactgatgaaggtctggaagcggttaataaagacaaaccgctgggtgccgtagcgctgaagtcttacgaggaagagttggcgaaagatccacgtattgccgccaccatggaaaacgcccagaaaggtgaaatcatgccgaacatcccgcagatgtccgctttctggtatgccgtgcgtactgcggtgatcaacgccgccagcggtcgtcagactgtcgatgaagccctgaaagacgcgcagactggtggttctggtgagaacctgtactttcaaagctcagataatgggcctcaaaaccagcgcaacgctccacgtataaccttcggtggcccgtctgactccacaggcagcaaccagaatggtgagcgtagtggagccaggtctaagcagcgccgtccccagggtctgccgaacaacacggcgagctggtttactgcgcttacccaacacggtaaagaagacttaaaattcccgcgtggccagggcgtcccgatcaacactaactcttccccggatgatcagattggttattaccgcagagcaactcgtcggattcgcggcggcgacggtaaaatgaaagatttgtctccgcgttggtacttttactatctcggcaccggtccggaagctggactgccctacggggcaaacaaggacgggatcatttgggtggctaccgaaggtgccctgaatactccaaaagatcatatcggcacccgtaaccctgctaataacgctgcgatcgttctgcaactgcctcagggtacaactctgccaaaaggcttctatgcagaagggtcgcgtggtggcagccaggcgagtagccgtagcagctcccgctctcgcaactcgtcccgtaactccactccgggctcttctcgcggcacgtccccggctcgtatggcaggtaacggtggtgacgctgctctggcgctgctactgctggacaggctgaaccagctggagtcgaagatgagtggtaaaggccaacagcagcagggccagaccgttaccaaaaagagcgcagctgaagcatctaaaaaaccgcgacagaaacgtaccgcgactaaagagtacaatgtaacacaggccttcggtcgtcgaggtccggagcaaactcaaggaaactttggcgatcaggatttaaataaactcgggaccgactacaaacactggccgcaaattgcccagttcgccccatccgctagtgcattcttcggtatgagccgcatcggcacggaagaaacgccaagtggtacgtggctgacctacaccggtgctatcaagcttgataaaaaggacccgaactttaaagaccaggttattctgcttaacaaacatattgatgcctataaaactttcccgccgaccgaacccaaaaaggacaaaaagaaaaaagctgatgaaacccaggctctaccgcagcgtcagaaaaaacagcaaactgtgactctgctgccagctgcggacctggatgatttttccaagcagctgcaacagtctatgagctctgcggactctacgcaggctggtggttctggtcaccatcatcaccatcattaa

SEQ ID NO: 2832 - DNA, 2421 bp, Artificial Sequence
  Description of Artificial Sequence: Synthetic polynucleotide
atgaaaatcgaagaaggtaaactggtaatctggattaacggcgataaaggctataacggtctcgctgaagtcggtaagaaattcgagaaagataccggaattaaagtcaccgttgagcatccggataaactggaagagaaattcccacaggttgcggcaactggcgatggccctgacattatcttctgggcacacgaccgctttggtggctacgctcaatctggcctgttggctgaaatcaccccggacaaagcgttccaggacaagctgtatccgtttacctgggatgccgtacgttacaacggcaagctgattgcttacccgatcgctgttgaagcgttatcgctgatttataacaaagatctgctgccgaacccgccaaaaacctgggaagagatcccggcgctggataaagaactgaaagcgaaaggtaagagcgcgctgatgttcaacctgcaagaaccgtacttcacctggccgctgattgctgctgacgggggttatgcgttcaagtatgaaaacggcaagtacgacattaaagacgtgggcgtggataacgctggcgcgaaagcgggtctgaccttcctggttgacctgattaaaaacaaacacatgaatgcagacaccgattactccatcgcagaagctgcctttaataaaggcgaaacagcgatgaccatcaacggcccgtgggcatggtccaacatcgacaccagcaaagtgaattatggtgtaacggtactgccgaccttcaagggtcaaccatccaaaccgttcgttggcgtgctgagcgcaggtattaacgccgccagtccgaacaaagagctggcgaaagagttcctcgaaaactatctgctgactgatgaaggtctggaagcggttaataaagacaaaccgctgggtgccgtagcgctgaagtcttacgaggaagagttggcgaaagatccacgtattgccgccaccatggaaaacgcccagaaaggtgaaatcatgccgaacatcccgcagatgtccgctttctggtatgccgtgcgtactgcggtgatcaacgccgccagcggtcgtcagactgtcgatgaagccctgaaagacgcgcagactggtggttctggtgagaacctgtactttcaaagctcagataatgggcctcaaaaccagcgcaacgctccacgtataaccttcggtggcccgtctgactccacaggcagcaaccagaatggtgagcgtagtggagccaggtctaagcagcgccgtccccagggtctgccgaacaacacggcgagctggtttactccgcttacccaacacggtaaagaagacttaaaattcccgcccggccagggcgtcccgatcaacactaactcttccccggatgatcagattggttattaccgcagagcaactcgtcggattcgcggcggcgacggtaaaatgaaagatttgccaccgcgttggtacttttactatctcggcaccggtccggaagctgatctgccctacggggcagtaaaggacgggatcgtttgggtggctgcggaaggtgccctgaatactccaaaagatcatatcggcacccgtaaccctgctaataacgctgcgatcccactgcaactgcctcccggtacaactctgccaaaaggcttctatgcagaagggtcgcgtggtggcagccaggcgagtagccgtagcagctcccgctctcgcaactcgtcccgtaactccactccgggctcttctcgcggcacgtccccggctcgtatggcaggtaacggtggtgacgctgctctggcgctgctactgctggacaggctgaaccagctggagtcgaagatgagtggtaaaggccaacagcagcagggccagaccgttaccaaaaagagcgcagctgaagcatctaaaaaaccgcgacagaaacgtaccgcgactaaagcgtacaatgtaacacaggccttcggtcgtcgaggtccggagcaaactcaaggaaactttggcgatcaggaattaatccgccaggggaccgactacaaacactggccgcaaattgcccagttcgccccatccgctagtgcattcttcggtatgagccgcatcggcatggaagtaacgccaagtggtacgtggctgacctacaccggtgctatcaagcttgatgacaaggacccgaactttaaagaccaggttattctgcttaacaaacatattgatgcctataaaactttcccgccgaccgaacccaaaaaggacaaaaagaaaaaagctgatgaaacccaggctctaccgcagcgtcagaaaaaacagcaaactgtgactctgctgccagctgcggacctggatgatttttccaagcagctgcaacagtctatgagctctgcggactctacgcaggctggtggttctggtcaccatcatcaccatcattaa

SEQ ID NO: 2833 - DNA, 2421 bp, Artificial Sequence
  Description of Artificial Sequence: Synthetic polynucleotide
atgaaaatcgaagaaggtaaactggtaatctggattaacggcgataaaggctataacggtctcgctgaagtcggtaagaaattcgagaaagataccggaattaaagtcaccgttgagcatccggataaactggaagagaaattcccacaggttgcggcaactggcgatggccctgacattatcttctgggcacacgaccgctttggtggctacgctcaatctggcctgttggctgaaatcaccccggacaaagcgttccaggacaagctgtatccgtttacctgggatgccgtacgttacaacggcaagctgattgcttacccgatcgctgttgaagcgttatcgctgatttataacaaagatctgctgccgaacccgccaaaaacctgggaagagatcccggcgctggataaagaactgaaagcgaaaggtaagagcgcgctgatgttcaacctgcaagaaccgtacttcacctggccgctgattgctgctgacgggggttatgcgttcaagtatgaaaacggcaagtacgacattaaagacgtgggcgtggataacgctggcgcgaaagcgggtctgaccttcctggttgacctgattaaaaacaaacacatgaatgcagacaccgattactccatcgcagaagctgcctttaataaaggcgaaacagcgatgaccatcaacggcccgtgggcatggtccaacatcgacaccagcaaagtgaattatggtgtaacggtactgccgaccttcaagggtcaaccatccaaaccgttcgttggcgtgctgagcgcaggtattaacgccgccagtccgaacaaagagctggcgaaagagttcctcgaaaactatctgctgactgatgaaggtctggaagcggttaataaagacaaaccgctgggtgccgtagcgctgaagtcttacgaggaagagttggcgaaagatccacgtattgccgccaccatggaaaacgcccagaaaggtgaaatcatgccgaacatcccgcagatgtccgctttctggtatgccgtgcgtactgcggtgatcaacgccgccagcggtcgtcagactgtcgatgaagccctgaaagacgcgcagactggtggttctggtgagaacctgtactttcaaagctcagataatgggcctcaaaaccagcgcaacgctccacgtataaccttcggtggcccgtctgactccacaggcagcaaccagaatggtgagcgtagtggagccaggtctaagcagcgccgtccccagggtctgccgaacaacacggcgagctggtttactgcgcttacccaacacggtaaagaagacttaaaattcccgcgtggccagggcgtcccgatcaacactaactcttccccggatgatcagattggttattaccgcagagcaactcgtcggattcgcggcggcgacggtaaaatgaaagatttgtctccgcgttggtacttttactatctcggcaccggtccggaagctggactgccctacggggcaaacaaggacgggatcatttgggtggctaccgaaggtgccctgaatactccaaaagatcatatcggcacccgtaaccctgctaataacgctgcgatcgttctgcaactgcctaatggtacaactctgccaaaaggcttctatgcagaagggtcgcgtggtggcagccaggcgagtagccgtagcagctcccgctctcgcaactcgtcccgtaactccactccgggctcttctcgcggcacgtccccggctcgtatggcaggtaacggtggtgacgctgctctggcgctgctactgctggacaggctgaaccagctggagtcgaagatgagtggtaaaggccaacagcagcagggccagaccgttaccaaaaagagcgcagctgaagcatctaaaaaaccgcgacagaaacgtaccgcgactaaagcgtacaatgtaacacaggccttcggtcgtcgaggtccggagcaaactcaaggaaactttggcgatcaggaattaatccgccaggggaccgactacaaacactggccgcaaattgcccagttcgccccatccgctagtgcattcttcggtatgagccgcatcggcatggaagtaacgccaagtggtacgtggctgacctacaccggtgctatcaagcttgatgacaaggacccgaactttaaagaccaggttattctgcttaacaaacatattgatgcctataaaactttcccgccgaccgaacccaaaaaggacaaaaagaaaaaagctgatgaaacccaggctctaccgcagcgtcagaaaaaacagcaaactgtgactctgctgccagctgcggacctggatgatttttccaagcagctgcaacagtctatgagctctgcggactctacgcaggctggtggttctggtcaccatcatcaccatcattaa

SEQ ID NO: 2834 - DNA, 2421 bp, Artificial Sequence
  Description of Artificial Sequence: Synthetic polynucleotide
atgaaaatcgaagaaggtaaactggtaatctggattaacggcgataaaggctataacggtctcgctgaagtcggtaagaaattcgagaaagataccggaattaaagtcaccgttgagcatccggataaactggaagagaaattcccacaggttgcggcaactggcgatggccctgacattatcttctgggcacacgaccgctttggtggctacgctcaatctggcctgttggctgaaatcaccccggacaaagcgttccaggacaagctgtatccgtttacctgggatgccgtacgttacaacggcaagctgattgcttacccgatcgctgttgaagcgttatcgctgatttataacaaagatctgctgccgaacccgccaaaaacctgggaagagatcccggcgctggataaagaactgaaagcgaaaggtaagagcgcgctgatgttcaacctgcaagaaccgtacttcacctggccgctgattgctgctgacgggggttatgcgttcaagtatgaaaacggcaagtacgacattaaagacgtgggcgtggataacgctggcgcgaaagcgggtctgaccttcctggttgacctgattaaaaacaaacacatgaatgcagacaccgattactccatcgcagaagctgcctttaataaaggcgaaacagcgatgaccatcaacggcccgtgggcatggtccaacatcgacaccagcaaagtgaattatggtgtaacggtactgccgaccttcaagggtcaaccatccaaaccgttcgttggcgtgctgagcgcaggtattaacgccgccagtccgaacaaagagctggcgaaagagttcctcgaaaactatctgctgactgatgaaggtctggaagcggttaataaagacaaaccgctgggtgccgtagcgctgaagtcttacgaggaagagttggcgaaagatccacgtattgccgccaccatggaaaacgcccagaaaggtgaaatcatgccgaacatcccgcagatgtccgctttctggtatgccgtgcgtactgcggtgatcaacgccgccagcggtcgtcagactgtcgatgaagccctgaaagacgcgcagactggtggttctggtgagaacctgtactttcaaagctcagataatgggcctcaaaaccagcgcaacgctccacgtataaccttcggtggcccgtctgactccacaggcagcaaccagaatggtgagcgtagtggagccaggtctaagcagcgccgtccccagggtctgccgaacaacacggcgagctggtttactccgcttacccaatttggtaaagaagacttaaaattcccgccgggccagggcgtcccgatcaacactaactcttccccggatgatcagattggttattaccgcagagcaactcgtcggattcgcggcggcgacggtaaaatgaaagatttgccaccgaagtggtacttttactatctcggcaccggtccgcatgctgatctgccctacgggcacaaaatggacggggtagtgtgggtggctcggcctggtgccctgaatactccaaaagatcatatcggcacccgtaaccctgctaataacgctgcgatcccactgcaactgcctccgggtacaaaactgccaaaaggcttctatgcagaagggtcgcgtggtggcagccaggcgagtagccgtagcagctcccgctctcgcaactcgtcccgtaactccactccgggctcttctcgcggcacgtccccggctcgtatggcaggtaacggtggtgacgctgctctggcgctgctactgctggacaggctgaaccagctggagtcgaagatgagtggtaaaggccaacagcagcagggccagaccgttaccaaaaagagcgcagctgaagcatctaaaaaaccgcgacagaaacgtaccgcgactaaagcgtacaatgtaacacaggccttcggtcgtcgaggtccggagcaaactcaaggaaactttggcgatcaggaattaatccgccaggggaccgactacaaacactggccgcaaattgcccagttcgccccatccgctagtgcattcttcggtatgagccgcatcggcatggaagtaacgccaagtggtacgtggctgacctacaccggtgctatcaagcttgatgacaaggacccgaactttaaagaccaggttattctgcttaacaaacatattgatgcctataaaactttcccgccgaccgaacccaaaaaggacaaaaagaaaaaagctgatgaaacccaggctctaccgcagcgtcagaaaaaacagcaaactgtgactctgctgccagctgcggacctggatgatttttccaagcagctgcaacagtctatgagctctgcggactctacgcaggctggtggttctggtcaccatcatcaccatcattaa

SEQ ID NO: 2835 - DNA, 2421 bp, Artificial Sequence
  Description of Artificial Sequence: Synthetic polynucleotide
atgaaaatcgaagaaggtaaactggtaatctggattaacggcgataaaggctataacggtctcgctgaagtcggtaagaaattcgagaaagataccggaattaaagtcaccgttgagcatccggataaactggaagagaaattcccacaggttgcggcaactggcgatggccctgacattatcttctgggcacacgaccgctttggtggctacgctcaatctggcctgttggctgaaatcaccccggacaaagcgttccaggacaagctgtatccgtttacctgggatgccgtacgttacaacggcaagctgattgcttacccgatcgctgttgaagcgttatcgctgatttataacaaagatctgctgccgaacccgccaaaaacctgggaagagatcccggcgctggataaagaactgaaagcgaaaggtaagagcgcgctgatgttcaacctgcaagaaccgtacttcacctggccgctgattgctgctgacgggggttatgcgttcaagtatgaaaacggcaagtacgacattaaagacgtgggcgtggataacgctggcgcgaaagcgggtctgaccttcctggttgacctgattaaaaacaaacacatgaatgcagacaccgattactccatcgcagaagctgcctttaataaaggcgaaacagcgatgaccatcaacggcccgtgggcatggtccaacatcgacaccagcaaagtgaattatggtgtaacggtactgccgaccttcaagggtcaaccatccaaaccgttcgttggcgtgctgagcgcaggtattaacgccgccagtccgaacaaagagctggcgaaagagttcctcgaaaactatctgctgactgatgaaggtctggaagcggttaataaagacaaaccgctgggtgccgtagcgctgaagtcttacgaggaagagttggcgaaagatccacgtattgccgccaccatggaaaacgcccagaaaggtgaaatcatgccgaacatcccgcagatgtccgctttctggtatgccgtgcgtactgcggtgatcaacgccgccagcggtcgtcagactgtcgatgaagccctgaaagacgcgcagactggtggttctggtgagaacctgtactttcaaagctcagataatgggcctcaaaaccagcgcaacgctccacgtataaccttcggtggcccgtctgactccacaggcagcaaccagaatggtgagcgtagtggagccaggtctaagcagcgccgtccccagggtctgccgaacaacacggcgagctggtttactgcgcttacccaacacggtaaagaagacttaaaattcccgcgtggccagggcgtcccgatcaacactaactcttccccggatgatcagattggttattaccgcagagcaactcgtcggattcgcggcggcgacggtaaaatgaaagatttgtctccgcgttggtacttttactatctcggcaccggtccggaagctggactgccctacggggcaaacaaggacgggatcatttgggtggctaccgaaggtgccctgaatactccaaaagatcatatcggcacccgtaaccctgctaataacgctgcgatcgttctgcaactgcctcagggtacaactctgccaaaaggcttctatgcagaagggtcgcgtggtggcagccaggcgagtagccgtagcagctcccgctctcgcaactcgtcccgtaactccactccgggctcttctcgcggcacgtccccggctcgtatggcaggtaacggtggtgacgctgctctggcgctgctactgctggacaggctgaaccagctggagtcgaagatgagtggtaaaggccaacagcagcagggccagaccgttaccaaaaagagcgcagctgaagcatctaaaaaaccgcgacagaaacgtaccgcgactaaagcgtacaatgtaacacaggccttcggtcgtcgaggtccggagcaaactcaaggaaactttggcgatcaggaattaatccgccaggggaccgactacaaacactggccgcaaattgcccagttcgccccatccgctagtgcattcttcggtatgagcgagatcggcatggaagtaacgccaagtggtacgtggctgacctacaccggtgctatcaagcttgatgacaaggacccgaactttaaagaccaggttattctgcttaacaaacatattgatgcctataaaactttcccgccgaccgaacccaaaaaggacaaaaagaaaaaagctgatgaaacccaggctctaccgcagcgtcagaaaaaacagcaaactgtgactctgctgccagctgcggacctggatgatttttccaagcagctgcaacagtctatgagctctgcggactctacgcaggctggtggttctggtcaccatcatcaccatcattaa

SEQ ID NO: 2836 - DNA, 2421 bp, Artificial Sequence
  Description of Artificial Sequence: Synthetic polynucleotide
atgaaaatcgaagaaggtaaactggtaatctggattaacggcgataaaggctataacggtctcgctgaagtcggtaagaaattcgagaaagataccggaattaaagtcaccgttgagcatccggataaactggaagagaaattcccacaggttgcggcaactggcgatggccctgacattatcttctgggcacacgaccgctttggtggctacgctcaatctggcctgttggctgaaatcaccccggacaaagcgttccaggacaagctgtatccgtttacctgggatgccgtacgttacaacggcaagctgattgcttacccgatcgctgttgaagcgttatcgctgatttataacaaagatctgctgccgaacccgccaaaaacctgggaagagatcccggcgctggataaagaactgaaagcgaaaggtaagagcgcgctgatgttcaacctgcaagaaccgtacttcacctggccgctgattgctgctgacgggggttatgcgttcaagtatgaaaacggcaagtacgacattaaagacgtgggcgtggataacgctggcgcgaaagcgggtctgaccttcctggttgacctgattaaaaacaaacacatgaatgcagacaccgattactccatcgcagaagctgcctttaataaaggcgaaacagcgatgaccatcaacggcccgtgggcatggtccaacatcgacaccagcaaagtgaattatggtgtaacggtactgccgaccttcaagggtcaaccatccaaaccgttcgttggcgtgctgagcgcaggtattaacgccgccagtccgaacaaagagctggcgaaagagttcctcgaaaactatctgctgactgatgaaggtctggaagcggttaataaagacaaaccgctgggtgccgtagcgctgaagtcttacgaggaagagttggcgaaagatccacgtattgccgccaccatggaaaacgcccagaaaggtgaaatcatgccgaacatcccgcagatgtccgctttctggtatgccgtgcgtactgcggtgatcaacgccgccagcggtcgtcagactgtcgatgaagccctgaaagacgcgcagactggtggttctggtgagaacctgtactttcaaagctcagataatgggcctcaaaaccagcgcaacgctccacgtataaccttcggtggcccgtctgactccacaggcagcaaccagaatggtgagcgtagtggagccaggtctaagcagcgccgtccccagggtctgccgaacaacacggcgagctggtttactgcgcttacccaacacggtaaagaagacttaaaattcccgcgtggccagggcgtcccgatcaacactaactcttccccggatgatcagattggttattaccgcagagcaactcgtcggattcgcggcggcgacggtaaaatgaaagatttgtctccgcgttggtacttttactatctcggcaccggtccggaagctggactgccctacggggcaaacaaggacgggatcatttgggtggctaccgaaggtgccctgaatactccaaaagatcatatcggcacccgtaaccctgctaataacgctgcgatcgttctgcaactgcctcagggtacacaactgccaaaaggcttctatgcagaagggtcgcgtggtggcagccaggcgagtagccgtagcagctcccgctctcgcaactcgtcccgtaactccactccgggctcttctcgcggcacgtccccggctcgtatggcaggtaacggtggtgacgctgctctggcgctgctactgctggacaggctgaaccagctggagtcgaagatgagtggtaaaggccaacagcagcagggccagaccgttaccaaaaagagcgcagctgaagcatctaaaaaaccgcgacagaaacgtaccgcgactaaagcgtacaatgtaacacaggccttcggtcgtcgaggtccggagcaaactcaaggaaactttggcgatcaggaattaatccgccaggggaccgactacaaacactggccgcaaattgcccagttcgccccatccgctagtgcattcttcggtatgagccgcatcggcatggaagtaacgccaagtggtacgtggctgacctacaccggtgctatcaagcttgatgacaaggacccgaactttaaagaccaggttattctgcttaacaaacatattgatgcctataaaactttcccgccgaccgaacccaaaaaggacaaaaagaaaaaagctgatgaaacccaggctctaccgcagcgtcagaaaaaacagcaaactgtgactctgctgccagctgcggacctggatgatttttccaagcagctgcaacagtctatgagctctgcggactctacgcaggctggtggttctggtcaccatcatcaccatcattaa

SEQ ID NO: 2837 - DNA, 2421 bp, Artificial Sequence
  Description of Artificial Sequence: Synthetic polynucleotide
atgaaaatcgaagaaggtaaactggtaatctggattaacggcgataaaggctataacggtctcgctgaagtcggtaagaaattcgagaaagataccggaattaaagtcaccgttgagcatccggataaactggaagagaaattcccacaggttgcggcaactggcgatggccctgacattatcttctgggcacacgaccgctttggtggctacgctcaatctggcctgttggctgaaatcaccccggacaaagcgttccaggacaagctgtatccgtttacctgggatgccgtacgttacaacggcaagctgattgcttacccgatcgctgttgaagcgttatcgctgatttataacaaagatctgctgccgaacccgccaaaaacctgggaagagatcccggcgctggataaagaactgaaagcgaaaggtaagagcgcgctgatgttcaacctgcaagaaccgtacttcacctggccgctgattgctgctgacgggggttatgcgttcaagtatgaaaacggcaagtacgacattaaagacgtgggcgtggataacgctggcgcgaaagcgggtctgaccttcctggttgacctgattaaaaacaaacacatgaatgcagacaccgattactccatcgcagaagctgcctttaataaaggcgaaacagcgatgaccatcaacggcccgtgggcatggtccaacatcgacaccagcaaagtgaattatggtgtaacggtactgccgaccttcaagggtcaaccatccaaaccgttcgttggcgtgctgagcgcaggtattaacgccgccagtccgaacaaagagctggcgaaagagttcctcgaaaactatctgctgactgatgaaggtctggaagcggttaataaagacaaaccgctgggtgccgtagcgctgaagtcttacgaggaagagttggcgaaagatccacgtattgccgccaccatggaaaacgcccagaaaggtgaaatcatgccgaacatcccgcagatgtccgctttctggtatgccgtgcgtactgcggtgatcaacgccgccagcggtcgtcagactgtcgatgaagccctgaaagacgcgcagactggtggttctggtgagaacctgtactttcaaagctcagataatgggcctcaaaaccagcgcaacgctccacgtataaccttcggtggcccgtctgactccacaggcagcaaccagaatggtgagcgtagtggagccaggtctaagcagcgccgtccccagggtctgccgaacaacacggcgagctggtttactgcgcttacccaacacggtaaagaagacttaaaattcccgcgtggccagggcgtcccgatcaacactaactcttccccggatgatcagattggttattaccgcagagcaactcgtcggattcgcggcggcgacggtaaaatgaaagatttgtctccgcgttggtacttttactatctcggcaccggtccggaagctggactgccctacggggcaaacaaggacgggatcatttgggtggctaccgaaggtgccctgaatactccaaaagatcatatcggcacccgtaaccctgctaataacgctgcgatcgttctgcaactgcctcagggtacaactctgccaaaaggcttctatgcagaagggtcgcgtggtggcagccaggcgagtagccgtagcagctcccgctctcgcaactcgtcccgtaactccactccgggctcttctcgcggcacgtccccggctcgtatggcaggtaacggtggtgacgctgctctggcgctgctactgctggacaggctgaaccagctggagtcgaagatgagtggtaaaggccaacagcagcagggccagaccgttaccaaaaagagcgcagctgaaatgtctaaaaaaccgcgacagaaacgtaccgcgactaaagagtgcaatgtaacacagtgtttcggtccgcgaggtccggagcaaactcaaggaaactttggcgatgccgaattaatcaagaaagggaccgactacaaacactggccgcaaattgcccagttcgccccatccgctagtgcattcttcggtatgagccgcatctcgtcaaaggaacaaccaagtggtacgtggctgacctacaccggtgctatcaagcttgataaagatgacccgaactttaaagaccaggttattctgcttaacaaacatattgatgcctataaaactttcccgccgaccgaacccaaaaaggacaaaaagaaaaaagctgatgaaacccaggctctaccgcagcgtcagaaaaaacagcaaactgtgactctgctgccagctgcggacctggatgatttttccaagcagctgcaacagtctatgagctctgcggactctacgcaggctggtggttctggtcaccatcatcaccatcattaa

SEQ ID NO: 2838 - DNA, 2421 bp, Artificial Sequence
  Description of Artificial Sequence: Synthetic polynucleotide
atgaaaatcgaagaaggtaaactggtaatctggattaacggcgataaaggctataacggtctcgctgaagtcggtaagaaattcgagaaagataccggaattaaagtcaccgttgagcatccggataaactggaagagaaattcccacaggttgcggcaactggcgatggccctgacattatcttctgggcacacgaccgctttggtggctacgctcaatctggcctgttggctgaaatcaccccggacaaagcgttccaggacaagctgtatccgtttacctgggatgccgtacgttacaacggcaagctgattgcttacccgatcgctgttgaagcgttatcgctgatttataacaaagatctgctgccgaacccgccaaaaacctgggaagagatcccggcgctggataaagaactgaaagcgaaaggtaagagcgcgctgatgttcaacctgcaagaaccgtacttcacctggccgctgattgctgctgacgggggttatgcgttcaagtatgaaaacggcaagtacgacattaaagacgtgggcgtggataacgctggcgcgaaagcgggtctgaccttcctggttgacctgattaaaaacaaacacatgaatgcagacaccgattactccatcgcagaagctgcctttaataaaggcgaaacagcgatgaccatcaacggcccgtgggcatggtccaacatcgacaccagcaaagtgaattatggtgtaacggtactgccgaccttcaagggtcaaccatccaaaccgttcgttggcgtgctgagcgcaggtattaacgccgccagtccgaacaaagagctggcgaaagagttcctcgaaaactatctgctgactgatgaaggtctggaagcggttaataaagacaaaccgctgggtgccgtagcgctgaagtcttacgaggaagagttggcgaaagatccacgtattgccgccaccatggaaaacgcccagaaaggtgaaatcatgccgaacatcccgcagatgtccgctttctggtatgccgtgcgtactgcggtgatcaacgccgccagcggtcgtcagactgtcgatgaagccctgaaagacgcgcagactggtggttctggtgagaacctgtactttcaaagctcagataatgggcctcaaaaccagcgcaacgctccacgtataaccttcggtggcccgtctgactccacaggcagcaaccagaatggtgagcgtagtggagccaggtctaagcagcgccgtccccagggtctgccgaacaacacggcgagctggtttactgcgcttacccaacacggtaaagaagacttaaaattcccgcgtggccagggcgtcccgatcaacactaactcttccccggatgatcagattggttattaccgcagaatgactcgtcggattcgcggcggcgacggtaaaatgaaagatttgtctccgcgttggtacttttactatctcggcaccggtccggaagctggactgccctacggggcaaacaaggacgggatcatttgggtggctaccgaaggtgccctgaatactccaaaagatcatatcggcacccgtaaccctgctaataacgctgcgatcgttctgcaactgcctcagggtacaactctgccaaaaggcttctatgcagaagggtcgcgtggtggcagccaggcgagtagccgtagcagctcccgctctcgcaactcgtcccgtaactccactccgggctcttctcgcggcacgtccccggctcgtatggcaggtaacggtggtgacgctgctctggcgctgctactgctggacaggctgaaccagctggagtcgaagatgagtggtaaaggccaacagcagcagggccagaccgttaccaaaaagagcgcagctgaagcatctaaaaaaccgcgacagaaacgtaccgcgactaaagcgtacaatgtaacacaggccttcggtcgtcgaggtccggagcaaactcaaggaaactttggcgatcaggaattaatccgccaggggaccgactacaaacactggccgcaaattgcccagttcgccccatccgctagtgcattcttcggtatgagccgcatcggcatggaagtaacgccaagtggtacgtggctgacctacaccggtgctatcaagcttgatgacaaggacccgaactttaaagaccaggttattctgcttaacaaacatattgatgcctataaaactttcccgccgaccgaacccaaaaaggacaaaaagaaaaaagctgatgaaacccaggctctaccgcagcgtcagaaaaaacagcaaactgtgactctgctgccagctgcggacctggatgatttttccaagcagctgcaacagtctatgagctctgcggactctacgcaggctggtggttctggtcaccatcatcaccatcattaa

SEQ ID NO: 2839 - DNA, 2421 bp, Artificial Sequence
  Description of Artificial Sequence: Synthetic polynucleotide
atgaaaatcgaagaaggtaaactggtaatctggattaacggcgataaaggctataacggtctcgctgaagtcggtaagaaattcgagaaagataccggaattaaagtcaccgttgagcatccggataaactggaagagaaattcccacaggttgcggcaactggcgatggccctgacattatcttctgggcacacgaccgctttggtggctacgctcaatctggcctgttggctgaaatcaccccggacaaagcgttccaggacaagctgtatccgtttacctgggatgccgtacgttacaacggcaagctgattgcttacccgatcgctgttgaagcgttatcgctgatttataacaaagatctgctgccgaacccgccaaaaacctgggaagagatcccggcgctggataaagaactgaaagcgaaaggtaagagcgcgctgatgttcaacctgcaagaaccgtacttcacctggccgctgattgctgctgacgggggttatgcgttcaagtatgaaaacggcaagtacgacattaaagacgtgggcgtggataacgctggcgcgaaagcgggtctgaccttcctggttgacctgattaaaaacaaacacatgaatgcagacaccgattactccatcgcagaagctgcctttaataaaggcgaaacagcgatgaccatcaacggcccgtgggcatggtccaacatcgacaccagcaaagtgaattatggtgtaacggtactgccgaccttcaagggtcaaccatccaaaccgttcgttggcgtgctgagcgcaggtattaacgccgccagtccgaacaaagagctggcgaaagagttcctcgaaaactatctgctgactgatgaaggtctggaagcggttaataaagacaaaccgctgggtgccgtagcgctgaagtcttacgaggaagagttggcgaaagatccacgtattgccgccaccatggaaaacgcccagaaaggtgaaatcatgccgaacatcccgcagatgtccgctttctggtatgccgtgcgtactgcggtgatcaacgccgccagcggtcgtcagactgtcgatgaagccctgaaagacgcgcagactggtggttctggtgagaacctgtactttcaaagctcagataatgggcctcaaaaccagcgcaacgctccacgtataaccttcggtggcccgtctgactccacaggcagcaaccagaatggtgagcgtagtggagccaggtctaagcagcgccgtccccagggtctgccgaacaacacggcgagctggtttactgcgcttacccaacacggtaaagaagacttaaaattcccgcgtggccagggcgtcccgatcaacactaactcttccccggatgatcagattggttattaccgcagagcaactcgtcggattcgcggcggcgacggtaaaatgaaagatttgtctccgcgttggtacttttactatctcggcaccggtccggaagctggactgccctacggggcaaacaaggacgggatcatttgggtggctaccgaaggtgccctgaatactccaaaagatcatatcggcacccgtaaccctgctaataacgctgcgatcgttctgcaactgcctcagggtacaactctgccaaaaggcttctatgcagaagggtcgcgtggtggcagccaggcgagtagccgtagcagctcccgctctcgcaactcgtcccgtaactccactccgggctcttctcgcggcacgtccccggctcgtatggcaggtaacggtggtgacgctgctctggcgctgctactgctggacaggctgaaccagctggagtcgaagatgagtggtaaaggccaacagcagcagggccagaccgttaccaaaaagagcgcagctgaagcatctaaaaaaccgcgacagaaacgtaccgcgactaaagcgtacaatgtaacacaggccttcggttcacgaggtccggagcaaactcaaggaaactttggcgatcaggaattaatccgccaggggaccgactacaaacactggccgcaaattgcccagttcgccccatccgctagtgcattcttcggtatgagccgcatcggcatggaagtaacgccaagtggtacgtggctgacctacaccggtgctatcaagcttgatgacaaggacccgaactttaaagaccaggttattctgcttaacaaacatattgatgcctataaaactttcccgccgaccgaacccaaaaaggacaaaaagaaaaaagctgatgaaacccaggctctaccgcagcgtcagaaaaaacagcaaactgtgactctgctgccagctgcggacctggatgatttttccaagcagctgcaacagtctatgagctctgcggactctacgcaggctggtggttctggtcaccatcatcaccatcattaa

SEQ ID NO: 2840 - DNA, 2421 bp, Artificial Sequence
  Description of Artificial Sequence: Synthetic polynucleotide
atgaaaatcgaagaaggtaaactggtaatctggattaacggcgataaaggctataacggtctcgctgaagtcggtaagaaattcgagaaagataccggaattaaagtcaccgttgagcatccggataaactggaagagaaattcccacaggttgcggcaactggcgatggccctgacattatcttctgggcacacgaccgctttggtggctacgctcaatctggcctgttggctgaaatcaccccggacaaagcgttccaggacaagctgtatccgtttacctgggatgccgtacgttacaacggcaagctgattgcttacccgatcgctgttgaagcgttatcgctgatttataacaaagatctgctgccgaacccgccaaaaacctgggaagagatcccggcgctggataaagaactgaaagcgaaaggtaagagcgcgctgatgttcaacctgcaagaaccgtacttcacctggccgctgattgctgctgacgggggttatgcgttcaagtatgaaaacggcaagtacgacattaaagacgtgggcgtggataacgctggcgcgaaagcgggtctgaccttcctggttgacctgattaaaaacaaacacatgaatgcagacaccgattactccatcgcagaagctgcctttaataaaggcgaaacagcgatgaccatcaacggcccgtgggcatggtccaacatcgacaccagcaaagtgaattatggtgtaacggtactgccgaccttcaagggtcaaccatccaaaccgttcgttggcgtgctgagcgcaggtattaacgccgccagtccgaacaaagagctggcgaaagagttcctcgaaaactatctgctgactgatgaaggtctggaagcggttaataaagacaaaccgctgggtgccgtagcgctgaagtcttacgaggaagagttggcgaaagatccacgtattgccgccaccatggaaaacgcccagaaaggtgaaatcatgccgaacatcccgcagatgtccgctttctggtatgccgtgcgtactgcggtgatcaacgccgccagcggtcgtcagactgtcgatgaagccctgaaagacgcgcagactggtggttctggtgagaacctgtactttcaaagctcagataatgggcctcaaaaccagcgcaacgctccacgtataaccttcggtggcccgtctgactccacaggcagcaaccagaatggtgagcgtagtggagccaggtctaagcagcgccgtccccagggtctgccgaacaacacggcgagctggtttactgcgcttacccaacacggtaaagaagacttaaaattcccgcgtggccagggcgtcccgatcaacactaactcttccccggatgatcagattggttattaccgcagagcaactcgtcggattcgcggcggcgacggtaaaatgaaagatttgtctccgcgttggtacttttactatctcggcaccggtccggaagctggactgccctacgggaccaacaaggacgggatcatttgggtggctaccgaaggtgccctgaatactccaaaagatcatatcggcacccgtaaccctgctaataacgctgcgatcgttctgcaactgcctcagggtacaactctgccaaaaggcttctatgcagaagggtcgcgtggtggcagccaggcgagtagccgtagcagctcccgctctcgcaactcgtcccgtaactccactccgggctcttctcgcggcacgtccccggctcgtatggcaggtaacggtggtgacgctgctctggcgctgctactgctggacaggctgaaccagctggagtcgaagatgagtggtaaaggccaacagcagcagggccagaccgttaccaaaaagagcgcagctgaagcatctaaaaaaccgcgacagaaacgtaccgcgactaaagcgtacaatgtaacacaggccttcggtcgtcgaggtccggagcaaactcaaggaaactttggcgatcaggaattaatccgccaggggaccgactacaaacactggccgcaaattgcccagttcgccccatccgctagtgcattcttcggtatgagccgcatcggcatggaagtaacgccaagtggtacgtggctgacctacaccggtgctatcaagcttgatgacaaggacccgaactttaaagaccaggttattctgcttaacaaacatattgatgcctataaaactttcccgccgaccgaacccaaaaaggacaaaaagaaaaaagctgatgaaacccaggctctaccgcagcgtcagaaaaaacagcaaactgtgactctgctgccagctgcggacctggatgatttttccaagcagctgcaacagtctatgagctctgcggactctacgcaggctggtggttctggtcaccatcatcaccatcattaa

SEQ ID NO: 2841 - DNA, 2421 bp, Artificial Sequence
  Description of Artificial Sequence: Synthetic polynucleotide
atgaaaatcgaagaaggtaaactggtaatctggattaacggcgataaaggctataacggtctcgctgaagtcggtaagaaattcgagaaagataccggaattaaagtcaccgttgagcatccggataaactggaagagaaattcccacaggttgcggcaactggcgatggccctgacattatcttctgggcacacgaccgctttggtggctacgctcaatctggcctgttggctgaaatcaccccggacaaagcgttccaggacaagctgtatccgtttacctgggatgccgtacgttacaacggcaagctgattgcttacccgatcgctgttgaagcgttatcgctgatttataacaaagatctgctgccgaacccgccaaaaacctgggaagagatcccggcgctggataaagaactgaaagcgaaaggtaagagcgcgctgatgttcaacctgcaagaaccgtacttcacctggccgctgattgctgctgacgggggttatgcgttcaagtatgaaaacggcaagtacgacattaaagacgtgggcgtggataacgctggcgcgaaagcgggtctgaccttcctggttgacctgattaaaaacaaacacatgaatgcagacaccgattactccatcgcagaagctgcctttaataaaggcgaaacagcgatgaccatcaacggcccgtgggcatggtccaacatcgacaccagcaaagtgaattatggtgtaacggtactgccgaccttcaagggtcaaccatccaaaccgttcgttggcgtgctgagcgcaggtattaacgccgccagtccgaacaaagagctggcgaaagagttcctcgaaaactatctgctgactgatgaaggtctggaagcggttaataaagacaaaccgctgggtgccgtagcgctgaagtcttacgaggaagagttggcgaaagatccacgtattgccgccaccatggaaaacgcccagaaaggtgaaatcatgccgaacatcccgcagatgtccgctttctggtatgccgtgcgtactgcggtgatcaacgccgccagcggtcgtcagactgtcgatgaagccctgaaagacgcgcagactggtggttctggtgagaacctgtactttcaaagctcagataatgggcctcaaaaccagcgcaacgctccacgtataaccttcggtggcccgtctgactccacaggcagcaaccagaatggtgagcgtagtggagccaggtctaagcagcgccgtccccagggtctgccgaacaacacggcgagctggtttactgcgcttacccaacacggtaaagaagacttaaaattcccgcgtggccagggcgtcccgatcaacactaactcttccccggatgatcagattggttattaccgcagagcaactcgtcggattcgcggcggcgacggtaaaatgaaagatttgtctccgcgttggtacttttactatctcggcaccggtccggaagctggactgccctacggggcaaacaaggacgggatcatttgggtggctaccgaaggtgccctgaatactccaaaagatcatatcggcacccgtaaccctgctaataacgctgcgatcgttctgcaactgcctcagggtacaactctgccaaaaggcttctatgcagaagggtcgcgtggtggcagccaggcgagtagccgtagcagctcccgctctcgcaactcgtcccgtaactccactccgggctcttctcgcggcacgtccccggctcgtatggcaggtaacggtggtgacgctgctctggcgctgctactgctggacaggctgaaccagctggagtcgaagatgagtggtaaaggccaacagcagcagggccagaccgttaccaaaaagagcgcagctgaagcatctaaaaaaccgcgacagaaacgtaccgcgactaaagcgtacaatgtaacacaggccttcggtcgtcgaggtccggagcaaactcaaggaaactttggcgatcaggaattaatccgccaggggaccgactacaaacactggccgcaaattgcccagttcgccccatccgctcaagcattcttcggtatgagccgcatcggcatggaagtaacgccaagtggtacgtggctgacctacaccggtgctatcaagcttgatgacaaggacccgaactttaaagaccaggttattctgcttaacaaacatattgatgcctataaaactttcccgccgaccgaacccaaaaaggacaaaaagaaaaaagctgatgaaacccaggctctaccgcagcgtcagaaaaaacagcaaactgtgactctgctgccagctgcggacctggatgatttttccaagcagctgcaacagtctatgagctctgcggactctacgcaggctggtggttctggtcaccatcatcaccatcattaa

SEQ ID NO: 2842 - DNA, 2421 bp, Artificial Sequence
  Description of Artificial Sequence: Synthetic polynucleotide
atgaaaatcgaagaaggtaaactggtaatctggattaacggcgataaaggctataacggtctcgctgaagtcggtaagaaattcgagaaagataccggaattaaagtcaccgttgagcatccggataaactggaagagaaattcccacaggttgcggcaactggcgatggccctgacattatcttctgggcacacgaccgctttggtggctacgctcaatctggcctgttggctgaaatcaccccggacaaagcgttccaggacaagctgtatccgtttacctgggatgccgtacgttacaacggcaagctgattgcttacccgatcgctgttgaagcgttatcgctgatttataacaaagatctgctgccgaacccgccaaaaacctgggaagagatcccggcgctggataaagaactgaaagcgaaaggtaagagcgcgctgatgttcaacctgcaagaaccgtacttcacctggccgctgattgctgctgacgggggttatgcgttcaagtatgaaaacggcaagtacgacattaaagacgtgggcgtggataacgctggcgcgaaagcgggtctgaccttcctggttgacctgattaaaaacaaacacatgaatgcagacaccgattactccatcgcagaagctgcctttaataaaggcgaaacagcgatgaccatcaacggcccgtgggcatggtccaacatcgacaccagcaaagtgaattatggtgtaacggtactgccgaccttcaagggtcaaccatccaaaccgttcgttggcgtgctgagcgcaggtattaacgccgccagtccgaacaaagagctggcgaaagagttcctcgaaaactatctgctgactgatgaaggtctggaagcggttaataaagacaaaccgctgggtgccgtagcgctgaagtcttacgaggaagagttggcgaaagatccacgtattgccgccaccatggaaaacgcccagaaaggtgaaatcatgccgaacatcccgcagatgtccgctttctggtatgccgtgcgtactgcggtgatcaacgccgccagcggtcgtcagactgtcgatgaagccctgaaagacgcgcagactggtggttctggtgagaacctgtactttcaaagctcagataatgggcctcaaaaccagcgcaacgctccacgtataaccttcggtggcccgtctgactccacaggcagcaaccagaatggtgagcgtagtggagccaggtctaagcagcgccgtccccagggtctgccgaacaacacggcgagctggtttactgcgcttacccaacacggtaaagaagacttaaaattcccgcgtggccagggcgtcccgatcaacactaactcttccccggatgatcagattggtacgtaccgcagagcaactcgtcggattcgcggcggcgacggtaaaatgaaagatttgtctccgcgttggtacttttactatctcggcaccggtccggaagctggactgccctacggggcaaacaaggacgggatcatttgggtggctaccgaaggtgccctgaatactccaaaagatcatatcggcacccgtaaccctgctaataacgctgcgatcgttctgcaactgcctcagggtacaactctgccaaaaggcttctatgcagaagggtcgcgtggtggcagccaggcgagtagccgtagcagctcccgctctcgcaactcgtcccgtaactccactccgggctcttctcgcggcacgtccccggctcgtatggcaggtaacggtggtgacgctgctctggcgctgctactgctggacaggctgaaccagctggagtcgaagatgagtggtaaaggccaacagcagcagggccagaccgttaccaaaaagagcgcagctgaagcatctaaaaaaccgcgacagaaacgtaccgcgactaaagcgtacaatgtaacacaggccttcggtcgtcgaggtccggagcaaactcaaggaaactttggcgatcaggaattaatccgccaggggaccgactacaaacactggccgcaaattgcccagttcgccccatccgctagtgcattcttcggtatgagccgcatcggcatggaagtaacgccaagtggtacgtggctgacctacaccggtgctatcaagcttgatgacaaggacccgaactttaaagaccaggttattctgcttaacaaacatattgatgcctataaaactttcccgccgaccgaacccaaaaaggacaaaaagaaaaaagctgatgaaacccaggctctaccgcagcgtcagaaaaaacagcaaactgtgactctgctgccagctgcggacctggatgatttttccaagcagctgcaacagtctatgagctctgcggactctacgcaggctggtggttctggtcaccatcatcaccatcattaa

SEQ ID NO: 2843 - DNA, 2421 bp, Artificial Sequence
  Description of Artificial Sequence: Synthetic polynucleotide
atgaaaatcgaagaaggtaaactggtaatctggattaacggcgataaaggctataacggtctcgctgaagtcggtaagaaattcgagaaagataccggaattaaagtcaccgttgagcatccggataaactggaagagaaattcccacaggttgcggcaactggcgatggccctgacattatcttctgggcacacgaccgctttggtggctacgctcaatctggcctgttggctgaaatcaccccggacaaagcgttccaggacaagctgtatccgtttacctgggatgccgtacgttacaacggcaagctgattgcttacccgatcgctgttgaagcgttatcgctgatttataacaaagatctgctgccgaacccgccaaaaacctgggaagagatcccggcgctggataaagaactgaaagcgaaaggtaagagcgcgctgatgttcaacctgcaagaaccgtacttcacctggccgctgattgctgctgacgggggttatgcgttcaagtatgaaaacggcaagtacgacattaaagacgtgggcgtggataacgctggcgcgaaagcgggtctgaccttcctggttgacctgattaaaaacaaacacatgaatgcagacaccgattactccatcgcagaagctgcctttaataaaggcgaaacagcgatgaccatcaacggcccgtgggcatggtccaacatcgacaccagcaaagtgaattatggtgtaacggtactgccgaccttcaagggtcaaccatccaaaccgttcgttggcgtgctgagcgcaggtattaacgccgccagtccgaacaaagagctggcgaaagagttcctcgaaaactatctgctgactgatgaaggtctggaagcggttaataaagacaaaccgctgggtgccgtagcgctgaagtcttacgaggaagagttggcgaaagatccacgtattgccgccaccatggaaaacgcccagaaaggtgaaatcatgccgaacatcccgcagatgtccgctttctggtatgccgtgcgtactgcggtgatcaacgccgccagcggtcgtcagactgtcgatgaagccctgaaagacgcgcagactggtggttctggtgagaacctgtactttcaaagctcagataatgggcctcaaaaccagcgcaacgctccacgtataaccttcggtggcccgtctgactccacaggcagcaaccagaatggtgagcgtagtggagccaggtctaagcagcgccgtccccagggtctgccgaacaacacggcgagctggtttactgcgcttacccaacacggtaaagaagacttaaaattcccgcgtggccagggcgtcccgatcaacactaactcttccccggatgatcagattggttattaccgcagagcaactcgtcggattcgcggcggcgacggtaaaatgaaagatttgtctccgcgttggtacttttactatctcggcaccggtccggaagctggactgccctacggggcaaacaaggacgggatcatttgggtggctaccgaaggtgccctgaatactccaaaagatcatatcggcacccgtaaccctgctaataacgctgcgatcgttctgcaactgcctcagggtacaactctgccaaaaggcttctatgcagaagggtcgcgtggtggcagccaggcgagtagccgtagcagctcccgctctcgcaactcgtcccgtaactccactccgggctcttctcgcggcacgtccccggctcgtatggcaggtaacggtggtgacgctgctctggcgctgctactgctggacaggctgaaccagctggagtcgaagatgagtggtaaaggccaacagcagcagggccagaccgttaccaaaaagagcgcagctgaagcatctaaaaaaccgcgacagaaacgtaccgcgactaaaggatacaatgtaacacaggccttcggtcgtcgaggtccggagcaaactcaaggaaactttggcgatcaggatttaatcaagttggggaccgactacaaacactggccgcaaattgcccagttcgccccatccgctagtgcattcttcggtatgagccgcatcggcacgcgggaaacgccaagtggtacgtggctgacctacaccggtgctatcaagcttgataaaaaggacccgaactttaaagaccaggttattctgcttaacaaacatattgatgcctataaaactttcccgccgaccgaacccaaaaaggacaaaaagaaaaaagctgatgaaacccaggctctaccgcagcgtcagaaaaaacagcaaactgtgactctgctgccagctgcggacctggatgatttttccaagcagctgcaacagtctatgagctctgcggactctacgcaggctggtggttctggtcaccatcatcaccatcattaa

SEQ ID NO: 2844 - DNA, 2421 bp, Artificial Sequence
  Description of Artificial Sequence: Synthetic polynucleotide
atgaaaatcgaagaaggtaaactggtaatctggattaacggcgataaaggctataacggtctcgctgaagtcggtaagaaattcgagaaagataccggaattaaagtcaccgttgagcatccggataaactggaagagaaattcccacaggttgcggcaactggcgatggccctgacattatcttctgggcacacgaccgctttggtggctacgctcaatctggcctgttggctgaaatcaccccggacaaagcgttccaggacaagctgtatccgtttacctgggatgccgtacgttacaacggcaagctgattgcttacccgatcgctgttgaagcgttatcgctgatttataacaaagatctgctgccgaacccgccaaaaacctgggaagagatcccggcgctggataaagaactgaaagcgaaaggtaagagcgcgctgatgttcaacctgcaagaaccgtacttcacctggccgctgattgctgctgacgggggttatgcgttcaagtatgaaaacggcaagtacgacattaaagacgtgggcgtggataacgctggcgcgaaagcgggtctgaccttcctggttgacctgattaaaaacaaacacatgaatgcagacaccgattactccatcgcagaagctgcctttaataaaggcgaaacagcgatgaccatcaacggcccgtgggcatggtccaacatcgacaccagcaaagtgaattatggtgtaacggtactgccgaccttcaagggtcaaccatccaaaccgttcgttggcgtgctgagcgcaggtattaacgccgccagtccgaacaaagagctggcgaaagagttcctcgaaaactatctgctgactgatgaaggtctggaagcggttaataaagacaaaccgctgggtgccgtagcgctgaagtcttacgaggaagagttggcgaaagatccacgtattgccgccaccatggaaaacgcccagaaaggtgaaatcatgccgaacatcccgcagatgtccgctttctggtatgccgtgcgtactgcggtgatcaacgccgccagcggtcgtcagactgtcgatgaagccctgaaagacgcgcagactggtggttctggtgagaacctgtactttcaaagctcagataatgggcctcaaaaccagcgcaacgctccacgtataaccttcggtggcccgtctgactccacaggcagcaaccagaatggtgagcgtagtggagccaggtctaagcagcgccgtccccagggtctgccgaacaacacggcgagctggtttactgcgcttacccaacacggtaaagaagacttaaaattcccgcgtggccagggcgtcccgatcaacactaactcttccccggatgatcagattggttattaccgcagagcaactcgtcggattcgcggcggcgacggtaaaatgaaagatttgtctccgcgttggtacttttactatctcggcaccggtccggaagctggactgccctacggggcaaacaaggacgggatcatttgggtggctaccgaaggtgccctgaatactccaaaagatcatatcggcacccgtaaccctgctaataacgctgcgatcgttctgcaactgcctagtggtacaactctgccaaaaggcttctatgcagaagggtcgcgtggtggcagccaggcgagtagccgtagcagctcccgctctcgcaactcgtcccgtaactccactccgggctcttctcgcggcacgtccccggctcgtatggcaggtaacggtggtgacgctgctctggcgctgctactgctggacaggctgaaccagctggagtcgaagatgagtggtaaaggccaacagcagcagggccagaccgttaccaaaaagagcgcagctgaagcatctaaaaaaccgcgacagaaacgtaccgcgactaaagcgtacaatgtaacacaggccttcggtcgtcgaggtccggagcaaactcaaggaaactttggcgatcaggaattaatccgccaggggaccgactacaaacactggccgcaaattgcccagttcgccccatccgctagtgcattcttcggtatgagccgcatcggcatggaagtaacgccaagtggtacgtggctgacctacaccggtgctatcaagcttgatgacaaggacccgaactttaaagaccaggttattctgcttaacaaacatattgatgcctataaaactttcccgccgaccgaacccaaaaaggacaaaaagaaaaaagctgatgaaacccaggctctaccgcagcgtcagaaaaaacagcaaactgtgactctgctgccagctgcggacctggatgatttttccaagcagctgcaacagtctatgagctctgcggactctacgcaggctggtggttctggtcaccatcatcaccatcattaa

SEQ ID NO: 2845 - DNA, 2421 bp, Artificial Sequence
  Description of Artificial Sequence: Synthetic polynucleotide
atgaaaatcgaagaaggtaaactggtaatctggattaacggcgataaaggctataacggtctcgctgaagtcggtaagaaattcgagaaagataccggaattaaagtcaccgttgagcatccggataaactggaagagaaattcccacaggttgcggcaactggcgatggccctgacattatcttctgggcacacgaccgctttggtggctacgctcaatctggcctgttggctgaaatcaccccggacaaagcgttccaggacaagctgtatccgtttacctgggatgccgtacgttacaacggcaagctgattgcttacccgatcgctgttgaagcgttatcgctgatttataacaaagatctgctgccgaacccgccaaaaacctgggaagagatcccggcgctggataaagaactgaaagcgaaaggtaagagcgcgctgatgttcaacctgcaagaaccgtacttcacctggccgctgattgctgctgacgggggttatgcgttcaagtatgaaaacggcaagtacgacattaaagacgtgggcgtggataacgctggcgcgaaagcgggtctgaccttcctggttgacctgattaaaaacaaacacatgaatgcagacaccgattactccatcgcagaagctgcctttaataaaggcgaaacagcgatgaccatcaacggcccgtgggcatggtccaacatcgacaccagcaaagtgaattatggtgtaacggtactgccgaccttcaagggtcaaccatccaaaccgttcgttggcgtgctgagcgcaggtattaacgccgccagtccgaacaaagagctggcgaaagagttcctcgaaaactatctgctgactgatgaaggtctggaagcggttaataaagacaaaccgctgggtgccgtagcgctgaagtcttacgaggaagagttggcgaaagatccacgtattgccgccaccatggaaaacgcccagaaaggtgaaatcatgccgaacatcccgcagatgtccgctttctggtatgccgtgcgtactgcggtgatcaacgccgccagcggtcgtcagactgtcgatgaagccctgaaagacgcgcagactggtggttctggtgagaacctgtactttcaaagctcagataatgggcctcaaaaccagcgcaacgctccacgtataaccttcggtggcccgtctgactccacaggcagcaaccagaatggtgagcgtagtggagccaggtctaagcagcgccgtccccagggtctgccgaacaacacggcgagctggtttactgcgcttacccaacacggtaaagaagacttaaaattcccgcgtggccagggcgtcccgatcaacactaactcttccccggatgatcagattggttattaccgcagagcaactcgtcggattcgcggcggcgacggtaaaatgaaagatttgtctccgcgttggtacttttactatctcggcaccggtccggaagctcatctgccctacggggcaaacaaggacgggatcatttgggtggctaccgaaggtgccctgaatactccaaaagatcatatcggcacccgtaaccctgctaataacgctgcgatcgttctgcaactgcctcagggtacaactctgccaaaaggcttctatgcagaagggtcgcgtggtggcagccaggcgagtagccgtagcagctcccgctctcgcaactcgtcccgtaactccactccgggctcttctcgcggcacgtccccggctcgtatggcaggtaacggtggtgacgctgctctggcgctgctactgctggacaggctgaaccagctggagtcgaagatgagtggtaaaggccaacagcagcagggccagaccgttaccaaaaagagcgcagctgaagcatctaaaaaaccgcgacagaaacgtaccgcgactaaagcgtacaatgtaacacaggccttcggtcgtcgaggtccggagcaaactcaaggaaactttggcgatcaggaattaatccgccaggggaccgactacaaacactggccgcaaattgcccagttcgccccatccgctagtgcattcttcggtatgagccgcatcggcatggaagtaacgccaagtggtacgtggctgacctacaccggtgctatcaagcttgatgacaaggacccgaactttaaagaccaggttattctgcttaacaaacatattgatgcctataaaactttcccgccgaccgaacccaaaaaggacaaaaagaaaaaagctgatgaaacccaggctctaccgcagcgtcagaaaaaacagcaaactgtgactctgctgccagctgcggacctggatgatttttccaagcagctgcaacagtctatgagctctgcggactctacgcaggctggtggttctggtcaccatcatcaccatcattaa

SEQ ID NO: 2846 - DNA, 2421 bp, Artificial Sequence
  Description of Artificial Sequence: Synthetic polynucleotide
atgaaaatcgaagaaggtaaactggtaatctggattaacggcgataaaggctataacggtctcgctgaagtcggtaagaaattcgagaaagataccggaattaaagtcaccgttgagcatccggataaactggaagagaaattcccacaggttgcggcaactggcgatggccctgacattatcttctgggcacacgaccgctttggtggctacgctcaatctggcctgttggctgaaatcaccccggacaaagcgttccaggacaagctgtatccgtttacctgggatgccgtacgttacaacggcaagctgattgcttacccgatcgctgttgaagcgttatcgctgatttataacaaagatctgctgccgaacccgccaaaaacctgggaagagatcccggcgctggataaagaactgaaagcgaaaggtaagagcgcgctgatgttcaacctgcaagaaccgtacttcacctggccgctgattgctgctgacgggggttatgcgttcaagtatgaaaacggcaagtacgacattaaagacgtgggcgtggataacgctggcgcgaaagcgggtctgaccttcctggttgacctgattaaaaacaaacacatgaatgcagacaccgattactccatcgcagaagctgcctttaataaaggcgaaacagcgatgaccatcaacggcccgtgggcatggtccaacatcgacaccagcaaagtgaattatggtgtaacggtactgccgaccttcaagggtcaaccatccaaaccgttcgttggcgtgctgagcgcaggtattaacgccgccagtccgaacaaagagctggcgaaagagttcctcgaaaactatctgctgactgatgaaggtctggaagcggttaataaagacaaaccgctgggtgccgtagcgctgaagtcttacgaggaagagttggcgaaagatccacgtattgccgccaccatggaaaacgcccagaaaggtgaaatcatgccgaacatcccgcagatgtccgctttctggtatgccgtgcgtactgcggtgatcaacgccgccagcggtcgtcagactgtcgatgaagccctgaaagacgcgcagactggtggttctggtgagaacctgtactttcaaagctcagataatgggcctcaaaaccagcgcaacgctccacgtataaccttcggtggcccgtctgactccacaggcagcaaccagaatggtgagcgtagtggagccaggtctaagcagcgccgtccccagggtctgccgaacaacacggcgagctggtttactgcgcttacccaacacggtaaagaagacttaaaattcccgcgtggccagggcgtcccgatcaacactaactcttccccggatgatcagattggttattaccgcagagcaactcgtcggattcgcggcggcgacggtaaaatgaaagatttgtctccgcgttggtacttttactatctcggcaccggtccggaagctggactgccctacggggcaaacaaggacgggatcatttgggtggctaccgaaggtgccctgaatactccaaaagatcatatcggcacccgtaaccctgctaataacgctgcgatcgttctgcaactgcctcagggtacaactctgccaaaaggcttctatgcagaagggtcgcgtggtggcagccaggcgagtagccgtagcagctcccgctctcgcaactcgtcccgtaactccactccgggctcttctcgcggcacgtccccggctcgtatggcaggtaacggtggtgacgctgctctggcgctgctactgctggacaggctgaaccagctggagtcgaagatgagtggtaaaggccaacagcagcagggccagaccgttaccaaaaagacggcagctgaagcatctaaaaaaccgcgacagaaacgtaccgcgactaaagcgtacaatgtaacacaggccttcggtcgtcgaggtccggagcaaactcaaggaaactttggcgatcaggaattaatccgccaggggaccgactacaaacactggccgcaaattgcccagttcgccccatccgctagtgcattcttcggtatgagccgcatcggcatggaagtaacgccaagtggtacgtggctgacctacaccggtgctatcaagcttgatgacaaggacccgaactttaaagaccaggttattctgcttaacaaacatattgatgcctataaaactttcccgccgaccgaacccaaaaaggacaaaaagaaaaaagctgatgaaacccaggctctaccgcagcgtcagaaaaaacagcaaactgtgactctgctgccagctgcggacctggatgatttttccaagcagctgcaacagtctatgagctctgcggactctacgcaggctggtggttctggtcaccatcatcaccatcattaa

SEQ ID NO: 2847 - DNA, 2421 bp, Artificial Sequence
  Description of Artificial Sequence: Synthetic polynucleotide
atgaaaatcgaagaaggtaaactggtaatctggattaacggcgataaaggctataacggtctcgctgaagtcggtaagaaattcgagaaagataccggaattaaagtcaccgttgagcatccggataaactggaagagaaattcccacaggttgcggcaactggcgatggccctgacattatcttctgggcacacgaccgctttggtggctacgctcaatctggcctgttggctgaaatcaccccggacaaagcgttccaggacaagctgtatccgtttacctgggatgccgtacgttacaacggcaagctgattgcttacccgatcgctgttgaagcgttatcgctgatttataacaaagatctgctgccgaacccgccaaaaacctgggaagagatcccggcgctggataaagaactgaaagcgaaaggtaagagcgcgctgatgttcaacctgcaagaaccgtacttcacctggccgctgattgctgctgacgggggttatgcgttcaagtatgaaaacggcaagtacgacattaaagacgtgggcgtggataacgctggcgcgaaagcgggtctgaccttcctggttgacctgattaaaaacaaacacatgaatgcagacaccgattactccatcgcagaagctgcctttaataaaggcgaaacagcgatgaccatcaacggcccgtgggcatggtccaacatcgacaccagcaaagtgaattatggtgtaacggtactgccgaccttcaagggtcaaccatccaaaccgttcgttggcgtgctgagcgcaggtattaacgccgccagtccgaacaaagagctggcgaaagagttcctcgaaaactatctgctgactgatgaaggtctggaagcggttaataaagacaaaccgctgggtgccgtagcgctgaagtcttacgaggaagagttggcgaaagatccacgtattgccgccaccatggaaaacgcccagaaaggtgaaatcatgccgaacatcccgcagatgtccgctttctggtatgccgtgcgtactgcggtgatcaacgccgccagcggtcgtcagactgtcgatgaagccctgaaagacgcgcagactggtggttctggtgagaacctgtactttcaaagctcagataatgggcctcaaaaccagcgcaacgctccacgtataaccttcggtggcccgtctgactccacaggcagcaaccagaatggtgagcgtagtggagccaggtctaagcagcgccgtccccagggtctgccgaacaacacggcgagctggtttactccgcttacccaacacggtaaagaagacttaaaattcccgccaggccagggcgtcccgatcaacactaactcttccccggatgatcagattggttattaccgcagagcaactcgtcggattcgcggcggcgacggtaaaatgaaagatttgcccccgcgttggtacttttactatctcggcaccggtccggaagctgatctgccctacggggcagtaaagcctgggatcgtgtgggtggctgaggaaggtgccctgaatactccaaaagatcatatcggcacccgtaaccctgctaataacgctgcgatcccactgcaactgcctccgggtacaactctgccaaaaggcttctatgcagaagggtcgcgtggtggcagccaggcgagtagccgtagcagctcccgctctcgcaactcgtcccgtaactccactccgggctcttctcgcggcacgtccccggctcgtatggcaggtaacggtggtgacgctgctctggcgctgctactgctggacaggctgaaccagctggagtcgaagatgagtggtaaaggccaacagcagcagggccagaccgttaccaaaaagagcgcagctgaagcatctaaaaaaccgcgacagaaacgtaccgcgactaaagcgtacaatgtaacacaggccttcggtcgtcgaggtccggagcaaactcaaggaaactttggcgatcaggaattaatccgccaggggaccgactacaaacactggccgcaaattgcccagttcgccccatccgctagtgcattcttcggtatgagccgcatcggcatggaagtaacgccaagtggtacgtggctgacctacaccggtgctatcaagcttgatgacaaggacccgaactttaaagaccaggttattctgcttaacaaacatattgatgcctataaaactttcccgccgaccgaacccaaaaaggacaaaaagaaaaaagctgatgaaacccaggctctaccgcagcgtcagaaaaaacagcaaactgtgactctgctgccagctgcggacctggatgatttttccaagcagctgcaacagtctatgagctctgcggactctacgcaggctggtggttctggtcaccatcatcaccatcattaa

SEQ ID NO: 2848 - DNA, 2421 bp, Artificial Sequence
  Description of Artificial Sequence: Synthetic polynucleotide
atgaaaatcgaagaaggtaaactggtaatctggattaacggcgataaaggctataacggtctcgctgaagtcggtaagaaattcgagaaagataccggaattaaagtcaccgttgagcatccggataaactggaagagaaattcccacaggttgcggcaactggcgatggccctgacattatcttctgggcacacgaccgctttggtggctacgctcaatctggcctgttggctgaaatcaccccggacaaagcgttccaggacaagctgtatccgtttacctgggatgccgtacgttacaacggcaagctgattgcttacccgatcgctgttgaagcgttatcgctgatttataacaaagatctgctgccgaacccgccaaaaacctgggaagagatcccggcgctggataaagaactgaaagcgaaaggtaagagcgcgctgatgttcaacctgcaagaaccgtacttcacctggccgctgattgctgctgacgggggttatgcgttcaagtatgaaaacggcaagtacgacattaaagacgtgggcgtggataacgctggcgcgaaagcgggtctgaccttcctggttgacctgattaaaaacaaacacatgaatgcagacaccgattactccatcgcagaagctgcctttaataaaggcgaaacagcgatgaccatcaacggcccgtgggcatggtccaacatcgacaccagcaaagtgaattatggtgtaacggtactgccgaccttcaagggtcaaccatccaaaccgttcgttggcgtgctgagcgcaggtattaacgccgccagtccgaacaaagagctggcgaaagagttcctcgaaaactatctgctgactgatgaaggtctggaagcggttaataaagacaaaccgctgggtgccgtagcgctgaagtcttacgaggaagagttggcgaaagatccacgtattgccgccaccatggaaaacgcccagaaaggtgaaatcatgccgaacatcccgcagatgtccgctttctggtatgccgtgcgtactgcggtgatcaacgccgccagcggtcgtcagactgtcgatgaagccctgaaagacgcgcagactggtggttctggtgagaacctgtactttcaaagctcagataatgggcctcaaaaccagcgcaacgctccacgtataaccttcggtggcccgtctgactccacaggcagcaaccagaatggtgagcgtagtggagccaggtctaagcagcgccgtccccagggtctgccgaacaacacggcgagctggtttactgcgcttacccaacacggtaaagaagacttaaaattcccgcgtggccagggcgtcccgatcaacactaactcttccccggatgatcagattggttattaccgcagagcaactcgtcggattcgcggcggcgacggtaaaatgaaagatttgtctccgcgttggtacttttactatctcggcaccggtccggaagctggactgccctacggggcaaacaaggacgggatcatttgggtggctaccgaaggtgccctgaatactccaaaagatcatatcggcacccgtaaccctgctaataacgctgcgatcgttctgcaactgcctcagggtacaactctgccaaaaggcttctatgcagaagggtcgcgtggtggcagccaggcgagtagccgtagcagctcccgctctcgcaactcgtcccgtaactccactccgggctcttctcgcggcacgtccccggctcgtatggcaggtaacggtggtgacgctgctctggcgctgctactgctggacaggctgaaccagctggagtcgaagatgagtggtaaaggccaacagcagcagggccagaccgttaccaaaaagagcgcagctgaagcatctaaaaaaccgcgacagaaacgtaccgcgactaaagcgtacaatgtaacacaggccttcggtcgtcgaggtccggagcaaactcaaggaaactttggcgatcaggaatttatccgccaggggaccgactacaaacactggccgcaaattgcccagttcgccccatccgctagtgcattcttcggtatgagccgcatcggcatggaagtaacgccaagtggtacgtggctgacctacaccggtgctatcaagcttgatgacaaggacccgaactttaaagaccaggttattctgcttaacaaacatattgatgcctataaaactttcccgccgaccgaacccaaaaaggacaaaaagaaaaaagctgatgaaacccaggctctaccgcagcgtcagaaaaaacagcaaactgtgactctgctgccagctgcggacctggatgatttttccaagcagctgcaacagtctatgagctctgcggactctacgcaggctggtggttctggtcaccatcatcaccatcattaa

SEQ ID NO: 2849 - DNA, 2421 bp, Artificial Sequence
  Description of Artificial Sequence: Synthetic polynucleotide
atgaaaatcgaagaaggtaaactggtaatctggattaacggcgataaaggctataacggtctcgctgaagtcggtaagaaattcgagaaagataccggaattaaagtcaccgttgagcatccggataaactggaagagaaattcccacaggttgcggcaactggcgatggccctgacattatcttctgggcacacgaccgctttggtggctacgctcaatctggcctgttggctgaaatcaccccggacaaagcgttccaggacaagctgtatccgtttacctgggatgccgtacgttacaacggcaagctgattgcttacccgatcgctgttgaagcgttatcgctgatttataacaaagatctgctgccgaacccgccaaaaacctgggaagagatcccggcgctggataaagaactgaaagcgaaaggtaagagcgcgctgatgttcaacctgcaagaaccgtacttcacctggccgctgattgctgctgacgggggttatgcgttcaagtatgaaaacggcaagtacgacattaaagacgtgggcgtggataacgctggcgcgaaagcgggtctgaccttcctggttgacctgattaaaaacaaacacatgaatgcagacaccgattactccatcgcagaagctgcctttaataaaggcgaaacagcgatgaccatcaacggcccgtgggcatggtccaacatcgacaccagcaaagtgaattatggtgtaacggtactgccgaccttcaagggtcaaccatccaaaccgttcgttggcgtgctgagcgcaggtattaacgccgccagtccgaacaaagagctggcgaaagagttcctcgaaaactatctgctgactgatgaaggtctggaagcggttaataaagacaaaccgctgggtgccgtagcgctgaagtcttacgaggaagagttggcgaaagatccacgtattgccgccaccatggaaaacgcccagaaaggtgaaatcatgccgaacatcccgcagatgtccgctttctggtatgccgtgcgtactgcggtgatcaacgccgccagcggtcgtcagactgtcgatgaagccctgaaagacgcgcagactggtggttctggtgagaacctgtactttcaaagctcagataatgggcctcaaaaccagcgcaacgctccacgtataaccttcggtggcccgtctgactccacaggcagcaaccagaatggtgagcgtagtggagccaggtctaagcagcgccgtccccagggtctgccgaacaacacggcgagctggtttactgcgcttacccaacacggtaaagaagacttaaaattcccgcgtggccagggcgtcccgatcaacactaactcttccccggatgatcagattggttattaccgcagagcaactcgtcggattcgcggcggcgacggtaaaatgaaagatttgtctccgcgttggtacttttactatctcggcaccggtccggaagctggactgccctacggggcaaacaaggacgggatcatttgggtggctaccgaaggtgccctgaatactccaaaagatcatatcggcacccgtaaccctgctaataacgctgcgatcgttctgcaactgcctcagggtacaactctgccaaaaggcttctatgcagaagggtcgcgtggtggcagccaggcgagtagccgtagcagctcccgctctcgcaactcgtcccgtaactccactccgggctcttctcgcggcacgtccccggctcgtatggcaggtaacggtggtgacgctgctctggcgctgctactgctggacaggctgaaccagctggagtcgaagatgagtggtaaaggccaacagcagcagggccagaccgttaccaaaaagagcgcagctgaagcatctaaaaaaccgcgacagaaacgtaccgcgactaaagcgtacaatgtaacacaggccttcggtcgtcgaggtccggagcaaactcaaggaaactttggcgatcaggaattaatccgccaggggaccgactacaaacactggccgcaaattgcccagttcattccatccgctagtgcattcttcggtatgagccgcatcggcatggaagtaacgccaagtggtacgtggctgacctacaccggtgctatcaagcttgatgacaaggacccgaactttaaagaccaggttattctgcttaacaaacatattgatgcctataaaactttcccgccgaccgaacccaaaaaggacaaaaagaaaaaagctgatgaaacccaggctctaccgcagcgtcagaaaaaacagcaaactgtgactctgctgccagctgcggacctggatgatttttccaagcagctgcaacagtctatgagctctgcggactctacgcaggctggtggttctggtcaccatcatcaccatcattaa

SEQ ID NO: 2850 - DNA, 2421 bp, Artificial Sequence
  Description of Artificial Sequence: Synthetic polynucleotide
atgaaaatcgaagaaggtaaactggtaatctggattaacggcgataaaggctataacggtctcgctgaagtcggtaagaaattcgagaaagataccggaattaaagtcaccgttgagcatccggataaactggaagagaaattcccacaggttgcggcaactggcgatggccctgacattatcttctgggcacacgaccgctttggtggctacgctcaatctggcctgttggctgaaatcaccccggacaaagcgttccaggacaagctgtatccgtttacctgggatgccgtacgttacaacggcaagctgattgcttacccgatcgctgttgaagcgttatcgctgatttataacaaagatctgctgccgaacccgccaaaaacctgggaagagatcccggcgctggataaagaactgaaagcgaaaggtaagagcgcgctgatgttcaacctgcaagaaccgtacttcacctggccgctgattgctgctgacgggggttatgcgttcaagtatgaaaacggcaagtacgacattaaagacgtgggcgtggataacgctggcgcgaaagcgggtctgaccttcctggttgacctgattaaaaacaaacacatgaatgcagacaccgattactccatcgcagaagctgcctttaataaaggcgaaacagcgatgaccatcaacggcccgtgggcatggtccaacatcgacaccagcaaagtgaattatggtgtaacggtactgccgaccttcaagggtcaaccatccaaaccgttcgttggcgtgctgagcgcaggtattaacgccgccagtccgaacaaagagctggcgaaagagttcctcgaaaactatctgctgactgatgaaggtctggaagcggttaataaagacaaaccgctgggtgccgtagcgctgaagtcttacgaggaagagttggcgaaagatccacgtattgccgccaccatggaaaacgcccagaaaggtgaaatcatgccgaacatcccgcagatgtccgctttctggtatgccgtgcgtactgcggtgatcaacgccgccagcggtcgtcagactgtcgatgaagccctgaaagacgcgcagactggtggttctggtgagaacctgtactttcaaagctcagataatgggcctcaaaaccagcgcaacgctccacgtataaccttcggtggcccgtctgactccacaggcagcaaccagaatggtgagcgtagtggagccaggtctaagcagcgccgtccccagggtctgccgaacaacacggcgagctggtttactgcgcttacccaacacggtaaagaagacttaaaattcccgcgtggccagggcgtcccgatcaacactaactctcaaccggatgatcagattggttattaccgcagagcaactcgtcggattcgcggcggcgacggtaaaatgaaagatttgtctccgcgttggtacttttactatctcggcaccggtccggaagctggactgccctacggggcaaacaaggacgggatcatttgggtggctaccgaaggtgccctgaatactccaaaagatcatatcggcacccgtaaccctgctaataacgctgcgatcgttctgcaactgcctcagggtacaactctgccaaaaggcttctatgcagaagggtcgcgtggtggcagccaggcgagtagccgtagcagctcccgctctcgcaactcgtcccgtaactccactccgggctcttctcgcggcacgtccccggctcgtatggcaggtaacggtggtgacgctgctctggcgctgctactgctggacaggctgaaccagctggagtcgaagatgagtggtaaaggccaacagcagcagggccagaccgttaccaaaaagagcgcagctgaagcatctaaaaaaccgcgacagaaacgtaccgcgactaaagcgtacaatgtaacacaggccttcggtcgtcgaggtccggagcaaactcaaggaaactttggcgatcaggaattaatccgccaggggaccgactacaaacactggccgcaaattgcccagttcgccccatccgctagtgcattcttcggtatgagccgcatcggcatggaagtaacgccaagtggtacgtggctgacctacaccggtgctatcaagcttgatgacaaggacccgaactttaaagaccaggttattctgcttaacaaacatattgatgcctataaaactttcccgccgaccgaacccaaaaaggacaaaaagaaaaaagctgatgaaacccaggctctaccgcagcgtcagaaaaaacagcaaactgtgactctgctgccagctgcggacctggatgatttttccaagcagctgcaacagtctatgagctctgcggactctacgcaggctggtggttctggtcaccatcatcaccatcattaa

SEQ ID NO: 2851 - DNA, 2421 bp, Artificial Sequence
  Description of Artificial Sequence: Synthetic polynucleotide
atgaaaatcgaagaaggtaaactggtaatctggattaacggcgataaaggctataacggtctcgctgaagtcggtaagaaattcgagaaagataccggaattaaagtcaccgttgagcatccggataaactggaagagaaattcccacaggttgcggcaactggcgatggccctgacattatcttctgggcacacgaccgctttggtggctacgctcaatctggcctgttggctgaaatcaccccggacaaagcgttccaggacaagctgtatccgtttacctgggatgccgtacgttacaacggcaagctgattgcttacccgatcgctgttgaagcgttatcgctgatttataacaaagatctgctgccgaacccgccaaaaacctgggaagagatcccggcgctggataaagaactgaaagcgaaaggtaagagcgcgctgatgttcaacctgcaagaaccgtacttcacctggccgctgattgctgctgacgggggttatgcgttcaagtatgaaaacggcaagtacgacattaaagacgtgggcgtggataacgctggcgcgaaagcgggtctgaccttcctggttgacctgattaaaaacaaacacatgaatgcagacaccgattactccatcgcagaagctgcctttaataaaggcgaaacagcgatgaccatcaacggcccgtgggcatggtccaacatcgacaccagcaaagtgaattatggtgtaacggtactgccgaccttcaagggtcaaccatccaaaccgttcgttggcgtgctgagcgcaggtattaacgccgccagtccgaacaaagagctggcgaaagagttcctcgaaaactatctgctgactgatgaaggtctggaagcggttaataaagacaaaccgctgggtgccgtagcgctgaagtcttacgaggaagagttggcgaaagatccacgtattgccgccaccatggaaaacgcccagaaaggtgaaatcatgccgaacatcccgcagatgtccgctttctggtatgccgtgcgtactgcggtgatcaacgccgccagcggtcgtcagactgtcgatgaagccctgaaagacgcgcagactggtggttctggtgagaacctgtactttcaaagctcagataatgggcctcaaaaccagcgcaacgctccacgtataaccttcggtggcccgtctgactccacaggcagcaaccagaatggtgagcgtagtggagccaggtctaagcagcgccgtccccagggtctgccgaacaacacggcgagctggtttactgcgcttacccaacacggtaaagaagacttaaaattcccgcgtggccagggcgtcccgatcaacactaactcttccccggatgatcagattggttattaccgcagagcaactcgtcggattcgcggcggcgacggtaaaatgaaagatttgtctccgcgttggtacttttactatctcggcaccggtccggaagctggactgccctacggggcaaacaaggacgggatcatttgggtggctaccgaaggtgccctgaatactccaaaagatcatatcggcacccgtaaccctgctaataacgctgcgatcgttctgcaactgcctcagggtacaactctgccaaaaggcttctatgcagaagggtcgcgtggtggcagccaggcgagtagccgtagcagctcccgctctcgcaactcgtcccgtaactccactccgggctcttctcgcggcacgtccccggctcgtatggcaggtaacggtggtgacgctgctctggcgctgctactgctggacaggctgaaccagctggagtcgaagatgagtggtaaaggccaacagcagcagggccagaccgttaccaaaaagagcgcagctgaagcatctaaaaaaccgcgacagaaacgtaccgcgactaaagcgtacaatgtaacacaggccttcggtcgtcgaggtccggagcaaactcaaggaaactttggcgatcaggaattaatccgccaggggaccgactacaaacactggccgcaaattgcccagttcgccccatccgctagtgcattcttcggtatgagccgcatctcaatggaagtaacgccaagtggtacgtggctgacctacaccggtgctatcaagcttgatgacaaggacccgaactttaaagaccaggttattctgcttaacaaacatattgatgcctataaaactttcccgccgaccgaacccaaaaaggacaaaaagaaaaaagctgatgaaacccaggctctaccgcagcgtcagaaaaaacagcaaactgtgactctgctgccagctgcggacctggatgatttttccaagcagctgcaacagtctatgagctctgcggactctacgcaggctggtggttctggtcaccatcatcaccatcattaa

SEQ ID NO: 2852 - DNA, 2421 bp, Artificial Sequence
  Description of Artificial Sequence: Synthetic polynucleotide
atgaaaatcgaagaaggtaaactggtaatctggattaacggcgataaaggctataacggtctcgctgaagtcggtaagaaattcgagaaagataccggaattaaagtcaccgttgagcatccggataaactggaagagaaattcccacaggttgcggcaactggcgatggccctgacattatcttctgggcacacgaccgctttggtggctacgctcaatctggcctgttggctgaaatcaccccggacaaagcgttccaggacaagctgtatccgtttacctgggatgccgtacgttacaacggcaagctgattgcttacccgatcgctgttgaagcgttatcgctgatttataacaaagatctgctgccgaacccgccaaaaacctgggaagagatcccggcgctggataaagaactgaaagcgaaaggtaagagcgcgctgatgttcaacctgcaagaaccgtacttcacctggccgctgattgctgctgacgggggttatgcgttcaagtatgaaaacggcaagtacgacattaaagacgtgggcgtggataacgctggcgcgaaagcgggtctgaccttcctggttgacctgattaaaaacaaacacatgaatgcagacaccgattactccatcgcagaagctgcctttaataaaggcgaaacagcgatgaccatcaacggcccgtgggcatggtccaacatcgacaccagcaaagtgaattatggtgtaacggtactgccgaccttcaagggtcaaccatccaaaccgttcgttggcgtgctgagcgcaggtattaacgccgccagtccgaacaaagagctggcgaaagagttcctcgaaaactatctgctgactgatgaaggtctggaagcggttaataaagacaaaccgctgggtgccgtagcgctgaagtcttacgaggaagagttggcgaaagatccacgtattgccgccaccatggaaaacgcccagaaaggtgaaatcatgccgaacatcccgcagatgtccgctttctggtatgccgtgcgtactgcggtgatcaacgccgccagcggtcgtcagactgtcgatgaagccctgaaagacgcgcagactggtggttctggtgagaacctgtactttcaaagctcagataatgggcctcaaaaccagcgcaacgctccacgtataaccttcggtggcccgtctgactccacaggcagcaaccagaatggtgagcgtagtggagccaggtctaagcagcgccgtccccagggtctgccgaacaacacggcgagctggtttactgcgcttacccaacacggtaaagaagacttaaaattcccgcgtggccagggcgtcccgatcaacactaactcttccccggatgatcagattggttattaccgcagagcaactcgtcggattcgcggcggcgacggtaaaatgaaagatttgtctccgcgttggtacttttactatctcggcaccggtccggaagctggactgccctacggggcaaacaaggacgggatcatttgggtggctaccgaaggtgccctgaatactccaaaaacgcatatcggcacccgtaaccctgctaataacgctgcgatcgttctgcaactgcctcagggtacaactctgccaaaaggcttctatgcagaagggtcgcgtggtggcagccaggcgagtagccgtagcagctcccgctctcgcaactcgtcccgtaactccactccgggctcttctcgcggcacgtccccggctcgtatggcaggtaacggtggtgacgctgctctggcgctgctactgctggacaggctgaaccagctggagtcgaagatgagtggtaaaggccaacagcagcagggccagaccgttaccaaaaagagcgcagctgaagcatctaaaaaaccgcgacagaaacgtaccgcgactaaagcgtacaatgtaacacaggccttcggtcgtcgaggtccggagcaaactcaaggaaactttggcgatcaggaattaatccgccaggggaccgactacaaacactggccgcaaattgcccagttcgccccatccgctagtgcattcttcggtatgagccgcatcggcatggaagtaacgccaagtggtacgtggctgacctacaccggtgctatcaagcttgatgacaaggacccgaactttaaagaccaggttattctgcttaacaaacatattgatgcctataaaactttcccgccgaccgaacccaaaaaggacaaaaagaaaaaagctgatgaaacccaggctctaccgcagcgtcagaaaaaacagcaaactgtgactctgctgccagctgcggacctggatgatttttccaagcagctgcaacagtctatgagctctgcggactctacgcaggctggtggttctggtcaccatcatcaccatcattaa

SEQ ID NO: 2853 - DNA, 2421 bp, Artificial Sequence
  Description of Artificial Sequence: Synthetic polynucleotide
atgaaaatcgaagaaggtaaactggtaatctggattaacggcgataaaggctataacggtctcgctgaagtcggtaagaaattcgagaaagataccggaattaaagtcaccgttgagcatccggataaactggaagagaaattcccacaggttgcggcaactggcgatggccctgacattatcttctgggcacacgaccgctttggtggctacgctcaatctggcctgttggctgaaatcaccccggacaaagcgttccaggacaagctgtatccgtttacctgggatgccgtacgttacaacggcaagctgattgcttacccgatcgctgttgaagcgttatcgctgatttataacaaagatctgctgccgaacccgccaaaaacctgggaagagatcccggcgctggataaagaactgaaagcgaaaggtaagagcgcgctgatgttcaacctgcaagaaccgtacttcacctggccgctgattgctgctgacgggggttatgcgttcaagtatgaaaacggcaagtacgacattaaagacgtgggcgtggataacgctggcgcgaaagcgggtctgaccttcctggttgacctgattaaaaacaaacacatgaatgcagacaccgattactccatcgcagaagctgcctttaataaaggcgaaacagcgatgaccatcaacggcccgtgggcatggtccaacatcgacaccagcaaagtgaattatggtgtaacggtactgccgaccttcaagggtcaaccatccaaaccgttcgttggcgtgctgagcgcaggtattaacgccgccagtccgaacaaagagctggcgaaagagttcctcgaaaactatctgctgactgatgaaggtctggaagcggttaataaagacaaaccgctgggtgccgtagcgctgaagtcttacgaggaagagttggcgaaagatccacgtattgccgccaccatggaaaacgcccagaaaggtgaaatcatgccgaacatcccgcagatgtccgctttctggtatgccgtgcgtactgcggtgatcaacgccgccagcggtcgtcagactgtcgatgaagccctgaaagacgcgcagactggtggttctggtgagaacctgtactttcaaagctcagataatgggcctcaaaaccagcgcaacgctccacgtataaccttcggtggcccgtctgactccacaggcagcaaccagaatggtgagcgtagtggagccaggtctaagcagcgccgtccccagggtctgccgaacaacacggcgagctggtttactgcgcttacccaacacggtaaagaagacttaaaattcccgcgtggccagggcgtcccgatcaacactaactcttccccggatgatcagattggttattaccgcagagcaactcgtcggattcgcggcggcgacggtaaaatgaaagatttgtctccgcgttggtacttttactatctcggcaccggtccggaagctggactgccctacggggcaaacaaggacgggatcatttgggtggctaccgaaggtgccctgaatactccaaaagatcatatcggcacccgtaaccctgctaataacgctgcgatcgttctgcaactgcctcagggtacaactctgccaaaaggcttctatgcagaagggtcgcgtggtggcagccaggcgagtagccgtagcagctcccgctctcgcaactcgtcccgtaactccactccgggctcttctcgcggcacgtccccggctcgtatggcaggtaacggtggtgacgctgctctggcgctgctactgctggacaggctgaaccagctggagtcgaagatgagtggtaaaggccaacagcagcagggccagaccgttaccaaaaagagcgcagctgaagcatctaaaaaaccgcgacagaaacgtaccgcgactaaagcgtacaatgtaacacaggccttcggtcgtcgaggtccggagcaaactcaaggaaactttggcgatcaggaattaatccgccaggggaccgactacaaacactggccgcaaattgcccagttcgccccatccgctagtgcattcttcggtatgagccgcatcggcgcggaagtaacgccaagtggtacgtggctgacctacaccggtgctatcaagcttgatgacaaggacccgaactttaaagaccaggttattctgcttaacaaacatattgatgcctataaaactttcccgccgaccgaacccaaaaaggacaaaaagaaaaaagctgatgaaacccaggctctaccgcagcgtcagaaaaaacagcaaactgtgactctgctgccagctgcggacctggatgatttttccaagcagctgcaacagtctatgagctctgcggactctacgcaggctggtggttctggtcaccatcatcaccatcattaa

SEQ ID NO: 2854 - DNA, 2421 bp, Artificial Sequence
  Description of Artificial Sequence: Synthetic polynucleotide
atgaaaatcgaagaaggtaaactggtaatctggattaacggcgataaaggctataacggtctcgctgaagtcggtaagaaattcgagaaagataccggaattaaagtcaccgttgagcatccggataaactggaagagaaattcccacaggttgcggcaactggcgatggccctgacattatcttctgggcacacgaccgctttggtggctacgctcaatctggcctgttggctgaaatcaccccggacaaagcgttccaggacaagctgtatccgtttacctgggatgccgtacgttacaacggcaagctgattgcttacccgatcgctgttgaagcgttatcgctgatttataacaaagatctgctgccgaacccgccaaaaacctgggaagagatcccggcgctggataaagaactgaaagcgaaaggtaagagcgcgctgatgttcaacctgcaagaaccgtacttcacctggccgctgattgctgctgacgggggttatgcgttcaagtatgaaaacggcaagtacgacattaaagacgtgggcgtggataacgctggcgcgaaagcgggtctgaccttcctggttgacctgattaaaaacaaacacatgaatgcagacaccgattactccatcgcagaagctgcctttaataaaggcgaaacagcgatgaccatcaacggcccgtgggcatggtccaacatcgacaccagcaaagtgaattatggtgtaacggtactgccgaccttcaagggtcaaccatccaaaccgttcgttggcgtgctgagcgcaggtattaacgccgccagtccgaacaaagagctggcgaaagagttcctcgaaaactatctgctgactgatgaaggtctggaagcggttaataaagacaaaccgctgggtgccgtagcgctgaagtcttacgaggaagagttggcgaaagatccacgtattgccgccaccatggaaaacgcccagaaaggtgaaatcatgccgaacatcccgcagatgtccgctttctggtatgccgtgcgtactgcggtgatcaacgccgccagcggtcgtcagactgtcgatgaagccctgaaagacgcgcagactggtggttctggtgagaacctgtactttcaaagctcagataatgggcctcaaaaccagcgcaacgctccacgtataaccttcggtggcccgtctgactccacaggcagcaaccagaatggtgagcgtagtggagccaggtctaagcagcgccgtccccagggtctgccgaacaacacggcgagctggtttactgcgcttacccaacacggtaaagaagacttaaaattcccgcgtggccagggcgtcccgatcaacactaactcttccccggatgatcagattggttattaccgcagagcaactcgtcggattcgcggcggcgacggtaaaatgaaagatttgtctccgcgttggtacttttactatctcggcaccggtccggaagctggactgccctacggggcaaacatggacgggatcatttgggtggctaccgaaggtgccctgaatactccaaaagatcatatcggcacccgtaaccctgctaataacgctgcgatcgttctgcaactgcctcagggtacaactctgccaaaaggcttctatgcagaagggtcgcgtggtggcagccaggcgagtagccgtagcagctcccgctctcgcaactcgtcccgtaactccactccgggctcttctcgcggcacgtccccggctcgtatggcaggtaacggtggtgacgctgctctggcgctgctactgctggacaggctgaaccagctggagtcgaagatgagtggtaaaggccaacagcagcagggccagaccgttaccaaaaagagcgcagctgaagcatctaaaaaaccgcgacagaaacgtaccgcgactaaagcgtacaatgtaacacaggccttcggtcgtcgaggtccggagcaaactcaaggaaactttggcgatcaggaattaatccgccaggggaccgactacaaacactggccgcaaattgcccagttcgccccatccgctagtgcattcttcggtatgagccgcatcggcatggaagtaacgccaagtggtacgtggctgacctacaccggtgctatcaagcttgatgacaaggacccgaactttaaagaccaggttattctgcttaacaaacatattgatgcctataaaactttcccgccgaccgaacccaaaaaggacaaaaagaaaaaagctgatgaaacccaggctctaccgcagcgtcagaaaaaacagcaaactgtgactctgctgccagctgcggacctggatgatttttccaagcagctgcaacagtctatgagctctgcggactctacgcaggctggtggttctggtcaccatcatcaccatcattaa

SEQ ID NO: 2855 - DNA, 2421 bp, Artificial Sequence
  Description of Artificial Sequence: Synthetic polynucleotide
atgaaaatcgaagaaggtaaactggtaatctggattaacggcgataaaggctataacggtctcgctgaagtcggtaagaaattcgagaaagataccggaattaaagtcaccgttgagcatccggataaactggaagagaaattcccacaggttgcggcaactggcgatggccctgacattatcttctgggcacacgaccgctttggtggctacgctcaatctggcctgttggctgaaatcaccccggacaaagcgttccaggacaagctgtatccgtttacctgggatgccgtacgttacaacggcaagctgattgcttacccgatcgctgttgaagcgttatcgctgatttataacaaagatctgctgccgaacccgccaaaaacctgggaagagatcccggcgctggataaagaactgaaagcgaaaggtaagagcgcgctgatgttcaacctgcaagaaccgtacttcacctggccgctgattgctgctgacgggggttatgcgttcaagtatgaaaacggcaagtacgacattaaagacgtgggcgtggataacgctggcgcgaaagcgggtctgaccttcctggttgacctgattaaaaacaaacacatgaatgcagacaccgattactccatcgcagaagctgcctttaataaaggcgaaacagcgatgaccatcaacggcccgtgggcatggtccaacatcgacaccagcaaagtgaattatggtgtaacggtactgccgaccttcaagggtcaaccatccaaaccgttcgttggcgtgctgagcgcaggtattaacgccgccagtccgaacaaagagctggcgaaagagttcctcgaaaactatctgctgactgatgaaggtctggaagcggttaataaagacaaaccgctgggtgccgtagcgctgaagtcttacgaggaagagttggcgaaagatccacgtattgccgccaccatggaaaacgcccagaaaggtgaaatcatgccgaacatcccgcagatgtccgctttctggtatgccgtgcgtactgcggtgatcaacgccgccagcggtcgtcagactgtcgatgaagccctgaaagacgcgcagactggtggttctggtgagaacctgtactttcaaagctcagataatgggcctcaaaaccagcgcaacgctccacgtataaccttcggtggcccgtctgactccacaggcagcaaccagaatggtgagcgtagtggagccaggtctaagcagcgccgtccccagggtctgccgaacaacacggcgagctggtttactgcgcttacccaacacggtaaagaagacttaaaattcccgcgtggccagggcgtcccgatcaacactaactcttccccggatgatcagattggttattaccgcagagcaactcgtcggattcgcggcggcgacggtaaaatgaaagatttgtctccgcgttggtacttttactatctcggcaccggtccggaagctggactgccctacggggcaaacaaggacgggatcatttgggtggctaccgaaggtgccctgaatactccaaaagatcatatcggcacccgtaaccctgctaataacgctgcgatcgttctgcaactgcctcagggtacaactctgccaaaaggcttctattcggaagggtcgcgtggtggcagccaggcgagtagccgtagcagctcccgctctcgcaactcgtcccgtaactccactccgggctcttctcgcggcacgtccccggctcgtatggcaggtaacggtggtgacgctgctctggcgctgctactgctggacaggctgaaccagctggagtcgaagatgagtggtaaaggccaacagcagcagggccagaccgttaccaaaaagagcgcagctgaagcatctaaaaaaccgcgacagaaacgtaccgcgactaaagcgtacaatgtaacacaggccttcggtcgtcgaggtccggagcaaactcaaggaaactttggcgatcaggaattaatccgccaggggaccgactacaaacactggccgcaaattgcccagttcgccccatccgctagtgcattcttcggtatgagccgcatcggcatggaagtaacgccaagtggtacgtggctgacctacaccggtgctatcaagcttgatgacaaggacccgaactttaaagaccaggttattctgcttaacaaacatattgatgcctataaaactttcccgccgaccgaacccaaaaaggacaaaaagaaaaaagctgatgaaacccaggctctaccgcagcgtcagaaaaaacagcaaactgtgactctgctgccagctgcggacctggatgatttttccaagcagctgcaacagtctatgagctctgcggactctacgcaggctggtggttctggtcaccatcatcaccatcattaa

SEQ ID NO: 2856 - DNA, 2421 bp, Artificial Sequence
  Description of Artificial Sequence: Synthetic polynucleotide
atgaaaatcgaagaaggtaaactggtaatctggattaacggcgataaaggctataacggtctcgctgaagtcggtaagaaattcgagaaagataccggaattaaagtcaccgttgagcatccggataaactggaagagaaattcccacaggttgcggcaactggcgatggccctgacattatcttctgggcacacgaccgctttggtggctacgctcaatctggcctgttggctgaaatcaccccggacaaagcgttccaggacaagctgtatccgtttacctgggatgccgtacgttacaacggcaagctgattgcttacccgatcgctgttgaagcgttatcgctgatttataacaaagatctgctgccgaacccgccaaaaacctgggaagagatcccggcgctggataaagaactgaaagcgaaaggtaagagcgcgctgatgttcaacctgcaagaaccgtacttcacctggccgctgattgctgctgacgggggttatgcgttcaagtatgaaaacggcaagtacgacattaaagacgtgggcgtggataacgctggcgcgaaagcgggtctgaccttcctggttgacctgattaaaaacaaacacatgaatgcagacaccgattactccatcgcagaagctgcctttaataaaggcgaaacagcgatgaccatcaacggcccgtgggcatggtccaacatcgacaccagcaaagtgaattatggtgtaacggtactgccgaccttcaagggtcaaccatccaaaccgttcgttggcgtgctgagcgcaggtattaacgccgccagtccgaacaaagagctggcgaaagagttcctcgaaaactatctgctgactgatgaaggtctggaagcggttaataaagacaaaccgctgggtgccgtagcgctgaagtcttacgaggaagagttggcgaaagatccacgtattgccgccaccatggaaaacgcccagaaaggtgaaatcatgccgaacatcccgcagatgtccgctttctggtatgccgtgcgtactgcggtgatcaacgccgccagcggtcgtcagactgtcgatgaagccctgaaagacgcgcagactggtggttctggtgagaacctgtactttcaaagctcagataatgggcctcaaaaccagcgcaacgctccacgtataaccttcggtggcccgtctgactccacaggcagcaaccagaatggtgagcgtagtggagccaggtctaagcagcgccgtccccagggtctgccgaacaacacggcgagctggtttactgcgcttacccaacacggtaaagaagacttaaaattcccgcgtggccagggcgtcccgatcaacactaactcttccccggatgatcagattggttattaccgcagagcaactcgtcggattcgcggcggcgacggtaaaatgaaagatttgtctccgcgttggtacttttactatctcggcaccggtccggaagctggactgccctacggggcaaacaaggacgggatcatttgggtggctaccgaaggtgccctgaatactccaaaagatcatatcggcacccgtaaccctgctaataacgctgcgatcgttctgcaactgcctcagggtacatggctgccaaaaggcttctatgcagaagggtcgcgtggtggcagccaggcgagtagccgtagcagctcccgctctcgcaactcgtcccgtaactccactccgggctcttctcgcggcacgtccccggctcgtatggcaggtaacggtggtgacgctgctctggcgctgctactgctggacaggctgaaccagctggagtcgaagatgagtggtaaaggccaacagcagcagggccagaccgttaccaaaaagagcgcagctgaagcatctaaaaaaccgcgacagaaacgtaccgcgactaaagcgtacaatgtaacacaggccttcggtcgtcgaggtccggagcaaactcaaggaaactttggcgatcaggaattaatccgccaggggaccgactacaaacactggccgcaaattgcccagttcgccccatccgctagtgcattcttcggtatgagccgcatcggcatggaagtaacgccaagtggtacgtggctgacctacaccggtgctatcaagcttgatgacaaggacccgaactttaaagaccaggttattctgcttaacaaacatattgatgcctataaaactttcccgccgaccgaacccaaaaaggacaaaaagaaaaaagctgatgaaacccaggctctaccgcagcgtcagaaaaaacagcaaactgtgactctgctgccagctgcggacctggatgatttttccaagcagctgcaacagtctatgagctctgcggactctacgcaggctggtggttctggtcaccatcatcaccatcattaa

SEQ ID NO: 2857 - DNA, 2421 bp, Artificial Sequence
  Description of Artificial Sequence: Synthetic polynucleotide
atgaaaatcgaagaaggtaaactggtaatctggattaacggcgataaaggctataacggtctcgctgaagtcggtaagaaattcgagaaagataccggaattaaagtcaccgttgagcatccggataaactggaagagaaattcccacaggttgcggcaactggcgatggccctgacattatcttctgggcacacgaccgctttggtggctacgctcaatctggcctgttggctgaaatcaccccggacaaagcgttccaggacaagctgtatccgtttacctgggatgccgtacgttacaacggcaagctgattgcttacccgatcgctgttgaagcgttatcgctgatttataacaaagatctgctgccgaacccgccaaaaacctgggaagagatcccggcgctggataaagaactgaaagcgaaaggtaagagcgcgctgatgttcaacctgcaagaaccgtacttcacctggccgctgattgctgctgacgggggttatgcgttcaagtatgaaaacggcaagtacgacattaaagacgtgggcgtggataacgctggcgcgaaagcgggtctgaccttcctggttgacctgattaaaaacaaacacatgaatgcagacaccgattactccatcgcagaagctgcctttaataaaggcgaaacagcgatgaccatcaacggcccgtgggcatggtccaacatcgacaccagcaaagtgaattatggtgtaacggtactgccgaccttcaagggtcaaccatccaaaccgttcgttggcgtgctgagcgcaggtattaacgccgccagtccgaacaaagagctggcgaaagagttcctcgaaaactatctgctgactgatgaaggtctggaagcggttaataaagacaaaccgctgggtgccgtagcgctgaagtcttacgaggaagagttggcgaaagatccacgtattgccgccaccatggaaaacgcccagaaaggtgaaatcatgccgaacatcccgcagatgtccgctttctggtatgccgtgcgtactgcggtgatcaacgccgccagcggtcgtcagactgtcgatgaagccctgaaagacgcgcagactggtggttctggtgagaacctgtactttcaaagctcagataatgggcctcaaaaccagcgcaacgctccacgtataaccttcggtggcccgtctgactccacaggcagcaaccagaatggtgagcgtagtggagccaggtctaagcagcgccgtccccagggtctgccgaacaacacggcgagctggtttactgcgcttacccaacacggtaaagaagacttaaaattcccgcgtggccagggcgtcccgatcaacactaactcttccccggatgatcagattggttattaccgcagagcaactcgtcggattcgcggcggcgacggtaaaatgaaagatttgtctccgcgttggtacttttactatctcggcaccggtccggaagctggactgccctacggggcaaacaaggacgggatcatttgggtggctaccgaaggtgccctgaatactccaaaagatcatatcggcacccgtaaccctgagaataacgctgcgatcgttctgcaactgcctcagggtacaactctgccaaaaggcttctatgcagaagggtcgcgtggtggcagccaggcgagtagccgtagcagctcccgctctcgcaactcgtcccgtaactccactccgggctcttctcgcggcacgtccccggctcgtatggcaggtaacggtggtgacgctgctctggcgctgctactgctggacaggctgaaccagctggagtcgaagatgagtggtaaaggccaacagcagcagggccagaccgttaccaaaaagagcgcagctgaagcatctaaaaaaccgcgacagaaacgtaccgcgactaaagcgtacaatgtaacacaggccttcggtcgtcgaggtccggagcaaactcaaggaaactttggcgatcaggaattaatccgccaggggaccgactacaaacactggccgcaaattgcccagttcgccccatccgctagtgcattcttcggtatgagccgcatcggcatggaagtaacgccaagtggtacgtggctgacctacaccggtgctatcaagcttgatgacaaggacccgaactttaaagaccaggttattctgcttaacaaacatattgatgcctataaaactttcccgccgaccgaacccaaaaaggacaaaaagaaaaaagctgatgaaacccaggctctaccgcagcgtcagaaaaaacagcaaactgtgactctgctgccagctgcggacctggatgatttttccaagcagctgcaacagtctatgagctctgcggactctacgcaggctggtggttctggtcaccatcatcaccatcattaa

SEQ ID NO: 2858 - DNA, 2421 bp, Artificial Sequence
  Description of Artificial Sequence: Synthetic polynucleotide
atgaaaatcgaagaaggtaaactggtaatctggattaacggcgataaaggctataacggtctcgctgaagtcggtaagaaattcgagaaagataccggaattaaagtcaccgttgagcatccggataaactggaagagaaattcccacaggttgcggcaactggcgatggccctgacattatcttctgggcacacgaccgctttggtggctacgctcaatctggcctgttggctgaaatcaccccggacaaagcgttccaggacaagctgtatccgtttacctgggatgccgtacgttacaacggcaagctgattgcttacccgatcgctgttgaagcgttatcgctgatttataacaaagatctgctgccgaacccgccaaaaacctgggaagagatcccggcgctggataaagaactgaaagcgaaaggtaagagcgcgctgatgttcaacctgcaagaaccgtacttcacctggccgctgattgctgctgacgggggttatgcgttcaagtatgaaaacggcaagtacgacattaaagacgtgggcgtggataacgctggcgcgaaagcgggtctgaccttcctggttgacctgattaaaaacaaacacatgaatgcagacaccgattactccatcgcagaagctgcctttaataaaggcgaaacagcgatgaccatcaacggcccgtgggcatggtccaacatcgacaccagcaaagtgaattatggtgtaacggtactgccgaccttcaagggtcaaccatccaaaccgttcgttggcgtgctgagcgcaggtattaacgccgccagtccgaacaaagagctggcgaaagagttcctcgaaaactatctgctgactgatgaaggtctggaagcggttaataaagacaaaccgctgggtgccgtagcgctgaagtcttacgaggaagagttggcgaaagatccacgtattgccgccaccatggaaaacgcccagaaaggtgaaatcatgccgaacatcccgcagatgtccgctttctggtatgccgtgcgtactgcggtgatcaacgccgccagcggtcgtcagactgtcgatgaagccctgaaagacgcgcagactggtggttctggtgagaacctgtactttcaaagctcagataatgggcctcaaaaccagcgcaacgctccacgtataaccttcggtggcccgtctgactccacaggcagcaaccagaatggtgagcgtagtggagccaggtctaagcagcgccgtccccagggtctgccgaacaacacggcgagctggtttactgcgcttacccaacacggtaaagaagacttaaaattcccgcgtggccagggcgtcccgatcaacactaactcttccccggatgatcagattggttattaccgcagagcaactcgtcggattcgcggcggcgacggtaaaatgaaagatttgtctccgcgttggtacttttactatctcggcaccggtccggaagctggactgccctacggggcaaacaaggacgggatcatttgggtggctaccgaaggtgccctgaatactccaaaagatcatatcggcacccgtaaccctgctaataacgctgcgatcgttctgcaactgcctcagggtacaactctgccaaaaggcttctatgcagaagggtcgcgtggtggcagccaggcgagtagccgtagcagctcccgctctcgcaactcgtcccgtaactccactccgggctcttctcgcggcacgtccccggctcgtatggcaggtaacggtggtgacgctgctctggcgctgctactgctggacaggctgaaccagctggagtcgaagatgagtggtaaaggccaacagcagcagggccagaccgttaccaaaaagagcgcagctgaagcatctaaaaaaccgcgacagaaacgtaccgcgactaaagcgtacaatgtaacacaggccttcggtcgtcgaggtccggagcaaactcaaggaaactttggcgatcaggaattaatccgccaggggaccgactacaaacactggccgcaaattgcccagttcgccccatccgctagtgcattcttcggtatgagccgcatcggcatggaagtaacgccaagtggtacgtggctgacctacaccggtgctatcaagcttgatcgcaaggacccgaactttaaagaccaggttattctgcttaacaaacatattgatgcctataaaactttcccgccgaccgaacccaaaaaggacaaaaagaaaaaagctgatgaaacccaggctctaccgcagcgtcagaaaaaacagcaaactgtgactctgctgccagctgcggacctggatgatttttccaagcagctgcaacagtctatgagctctgcggactctacgcaggctggtggttctggtcaccatcatcaccatcattaa

SEQ ID NO: 2859 - DNA, 2421 bp, Artificial Sequence
  Description of Artificial Sequence: Synthetic polynucleotide
atgaaaatcgaagaaggtaaactggtaatctggattaacggcgataaaggctataacggtctcgctgaagtcggtaagaaattcgagaaagataccggaattaaagtcaccgttgagcatccggataaactggaagagaaattcccacaggttgcggcaactggcgatggccctgacattatcttctgggcacacgaccgctttggtggctacgctcaatctggcctgttggctgaaatcaccccggacaaagcgttccaggacaagctgtatccgtttacctgggatgccgtacgttacaacggcaagctgattgcttacccgatcgctgttgaagcgttatcgctgatttataacaaagatctgctgccgaacccgccaaaaacctgggaagagatcccggcgctggataaagaactgaaagcgaaaggtaagagcgcgctgatgttcaacctgcaagaaccgtacttcacctggccgctgattgctgctgacgggggttatgcgttcaagtatgaaaacggcaagtacgacattaaagacgtgggcgtggataacgctggcgcgaaagcgggtctgaccttcctggttgacctgattaaaaacaaacacatgaatgcagacaccgattactccatcgcagaagctgcctttaataaaggcgaaacagcgatgaccatcaacggcccgtgggcatggtccaacatcgacaccagcaaagtgaattatggtgtaacggtactgccgaccttcaagggtcaaccatccaaaccgttcgttggcgtgctgagcgcaggtattaacgccgccagtccgaacaaagagctggcgaaagagttcctcgaaaactatctgctgactgatgaaggtctggaagcggttaataaagacaaaccgctgggtgccgtagcgctgaagtcttacgaggaagagttggcgaaagatccacgtattgccgccaccatggaaaacgcccagaaaggtgaaatcatgccgaacatcccgcagatgtccgctttctggtatgccgtgcgtactgcggtgatcaacgccgccagcggtcgtcagactgtcgatgaagccctgaaagacgcgcagactggtggttctggtgagaacctgtactttcaaagctcagataatgggcctcaaaaccagcgcaacgctccacgtataaccttcggtggcccgtctgactccacaggcagcaaccagaatggtgagcgtagtggagccaggtctaagcagcgccgtccccagggtctgccgaacaacacggcgagctggtttactgcgcttacccaatttggtaaagaagacttaaaattcccgcgtggccagggcgtcccgatcaacactaactcttccccggatgatcagattggttattaccgcagagcaactcgtcggattcgcggcggcgacggtaaaatgaaagatttgtctccgcgttggtacttttactatctcggcaccggtccggaagctggactgccctacggggcaaacaaggacgggatcatttgggtggctaccgaaggtgccctgaatactccaaaagatcatatcggcacccgtaaccctgctaataacgctgcgatcgttctgcaactgcctcagggtacaactctgccaaaaggcttctatgcagaagggtcgcgtggtggcagccaggcgagtagccgtagcagctcccgctctcgcaactcgtcccgtaactccactccgggctcttctcgcggcacgtccccggctcgtatggcaggtaacggtggtgacgctgctctggcgctgctactgctggacaggctgaaccagctggagtcgaagatgagtggtaaaggccaacagcagcagggccagaccgttaccaaaaagagcgcagctgaagcatctaaaaaaccgcgacagaaacgtaccgcgactaaagcgtacaatgtaacacaggccttcggtcgtcgaggtccggagcaaactcaaggaaactttggcgatcaggaattaatccgccaggggaccgactacaaacactggccgcaaattgcccagttcgccccatccgctagtgcattcttcggtatgagccgcatcggcatggaagtaacgccaagtggtacgtggctgacctacaccggtgctatcaagcttgatgacaaggacccgaactttaaagaccaggttattctgcttaacaaacatattgatgcctataaaactttcccgccgaccgaacccaaaaaggacaaaaagaaaaaagctgatgaaacccaggctctaccgcagcgtcagaaaaaacagcaaactgtgactctgctgccagctgcggacctggatgatttttccaagcagctgcaacagtctatgagctctgcggactctacgcaggctggtggttctggtcaccatcatcaccatcattaa

SEQ ID NO: 2860 - DNA, 2421 bp, Artificial Sequence
  Description of Artificial Sequence: Synthetic polynucleotide
atgaaaatcgaagaaggtaaactggtaatctggattaacggcgataaaggctataacggtctcgctgaagtcggtaagaaattcgagaaagataccggaattaaagtcaccgttgagcatccggataaactggaagagaaattcccacaggttgcggcaactggcgatggccctgacattatcttctgggcacacgaccgctttggtggctacgctcaatctggcctgttggctgaaatcaccccggacaaagcgttccaggacaagctgtatccgtttacctgggatgccgtacgttacaacggcaagctgattgcttacccgatcgctgttgaagcgttatcgctgatttataacaaagatctgctgccgaacccgccaaaaacctgggaagagatcccggcgctggataaagaactgaaagcgaaaggtaagagcgcgctgatgttcaacctgcaagaaccgtacttcacctggccgctgattgctgctgacgggggttatgcgttcaagtatgaaaacggcaagtacgacattaaagacgtgggcgtggataacgctggcgcgaaagcgggtctgaccttcctggttgacctgattaaaaacaaacacatgaatgcagacaccgattactccatcgcagaagctgcctttaataaaggcgaaacagcgatgaccatcaacggcccgtgggcatggtccaacatcgacaccagcaaagtgaattatggtgtaacggtactgccgaccttcaagggtcaaccatccaaaccgttcgttggcgtgctgagcgcaggtattaacgccgccagtccgaacaaagagctggcgaaagagttcctcgaaaactatctgctgactgatgaaggtctggaagcggttaataaagacaaaccgctgggtgccgtagcgctgaagtcttacgaggaagagttggcgaaagatccacgtattgccgccaccatggaaaacgcccagaaaggtgaaatcatgccgaacatcccgcagatgtccgctttctggtatgccgtgcgtactgcggtgatcaacgccgccagcggtcgtcagactgtcgatgaagccctgaaagacgcgcagactggtggttctggtgagaacctgtactttcaaagctcagataatgggcctcaaaaccagcgcaacgctccacgtataaccttcggtggcccgtctgactccacaggcagcaaccagaatggtgagcgtagtggagccaggtctaagcagcgccgtccccagggtctgccgaacaacacggcgagctggtttactgcgcttacccaacacggtaaagaagacttaaaattcccgcgtggccagggcgtcccgatcaacactaactcttccccggatgatcagattggttattaccgcagagcaactcgtcggattcgcggcggcgacggtaaaatgaaagatttgtctccgcgttggtacttttactatctcggcaccggtccggaagctggactgccctacggggcagcgaaggacgggatcatttgggtggctaccgaaggtgccctgaatactccaaaagatcatatcggcacccgtaaccctgctaataacgctgcgatcgttctgcaactgcctcagggtacaactctgccaaaaggcttctatgcagaagggtcgcgtggtggcagccaggcgagtagccgtagcagctcccgctctcgcaactcgtcccgtaactccactccgggctcttctcgcggcacgtccccggctcgtatggcaggtaacggtggtgacgctgctctggcgctgctactgctggacaggctgaaccagctggagtcgaagatgagtggtaaaggccaacagcagcagggccagaccgttaccaaaaagagcgcagctgaagcatctaaaaaaccgcgacagaaacgtaccgcgactaaagcgtacaatgtaacacaggccttcggtcgtcgaggtccggagcaaactcaaggaaactttggcgatcaggaattaatccgccaggggaccgactacaaacactggccgcaaattgcccagttcgccccatccgctagtgcattcttcggtatgagccgcatcggcatggaagtaacgccaagtggtacgtggctgacctacaccggtgctatcaagcttgatgacaaggacccgaactttaaagaccaggttattctgcttaacaaacatattgatgcctataaaactttcccgccgaccgaacccaaaaaggacaaaaagaaaaaagctgatgaaacccaggctctaccgcagcgtcagaaaaaacagcaaactgtgactctgctgccagctgcggacctggatgatttttccaagcagctgcaacagtctatgagctctgcggactctacgcaggctggtggttctggtcaccatcatcaccatcattaa

SEQ ID NO: 2861 - DNA, 2421 bp, Artificial Sequence
  Description of Artificial Sequence: Synthetic polynucleotide
atgaaaatcgaagaaggtaaactggtaatctggattaacggcgataaaggctataacggtctcgctgaagtcggtaagaaattcgagaaagataccggaattaaagtcaccgttgagcatccggataaactggaagagaaattcccacaggttgcggcaactggcgatggccctgacattatcttctgggcacacgaccgctttggtggctacgctcaatctggcctgttggctgaaatcaccccggacaaagcgttccaggacaagctgtatccgtttacctgggatgccgtacgttacaacggcaagctgattgcttacccgatcgctgttgaagcgttatcgctgatttataacaaagatctgctgccgaacccgccaaaaacctgggaagagatcccggcgctggataaagaactgaaagcgaaaggtaagagcgcgctgatgttcaacctgcaagaaccgtacttcacctggccgctgattgctgctgacgggggttatgcgttcaagtatgaaaacggcaagtacgacattaaagacgtgggcgtggataacgctggcgcgaaagcgggtctgaccttcctggttgacctgattaaaaacaaacacatgaatgcagacaccgattactccatcgcagaagctgcctttaataaaggcgaaacagcgatgaccatcaacggcccgtgggcatggtccaacatcgacaccagcaaagtgaattatggtgtaacggtactgccgaccttcaagggtcaaccatccaaaccgttcgttggcgtgctgagcgcaggtattaacgccgccagtccgaacaaagagctggcgaaagagttcctcgaaaactatctgctgactgatgaaggtctggaagcggttaataaagacaaaccgctgggtgccgtagcgctgaagtcttacgaggaagagttggcgaaagatccacgtattgccgccaccatggaaaacgcccagaaaggtgaaatcatgccgaacatcccgcagatgtccgctttctggtatgccgtgcgtactgcggtgatcaacgccgccagcggtcgtcagactgtcgatgaagccctgaaagacgcgcagactggtggttctggtgagaacctgtactttcaaagctcagataatgggcctcaaaaccagcgcaacgctccacgtataaccttcggtggcccgtctgactccacaggcagcaaccagaatggtgagcgtagtggagccaggtctaagcagcgccgtccccagggtctgccgaacaacacggcgagctggtttactgcgcttacccaacacggtaaagaagacttaaaattcccgcgtggccagggcgtcccgatcaacactaactctaatccggatgatcagattggttattaccgcagagcaactcgtcggattcgcggcggcgacggtaaaatgaaagatttgtctccgcgttggtacttttactatctcggcaccggtccggaagctggactgccctacggggcaaacaaggacgggatcatttgggtggctaccgaaggtgccctgaatactccaaaagatcatatcggcacccgtaaccctgctaataacgctgcgatcgttctgcaactgcctcagggtacaactctgccaaaaggcttctatgcagaagggtcgcgtggtggcagccaggcgagtagccgtagcagctcccgctctcgcaactcgtcccgtaactccactccgggctcttctcgcggcacgtccccggctcgtatggcaggtaacggtggtgacgctgctctggcgctgctactgctggacaggctgaaccagctggagtcgaagatgagtggtaaaggccaacagcagcagggccagaccgttaccaaaaagagcgcagctgaagcatctaaaaaaccgcgacagaaacgtaccgcgactaaagcgtacaatgtaacacaggccttcggtcgtcgaggtccggagcaaactcaaggaaactttggcgatcaggaattaatccgccaggggaccgactacaaacactggccgcaaattgcccagttcgccccatccgctagtgcattcttcggtatgagccgcatcggcatggaagtaacgccaagtggtacgtggctgacctacaccggtgctatcaagcttgatgacaaggacccgaactttaaagaccaggttattctgcttaacaaacatattgatgcctataaaactttcccgccgaccgaacccaaaaaggacaaaaagaaaaaagctgatgaaacccaggctctaccgcagcgtcagaaaaaacagcaaactgtgactctgctgccagctgcggacctggatgatttttccaagcagctgcaacagtctatgagctctgcggactctacgcaggctggtggttctggtcaccatcatcaccatcattaa

SEQ ID NO: 2862 - DNA, 2421 bp, Artificial Sequence
  Description of Artificial Sequence: Synthetic polynucleotide
atgaaaatcgaagaaggtaaactggtaatctggattaacggcgataaaggctataacggtctcgctgaagtcggtaagaaattcgagaaagataccggaattaaagtcaccgttgagcatccggataaactggaagagaaattcccacaggttgcggcaactggcgatggccctgacattatcttctgggcacacgaccgctttggtggctacgctcaatctggcctgttggctgaaatcaccccggacaaagcgttccaggacaagctgtatccgtttacctgggatgccgtacgttacaacggcaagctgattgcttacccgatcgctgttgaagcgttatcgctgatttataacaaagatctgctgccgaacccgccaaaaacctgggaagagatcccggcgctggataaagaactgaaagcgaaaggtaagagcgcgctgatgttcaacctgcaagaaccgtacttcacctggccgctgattgctgctgacgggggttatgcgttcaagtatgaaaacggcaagtacgacattaaagacgtgggcgtggataacgctggcgcgaaagcgggtctgaccttcctggttgacctgattaaaaacaaacacatgaatgcagacaccgattactccatcgcagaagctgcctttaataaaggcgaaacagcgatgaccatcaacggcccgtgggcatggtccaacatcgacaccagcaaagtgaattatggtgtaacggtactgccgaccttcaagggtcaaccatccaaaccgttcgttggcgtgctgagcgcaggtattaacgccgccagtccgaacaaagagctggcgaaagagttcctcgaaaactatctgctgactgatgaaggtctggaagcggttaataaagacaaaccgctgggtgccgtagcgctgaagtcttacgaggaagagttggcgaaagatccacgtattgccgccaccatggaaaacgcccagaaaggtgaaatcatgccgaacatcccgcagatgtccgctttctggtatgccgtgcgtactgcggtgatcaacgccgccagcggtcgtcagactgtcgatgaagccctgaaagacgcgcagactggtggttctggtgagaacctgtactttcaaagctcagataatgggcctcaaaaccagcgcaacgctccacgtataaccttcggtggcccgtctgactccacaggcagcaaccagaatggtgagcgtagtggagccaggtctaagcagcgccgtccccagggtctgccgaacaacacggcgagctggtttactgcgcttacccaacacggtaaagaagacttaaaattcccgcgtggccagggcgtcccgatcaacactaactcttccccggatgatcagattggttattaccgcagagcaactcgtcggattcgcggcggcgacggtaaaatgaaagatttgtctccgcgttggtacttttactatctcggcaccggtccggaagctggactgccctacggggcaaacaaggacgggatcatttgggtggctaccgaaggtgccctgaatactccaaaagatcatatcggcacccgtaaccctgctaataacgctgcgatcgttctgcaactgcctcagggtacaactctgccaaaaggcttctatgcagaagggtcgcgtggtggcagccaggcgagtagccgtagcagctcccgctctcgcaactcgtcccgtaactccactccgggctcttctcgcggcacgtccccggctcgtatggcaggtaacggtggtgacgctgctctggcgctgctactgctggacaggctgaaccagctggagtcgaagatgagtggtaaaggccaacagcagcagggccagaccgttaccaaaaagagcgcagctgaagcatctaaaaaaccgcgacagaaacgtaccgcgactaaagcgtacaatgtaacacaggccttcggtcgtcgaggtccggagcaaactcaaggaaactttggcgatcaggaattaatccgccaggggaccgactacaaacactggccgcaaattgcccagttcgccccatccgctagtgcattcttcggtatgagccgcatcggcatggaacatacgccaagtggtacgtggctgacctacaccggtgctatcaagcttgatgacaaggacccgaactttaaagaccaggttattctgcttaacaaacatattgatgcctataaaactttcccgccgaccgaacccaaaaaggacaaaaagaaaaaagctgatgaaacccaggctctaccgcagcgtcagaaaaaacagcaaactgtgactctgctgccagctgcggacctggatgatttttccaagcagctgcaacagtctatgagctctgcggactctacgcaggctggtggttctggtcaccatcatcaccatcattaa

SEQ ID NO: 2863 - DNA, 2421 bp, Artificial Sequence
  Description of Artificial Sequence: Synthetic polynucleotide
atgaaaatcgaagaaggtaaactggtaatctggattaacggcgataaaggctataacggtctcgctgaagtcggtaagaaattcgagaaagataccggaattaaagtcaccgttgagcatccggataaactggaagagaaattcccacaggttgcggcaactggcgatggccctgacattatcttctgggcacacgaccgctttggtggctacgctcaatctggcctgttggctgaaatcaccccggacaaagcgttccaggacaagctgtatccgtttacctgggatgccgtacgttacaacggcaagctgattgcttacccgatcgctgttgaagcgttatcgctgatttataacaaagatctgctgccgaacccgccaaaaacctgggaagagatcccggcgctggataaagaactgaaagcgaaaggtaagagcgcgctgatgttcaacctgcaagaaccgtacttcacctggccgctgattgctgctgacgggggttatgcgttcaagtatgaaaacggcaagtacgacattaaagacgtgggcgtggataacgctggcgcgaaagcgggtctgaccttcctggttgacctgattaaaaacaaacacatgaatgcagacaccgattactccatcgcagaagctgcctttaataaaggcgaaacagcgatgaccatcaacggcccgtgggcatggtccaacatcgacaccagcaaagtgaattatggtgtaacggtactgccgaccttcaagggtcaaccatccaaaccgttcgttggcgtgctgagcgcaggtattaacgccgccagtccgaacaaagagctggcgaaagagttcctcgaaaactatctgctgactgatgaaggtctggaagcggttaataaagacaaaccgctgggtgccgtagcgctgaagtcttacgaggaagagttggcgaaagatccacgtattgccgccaccatggaaaacgcccagaaaggtgaaatcatgccgaacatcccgcagatgtccgctttctggtatgccgtgcgtactgcggtgatcaacgccgccagcggtcgtcagactgtcgatgaagccctgaaagacgcgcagactggtggttctggtgagaacctgtactttcaaagctcagataatgggcctcaaaaccagcgcaacgctccacgtataaccttcggtggcccgtctgactccacaggcagcaaccagaatggtgagcgtagtggagccaggtctaagcagcgccgtccccagggtctgccgaacaacacggcgagctggtttactgcgcttacccaacacggtaaagaagacttaaaattcccgcgtggccagggcgtcccgatcaacactaactcttccccggatgatcagattggttattaccgcagagcaactcgtcggattcgcggcggcgacggtaaaatgaaagatttgtctccgcgttggtacttttactatctcggcaccggtccggaagctggactgccctacggggcaaacaaggacgggatcatttgggtggctaccgaaggtgcccgaaatactccaaaagatcatatcggcacccgtaaccctgctaataacgctgcgatcgttctgcaactgcctcagggtacaactctgccaaaaggcttctatgcagaagggtcgcgtggtggcagccaggcgagtagccgtagcagctcccgctctcgcaactcgtcccgtaactccactccgggctcttctcgcggcacgtccccggctcgtatggcaggtaacggtggtgacgctgctctggcgctgctactgctggacaggctgaaccagctggagtcgaagatgagtggtaaaggccaacagcagcagggccagaccgttaccaaaaagagcgcagctgaagcatctaaaaaaccgcgacagaaacgtaccgcgactaaagcgtacaatgtaacacaggccttcggtcgtcgaggtccggagcaaactcaaggaaactttggcgatcaggaattaatccgccaggggaccgactacaaacactggccgcaaattgcccagttcgccccatccgctagtgcattcttcggtatgagccgcatcggcatggaagtaacgccaagtggtacgtggctgacctacaccggtgctatcaagcttgatgacaaggacccgaactttaaagaccaggttattctgcttaacaaacatattgatgcctataaaactttcccgccgaccgaacccaaaaaggacaaaaagaaaaaagctgatgaaacccaggctctaccgcagcgtcagaaaaaacagcaaactgtgactctgctgccagctgcggacctggatgatttttccaagcagctgcaacagtctatgagctctgcggactctacgcaggctggtggttctggtcaccatcatcaccatcattaa

SEQ ID NO: 2864 - DNA, 2421 bp, Artificial Sequence
  Description of Artificial Sequence: Synthetic polynucleotide
atgaaaatcgaagaaggtaaactggtaatctggattaacggcgataaaggctataacggtctcgctgaagtcggtaagaaattcgagaaagataccggaattaaagtcaccgttgagcatccggataaactggaagagaaattcccacaggttgcggcaactggcgatggccctgacattatcttctgggcacacgaccgctttggtggctacgctcaatctggcctgttggctgaaatcaccccggacaaagcgttccaggacaagctgtatccgtttacctgggatgccgtacgttacaacggcaagctgattgcttacccgatcgctgttgaagcgttatcgctgatttataacaaagatctgctgccgaacccgccaaaaacctgggaagagatcccggcgctggataaagaactgaaagcgaaaggtaagagcgcgctgatgttcaacctgcaagaaccgtacttcacctggccgctgattgctgctgacgggggttatgcgttcaagtatgaaaacggcaagtacgacattaaagacgtgggcgtggataacgctggcgcgaaagcgggtctgaccttcctggttgacctgattaaaaacaaacacatgaatgcagacaccgattactccatcgcagaagctgcctttaataaaggcgaaacagcgatgaccatcaacggcccgtgggcatggtccaacatcgacaccagcaaagtgaattatggtgtaacggtactgccgaccttcaagggtcaaccatccaaaccgttcgttggcgtgctgagcgcaggtattaacgccgccagtccgaacaaagagctggcgaaagagttcctcgaaaactatctgctgactgatgaaggtctggaagcggttaataaagacaaaccgctgggtgccgtagcgctgaagtcttacgaggaagagttggcgaaagatccacgtattgccgccaccatggaaaacgcccagaaaggtgaaatcatgccgaacatcccgcagatgtccgctttctggtatgccgtgcgtactgcggtgatcaacgccgccagcggtcgtcagactgtcgatgaagccctgaaagacgcgcagactggtggttctggtgagaacctgtactttcaaagctcagataatgggcctcaaaaccagcgcaacgctccacgtataaccttcggtggcccgtctgactccacaggcagcaaccagaatggtgagcgtagtggagccaggtctaagcagcgccgtccccagggtctgccgaacaacacggcgagctggtttactgcgcttacccaacacggtaaagaagacttaaaattcccgcgtggccagggcattccgatcaacactaactcttccccggatgatcagattggttattaccgcagagcaactcgtcggattcgcggcggcgacggtaaaatgaaagatttgtctccgcgttggtacttttactatctcggcaccggtccggaagctggactgccctacggggcaaacaaggacgggatcatttgggtggctaccgaaggtgccctgaatactccaaaagatcatatcggcacccgtaaccctgctaataacgctgcgatcgttctgcaactgcctcagggtacaactctgccaaaaggcttctatgcagaagggtcgcgtggtggcagccaggcgagtagccgtagcagctcccgctctcgcaactcgtcccgtaactccactccgggctcttctcgcggcacgtccccggctcgtatggcaggtaacggtggtgacgctgctctggcgctgctactgctggacaggctgaaccagctggagtcgaagatgagtggtaaaggccaacagcagcagggccagaccgttaccaaaaagagcgcagctgaagcatctaaaaaaccgcgacagaaacgtaccgcgactaaagcgtacaatgtaacacaggccttcggtcgtcgaggtccggagcaaactcaaggaaactttggcgatcaggaattaatccgccaggggaccgactacaaacactggccgcaaattgcccagttcgccccatccgctagtgcattcttcggtatgagccgcatcggcatggaagtaacgccaagtggtacgtggctgacctacaccggtgctatcaagcttgatgacaaggacccgaactttaaagaccaggttattctgcttaacaaacatattgatgcctataaaactttcccgccgaccgaacccaaaaaggacaaaaagaaaaaagctgatgaaacccaggctctaccgcagcgtcagaaaaaacagcaaactgtgactctgctgccagctgcggacctggatgatttttccaagcagctgcaacagtctatgagctctgcggactctacgcaggctggtggttctggtcaccatcatcaccatcattaa

SEQ ID NO: 2865 - DNA, 2421 bp, Artificial Sequence
  Description of Artificial Sequence: Synthetic polynucleotide
atgaaaatcgaagaaggtaaactggtaatctggattaacggcgataaaggctataacggtctcgctgaagtcggtaagaaattcgagaaagataccggaattaaagtcaccgttgagcatccggataaactggaagagaaattcccacaggttgcggcaactggcgatggccctgacattatcttctgggcacacgaccgctttggtggctacgctcaatctggcctgttggctgaaatcaccccggacaaagcgttccaggacaagctgtatccgtttacctgggatgccgtacgttacaacggcaagctgattgcttacccgatcgctgttgaagcgttatcgctgatttataacaaagatctgctgccgaacccgccaaaaacctgggaagagatcccggcgctggataaagaactgaaagcgaaaggtaagagcgcgctgatgttcaacctgcaagaaccgtacttcacctggccgctgattgctgctgacgggggttatgcgttcaagtatgaaaacggcaagtacgacattaaagacgtgggcgtggataacgctggcgcgaaagcgggtctgaccttcctggttgacctgattaaaaacaaacacatgaatgcagacaccgattactccatcgcagaagctgcctttaataaaggcgaaacagcgatgaccatcaacggcccgtgggcatggtccaacatcgacaccagcaaagtgaattatggtgtaacggtactgccgaccttcaagggtcaaccatccaaaccgttcgttggcgtgctgagcgcaggtattaacgccgccagtccgaacaaagagctggcgaaagagttcctcgaaaactatctgctgactgatgaaggtctggaagcggttaataaagacaaaccgctgggtgccgtagcgctgaagtcttacgaggaagagttggcgaaagatccacgtattgccgccaccatggaaaacgcccagaaaggtgaaatcatgccgaacatcccgcagatgtccgctttctggtatgccgtgcgtactgcggtgatcaacgccgccagcggtcgtcagactgtcgatgaagccctgaaagacgcgcagactggtggttctggtgagaacctgtactttcaaagctcagataatgggcctcaaaaccagcgcaacgctccacgtataaccttcggtggcccgtctgactccacaggcagcaaccagaatggtgagcgtagtggagccaggtctaagcagcgccgtccccagggtctgccgaacaacacggcgagctggtttactgcgcttacccaacacggtaaagaagacttaaaattcccgcgtggccagggcgtcccgatcaacactaactcttccccggatgatcagattggttggtaccgcagagcaactcgtcggattcgcggcggcgacggtaaaatgaaagatttgtctccgcgttggtacttttactatctcggcaccggtccggaagctggactgccctacggggcaaacaaggacgggatcatttgggtggctaccgaaggtgccctgaatactccaaaagatcatatcggcacccgtaaccctgctaataacgctgcgatcgttctgcaactgcctcagggtacaactctgccaaaaggcttctatgcagaagggtcgcgtggtggcagccaggcgagtagccgtagcagctcccgctctcgcaactcgtcccgtaactccactccgggctcttctcgcggcacgtccccggctcgtatggcaggtaacggtggtgacgctgctctggcgctgctactgctggacaggctgaaccagctggagtcgaagatgagtggtaaaggccaacagcagcagggccagaccgttaccaaaaagagcgcagctgaagcatctaaaaaaccgcgacagaaacgtaccgcgactaaagcgtacaatgtaacacaggccttcggtcgtcgaggtccggagcaaactcaaggaaactttggcgatcaggaattaatccgccaggggaccgactacaaacactggccgcaaattgcccagttcgccccatccgctagtgcattcttcggtatgagccgcatcggcatggaagtaacgccaagtggtacgtggctgacctacaccggtgctatcaagcttgatgacaaggacccgaactttaaagaccaggttattctgcttaacaaacatattgatgcctataaaactttcccgccgaccgaacccaaaaaggacaaaaagaaaaaagctgatgaaacccaggctctaccgcagcgtcagaaaaaacagcaaactgtgactctgctgccagctgcggacctggatgatttttccaagcagctgcaacagtctatgagctctgcggactctacgcaggctggtggttctggtcaccatcatcaccatcattaa

SEQ ID NO: 2866 - DNA, 2421 bp, Artificial Sequence
  Description of Artificial Sequence: Synthetic polynucleotide
atgaaaatcgaagaaggtaaactggtaatctggattaacggcgataaaggctataacggtctcgctgaagtcggtaagaaattcgagaaagataccggaattaaagtcaccgttgagcatccggataaactggaagagaaattcccacaggttgcggcaactggcgatggccctgacattatcttctgggcacacgaccgctttggtggctacgctcaatctggcctgttggctgaaatcaccccggacaaagcgttccaggacaagctgtatccgtttacctgggatgccgtacgttacaacggcaagctgattgcttacccgatcgctgttgaagcgttatcgctgatttataacaaagatctgctgccgaacccgccaaaaacctgggaagagatcccggcgctggataaagaactgaaagcgaaaggtaagagcgcgctgatgttcaacctgcaagaaccgtacttcacctggccgctgattgctgctgacgggggttatgcgttcaagtatgaaaacggcaagtacgacattaaagacgtgggcgtggataacgctggcgcgaaagcgggtctgaccttcctggttgacctgattaaaaacaaacacatgaatgcagacaccgattactccatcgcagaagctgcctttaataaaggcgaaacagcgatgaccatcaacggcccgtgggcatggtccaacatcgacaccagcaaagtgaattatggtgtaacggtactgccgaccttcaagggtcaaccatccaaaccgttcgttggcgtgctgagcgcaggtattaacgccgccagtccgaacaaagagctggcgaaagagttcctcgaaaactatctgctgactgatgaaggtctggaagcggttaataaagacaaaccgctgggtgccgtagcgctgaagtcttacgaggaagagttggcgaaagatccacgtattgccgccaccatggaaaacgcccagaaaggtgaaatcatgccgaacatcccgcagatgtccgctttctggtatgccgtgcgtactgcggtgatcaacgccgccagcggtcgtcagactgtcgatgaagccctgaaagacgcgcagactggtggttctggtgagaacctgtactttcaaagctcagataatgggcctcaaaaccagcgcaacgctccacgtataaccttcggtggcccgtctgactccacaggcagcaaccagaatggtgagcgtagtggagccaggtctaagcagcgccgtccccagggtctgccgaacaacacggcgagctggtttactgcgcttacccaacacggtaaagaagacttaaaattcccgcgtggccagggcgtcccgatcaacactaactcttccccggatgatcagattggttgctaccgcagagcaactcgtcggattcgcggcggcgacggtaaaatgaaagatttgtctccgcgttggtacttttactatctcggcaccggtccggaagctggactgccctacggggcaaacaaggacgggatcatttgggtggctaccgaaggtgccctgaatactccaaaagatcatatcggcacccgtaaccctgctaataacgctgcgatcgttctgcaactgcctcagggtacaactctgccaaaaggcttctatgcagaagggtcgcgtggtggcagccaggcgagtagccgtagcagctcccgctctcgcaactcgtcccgtaactccactccgggctcttctcgcggcacgtccccggctcgtatggcaggtaacggtggtgacgctgctctggcgctgctactgctggacaggctgaaccagctggagtcgaagatgagtggtaaaggccaacagcagcagggccagaccgttaccaaaaagagcgcagctgaagcatctaaaaaaccgcgacagaaacgtaccgcgactaaagcgtacaatgtaacacaggccttcggtcgtcgaggtccggagcaaactcaaggaaactttggcgatcaggaattaatccgccaggggaccgactacaaacactggccgcaaattgcccagttcgccccatccgctagtgcattcttcggtatgagccgcatcggcatggaagtaacgccaagtggtacgtggctgacctacaccggtgctatcaagcttgatgacaaggacccgaactttaaagaccaggttattctgcttaacaaacatattgatgcctataaaactttcccgccgaccgaacccaaaaaggacaaaaagaaaaaagctgatgaaacccaggctctaccgcagcgtcagaaaaaacagcaaactgtgactctgctgccagctgcggacctggatgatttttccaagcagctgcaacagtctatgagctctgcggactctacgcaggctggtggttctggtcaccatcatcaccatcattaa

SEQ ID NO: 2867 - DNA, 2421 bp, Artificial Sequence
  Description of Artificial Sequence: Synthetic polynucleotide
atgaaaatcgaagaaggtaaactggtaatctggattaacggcgataaaggctataacggtctcgctgaagtcggtaagaaattcgagaaagataccggaattaaagtcaccgttgagcatccggataaactggaagagaaattcccacaggttgcggcaactggcgatggccctgacattatcttctgggcacacgaccgctttggtggctacgctcaatctggcctgttggctgaaatcaccccggacaaagcgttccaggacaagctgtatccgtttacctgggatgccgtacgttacaacggcaagctgattgcttacccgatcgctgttgaagcgttatcgctgatttataacaaagatctgctgccgaacccgccaaaaacctgggaagagatcccggcgctggataaagaactgaaagcgaaaggtaagagcgcgctgatgttcaacctgcaagaaccgtacttcacctggccgctgattgctgctgacgggggttatgcgttcaagtatgaaaacggcaagtacgacattaaagacgtgggcgtggataacgctggcgcgaaagcgggtctgaccttcctggttgacctgattaaaaacaaacacatgaatgcagacaccgattactccatcgcagaagctgcctttaataaaggcgaaacagcgatgaccatcaacggcccgtgggcatggtccaacatcgacaccagcaaagtgaattatggtgtaacggtactgccgaccttcaagggtcaaccatccaaaccgttcgttggcgtgctgagcgcaggtattaacgccgccagtccgaacaaagagctggcgaaagagttcctcgaaaactatctgctgactgatgaaggtctggaagcggttaataaagacaaaccgctgggtgccgtagcgctgaagtcttacgaggaagagttggcgaaagatccacgtattgccgccaccatggaaaacgcccagaaaggtgaaatcatgccgaacatcccgcagatgtccgctttctggtatgccgtgcgtactgcggtgatcaacgccgccagcggtcgtcagactgtcgatgaagccctgaaagacgcgcagactggtggttctggtgagaacctgtactttcaaagctcagataatgggcctcaaaaccagcgcaacgctccacgtataaccttcggtggcccgtctgactccacaggcagcaaccagaatggtgagcgtagtggagccaggtctaagcagcgccgtccccagggtctgccgaacaacacggcgagctggtttactgcgcttacccaacacggtaaagaagacttaaaattcccgcgtggccagggcgtcccgatcaacactaactcttccccggatgatcagattggttattaccgcagagcaactcgtcggattcgcggcggcgacggtaaaatgaaagatttgtctccgcgttggtacttttactatctcggcaccggtccggaagctggactgccctacggggcaaacaaggacgggatcatttgggtggctaccgaaggtgccctgaatactccaaaagatcatatcggcacccgtaaccctgctaataacgctgcgatcgttctgcaactgcctcagggtacaactctgccaaaaggcttctatgcagaagggtcgcgtggtggcagccaggcgagtagccgtagcagctcccgctctcgcaactcgtcccgtaactccactccgggctcttctcgcggcacgtccccggctcgtatggcaggtaacggtggtgacgctgctctggcgctgctactgctggacaggctgaaccagctggagtcgaagatgagtggtaaaggccaacagcagcagggccagaccgttaccaaaaagagcgcagctgaagcatctaaaaaaccgcgacagaaacgtaccgcgactaaagcgtacaatgtaacacaggccttcggtcgtcgaggtccggagcaaactcaaggaaactttggcgatcaggaattaatccgccaggggaccgactacaaacactggccgcaaattgcccagttcgccccatccgctagtgcattcttcggtatgagccgcatcggcatggaagtacaaccaagtggtacgtggctgacctacaccggtgctatcaagcttgatgacaaggacccgaactttaaagaccaggttattctgcttaacaaacatattgatgcctataaaactttcccgccgaccgaacccaaaaaggacaaaaagaaaaaagctgatgaaacccaggctctaccgcagcgtcagaaaaaacagcaaactgtgactctgctgccagctgcggacctggatgatttttccaagcagctgcaacagtctatgagctctgcggactctacgcaggctggtggttctggtcaccatcatcaccatcattaa

SEQ ID NO: 2868 - DNA, 2421 bp, Artificial Sequence
  Description of Artificial Sequence: Synthetic polynucleotide
atgaaaatcgaagaaggtaaactggtaatctggattaacggcgataaaggctataacggtctcgctgaagtcggtaagaaattcgagaaagataccggaattaaagtcaccgttgagcatccggataaactggaagagaaattcccacaggttgcggcaactggcgatggccctgacattatcttctgggcacacgaccgctttggtggctacgctcaatctggcctgttggctgaaatcaccccggacaaagcgttccaggacaagctgtatccgtttacctgggatgccgtacgttacaacggcaagctgattgcttacccgatcgctgttgaagcgttatcgctgatttataacaaagatctgctgccgaacccgccaaaaacctgggaagagatcccggcgctggataaagaactgaaagcgaaaggtaagagcgcgctgatgttcaacctgcaagaaccgtacttcacctggccgctgattgctgctgacgggggttatgcgttcaagtatgaaaacggcaagtacgacattaaagacgtgggcgtggataacgctggcgcgaaagcgggtctgaccttcctggttgacctgattaaaaacaaacacatgaatgcagacaccgattactccatcgcagaagctgcctttaataaaggcgaaacagcgatgaccatcaacggcccgtgggcatggtccaacatcgacaccagcaaagtgaattatggtgtaacggtactgccgaccttcaagggtcaaccatccaaaccgttcgttggcgtgctgagcgcaggtattaacgccgccagtccgaacaaagagctggcgaaagagttcctcgaaaactatctgctgactgatgaaggtctggaagcggttaataaagacaaaccgctgggtgccgtagcgctgaagtcttacgaggaagagttggcgaaagatccacgtattgccgccaccatggaaaacgcccagaaaggtgaaatcatgccgaacatcccgcagatgtccgctttctggtatgccgtgcgtactgcggtgatcaacgccgccagcggtcgtcagactgtcgatgaagccctgaaagacgcgcagactggtggttctggtgagaacctgtactttcaaagctcagataatgggcctcaaaaccagcgcaacgctccacgtataaccttcggtggcccgtctgactccacaggcagcaaccagaatggtgagcgtagtggagccaggtctaagcagcgccgtccccagggtctgccgaacaacacggcgagctggtttactgcgcttacccaacacggtaaagaagacttaaaattcccgcgtggccagggcgtcccgatcaacactaactcttccccggatgatcagattggttattaccgcagagcaactcgtcggattcgcggcggcgacggtaaaatgaaagatttgtctccgcgttggtacttttactatctcggcaccggtccggaagctggactgccctacggggcaaacaaggacgggatcatttgggtggctaccgaaggtgccctgaatactccaaaagatcatatcggcacccgtaaccctgctaataacgctgcgatcaaactgcaactgcctcagggtacaactctgccaaaaggcttctatgcagaagggtcgcgtggtggcagccaggcgagtagccgtagcagctcccgctctcgcaactcgtcccgtaactccactccgggctcttctcgcggcacgtccccggctcgtatggcaggtaacggtggtgacgctgctctggcgctgctactgctggacaggctgaaccagctggagtcgaagatgagtggtaaaggccaacagcagcagggccagaccgttaccaaaaagagcgcagctgaagcatctaaaaaaccgcgacagaaacgtaccgcgactaaagcgtacaatgtaacacaggccttcggtcgtcgaggtccggagcaaactcaaggaaactttggcgatcaggaattaatccgccaggggaccgactacaaacactggccgcaaattgcccagttcgccccatccgctagtgcattcttcggtatgagccgcatcggcatggaagtaacgccaagtggtacgtggctgacctacaccggtgctatcaagcttgatgacaaggacccgaactttaaagaccaggttattctgcttaacaaacatattgatgcctataaaactttcccgccgaccgaacccaaaaaggacaaaaagaaaaaagctgatgaaacccaggctctaccgcagcgtcagaaaaaacagcaaactgtgactctgctgccagctgcggacctggatgatttttccaagcagctgcaacagtctatgagctctgcggactctacgcaggctggtggttctggtcaccatcatcaccatcattaa

SEQ ID NO: 2869 - DNA, 2421 bp, Artificial Sequence
  Description of Artificial Sequence: Synthetic polynucleotide
atgaaaatcgaagaaggtaaactggtaatctggattaacggcgataaaggctataacggtctcgctgaagtcggtaagaaattcgagaaagataccggaattaaagtcaccgttgagcatccggataaactggaagagaaattcccacaggttgcggcaactggcgatggccctgacattatcttctgggcacacgaccgctttggtggctacgctcaatctggcctgttggctgaaatcaccccggacaaagcgttccaggacaagctgtatccgtttacctgggatgccgtacgttacaacggcaagctgattgcttacccgatcgctgttgaagcgttatcgctgatttataacaaagatctgctgccgaacccgccaaaaacctgggaagagatcccggcgctggataaagaactgaaagcgaaaggtaagagcgcgctgatgttcaacctgcaagaaccgtacttcacctggccgctgattgctgctgacgggggttatgcgttcaagtatgaaaacggcaagtacgacattaaagacgtgggcgtggataacgctggcgcgaaagcgggtctgaccttcctggttgacctgattaaaaacaaacacatgaatgcagacaccgattactccatcgcagaagctgcctttaataaaggcgaaacagcgatgaccatcaacggcccgtgggcatggtccaacatcgacaccagcaaagtgaattatggtgtaacggtactgccgaccttcaagggtcaaccatccaaaccgttcgttggcgtgctgagcgcaggtattaacgccgccagtccgaacaaagagctggcgaaagagttcctcgaaaactatctgctgactgatgaaggtctggaagcggttaataaagacaaaccgctgggtgccgtagcgctgaagtcttacgaggaagagttggcgaaagatccacgtattgccgccaccatggaaaacgcccagaaaggtgaaatcatgccgaacatcccgcagatgtccgctttctggtatgccgtgcgtactgcggtgatcaacgccgccagcggtcgtcagactgtcgatgaagccctgaaagacgcgcagactggtggttctggtgagaacctgtactttcaaagctcagataatgggcctcaaaaccagcgcaacgctccacgtataaccttcggtggcccgtctgactccacaggcagcaaccagaatggtgagcgtagtggagccaggtctaagcagcgccgtccccagggtctgccgaacaacacggcgagctggtttactccgcttacccaatttggtaaagaagacttaaaattcccgcccggccagggcgtcccgatcaacactaactcttccccggatgatcagattggttattaccgcagagcaactcgtcggattcgcggcggcgacggtaaaatgaaagatttgccaccgaagtggtacttttactatctcggcaccggtccgcacgctgatctgccctacgggcaaaaacaagacggggttttttgggtggctcggcctggtgccctgaatactccaaaagatcatatcggcacccgtaaccctgctaataacgctgcgatcccgctgcaactgcctccgggtacaaagctgccaaaaggcttctatgcagaagggtcgcgtggtggcagccaggcgagtagccgtagcagctcccgctctcgcaactcgtcccgtaactccactccgggctcttctcgcggcacgtccccggctcgtatggcaggtaacggtggtgacgctgctctggcgctgctactgctggacaggctgaaccagctggagtcgaagatgagtggtaaaggccaacagcagcagggccagaccgttaccaaaaagagcgcagctgaagcatctaaaaaaccgcgacagaaacgtaccgcgactaaagcgtacaatgtaacacaggccttcggtcgtcgaggtccggagcaaactcaaggaaactttggcgatcaggaattaatccgccaggggaccgactacaaacactggccgcaaattgcccagttcgccccatccgctagtgcattcttcggtatgagccgcatcggcatggaagtaacgccaagtggtacgtggctgacctacaccggtgctatcaagcttgatgacaaggacccgaactttaaagaccaggttattctgcttaacaaacatattgatgcctataaaactttcccgccgaccgaacccaaaaaggacaaaaagaaaaaagctgatgaaacccaggctctaccgcagcgtcagaaaaaacagcaaactgtgactctgctgccagctgcggacctggatgatttttccaagcagctgcaacagtctatgagctctgcggactctacgcaggctggtggttctggtcaccatcatcaccatcattaa

SEQ ID NO: 2870 - DNA, 2421 bp, Artificial Sequence
  Description of Artificial Sequence: Synthetic polynucleotide
atgaaaatcgaagaaggtaaactggtaatctggattaacggcgataaaggctataacggtctcgctgaagtcggtaagaaattcgagaaagataccggaattaaagtcaccgttgagcatccggataaactggaagagaaattcccacaggttgcggcaactggcgatggccctgacattatcttctgggcacacgaccgctttggtggctacgctcaatctggcctgttggctgaaatcaccccggacaaagcgttccaggacaagctgtatccgtttacctgggatgccgtacgttacaacggcaagctgattgcttacccgatcgctgttgaagcgttatcgctgatttataacaaagatctgctgccgaacccgccaaaaacctgggaagagatcccggcgctggataaagaactgaaagcgaaaggtaagagcgcgctgatgttcaacctgcaagaaccgtacttcacctggccgctgattgctgctgacgggggttatgcgttcaagtatgaaaacggcaagtacgacattaaagacgtgggcgtggataacgctggcgcgaaagcgggtctgaccttcctggttgacctgattaaaaacaaacacatgaatgcagacaccgattactccatcgcagaagctgcctttaataaaggcgaaacagcgatgaccatcaacggcccgtgggcatggtccaacatcgacaccagcaaagtgaattatggtgtaacggtactgccgaccttcaagggtcaaccatccaaaccgttcgttggcgtgctgagcgcaggtattaacgccgccagtccgaacaaagagctggcgaaagagttcctcgaaaactatctgctgactgatgaaggtctggaagcggttaataaagacaaaccgctgggtgccgtagcgctgaagtcttacgaggaagagttggcgaaagatccacgtattgccgccaccatggaaaacgcccagaaaggtgaaatcatgccgaacatcccgcagatgtccgctttctggtatgccgtgcgtactgcggtgatcaacgccgccagcggtcgtcagactgtcgatgaagccctgaaagacgcgcagactggtggttctggtgagaacctgtactttcaaagctcagataatgggcctcaaaaccagcgcaacgctccacgtataaccttcggtggcccgtctgactccacaggcagcaaccagaatggtgagcgtagtggagccaggtctaagcagcgccgtccccagggtctgccgaacaacacggcgagctggtttactgcgcttacccaacacggtaaagaagacttaaaattcccgcgtggccagggcgtcccgatcaacactaactcttccccggatgatcagattggttattaccgcagagcaactcgtcggattcgcggcggcgacggtaaaatgaaagatttgtctccgcgttggtacttttactatctcggcaccggtccggaagctggactgccctacggggcaaacaaggacgggatcatttgggtggctaccgaaggtgccctgaatactccaaaagatcatatcggcacccgtaaccctgctaataacgctgcgatcgttctgcaactgcctcagggtacaactctgccaaaaggcttctatgcagaagggtcgcgtggtggcagccaggcgagtagccgtagcagctcccgctctcgcaactcgtcccgtaactccactccgggctcttctcgcggcacgtccccggctcgtatggcaggtaacggtggtgacgctgctctggcgctgctactgctggacaggctgaaccagctggagtcgaagatgagtggtaaaggccaacagcagcagggccagaccgttaccaaaaagagcgcagctgaagcatctaaaaaaccgcgacagaaacgtaccgcgactaaagagtacaatgtaacacaggccttcggtcgtcgaggtccggagcaaactcaaggaaactttggcgatcaggatttaatcaaacttgggaccgactacaaacactggccgcaaattgcccagttcgccccatccgctagtgcattcttcggtatgagccgcatcggcatgcgggaaacgccaagtggtacgtggctgacctacaccggtgctatcaagcttgataagaaggacccgaactttaaagaccaggttattctgcttaacaaacatattgatgcctataaaactttcccgccgaccgaacccaaaaaggacaaaaagaaaaaagctgatgaaacccaggctctaccgcagcgtcagaaaaaacagcaaactgtgactctgctgccagctgcggacctggatgatttttccaagcagctgcaacagtctatgagctctgcggactctacgcaggctggtggttctggtcaccatcatcaccatcattaa

SEQ ID NO: 2871 - DNA, 2421 bp, Artificial Sequence
  Description of Artificial Sequence: Synthetic polynucleotide
atgaaaatcgaagaaggtaaactggtaatctggattaacggcgataaaggctataacggtctcgctgaagtcggtaagaaattcgagaaagataccggaattaaagtcaccgttgagcatccggataaactggaagagaaattcccacaggttgcggcaactggcgatggccctgacattatcttctgggcacacgaccgctttggtggctacgctcaatctggcctgttggctgaaatcaccccggacaaagcgttccaggacaagctgtatccgtttacctgggatgccgtacgttacaacggcaagctgattgcttacccgatcgctgttgaagcgttatcgctgatttataacaaagatctgctgccgaacccgccaaaaacctgggaagagatcccggcgctggataaagaactgaaagcgaaaggtaagagcgcgctgatgttcaacctgcaagaaccgtacttcacctggccgctgattgctgctgacgggggttatgcgttcaagtatgaaaacggcaagtacgacattaaagacgtgggcgtggataacgctggcgcgaaagcgggtctgaccttcctggttgacctgattaaaaacaaacacatgaatgcagacaccgattactccatcgcagaagctgcctttaataaaggcgaaacagcgatgaccatcaacggcccgtgggcatggtccaacatcgacaccagcaaagtgaattatggtgtaacggtactgccgaccttcaagggtcaaccatccaaaccgttcgttggcgtgctgagcgcaggtattaacgccgccagtccgaacaaagagctggcgaaagagttcctcgaaaactatctgctgactgatgaaggtctggaagcggttaataaagacaaaccgctgggtgccgtagcgctgaagtcttacgaggaagagttggcgaaagatccacgtattgccgccaccatggaaaacgcccagaaaggtgaaatcatgccgaacatcccgcagatgtccgctttctggtatgccgtgcgtactgcggtgatcaacgccgccagcggtcgtcagactgtcgatgaagccctgaaagacgcgcagactggtggttctggtgagaacctgtactttcaaagctcagataatgggcctcaaaaccagcgcaacgctccacgtataaccttcggtggcccgtctgactccacaggcagcaaccagaatggtgagcgtagtggagccaggtctaagcagcgccgtccccagggtctgccgaacaacacggcgagctggtttactgcgcttacccaacacggtaaagaagacttaaaattcccgcgtggccagggcgtcccgatcaacactaactcttccccggatgatcagattggttattaccgcagagcaactcgtcggattcgcggcggcgacggtaaaatgaaagatttgtctccgcgttggtacttttactatctcggcaccggtccggaagctggactgccctacggggcaaacaaggacgggatcatttgggtggctaccgaaggtgccctgaatactccaaaagatcatatcggcacccgtaaccctgctaataacgctgcgatcgttctgcaactgcctcagggtacaactctgccaaaaggcttctatgcagaagggtcgcgtggtggcagccaggcgagtagccgtagcagctcccgctctcgcaactcgtcccgtaactccactccgggctcttctcgcggcacgtccccggctcgtatggcaggtaacggtggtgacgctgctctggcgctgctactgctggacaggctgaaccagctggagtcgaagatgagtggtaaaggccaacagcagcagggccagaccgttaccaaaaagagcgcagctgaagcatctaaaaaaccgcgacagaaacgtaccgcgactaaagaatacaatgtaacacaggccttcggtcgtcgaggtccggagcaaactcaaggaaactttggcgatcaggatttaatcaaactcgggaccgactacaaacactggccgcaaattgcccagttcgccccatccgctagtgcattcttcggtatgagccgcatcggcatggaagaaacgccaagtggtacgtggctgacctacaccggtgctatcaagcttgataaaaaggacccgaactttaaagaccaggttattctgcttaacaaacatattgatgcctataaaactttcccgccgaccgaacccaaaaaggacaaaaagaaaaaagctgatgaaacccaggctctaccgcagcgtcagaaaaaacagcaaactgtgactctgctgccagctgcggacctggatgatttttccaagcagctgcaacagtctatgagctctgcggactctacgcaggctggtggttctggtcaccatcatcaccatcattaa

SEQ ID NO: 2872 - DNA, 2421 bp, Artificial Sequence
  Description of Artificial Sequence: Synthetic polynucleotide
atgaaaatcgaagaaggtaaactggtaatctggattaacggcgataaaggctataacggtctcgctgaagtcggtaagaaattcgagaaagataccggaattaaagtcaccgttgagcatccggataaactggaagagaaattcccacaggttgcggcaactggcgatggccctgacattatcttctgggcacacgaccgctttggtggctacgctcaatctggcctgttggctgaaatcaccccggacaaagcgttccaggacaagctgtatccgtttacctgggatgccgtacgttacaacggcaagctgattgcttacccgatcgctgttgaagcgttatcgctgatttataacaaagatctgctgccgaacccgccaaaaacctgggaagagatcccggcgctggataaagaactgaaagcgaaaggtaagagcgcgctgatgttcaacctgcaagaaccgtacttcacctggccgctgattgctgctgacgggggttatgcgttcaagtatgaaaacggcaagtacgacattaaagacgtgggcgtggataacgctggcgcgaaagcgggtctgaccttcctggttgacctgattaaaaacaaacacatgaatgcagacaccgattactccatcgcagaagctgcctttaataaaggcgaaacagcgatgaccatcaacggcccgtgggcatggtccaacatcgacaccagcaaagtgaattatggtgtaacggtactgccgaccttcaagggtcaaccatccaaaccgttcgttggcgtgctgagcgcaggtattaacgccgccagtccgaacaaagagctggcgaaagagttcctcgaaaactatctgctgactgatgaaggtctggaagcggttaataaagacaaaccgctgggtgccgtagcgctgaagtcttacgaggaagagttggcgaaagatccacgtattgccgccaccatggaaaacgcccagaaaggtgaaatcatgccgaacatcccgcagatgtccgctttctggtatgccgtgcgtactgcggtgatcaacgccgccagcggtcgtcagactgtcgatgaagccctgaaagacgcgcagactggtggttctggtgagaacctgtactttcaaagctcagataatgggcctcaaaaccagcgcaacgctccacgtataaccttcggtggcccgtctgactccacaggcagcaaccagaatggtgagcgtagtggagccaggtctaagcagcgccgtccccagggtctgccgaacaacacggcgagctggtttactgcgcttacccaacacggtaaagaagacttaaaattcccgcctggccagggcgtcccgatcaacccgaactctaaaccggatgatcagattggttattggcgcagacaagtgcgtcggtaccgcggcggcgacggtcaaatgaaagatttgcccccgcgttggtacttttactatctcggcaccggtccggaagctggactgccctacggggcaaacaaggacgggatcatttgggtggctaccgaaggtgccctgaatactccaaaagatcatatcggcacccgtaaccctgctaataacgctgcgatcgttctgcaactgcctcagggtacaactctgccaaaaggcttctatgcagaagggtcgcgtggtggcagccaggcgagtagccgtagcagctcccgctctcgcaactcgtcccgtaactccactccgggctcttctcgcggcacgtccccggctcgtatggcaggtaacggtggtgacgctgctctggcgctgctactgctggacaggctgaaccagctggagtcgaagatgagtggtaaaggccaacagcagcagggccagaccgttaccaaaaagagcgcagctgaagcatctaaaaaaccgcgacagaaacgtaccgcgactaaagcgtacaatgtaacacaggccttcggtcgtcgaggtccggagcaaactcaaggaaactttggcgatcaggaattaatccgccaggggaccgactacaaacactggccgcaaattgcccagttcgccccatccgctagtgcattcttcggtatgagccgcatcggcatggaagtaacgccaagtggtacgtggctgacctacaccggtgctatcaagcttgatgacaaggacccgaactttaaagaccaggttattctgcttaacaaacatattgatgcctataaaactttcccgccgaccgaacccaaaaaggacaaaaagaaaaaagctgatgaaacccaggctctaccgcagcgtcagaaaaaacagcaaactgtgactctgctgccagctgcggacctggatgatttttccaagcagctgcaacagtctatgagctctgcggactctacgcaggctggtggttctggtcaccatcatcaccatcattaa

SEQ ID NO: 2873 - DNA, 2421 bp, Artificial Sequence
  Description of Artificial Sequence: Synthetic polynucleotide
atgaaaatcgaagaaggtaaactggtaatctggattaacggcgataaaggctataacggtctcgctgaagtcggtaagaaattcgagaaagataccggaattaaagtcaccgttgagcatccggataaactggaagagaaattcccacaggttgcggcaactggcgatggccctgacattatcttctgggcacacgaccgctttggtggctacgctcaatctggcctgttggctgaaatcaccccggacaaagcgttccaggacaagctgtatccgtttacctgggatgccgtacgttacaacggcaagctgattgcttacccgatcgctgttgaagcgttatcgctgatttataacaaagatctgctgccgaacccgccaaaaacctgggaagagatcccggcgctggataaagaactgaaagcgaaaggtaagagcgcgctgatgttcaacctgcaagaaccgtacttcacctggccgctgattgctgctgacgggggttatgcgttcaagtatgaaaacggcaagtacgacattaaagacgtgggcgtggataacgctggcgcgaaagcgggtctgaccttcctggttgacctgattaaaaacaaacacatgaatgcagacaccgattactccatcgcagaagctgcctttaataaaggcgaaacagcgatgaccatcaacggcccgtgggcatggtccaacatcgacaccagcaaagtgaattatggtgtaacggtactgccgaccttcaagggtcaaccatccaaaccgttcgttggcgtgctgagcgcaggtattaacgccgccagtccgaacaaagagctggcgaaagagttcctcgaaaactatctgctgactgatgaaggtctggaagcggttaataaagacaaaccgctgggtgccgtagcgctgaagtcttacgaggaagagttggcgaaagatccacgtattgccgccaccatggaaaacgcccagaaaggtgaaatcatgccgaacatcccgcagatgtccgctttctggtatgccgtgcgtactgcggtgatcaacgccgccagcggtcgtcagactgtcgatgaagccctgaaagacgcgcagactggtggttctggtgagaacctgtactttcaaagctcagataatgggcctcaaaaccagcgcaacgctccacgtataaccttcggtggcccgtctgactccacaggcagcaaccagaatggtgagcgtagtggagccaggtctaagcagcgccgtccccagggtctgccgaacaacacggcgagctggtttactgcgcttacccaacacggtaaagaagacttaaaattcccgcgtggccagggcgtcccgatcaacactaactcttccccggatgatcagattggttattaccgcagagcaactcgtcggattcgcggcggcgacggtaaaatgaaagatttgtctccgcgttggtacttttactatctcggcaccggtccggaagctggactgccctacggggcaaacaaggacgggatcatttgggtggctaccgaaggtgccctgaatactccaaaagatcatatcggcacccgtaaccctgctaataacgctgcgatcgttctgcaactgcctcagggtacaactctgccaaaaggcttctatgcagaagggtcgcgtggtggcagccaggcgagtagccgtagcagctcccgctctcgcaactcgtcccgtaactccactccgggctcttctcgcggcacgtccccggctcgtatggcaggtaacggtggtgacgctgctctggcgctgctactgctggacaggctgaaccagctggagtcgaagatgagtggtaaaggccaacagcagcagggccagaccgttaccaaaaagagcgcagctgaagcatctaaaaaaccgcgacagaaacgtaccgcgactaaagattacaatgtaacacaggccttcggtcgtcgaggtccggagcaaactcaaggaaactttggcgatcaggatttaatcaaattggggaccgactacaaacactggccgcaaattgcccagttcgccccatccgctagtgcattcttcggtatgagccgcatcagtaccgaagaaacgccaagtggtacgtggctgacctacaccggtgctatcaagcttgataagaaggacccgaactttaaagaccaggttattctgcttaacaaacatattgatgcctataaaactttcccgccgaccgaacccaaaaaggacaaaaagaaaaaagctgatgaaacccaggctctaccgcagcgtcagaaaaaacagcaaactgtgactctgctgccagctgcggacctggatgatttttccaagcagctgcaacagtctatgagctctgcggactctacgcaggctggtggttctggtcaccatcatcaccatcattaa

SEQ ID NO: 2874 - DNA, 2421 bp, Artificial Sequence
  Description of Artificial Sequence: Synthetic polynucleotide
atgaaaatcgaagaaggtaaactggtaatctggattaacggcgataaaggctataacggtctcgctgaagtcggtaagaaattcgagaaagataccggaattaaagtcaccgttgagcatccggataaactggaagagaaattcccacaggttgcggcaactggcgatggccctgacattatcttctgggcacacgaccgctttggtggctacgctcaatctggcctgttggctgaaatcaccccggacaaagcgttccaggacaagctgtatccgtttacctgggatgccgtacgttacaacggcaagctgattgcttacccgatcgctgttgaagcgttatcgctgatttataacaaagatctgctgccgaacccgccaaaaacctgggaagagatcccggcgctggataaagaactgaaagcgaaaggtaagagcgcgctgatgttcaacctgcaagaaccgtacttcacctggccgctgattgctgctgacgggggttatgcgttcaagtatgaaaacggcaagtacgacattaaagacgtgggcgtggataacgctggcgcgaaagcgggtctgaccttcctggttgacctgattaaaaacaaacacatgaatgcagacaccgattactccatcgcagaagctgcctttaataaaggcgaaacagcgatgaccatcaacggcccgtgggcatggtccaacatcgacaccagcaaagtgaattatggtgtaacggtactgccgaccttcaagggtcaaccatccaaaccgttcgttggcgtgctgagcgcaggtattaacgccgccagtccgaacaaagagctggcgaaagagttcctcgaaaactatctgctgactgatgaaggtctggaagcggttaataaagacaaaccgctgggtgccgtagcgctgaagtcttacgaggaagagttggcgaaagatccacgtattgccgccaccatggaaaacgcccagaaaggtgaaatcatgccgaacatcccgcagatgtccgctttctggtatgccgtgcgtactgcggtgatcaacgccgccagcggtcgtcagactgtcgatgaagccctgaaagacgcgcagactggtggttctggtgagaacctgtactttcaaagctcagataatgggcctcaaaaccagcgcaacgctccacgtataaccttcggtggcccgtctgactccacaggcagcaaccagaatggtgagcgtagtggagccaggtctaagcagcgccgtccccagggtctgccgaacaacacggcgagctggtttactgcgcttacccaacacggtaaagaagacttaaaattcccgcgtggccagggcgtcccgatcaacactaactcttccccggatgatcagattggttattaccgcagagcaactcgtcggattcgcggcggcgacggtaaaatgaaagatttgtctccgcgttggtacttttactatctcggcaccggtccggaagctggactgccctacggggcaaacaaggacgggatcatttgggtggctcgagaaggtgccctgaatactccaaaagatcatatcggcacccgtaaccctgctaataacgctgcgatcgttctgcaactgcctcagggtacaactctgccaaaaggcttctatgcagaagggtcgcgtggtggcagccaggcgagtagccgtagcagctcccgctctcgcaactcgtcccgtaactccactccgggctcttctcgcggcacgtccccggctcgtatggcaggtaacggtggtgacgctgctctggcgctgctactgctggacaggctgaaccagctggagtcgaagatgagtggtaaaggccaacagcagcagggccagaccgttaccaaaaagagcgcagctgaagcatctaaaaaaccgcgacagaaacgtaccgcgactaaagcgtacaatgtaacacaggccttcggtcgtcgaggtccggagcaaactcaaggaaactttggcgatcaggaattaatccgccaggggaccgactacaaacactggccgcaaattgcccagttcgccccatccgctagtgcattcttcggtatgagccgcatcggcatggaagtaacgccaagtggtacgtggctgacctacaccggtgctatcaagcttgatgacaaggacccgaactttaaagaccaggttattctgcttaacaaacatattgatgcctataaaactttcccgccgaccgaacccaaaaaggacaaaaagaaaaaagctgatgaaacccaggctctaccgcagcgtcagaaaaaacagcaaactgtgactctgctgccagctgcggacctggatgatttttccaagcagctgcaacagtctatgagctctgcggactctacgcaggctggtggttctggtcaccatcatcaccatcattaa

SEQ ID NO: 2875 - DNA, 2421 bp, Artificial Sequence
  Description of Artificial Sequence: Synthetic polynucleotide
atgaaaatcgaagaaggtaaactggtaatctggattaacggcgataaaggctataacggtctcgctgaagtcggtaagaaattcgagaaagataccggaattaaagtcaccgttgagcatccggataaactggaagagaaattcccacaggttgcggcaactggcgatggccctgacattatcttctgggcacacgaccgctttggtggctacgctcaatctggcctgttggctgaaatcaccccggacaaagcgttccaggacaagctgtatccgtttacctgggatgccgtacgttacaacggcaagctgattgcttacccgatcgctgttgaagcgttatcgctgatttataacaaagatctgctgccgaacccgccaaaaacctgggaagagatcccggcgctggataaagaactgaaagcgaaaggtaagagcgcgctgatgttcaacctgcaagaaccgtacttcacctggccgctgattgctgctgacgggggttatgcgttcaagtatgaaaacggcaagtacgacattaaagacgtgggcgtggataacgctggcgcgaaagcgggtctgaccttcctggttgacctgattaaaaacaaacacatgaatgcagacaccgattactccatcgcagaagctgcctttaataaaggcgaaacagcgatgaccatcaacggcccgtgggcatggtccaacatcgacaccagcaaagtgaattatggtgtaacggtactgccgaccttcaagggtcaaccatccaaaccgttcgttggcgtgctgagcgcaggtattaacgccgccagtccgaacaaagagctggcgaaagagttcctcgaaaactatctgctgactgatgaaggtctggaagcggttaataaagacaaaccgctgggtgccgtagcgctgaagtcttacgaggaagagttggcgaaagatccacgtattgccgccaccatggaaaacgcccagaaaggtgaaatcatgccgaacatcccgcagatgtccgctttctggtatgccgtgcgtactgcggtgatcaacgccgccagcggtcgtcagactgtcgatgaagccctgaaagacgcgcagactggtggttctggtgagaacctgtactttcaaagctcagataatgggcctcaaaaccagcgcaacgctccacgtataaccttcggtggcccgtctgactccacaggcagcaaccagaatggtgagcgtagtggagccaggtctaagcagcgccgtccccagggtctgccgaacaacacggcgagctggtttactccgcttacccaaaatggtaaagaagacttaaaattcccgccaggccagggcgtcccgatcaacactaactcttccccggatgatcagattggttattaccgcagagcaactcgtcggattcgcggcggcgacggtaaaatgaaagatttgcctccgaagtggtacttttactatctcggcaccggtccgcacgctgatctgccctacgggcaaaaacaagacggggtattttgggtggctcgacccggtgccctgaatactccaaaagatcatatcggcacccgtaaccctgctaataacgctgcgatcccgctgcaactgcctccgggtacaaagctgccaaaaggcttctatgcagaagggtcgcgtggtggcagccaggcgagtagccgtagcagctcccgctctcgcaactcgtcccgtaactccactccgggctcttctcgcggcacgtccccggctcgtatggcaggtaacggtggtgacgctgctctggcgctgctactgctggacaggctgaaccagctggagtcgaagatgagtggtaaaggccaacagcagcagggccagaccgttaccaaaaagagcgcagctgaagcatctaaaaaaccgcgacagaaacgtaccgcgactaaagcgtacaatgtaacacaggccttcggtcgtcgaggtccggagcaaactcaaggaaactttggcgatcaggaattaatccgccaggggaccgactacaaacactggccgcaaattgcccagttcgccccatccgctagtgcattcttcggtatgagccgcatcggcatggaagtaacgccaagtggtacgtggctgacctacaccggtgctatcaagcttgatgacaaggacccgaactttaaagaccaggttattctgcttaacaaacatattgatgcctataaaactttcccgccgaccgaacccaaaaaggacaaaaagaaaaaagctgatgaaacccaggctctaccgcagcgtcagaaaaaacagcaaactgtgactctgctgccagctgcggacctggatgatttttccaagcagctgcaacagtctatgagctctgcggactctacgcaggctggtggttctggtcaccatcatcaccatcattaa

SEQ ID NO: 2876 - DNA, 2421 bp, Artificial Sequence
  Description of Artificial Sequence: Synthetic polynucleotide
atgaaaatcgaagaaggtaaactggtaatctggattaacggcgataaaggctataacggtctcgctgaagtcggtaagaaattcgagaaagataccggaattaaagtcaccgttgagcatccggataaactggaagagaaattcccacaggttgcggcaactggcgatggccctgacattatcttctgggcacacgaccgctttggtggctacgctcaatctggcctgttggctgaaatcaccccggacaaagcgttccaggacaagctgtatccgtttacctgggatgccgtacgttacaacggcaagctgattgcttacccgatcgctgttgaagcgttatcgctgatttataacaaagatctgctgccgaacccgccaaaaacctgggaagagatcccggcgctggataaagaactgaaagcgaaaggtaagagcgcgctgatgttcaacctgcaagaaccgtacttcacctggccgctgattgctgctgacgggggttatgcgttcaagtatgaaaacggcaagtacgacattaaagacgtgggcgtggataacgctggcgcgaaagcgggtctgaccttcctggttgacctgattaaaaacaaacacatgaatgcagacaccgattactccatcgcagaagctgcctttaataaaggcgaaacagcgatgaccatcaacggcccgtgggcatggtccaacatcgacaccagcaaagtgaattatggtgtaacggtactgccgaccttcaagggtcaaccatccaaaccgttcgttggcgtgctgagcgcaggtattaacgccgccagtccgaacaaagagctggcgaaagagttcctcgaaaactatctgctgactgatgaaggtctggaagcggttaataaagacaaaccgctgggtgccgtagcgctgaagtcttacgaggaagagttggcgaaagatccacgtattgccgccaccatggaaaacgcccagaaaggtgaaatcatgccgaacatcccgcagatgtccgctttctggtatgccgtgcgtactgcggtgatcaacgccgccagcggtcgtcagactgtcgatgaagccctgaaagacgcgcagactggtggttctggtgagaacctgtactttcaaagctcagataatgggcctcaaaaccagcgcaacgctccacgtataaccttcggtggcccgtctgactccacaggcagcaaccagaatggtgagcgtagtggagccaggtctaagcagcgccgtccccagggtctgccgaacaacacggcgagctggtttactgcgcttacccaacacggtaaagaagacttaaaattcccgcgtggccagggcgtcccgatcaacactaactcttccccggatgatcagattggttattaccgcagagcaactcgtcggattcgcggcggcgacggtaaaatgaaagatttgtctccgcgttggtacttttactatctcggcaccggtccggaagctggactgccctacggggcaaacaaggacgggatcatttgggtggctaccgaaggtgccctgaatactccaaaagatcatatcggcacccgtaaccctgctaataacgctgcgatcgttctgcaactgcctcagggtacaactctgccaaaaggcttctatgcagaagggtcgcgtggtggcagccaggcgagtagccgtagcagctcccgctctcgcaactcgtcccgtaactccactccgggctcttctcgcggcacgtccccggctcgtatggcaggtaacggtggtgacgctgctctggcgctgctactgctggacaggctgaaccagctggagtcgaagatgagtggtaaaggccaacagcagcagggccagaccgttaccaaaaagagcgcagctgaagcatctaaaaaaccgcgacagaaacgtaccgcgactaaagcgtacaatgtaacacaggccttcggtcgtcgaggtccggagcaaactcaaggaaactttggcgatcaggaattaatccgcttggggaccgactacaaacactggccgcaaattgcccagttcgccccatccgctagtgcattcttcggtatgagccgcatcggcatggaagtaacgccaagtggtacgtggctgacctacaccggtgctatcaagcttgatgacaaggacccgaactttaaagaccaggttattctgcttaacaaacatattgatgcctataaaactttcccgccgaccgaacccaaaaaggacaaaaagaaaaaagctgatgaaacccaggctctaccgcagcgtcagaaaaaacagcaaactgtgactctgctgccagctgcggacctggatgatttttccaagcagctgcaacagtctatgagctctgcggactctacgcaggctggtggttctggtcaccatcatcaccatcattaa

SEQ ID NO: 2877 - DNA, 2421 bp, Artificial Sequence
  Description of Artificial Sequence: Synthetic polynucleotide
atgaaaatcgaagaaggtaaactggtaatctggattaacggcgataaaggctataacggtctcgctgaagtcggtaagaaattcgagaaagataccggaattaaagtcaccgttgagcatccggataaactggaagagaaattcccacaggttgcggcaactggcgatggccctgacattatcttctgggcacacgaccgctttggtggctacgctcaatctggcctgttggctgaaatcaccccggacaaagcgttccaggacaagctgtatccgtttacctgggatgccgtacgttacaacggcaagctgattgcttacccgatcgctgttgaagcgttatcgctgatttataacaaagatctgctgccgaacccgccaaaaacctgggaagagatcccggcgctggataaagaactgaaagcgaaaggtaagagcgcgctgatgttcaacctgcaagaaccgtacttcacctggccgctgattgctgctgacgggggttatgcgttcaagtatgaaaacggcaagtacgacattaaagacgtgggcgtggataacgctggcgcgaaagcgggtctgaccttcctggttgacctgattaaaaacaaacacatgaatgcagacaccgattactccatcgcagaagctgcctttaataaaggcgaaacagcgatgaccatcaacggcccgtgggcatggtccaacatcgacaccagcaaagtgaattatggtgtaacggtactgccgaccttcaagggtcaaccatccaaaccgttcgttggcgtgctgagcgcaggtattaacgccgccagtccgaacaaagagctggcgaaagagttcctcgaaaactatctgctgactgatgaaggtctggaagcggttaataaagacaaaccgctgggtgccgtagcgctgaagtcttacgaggaagagttggcgaaagatccacgtattgccgccaccatggaaaacgcccagaaaggtgaaatcatgccgaacatcccgcagatgtccgctttctggtatgccgtgcgtactgcggtgatcaacgccgccagcggtcgtcagactgtcgatgaagccctgaaagacgcgcagactggtggttctggtgagaacctgtactttcaaagctcagataatgggcctcaaaaccagcgcaacgctccacgtataaccttcggtggcccgtctgactccacaggcagcaaccagaatggtgagcgtagtggagccaggtctaagcagcgccgtccccagggtctgccgaacaacacggcgagctggtttactccgcttacccaacacggtaaagaagacttaaaattcccgccgggccagggcgtcccgatcaacactaactcttccccggatgatcagattggttattaccgcagagcaactcgtcggattcgcggcggcgacggtaaaatgaaagatttgccaccgaagtggtacttttactatctcggcaccggtccgcatgctgatctgccctacgggcaaaaacaagacggggtagtgtgggtggctcgaccaggtgccctgaatactccaaaagatcatatcggcacccgtaaccctgctaataacgctgcgatccctctgcaactgcctccgggtacaaaactgccaaaaggcttctatgcagaagggtcgcgtggtggcagccaggcgagtagccgtagcagctcccgctctcgcaactcgtcccgtaactccactccgggctcttctcgcggcacgtccccggctcgtatggcaggtaacggtggtgacgctgctctggcgctgctactgctggacaggctgaaccagctggagtcgaagatgagtggtaaaggccaacagcagcagggccagaccgttaccaaaaagagcgcagctgaagcatctaaaaaaccgcgacagaaacgtaccgcgactaaagcgtacaatgtaacacaggccttcggtcgtcgaggtccggagcaaactcaaggaaactttggcgatcaggaattaatccgccaggggaccgactacaaacactggccgcaaattgcccagttcgccccatccgctagtgcattcttcggtatgagccgcatcggcatggaagtaacgccaagtggtacgtggctgacctacaccggtgctatcaagcttgatgacaaggacccgaactttaaagaccaggttattctgcttaacaaacatattgatgcctataaaactttcccgccgaccgaacccaaaaaggacaaaaagaaaaaagctgatgaaacccaggctctaccgcagcgtcagaaaaaacagcaaactgtgactctgctgccagctgcggacctggatgatttttccaagcagctgcaacagtctatgagctctgcggactctacgcaggctggtggttctggtcaccatcatcaccatcattaa

SEQ ID NO: 2878 - DNA, 2421 bp, Artificial Sequence
  Description of Artificial Sequence: Synthetic polynucleotide
atgaaaatcgaagaaggtaaactggtaatctggattaacggcgataaaggctataacggtctcgctgaagtcggtaagaaattcgagaaagataccggaattaaagtcaccgttgagcatccggataaactggaagagaaattcccacaggttgcggcaactggcgatggccctgacattatcttctgggcacacgaccgctttggtggctacgctcaatctggcctgttggctgaaatcaccccggacaaagcgttccaggacaagctgtatccgtttacctgggatgccgtacgttacaacggcaagctgattgcttacccgatcgctgttgaagcgttatcgctgatttataacaaagatctgctgccgaacccgccaaaaacctgggaagagatcccggcgctggataaagaactgaaagcgaaaggtaagagcgcgctgatgttcaacctgcaagaaccgtacttcacctggccgctgattgctgctgacgggggttatgcgttcaagtatgaaaacggcaagtacgacattaaagacgtgggcgtggataacgctggcgcgaaagcgggtctgaccttcctggttgacctgattaaaaacaaacacatgaatgcagacaccgattactccatcgcagaagctgcctttaataaaggcgaaacagcgatgaccatcaacggcccgtgggcatggtccaacatcgacaccagcaaagtgaattatggtgtaacggtactgccgaccttcaagggtcaaccatccaaaccgttcgttggcgtgctgagcgcaggtattaacgccgccagtccgaacaaagagctggcgaaagagttcctcgaaaactatctgctgactgatgaaggtctggaagcggttaataaagacaaaccgctgggtgccgtagcgctgaagtcttacgaggaagagttggcgaaagatccacgtattgccgccaccatggaaaacgcccagaaaggtgaaatcatgccgaacatcccgcagatgtccgctttctggtatgccgtgcgtactgcggtgatcaacgccgccagcggtcgtcagactgtcgatgaagccctgaaagacgcgcagactggtggttctggtgagaacctgtactttcaaagctcagataatgggcctcaaaaccagcgcaacgctccacgtataaccttcggtggcccgtctgactccacaggcagcaaccagaatggtgagcgtagtggagccaggtctaagcagcgccgtccccagggtctgccgaacaacacggcgagctggtttactgcgcttacccaacacggtaaagaagacttaaaattcccgcgtggccagggcgtcccgatcaacactaactcttccccggatgatcagattggttattaccgcagagcaactcgtcggattcgcggcggcgacggtaaaatgaaagatttgtctccgcgttggtacttttactatctcggcaccggtccggaagctggactgccctacggggcaaacaaggacgggatcatttgggtggctaccgaaggtgccctgaatactccaaaagatcatatcggcacccgtaaccctgctaataacgctgcgatcgttctgcaactgcctcagggtacaactctgccaaaaggcttctatgcagaagggtcgcgtggtggcagccaggcgagtagccgtagcagctcccgctctcgcaactcgtcccgtaactccactccgggctcttctcgcggcacgtccccggctcgtatggcaggtaacggtggtgacgctgctctggcgctgctactgctggacaggctgaaccagctggagtcgaagatgagtggtaaaggccaacagcagcagggccagaccgttaccaaaaagagcgcagctgaaatgtctaaaaaaccgcgacagaaacgtaccgcgactaaaggatacaatgtaacacagtgtttcggtccccgaggtccggagcaaactcaaggaaactttggcgatgccgaattaatcaaaaaagggtcagactacaaacactggccgcaaattgcccagttcgccccatccgctagtgcattcttcggtatgagccgcatctcgtcaaaggaacagccaagtggtacgtggctgacctacaccggtgctatcaagcttgataaagatgacccgaactttaaagaccaggttattctgcttaacaaacatattgatgcctataaaactttcccgccgaccgaacccaaaaaggacaaaaagaaaaaagctgatgaaacccaggctctaccgcagcgtcagaaaaaacagcaaactgtgactctgctgccagctgcggacctggatgatttttccaagcagctgcaacagtctatgagctctgcggactctacgcaggctggtggttctggtcaccatcatcaccatcattaa

SEQ ID NO: 2879 - DNA, 2421 bp, Artificial Sequence
  Description of Artificial Sequence: Synthetic polynucleotide
atgaaaatcgaagaaggtaaactggtaatctggattaacggcgataaaggctataacggtctcgctgaagtcggtaagaaattcgagaaagataccggaattaaagtcaccgttgagcatccggataaactggaagagaaattcccacaggttgcggcaactggcgatggccctgacattatcttctgggcacacgaccgctttggtggctacgctcaatctggcctgttggctgaaatcaccccggacaaagcgttccaggacaagctgtatccgtttacctgggatgccgtacgttacaacggcaagctgattgcttacccgatcgctgttgaagcgttatcgctgatttataacaaagatctgctgccgaacccgccaaaaacctgggaagagatcccggcgctggataaagaactgaaagcgaaaggtaagagcgcgctgatgttcaacctgcaagaaccgtacttcacctggccgctgattgctgctgacgggggttatgcgttcaagtatgaaaacggcaagtacgacattaaagacgtgggcgtggataacgctggcgcgaaagcgggtctgaccttcctggttgacctgattaaaaacaaacacatgaatgcagacaccgattactccatcgcagaagctgcctttaataaaggcgaaacagcgatgaccatcaacggcccgtgggcatggtccaacatcgacaccagcaaagtgaattatggtgtaacggtactgccgaccttcaagggtcaaccatccaaaccgttcgttggcgtgctgagcgcaggtattaacgccgccagtccgaacaaagagctggcgaaagagttcctcgaaaactatctgctgactgatgaaggtctggaagcggttaataaagacaaaccgctgggtgccgtagcgctgaagtcttacgaggaagagttggcgaaagatccacgtattgccgccaccatggaaaacgcccagaaaggtgaaatcatgccgaacatcccgcagatgtccgctttctggtatgccgtgcgtactgcggtgatcaacgccgccagcggtcgtcagactgtcgatgaagccctgaaagacgcgcagactggtggttctggtgagaacctgtactttcaaagctcagataatgggcctcaaaaccagcgcaacgctccacgtataaccttcggtggcccgtctgactccacaggcagcaaccagaatggtgagcgtagtggagccaggtctaagcagcgccgtccccagggtctgccgaacaacacggcgagctggtttactgcgcttacccaacacggtaaagaagacttaaaattcccgcgtggccagggcgtcccgatcaacactaactcttccccggatgatcagattggttattaccgcagagcaactcgtcggattcgcggcggcgacggtaaaatgaaagatttgtctccgcgttggtacttttactatctcggcaccggtccggaagctggactgccctacggggcaaacaaggacgggatcatttgggtggctaccgaaggtgccctgaatactccaaaagatcatatcggcacccgtaaccctgctaataacgctgcgatcgttctgcaactgcctcagggtacaactctgccaaaaggcttctatgcagaagggtcgcgtggtggcagccaggcgagtagccgtagcagcgagcgctctcgcaactcgtcccgtaactccactccgggctcttctcgcggcacggaaccggctcgtatggcaggtaacggtggtgacgctgctctggcgctgctactgctggacaggctgaaccagctggagtcgaagatgagtggtaaaggccaacagcagcagggccagaccgttaccaaaaagagcgcagctgaagcatctaaaaaaccgcgacagaaacgtaccgcgactaaagcgtacaatgtaacacaggccttcggtcgtcgaggtccggagcaaactcaaggaaactttggcgatcaggaattaatccgccaggggaccgactacaaacactggccgcaaattgcccagttcgccccatccgctagtgcattcttcggtatgagccgcatcggcatggaagtaacgccaagtggtacgtggctgacctacaccggtgctatcaagcttgatgacaaggacccgaactttaaagaccaggttattctgcttaacaaacatattgatgcctataaaactttcccgccgaccgaacccaaaaaggacaaaaagaaaaaagctgatgaaacccaggctctaccgcagcgtcagaaaaaacagcaaactgtgactctgctgccagctgcggacctggatgatttttccaagcagctgcaacagtctatgagctctgcggactctacgcaggctggtggttctggtcaccatcatcaccatcattaa

SEQ ID NO: 2880 - DNA, 2421 bp, Artificial Sequence
  Description of Artificial Sequence: Synthetic polynucleotide
atgaaaatcgaagaaggtaaactggtaatctggattaacggcgataaaggctataacggtctcgctgaagtcggtaagaaattcgagaaagataccggaattaaagtcaccgttgagcatccggataaactggaagagaaattcccacaggttgcggcaactggcgatggccctgacattatcttctgggcacacgaccgctttggtggctacgctcaatctggcctgttggctgaaatcaccccggacaaagcgttccaggacaagctgtatccgtttacctgggatgccgtacgttacaacggcaagctgattgcttacccgatcgctgttgaagcgttatcgctgatttataacaaagatctgctgccgaacccgccaaaaacctgggaagagatcccggcgctggataaagaactgaaagcgaaaggtaagagcgcgctgatgttcaacctgcaagaaccgtacttcacctggccgctgattgctgctgacgggggttatgcgttcaagtatgaaaacggcaagtacgacattaaagacgtgggcgtggataacgctggcgcgaaagcgggtctgaccttcctggttgacctgattaaaaacaaacacatgaatgcagacaccgattactccatcgcagaagctgcctttaataaaggcgaaacagcgatgaccatcaacggcccgtgggcatggtccaacatcgacaccagcaaagtgaattatggtgtaacggtactgccgaccttcaagggtcaaccatccaaaccgttcgttggcgtgctgagcgcaggtattaacgccgccagtccgaacaaagagctggcgaaagagttcctcgaaaactatctgctgactgatgaaggtctggaagcggttaataaagacaaaccgctgggtgccgtagcgctgaagtcttacgaggaagagttggcgaaagatccacgtattgccgccaccatggaaaacgcccagaaaggtgaaatcatgccgaacatcccgcagatgtccgctttctggtatgccgtgcgtactgcggtgatcaacgccgccagcggtcgtcagactgtcgatgaagccctgaaagacgcgcagactggtggttctggtgagaacctgtactttcaaagctcagataatgggcctcaaaaccagcgcaacgctccacgtataaccttcggtggcccgtctgactccacaggcagcaaccagaatggtgagcgtagtggagccaggtctaagcagcgccgtccccagggtctgccgaacaacacggcgagctggtttactgcgcttacccaacacggtaaagaagacttaaaattcccgcgtggccagggcgtcccgatcaacactaactcttccccggatgatcagattggttattaccgcagagcaactcgtcggattcgcggcggcgacggtaaaatgaaagatttgtctccgcgttggtacttttactatctcggcaccggtccggaagctggactgccctacggggcaaacaaggacgggatcatttgggtggctaccgaaggtgccctgaatactccaaaagatcatatcggcacccgtaaccctgctaataacgctgcgatcgttctgcaactgcctcagggtacaactctgccaaaaggcttctatgcagaagggtcgcgtggtggcagccaggcgagtagccgtagcagctcccgctctcgcaactcgtcccgtaactccactccgggctcttctcgcggcacgtccccggctcgtatggcaggtaacggtggtgacgctgctctggcgctgctactgctggacaggctgaaccagctggagtcgaagatgagtggtaaaggccaacagcagcagggccagaccgttaccaaaaagagcgcagctgaagcatctaaaaaaccgcgacagaaacgtaccgcgactaaagcgtacaatgtaacacaggccttcggtcgtcgaggtccggagcaaactcaaggaaactttggcgatcaggaattaatccgccaggggaccgactacaaacactggccgcaaattgcccagttcgccccatccgctagtgcattcttcggtatgagccgcatcggcatggaaatgacgccaagtggtacgtggctgacctacaccggtgctatcaagcttgatgacaaggacccgaactttaaagaccaggttattctgcttaacaaacatattgatgcctataaaactttcccgccgaccgaacccaaaaaggacaaaaagaaaaaagctgatgaaacccaggctctaccgcagcgtcagaaaaaacagcaaactgtgactctgctgccagctgcggacctggatgatttttccaagcagctgcaacagtctatgagctctgcggactctacgcaggctggtggttctggtcaccatcatcaccatcattaa

SEQ ID NO: 2881 - DNA, 2421 bp, Artificial Sequence
  Description of Artificial Sequence: Synthetic polynucleotide
atgaaaatcgaagaaggtaaactggtaatctggattaacggcgataaaggctataacggtctcgctgaagtcggtaagaaattcgagaaagataccggaattaaagtcaccgttgagcatccggataaactggaagagaaattcccacaggttgcggcaactggcgatggccctgacattatcttctgggcacacgaccgctttggtggctacgctcaatctggcctgttggctgaaatcaccccggacaaagcgttccaggacaagctgtatccgtttacctgggatgccgtacgttacaacggcaagctgattgcttacccgatcgctgttgaagcgttatcgctgatttataacaaagatctgctgccgaacccgccaaaaacctgggaagagatcccggcgctggataaagaactgaaagcgaaaggtaagagcgcgctgatgttcaacctgcaagaaccgtacttcacctggccgctgattgctgctgacgggggttatgcgttcaagtatgaaaacggcaagtacgacattaaagacgtgggcgtggataacgctggcgcgaaagcgggtctgaccttcctggttgacctgattaaaaacaaacacatgaatgcagacaccgattactccatcgcagaagctgcctttaataaaggcgaaacagcgatgaccatcaacggcccgtgggcatggtccaacatcgacaccagcaaagtgaattatggtgtaacggtactgccgaccttcaagggtcaaccatccaaaccgttcgttggcgtgctgagcgcaggtattaacgccgccagtccgaacaaagagctggcgaaagagttcctcgaaaactatctgctgactgatgaaggtctggaagcggttaataaagacaaaccgctgggtgccgtagcgctgaagtcttacgaggaagagttggcgaaagatccacgtattgccgccaccatggaaaacgcccagaaaggtgaaatcatgccgaacatcccgcagatgtccgctttctggtatgccgtgcgtactgcggtgatcaacgccgccagcggtcgtcagactgtcgatgaagccctgaaagacgcgcagactggtggttctggtgagaacctgtactttcaaagctcagataatgggcctcaaaaccagcgcaacgctccacgtataaccttcggtggcccgtctgactccacaggcagcaaccagaatggtgagcgtagtggagccaggtctaagcagcgccgtccccagggtctgccgaacaacacggcgagctggtttactgcgcttacccaacacggtaaagaagacttaaaattcccgcgtggccagggcgtcccgatcaacactaactcttccccggatgatcagattggttattaccgcagagcaactcgtcggattcgcggcggcgacggtaaaatgaaagatttgtctccgcgttggtacttttactatctcggcaccggtccggaagctggactgccctacggggcaaacaaggacgggatcatttgggtggctaccgaaggtgccctgaatactccaaaagatcatatcggcacccgtaaccctgctaataacgctgcgatcgttctgcaactgcctcagggtacaactctgccaaaaggcttctatgcagaagggtcgcgtggtggcagccaggcgagtagccgtagcagctcccgctctcgcaactcgtcccgtaactccactccgggctcttctcgcggcacgtccccggctcgtatggcaggtaacggtggtgacgctgctctggcgctgctactgctggacaggctgaaccagctggagtcgaagatgagtggtaaaggccaacagcagcagggccagaccgttaccaaaaagagcgcagctgaaatgtctaaaaaaccgcgacagaaacgtaccgcgactaaaggctgcaatgtaacacagtgtttcggtccacgaggtccggagcaaactcaaggaaactttggcgatgccgatttagtgaaaaaagggaccgactacaaacactggccgcaaattgcccagttcgccccatccgctagtgcattcttcggtatgagccgcatctcgtcaaaagaacaaccaagtggtacgtggctgacctacaccggtgctatcaagcttgataaggatgacccgaactttaaagaccaggttattctgcttaacaaacatattgatgcctataaaactttcccgccgaccgaacccaaaaaggacaaaaagaaaaaagctgatgaaacccaggctctaccgcagcgtcagaaaaaacagcaaactgtgactctgctgccagctgcggacctggatgatttttccaagcagctgcaacagtctatgagctctgcggactctacgcaggctggtggttctggtcaccatcatcaccatcattaa

SEQ ID NO: 2882 - DNA, 2421 bp, Artificial Sequence
  Description of Artificial Sequence: Synthetic polynucleotide
atgaaaatcgaagaaggtaaactggtaatctggattaacggcgataaaggctataacggtctcgctgaagtcggtaagaaattcgagaaagataccggaattaaagtcaccgttgagcatccggataaactggaagagaaattcccacaggttgcggcaactggcgatggccctgacattatcttctgggcacacgaccgctttggtggctacgctcaatctggcctgttggctgaaatcaccccggacaaagcgttccaggacaagctgtatccgtttacctgggatgccgtacgttacaacggcaagctgattgcttacccgatcgctgttgaagcgttatcgctgatttataacaaagatctgctgccgaacccgccaaaaacctgggaagagatcccggcgctggataaagaactgaaagcgaaaggtaagagcgcgctgatgttcaacctgcaagaaccgtacttcacctggccgctgattgctgctgacgggggttatgcgttcaagtatgaaaacggcaagtacgacattaaagacgtgggcgtggataacgctggcgcgaaagcgggtctgaccttcctggttgacctgattaaaaacaaacacatgaatgcagacaccgattactccatcgcagaagctgcctttaataaaggcgaaacagcgatgaccatcaacggcccgtgggcatggtccaacatcgacaccagcaaagtgaattatggtgtaacggtactgccgaccttcaagggtcaaccatccaaaccgttcgttggcgtgctgagcgcaggtattaacgccgccagtccgaacaaagagctggcgaaagagttcctcgaaaactatctgctgactgatgaaggtctggaagcggttaataaagacaaaccgctgggtgccgtagcgctgaagtcttacgaggaagagttggcgaaagatccacgtattgccgccaccatggaaaacgcccagaaaggtgaaatcatgccgaacatcccgcagatgtccgctttctggtatgccgtgcgtactgcggtgatcaacgccgccagcggtcgtcagactgtcgatgaagccctgaaagacgcgcagactggtggttctggtgagaacctgtactttcaaagctcagataatgggcctcaaaaccagcgcaacgctccacgtataaccttcggtggcccgtctgactccacaggcagcaaccagaatggtgagcgtagtggagccaggtctaagcagcgccgtccccagggtctgccgaacaacacggcgagctggtttactgcgcttacccaacacggtaaagaagacttaaaattcccgcgtggccagggcgtcccgatcaacactaactcttccccggatgatcagattggttattaccgcagagcaactcgtcggattcgcggcggcgacggtaaaatgaaagatttgtctccgcgttggtacttttactatctcggcaccggtccggaagctggactgccctacggggcaaacaaggacgggatcatttgggtggctaccgaaggtgccctgaatactccaaaagatcatatcggcacccgtaaccctgctaataacaccgcgatcgttctgcaactgcctcagggtacaactctgccaaaaggcttctatgcagaagggtcgcgtggtggcagccaggcgagtagccgtagcagctcccgctctcgcaactcgtcccgtaactccactccgggctcttctcgcggcacgtccccggctcgtatggcaggtaacggtggtgacgctgctctggcgctgctactgctggacaggctgaaccagctggagtcgaagatgagtggtaaaggccaacagcagcagggccagaccgttaccaaaaagagcgcagctgaagcatctaaaaaaccgcgacagaaacgtaccgcgactaaagcgtacaatgtaacacaggccttcggtcgtcgaggtccggagcaaactcaaggaaactttggcgatcaggaattaatccgccaggggaccgactacaaacactggccgcaaattgcccagttcgccccatccgctagtgcattcttcggtatgagccgcatcggcatggaagtaacgccaagtggtacgtggctgacctacaccggtgctatcaagcttgatgacaaggacccgaactttaaagaccaggttattctgcttaacaaacatattgatgcctataaaactttcccgccgaccgaacccaaaaaggacaaaaagaaaaaagctgatgaaacccaggctctaccgcagcgtcagaaaaaacagcaaactgtgactctgctgccagctgcggacctggatgatttttccaagcagctgcaacagtctatgagctctgcggactctacgcaggctggtggttctggtcaccatcatcaccatcattaa

SEQ ID NO: 2883 - DNA, 2421 bp, Artificial Sequence
  Description of Artificial Sequence: Synthetic polynucleotide
atgaaaatcgaagaaggtaaactggtaatctggattaacggcgataaaggctataacggtctcgctgaagtcggtaagaaattcgagaaagataccggaattaaagtcaccgttgagcatccggataaactggaagagaaattcccacaggttgcggcaactggcgatggccctgacattatcttctgggcacacgaccgctttggtggctacgctcaatctggcctgttggctgaaatcaccccggacaaagcgttccaggacaagctgtatccgtttacctgggatgccgtacgttacaacggcaagctgattgcttacccgatcgctgttgaagcgttatcgctgatttataacaaagatctgctgccgaacccgccaaaaacctgggaagagatcccggcgctggataaagaactgaaagcgaaaggtaagagcgcgctgatgttcaacctgcaagaaccgtacttcacctggccgctgattgctgctgacgggggttatgcgttcaagtatgaaaacggcaagtacgacattaaagacgtgggcgtggataacgctggcgcgaaagcgggtctgaccttcctggttgacctgattaaaaacaaacacatgaatgcagacaccgattactccatcgcagaagctgcctttaataaaggcgaaacagcgatgaccatcaacggcccgtgggcatggtccaacatcgacaccagcaaagtgaattatggtgtaacggtactgccgaccttcaagggtcaaccatccaaaccgttcgttggcgtgctgagcgcaggtattaacgccgccagtccgaacaaagagctggcgaaagagttcctcgaaaactatctgctgactgatgaaggtctggaagcggttaataaagacaaaccgctgggtgccgtagcgctgaagtcttacgaggaagagttggcgaaagatccacgtattgccgccaccatggaaaacgcccagaaaggtgaaatcatgccgaacatcccgcagatgtccgctttctggtatgccgtgcgtactgcggtgatcaacgccgccagcggtcgtcagactgtcgatgaagccctgaaagacgcgcagactggtggttctggtgagaacctgtactttcaaagctcagataatgggcctcaaaaccagcgcaacgctccacgtataaccttcggtggcccgtctgactccacaggcagcaaccagaatggtgagcgtagtggagccaggtctaagcagcgccgtccccagggtctgccgaacaacacggcgagctggtttactgcgcttacccaacacggtaaagaagacttaaaattcccgcgtggccagggcgtcccgatcaacactaactcttccccggatgatcagattggttattaccgcagagcaactcgtcggattcgcggcggcgacggtaaaatgaaagatttgtctccgcgttggtacttttactatctcggcaccggtccggaagctggactgccctacggggcaaacaaggacgggatcatttgggtggctaccgaaggtgccctgaatactccaaaagatcatatcggcacccgtaaccctgctaataacgctgcgatcgttctgcaactgcctcagggtacaactctgccaaaaggcttctatgcagaagggtcgcgtggtggcagccaggcgagtagccgtagcagctcccgctctcgcaactcgtcccgtaactccactccgggctcttctcgcggcacgtccccggctcgtatggcaggtaacggtggtgacgctgctctggcgctgctactgctggacaggctgaaccagctggagtcgaagatgagtggtaaaggccaacagcagcagggccagaccgttaccaaaaagagcgcagctgaagcatctaaaaaaccgcgacagaaacgtaccgcgactaaaacgtacaatgtaacacaggccttcggtcgtcgaggtccggagcaaactcaaggaaactttggcgatcaggaattaatccgccaggggaccgactacaaacactggccgcaaattgcccagttcgccccatccgctagtgcattcttcggtatgagccgcatcggcatggaagtaacgccaagtggtacgtggctgacctacaccggtgctatcaagcttgatgacaaggacccgaactttaaagaccaggttattctgcttaacaaacatattgatgcctataaaactttcccgccgaccgaacccaaaaaggacaaaaagaaaaaagctgatgaaacccaggctctaccgcagcgtcagaaaaaacagcaaactgtgactctgctgccagctgcggacctggatgatttttccaagcagctgcaacagtctatgagctctgcggactctacgcaggctggtggttctggtcaccatcatcaccatcattaa

SEQ ID NO: 2884 - DNA, 2421 bp, Artificial Sequence
  Description of Artificial Sequence: Synthetic polynucleotide
atgaaaatcgaagaaggtaaactggtaatctggattaacggcgataaaggctataacggtctcgctgaagtcggtaagaaattcgagaaagataccggaattaaagtcaccgttgagcatccggataaactggaagagaaattcccacaggttgcggcaactggcgatggccctgacattatcttctgggcacacgaccgctttggtggctacgctcaatctggcctgttggctgaaatcaccccggacaaagcgttccaggacaagctgtatccgtttacctgggatgccgtacgttacaacggcaagctgattgcttacccgatcgctgttgaagcgttatcgctgatttataacaaagatctgctgccgaacccgccaaaaacctgggaagagatcccggcgctggataaagaactgaaagcgaaaggtaagagcgcgctgatgttcaacctgcaagaaccgtacttcacctggccgctgattgctgctgacgggggttatgcgttcaagtatgaaaacggcaagtacgacattaaagacgtgggcgtggataacgctggcgcgaaagcgggtctgaccttcctggttgacctgattaaaaacaaacacatgaatgcagacaccgattactccatcgcagaagctgcctttaataaaggcgaaacagcgatgaccatcaacggcccgtgggcatggtccaacatcgacaccagcaaagtgaattatggtgtaacggtactgccgaccttcaagggtcaaccatccaaaccgttcgttggcgtgctgagcgcaggtattaacgccgccagtccgaacaaagagctggcgaaagagttcctcgaaaactatctgctgactgatgaaggtctggaagcggttaataaagacaaaccgctgggtgccgtagcgctgaagtcttacgaggaagagttggcgaaagatccacgtattgccgccaccatggaaaacgcccagaaaggtgaaatcatgccgaacatcccgcagatgtccgctttctggtatgccgtgcgtactgcggtgatcaacgccgccagcggtcgtcagactgtcgatgaagccctgaaagacgcgcagactggtggttctggtgagaacctgtactttcaaagctcagataatgggcctcaaaaccagcgcaacgctccacgtataaccttcggtggcccgtctgactccacaggcagcaaccagaatggtgagcgtagtggagccaggtctaagcagcgccgtccccagggtctgccgaacaacacggcgagctggtttactgcgcttgttcaacacggtaaagaagacttaaaattcccgcgtggccagggcgtcccgatcaacactaactcttccccggatgatcagattggttattaccgcagagcaactcgtcggattcgcggcggcgacggtaaaatgaaagatttgtctccgcgttggtacttttactatctcggcaccggtccggaagctggactgccctacggggcaaacaaggacgggatcatttgggtggctaccgaaggtgccctgaatactccaaaagatcatatcggcacccgtaaccctgctaataacgctgcgatcgttctgcaactgcctcagggtacaactctgccaaaaggcttctatgcagaagggtcgcgtggtggcagccaggcgagtagccgtagcagctcccgctctcgcaactcgtcccgtaactccactccgggctcttctcgcggcacgtccccggctcgtatggcaggtaacggtggtgacgctgctctggcgctgctactgctggacaggctgaaccagctggagtcgaagatgagtggtaaaggccaacagcagcagggccagaccgttaccaaaaagagcgcagctgaagcatctaaaaaaccgcgacagaaacgtaccgcgactaaagcgtacaatgtaacacaggccttcggtcgtcgaggtccggagcaaactcaaggaaactttggcgatcaggaattaatccgccaggggaccgactacaaacactggccgcaaattgcccagttcgccccatccgctagtgcattcttcggtatgagccgcatcggcatggaagtaacgccaagtggtacgtggctgacctacaccggtgctatcaagcttgatgacaaggacccgaactttaaagaccaggttattctgcttaacaaacatattgatgcctataaaactttcccgccgaccgaacccaaaaaggacaaaaagaaaaaagctgatgaaacccaggctctaccgcagcgtcagaaaaaacagcaaactgtgactctgctgccagctgcggacctggatgatttttccaagcagctgcaacagtctatgagctctgcggactctacgcaggctggtggttctggtcaccatcatcaccatcattaa

SEQ ID NO: 2885 - DNA, 2421 bp, Artificial Sequence
  Description of Artificial Sequence: Synthetic polynucleotide
atgaaaatcgaagaaggtaaactggtaatctggattaacggcgataaaggctataacggtctcgctgaagtcggtaagaaattcgagaaagataccggaattaaagtcaccgttgagcatccggataaactggaagagaaattcccacaggttgcggcaactggcgatggccctgacattatcttctgggcacacgaccgctttggtggctacgctcaatctggcctgttggctgaaatcaccccggacaaagcgttccaggacaagctgtatccgtttacctgggatgccgtacgttacaacggcaagctgattgcttacccgatcgctgttgaagcgttatcgctgatttataacaaagatctgctgccgaacccgccaaaaacctgggaagagatcccggcgctggataaagaactgaaagcgaaaggtaagagcgcgctgatgttcaacctgcaagaaccgtacttcacctggccgctgattgctgctgacgggggttatgcgttcaagtatgaaaacggcaagtacgacattaaagacgtgggcgtggataacgctggcgcgaaagcgggtctgaccttcctggttgacctgattaaaaacaaacacatgaatgcagacaccgattactccatcgcagaagctgcctttaataaaggcgaaacagcgatgaccatcaacggcccgtgggcatggtccaacatcgacaccagcaaagtgaattatggtgtaacggtactgccgaccttcaagggtcaaccatccaaaccgttcgttggcgtgctgagcgcaggtattaacgccgccagtccgaacaaagagctggcgaaagagttcctcgaaaactatctgctgactgatgaaggtctggaagcggttaataaagacaaaccgctgggtgccgtagcgctgaagtcttacgaggaagagttggcgaaagatccacgtattgccgccaccatggaaaacgcccagaaaggtgaaatcatgccgaacatcccgcagatgtccgctttctggtatgccgtgcgtactgcggtgatcaacgccgccagcggtcgtcagactgtcgatgaagccctgaaagacgcgcagactggtggttctggtgagaacctgtactttcaaagctcagataatgggcctcaaaaccagcgcaacgctccacgtataaccttcggtggcccgtctgactccacaggcagcaaccagaatggtgagcgtagtggagccaggtctaagcagcgccgtccccagggtctgccgaacaacacggcgagctggtttactgcgcttacccaacacggtaaagaagacttaaaattcccgcgtggccagggcgtcccgatcaacactaactcttccccggatgatcagattggttattaccgcagagcaactcgtcggattcgcggcggcgacggtaaaatgaaagatttgtctccgcgttggtacttttactatctcggcaccggtccggaagctggactgccctacggggcaaacaaggacgggatcatttgggtggctaccgaaggtgccctgaatactccaaaagatcatatcggcacccgtaaccctgctaataacgctgcgatcgttctgcaactgcctcagggtacaactctgccaaaaggcttctatgcagaagggtcgcgtggtggcagccaggcgagtagccgtagcagctcccgctctcgcaactcgtcccgtaactccactccgggctcttctcgcggcacgtccccggctcgtatggcaggtaacggtggtgacgctgctctggcgctgctactgctggacaggctgaaccagctggagtcgaagatgagtggtaaaggccaacagcagcagggccagaccgttaccaaaaagagcgcagctgaaatgtctaaaaaaccgcgacagaaacgtaccgcgactaaagggtgtaatgtaacacagtgcttcggtcctcgaggtccggagcaaactcaaggaaactttggcgatgccgatttaaataaaaaggggaccgactacaaacactggccgcaaattgcccagttcgccccatccgctagtgcattcttcggtatgagccgcatctcgagtaaagaacaaccaagtggtacgtggctgacctacaccggtgctatcaagcttgataaagatgacccgaactttaaagaccaggttattctgcttaacaaacatattgatgcctataaaactttcccgccgaccgaacccaaaaaggacaaaaagaaaaaagctgatgaaacccaggctctaccgcagcgtcagaaaaaacagcaaactgtgactctgctgccagctgcggacctggatgatttttccaagcagctgcaacagtctatgagctctgcggactctacgcaggctggtggttctggtcaccatcatcaccatcattaa

SEQ ID NO: 2886 - DNA, 2421 bp, Artificial Sequence
  Description of Artificial Sequence: Synthetic polynucleotide
atgaaaatcgaagaaggtaaactggtaatctggattaacggcgataaaggctataacggtctcgctgaagtcggtaagaaattcgagaaagataccggaattaaagtcaccgttgagcatccggataaactggaagagaaattcccacaggttgcggcaactggcgatggccctgacattatcttctgggcacacgaccgctttggtggctacgctcaatctggcctgttggctgaaatcaccccggacaaagcgttccaggacaagctgtatccgtttacctgggatgccgtacgttacaacggcaagctgattgcttacccgatcgctgttgaagcgttatcgctgatttataacaaagatctgctgccgaacccgccaaaaacctgggaagagatcccggcgctggataaagaactgaaagcgaaaggtaagagcgcgctgatgttcaacctgcaagaaccgtacttcacctggccgctgattgctgctgacgggggttatgcgttcaagtatgaaaacggcaagtacgacattaaagacgtgggcgtggataacgctggcgcgaaagcgggtctgaccttcctggttgacctgattaaaaacaaacacatgaatgcagacaccgattactccatcgcagaagctgcctttaataaaggcgaaacagcgatgaccatcaacggcccgtgggcatggtccaacatcgacaccagcaaagtgaattatggtgtaacggtactgccgaccttcaagggtcaaccatccaaaccgttcgttggcgtgctgagcgcaggtattaacgccgccagtccgaacaaagagctggcgaaagagttcctcgaaaactatctgctgactgatgaaggtctggaagcggttaataaagacaaaccgctgggtgccgtagcgctgaagtcttacgaggaagagttggcgaaagatccacgtattgccgccaccatggaaaacgcccagaaaggtgaaatcatgccgaacatcccgcagatgtccgctttctggtatgccgtgcgtactgcggtgatcaacgccgccagcggtcgtcagactgtcgatgaagccctgaaagacgcgcagactggtggttctggtgagaacctgtactttcaaagctcagataatgggcctcaaaaccagcgcaacgctccacgtataaccttcggtggcccgtctgactccacaggcagcaaccagaatggtgagcgtagtggagccaggtctaagcagcgccgtccccagggtctgccgaacaacacggcgagctggtttactgcgcttacccaacacggtaaagaagacttaaaattcccgcgtggccagggcgtcccgatcaacactaactcttccccggatgatcagattggttattaccgcagagcaactcgtcggattcgcggcggcgacggtaaaatgaaagatttgtctccgcgttggtacttttactatctcggcaccggtccggaagctggactgccctacggggcaaacaaggacgggatcatttgggtggctaccgaaggtgccctgaatactccaaaagatcatatcggcacccgtaaccctgctaataacgctgcgatctatctgcaactgcctcagggtacaactctgccaaaaggcttctatgcagaagggtcgcgtggtggcagccaggcgagtagccgtagcagctcccgctctcgcaactcgtcccgtaactccactccgggctcttctcgcggcacgtccccggctcgtatggcaggtaacggtggtgacgctgctctggcgctgctactgctggacaggctgaaccagctggagtcgaagatgagtggtaaaggccaacagcagcagggccagaccgttaccaaaaagagcgcagctgaagcatctaaaaaaccgcgacagaaacgtaccgcgactaaagcgtacaatgtaacacaggccttcggtcgtcgaggtccggagcaaactcaaggaaactttggcgatcaggaattaatccgccaggggaccgactacaaacactggccgcaaattgcccagttcgccccatccgctagtgcattcttcggtatgagccgcatcggcatggaagtaacgccaagtggtacgtggctgacctacaccggtgctatcaagcttgatgacaaggacccgaactttaaagaccaggttattctgcttaacaaacatattgatgcctataaaactttcccgccgaccgaacccaaaaaggacaaaaagaaaaaagctgatgaaacccaggctctaccgcagcgtcagaaaaaacagcaaactgtgactctgctgccagctgcggacctggatgatttttccaagcagctgcaacagtctatgagctctgcggactctacgcaggctggtggttctggtcaccatcatcaccatcattaa

SEQ ID NO: 2887 - DNA, 2421 bp, Artificial Sequence
  Description of Artificial Sequence: Synthetic polynucleotide
atgaaaatcgaagaaggtaaactggtaatctggattaacggcgataaaggctataacggtctcgctgaagtcggtaagaaattcgagaaagataccggaattaaagtcaccgttgagcatccggataaactggaagagaaattcccacaggttgcggcaactggcgatggccctgacattatcttctgggcacacgaccgctttggtggctacgctcaatctggcctgttggctgaaatcaccccggacaaagcgttccaggacaagctgtatccgtttacctgggatgccgtacgttacaacggcaagctgattgcttacccgatcgctgttgaagcgttatcgctgatttataacaaagatctgctgccgaacccgccaaaaacctgggaagagatcccggcgctggataaagaactgaaagcgaaaggtaagagcgcgctgatgttcaacctgcaagaaccgtacttcacctggccgctgattgctgctgacgggggttatgcgttcaagtatgaaaacggcaagtacgacattaaagacgtgggcgtggataacgctggcgcgaaagcgggtctgaccttcctggttgacctgattaaaaacaaacacatgaatgcagacaccgattactccatcgcagaagctgcctttaataaaggcgaaacagcgatgaccatcaacggcccgtgggcatggtccaacatcgacaccagcaaagtgaattatggtgtaacggtactgccgaccttcaagggtcaaccatccaaaccgttcgttggcgtgctgagcgcaggtattaacgccgccagtccgaacaaagagctggcgaaagagttcctcgaaaactatctgctgactgatgaaggtctggaagcggttaataaagacaaaccgctgggtgccgtagcgctgaagtcttacgaggaagagttggcgaaagatccacgtattgccgccaccatggaaaacgcccagaaaggtgaaatcatgccgaacatcccgcagatgtccgctttctggtatgccgtgcgtactgcggtgatcaacgccgccagcggtcgtcagactgtcgatgaagccctgaaagacgcgcagactggtggttctggtgagaacctgtactttcaaagctcagataatgggcctcaaaaccagcgcaacgctccacgtataaccttcggtggcccgtctgactccacaggcagcaaccagaatggtgagcgtagtggagccaggtctaagcagcgccgtccccagggtctgccgaacaacacggcgagctggtttactgcgcttacccaacacggtaaagaagacttaaaattcccgcgtggccagggcgtcccgatcaacactaactcttccccggatgatcagattggttattaccgcagagcaactcgtcggattcgcggcggcgacggtaaaatgaaagatttgtctccgcgttggtacttttactatctcggcaccggtccggaagctggactgccctacggggcaaacaaggacgggatcatttgggtggctaccgaaggtgccctgaatactccaaaagatcatatcggcacccgtaaccctgctaataacgctgcgatcgttctgcaactgcctcagggtacaactctgccaaaaggcttctatgcagaagggtcgcgtggtggcagccaggcgagtagccgtagcagctcccgctctcgcaactcgtcccgtaactccactccgggctcttctcgcggcacgtccccggctcgtatggcaggtaacggtggtgacgctgctctggcgctgctactgctggacaggctgaaccagctggagtcgaagatgagtggtaaaggccaacagcagcagggccagaccgttaccaaaaagagcgcagctgaaatgtctaaaaaaccgcgacagaaacgtaccgcgactaaaggatacaatgtaacacagtgcttcggtccccgaggtccggagcaaactcaaggaaactttggcgatgccgaattaaataagaaagggaccgactacaaacactggccgcaaattgcccagttcgccccatccgctagtgcattcttcggtatgagccgcatctcatcaaaagaacaaccaagtggtacgtggctgacctacaccggtgctatcaagcttgataaagatgacccgaactttaaagaccaggttattctgcttaacaaacatattgatgcctataaaactttcccgccgaccgaacccaaaaaggacaaaaagaaaaaagctgatgaaacccaggctctaccgcagcgtcagaaaaaacagcaaactgtgactctgctgccagctgcggacctggatgatttttccaagcagctgcaacagtctatgagctctgcggactctacgcaggctggtggttctggtcaccatcatcaccatcattaa

SEQ ID NO: 2888 - DNA, 2421 bp, Artificial Sequence
  Description of Artificial Sequence: Synthetic polynucleotide
atgaaaatcgaagaaggtaaactggtaatctggattaacggcgataaaggctataacggtctcgctgaagtcggtaagaaattcgagaaagataccggaattaaagtcaccgttgagcatccggataaactggaagagaaattcccacaggttgcggcaactggcgatggccctgacattatcttctgggcacacgaccgctttggtggctacgctcaatctggcctgttggctgaaatcaccccggacaaagcgttccaggacaagctgtatccgtttacctgggatgccgtacgttacaacggcaagctgattgcttacccgatcgctgttgaagcgttatcgctgatttataacaaagatctgctgccgaacccgccaaaaacctgggaagagatcccggcgctggataaagaactgaaagcgaaaggtaagagcgcgctgatgttcaacctgcaagaaccgtacttcacctggccgctgattgctgctgacgggggttatgcgttcaagtatgaaaacggcaagtacgacattaaagacgtgggcgtggataacgctggcgcgaaagcgggtctgaccttcctggttgacctgattaaaaacaaacacatgaatgcagacaccgattactccatcgcagaagctgcctttaataaaggcgaaacagcgatgaccatcaacggcccgtgggcatggtccaacatcgacaccagcaaagtgaattatggtgtaacggtactgccgaccttcaagggtcaaccatccaaaccgttcgttggcgtgctgagcgcaggtattaacgccgccagtccgaacaaagagctggcgaaagagttcctcgaaaactatctgctgactgatgaaggtctggaagcggttaataaagacaaaccgctgggtgccgtagcgctgaagtcttacgaggaagagttggcgaaagatccacgtattgccgccaccatggaaaacgcccagaaaggtgaaatcatgccgaacatcccgcagatgtccgctttctggtatgccgtgcgtactgcggtgatcaacgccgccagcggtcgtcagactgtcgatgaagccctgaaagacgcgcagactggtggttctggtgagaacctgtactttcaaagctcagataatgggcctcaaaaccagcgcaacgctccacgtataaccttcggtggcccgtctgactccacaggcagcaaccagaatggtgagcgtagtggagccaggtctaagcagcgccgtccccagggtctgccgaacaacacggcgagctggtttactgcgcttacccaacacggtaaagaagacttaaaattcccgaaaggccagggcgtcccgatcaacactaactctaagccggatgatcagattggttattaccgcagacaaactcgtcggtatcgcggcggcgacggtcaaatgaaagatttgaatccgcgttggtacttttactatctcggcaccggtccggaagctggactgccctacggggcaaacaaggacgggatcatttgggtggctaccgaaggtgccctgaatactccaaaagatcatatcggcacccgtaaccctgctaataacgctgcgatcgttctgcaactgcctcagggtacaactctgccaaaaggcttctatgcagaagggtcgcgtggtggcagccaggcgagtagccgtagcagctcccgctctcgcaactcgtcccgtaactccactccgggctcttctcgcggcacgtccccggctcgtatggcaggtaacggtggtgacgctgctctggcgctgctactgctggacaggctgaaccagctggagtcgaagatgagtggtaaaggccaacagcagcagggccagaccgttaccaaaaagagcgcagctgaagcatctaaaaaaccgcgacagaaacgtaccgcgactaaagcgtacaatgtaacacaggccttcggtcgtcgaggtccggagcaaactcaaggaaactttggcgatcaggaattaatccgccaggggaccgactacaaacactggccgcaaattgcccagttcgccccatccgctagtgcattcttcggtatgagccgcatcggcatggaagtaacgccaagtggtacgtggctgacctacaccggtgctatcaagcttgatgacaaggacccgaactttaaagaccaggttattctgcttaacaaacatattgatgcctataaaactttcccgccgaccgaacccaaaaaggacaaaaagaaaaaagctgatgaaacccaggctctaccgcagcgtcagaaaaaacagcaaactgtgactctgctgccagctgcggacctggatgatttttccaagcagctgcaacagtctatgagctctgcggactctacgcaggctggtggttctggtcaccatcatcaccatcattaa

SEQ ID NO: 2889 - DNA, 2421 bp, Artificial Sequence
  Description of Artificial Sequence: Synthetic polynucleotide
atgaaaatcgaagaaggtaaactggtaatctggattaacggcgataaaggctataacggtctcgctgaagtcggtaagaaattcgagaaagataccggaattaaagtcaccgttgagcatccggataaactggaagagaaattcccacaggttgcggcaactggcgatggccctgacattatcttctgggcacacgaccgctttggtggctacgctcaatctggcctgttggctgaaatcaccccggacaaagcgttccaggacaagctgtatccgtttacctgggatgccgtacgttacaacggcaagctgattgcttacccgatcgctgttgaagcgttatcgctgatttataacaaagatctgctgccgaacccgccaaaaacctgggaagagatcccggcgctggataaagaactgaaagcgaaaggtaagagcgcgctgatgttcaacctgcaagaaccgtacttcacctggccgctgattgctgctgacgggggttatgcgttcaagtatgaaaacggcaagtacgacattaaagacgtgggcgtggataacgctggcgcgaaagcgggtctgaccttcctggttgacctgattaaaaacaaacacatgaatgcagacaccgattactccatcgcagaagctgcctttaataaaggcgaaacagcgatgaccatcaacggcccgtgggcatggtccaacatcgacaccagcaaagtgaattatggtgtaacggtactgccgaccttcaagggtcaaccatccaaaccgttcgttggcgtgctgagcgcaggtattaacgccgccagtccgaacaaagagctggcgaaagagttcctcgaaaactatctgctgactgatgaaggtctggaagcggttaataaagacaaaccgctgggtgccgtagcgctgaagtcttacgaggaagagttggcgaaagatccacgtattgccgccaccatggaaaacgcccagaaaggtgaaatcatgccgaacatcccgcagatgtccgctttctggtatgccgtgcgtactgcggtgatcaacgccgccagcggtcgtcagactgtcgatgaagccctgaaagacgcgcagactggtggttctggtgagaacctgtactttcaaagctcagataatgggcctcaaaaccagcgcaacgctccacgtataaccttcggtggcccgtctgactccacaggcagcaaccagaatggtgagcgtagtggagccaggtctaagcagcgccgtccccagggtctgccgaacaacacggcgagctggtttactgcgcttacccaacacggtaaagaagacttaaaattcccgcgtggccagggcgtcccgatcaacactaactcttccccggatgatcagattggttattaccgcagagcaactcgtcggattcgcggcggcgacggtaaaatgaaagatttgtctccgcgttggtacttttactatctcggcaccggtccggaagctggactgccctacggggcaaacaaggacgggatcatttgggtggctaccgaaggtgccctgaatactccaaaagatcatatcggcacccgtaaccctgctaataacgctgcgatcgttctgcaactgcctcagggtacaactctgccaaaaggcttctatgcagaagggtcgcgtggtggcagccaggcgagtagccgtagcagctcccgctctcgcaactcgtcccgtaactccactccgggctcttctcgcggcacgtccccggctcgtatggcaggtaacggtggtgacgctgctctggcgctgctactgctggacaggctgaaccagctggagtcgaagatgagtggtaaaggccaacagcagcagggccagaccgttaccaaaaagagcgcagctgaaatgtctaaaaaaccgcgatggaaacgtaccccaactaaagagtacaatgtaacacaggccttcggtccccgaggtccgaaggatactcaaggaaactttggcgatgcggaattaatcaaacaggggaccgactacaaacactggccgcaaattgcccagttcgtgccatccgctgcggcattcttctttatgagccgcatcggcatgaaagaaacgccagatggtgtctggctgacctacaccggtacgatcaagcttgataaagatgacccgaactttgatgaccaggttaaactgcttaacaaacatattgatgcctataaaactttcccgccgaccgaacccaaaaaggacaaaaagaaaaaagctgatgaaacccaggctctaccgcagcgtcagaaaaaacagcaaactgtgactctgctgccagctgcggacctggatgatttttccaagcagctgcaacagtctatgagctctgcggactctacgcaggctggtggttctggtcaccatcatcaccatcattaa

SEQ ID NO: 2890 - DNA, 2421 bp, Artificial Sequence
  Description of Artificial Sequence: Synthetic polynucleotide
atgaaaatcgaagaaggtaaactggtaatctggattaacggcgataaaggctataacggtctcgctgaagtcggtaagaaattcgagaaagataccggaattaaagtcaccgttgagcatccggataaactggaagagaaattcccacaggttgcggcaactggcgatggccctgacattatcttctgggcacacgaccgctttggtggctacgctcaatctggcctgttggctgaaatcaccccggacaaagcgttccaggacaagctgtatccgtttacctgggatgccgtacgttacaacggcaagctgattgcttacccgatcgctgttgaagcgttatcgctgatttataacaaagatctgctgccgaacccgccaaaaacctgggaagagatcccggcgctggataaagaactgaaagcgaaaggtaagagcgcgctgatgttcaacctgcaagaaccgtacttcacctggccgctgattgctgctgacgggggttatgcgttcaagtatgaaaacggcaagtacgacattaaagacgtgggcgtggataacgctggcgcgaaagcgggtctgaccttcctggttgacctgattaaaaacaaacacatgaatgcagacaccgattactccatcgcagaagctgcctttaataaaggcgaaacagcgatgaccatcaacggcccgtgggcatggtccaacatcgacaccagcaaagtgaattatggtgtaacggtactgccgaccttcaagggtcaaccatccaaaccgttcgttggcgtgctgagcgcaggtattaacgccgccagtccgaacaaagagctggcgaaagagttcctcgaaaactatctgctgactgatgaaggtctggaagcggttaataaagacaaaccgctgggtgccgtagcgctgaagtcttacgaggaagagttggcgaaagatccacgtattgccgccaccatggaaaacgcccagaaaggtgaaatcatgccgaacatcccgcagatgtccgctttctggtatgccgtgcgtactgcggtgatcaacgccgccagcggtcgtcagactgtcgatgaagccctgaaagacgcgcagactggtggttctggtgagaacctgtactttcaaagctcagataatgggcctcaaaaccagcgcaacgctccacgtataaccttcggtggcccgtctgactccacaggcagcaaccagaatggtgagcgtagtggagccaggtctaagcagcgccgtccccagggtctgccgaacaacacggcgagctggtttactgcgcttacccaacacggtaaagaagacttaaaattcccgcgtggccagggcgtcccgatcaacactaactcttccccggatgatcagattggttattaccgcagagcaactcgtcggattcgcggcggcgacggtaaaatgaaagatttgtctccgcgttggtacttttactatctcggcaccggtccggaagctggactgccctacggggcaaacaaggacgggatcatttgggtggctaccgaaggtgccctgaatactccaaaagatcatatcggcacccgtaaccctgctaataacgctgcgatcacgctgcaactgcctcagggtacaactctgccaaaaggcttctatgcagaagggtcgcgtggtggcagccaggcgagtagccgtagcagctcccgctctcgcaactcgtcccgtaactccactccgggctcttctcgcggcacgtccccggctcgtatggcaggtaacggtggtgacgctgctctggcgctgctactgctggacaggctgaaccagctggagtcgaagatgagtggtaaaggccaacagcagcagggccagaccgttaccaaaaagagcgcagctgaagcatctaaaaaaccgcgacagaaacgtaccgcgactaaagcgtacaatgtaacacaggccttcggtcgtcgaggtccggagcaaactcaaggaaactttggcgatcaggaattaatccgccaggggaccgactacaaacactggccgcaaattgcccagttcgccccatccgctagtgcattcttcggtatgagccgcatcggcatggaagtaacgccaagtggtacgtggctgacctacaccggtgctatcaagcttgatgacaaggacccgaactttaaagaccaggttattctgcttaacaaacatattgatgcctataaaactttcccgccgaccgaacccaaaaaggacaaaaagaaaaaagctgatgaaacccaggctctaccgcagcgtcagaaaaaacagcaaactgtgactctgctgccagctgcggacctggatgatttttccaagcagctgcaacagtctatgagctctgcggactctacgcaggctggtggttctggtcaccatcatcaccatcattaa

SEQ ID NO: 2891 - DNA, 2421 bp, Artificial Sequence
  Description of Artificial Sequence: Synthetic polynucleotide
atgaaaatcgaagaaggtaaactggtaatctggattaacggcgataaaggctataacggtctcgctgaagtcggtaagaaattcgagaaagataccggaattaaagtcaccgttgagcatccggataaactggaagagaaattcccacaggttgcggcaactggcgatggccctgacattatcttctgggcacacgaccgctttggtggctacgctcaatctggcctgttggctgaaatcaccccggacaaagcgttccaggacaagctgtatccgtttacctgggatgccgtacgttacaacggcaagctgattgcttacccgatcgctgttgaagcgttatcgctgatttataacaaagatctgctgccgaacccgccaaaaacctgggaagagatcccggcgctggataaagaactgaaagcgaaaggtaagagcgcgctgatgttcaacctgcaagaaccgtacttcacctggccgctgattgctgctgacgggggttatgcgttcaagtatgaaaacggcaagtacgacattaaagacgtgggcgtggataacgctggcgcgaaagcgggtctgaccttcctggttgacctgattaaaaacaaacacatgaatgcagacaccgattactccatcgcagaagctgcctttaataaaggcgaaacagcgatgaccatcaacggcccgtgggcatggtccaacatcgacaccagcaaagtgaattatggtgtaacggtactgccgaccttcaagggtcaaccatccaaaccgttcgttggcgtgctgagcgcaggtattaacgccgccagtccgaacaaagagctggcgaaagagttcctcgaaaactatctgctgactgatgaaggtctggaagcggttaataaagacaaaccgctgggtgccgtagcgctgaagtcttacgaggaagagttggcgaaagatccacgtattgccgccaccatggaaaacgcccagaaaggtgaaatcatgccgaacatcccgcagatgtccgctttctggtatgccgtgcgtactgcggtgatcaacgccgccagcggtcgtcagactgtcgatgaagccctgaaagacgcgcagactggtggttctggtgagaacctgtactttcaaagctcagataatgggcctcaaaaccagcgcaacgctccacgtataaccttcggtggcccgtctgactccacaggcagcaaccagaatggtgagcgtagtggagccaggtctaagcagcgccgtccccagggtctgccgaacaacacggcgagctggtttactgcgcttacccaacacggtaaagaagacttaaaattcccgcgtggccagggcgtcccgatcaacactaactcttccccggatgatcagattggttattaccgcagagcaactcgtcggattcgcggcggcgacggtaaaatgaaagatttgtctccgcgttggtacttttactatctcggcaccggtccggaagctggactgccctacggggcaaacaaggacgggatcatttgggtggctaccgaaggtgccctgaatactccaaaagatcatatcggcacccgtaaccctgctaataacgctgcgatcgttctgcaactgcctcagggtacaactctgccaaaaggcttctatgcagaagggtcgcgtggtggcagccaggcgagtagccgtagcagctcccgctctcgcaactcgtcccgtaactccactccgggctcttctcgcggcacgtccccggctcgtatggcaggtaacggtggtgacgctgctctggcgctgctactgctggacaggctgaaccagctggagtcgaagatgagtggtaaaggccaacagcagcagggccagaccgttaccaaaaagagcgcagctgaagcatctaaagcgccgcgacagaaacgtaccgcgactaaagcgtacaatgtaacacaggccttcggtcgtcgaggtccggagcaaactcaaggaaactttggcgatcaggaattaatccgccaggggaccgactacaaacactggccgcaaattgcccagttcgccccatccgctagtgcattcttcggtatgagccgcatcggcatggaagtaacgccaagtggtacgtggctgacctacaccggtgctatcaagcttgatgacaaggacccgaactttaaagaccaggttattctgcttaacaaacatattgatgcctataaaactttcccgccgaccgaacccaaaaaggacaaaaagaaaaaagctgatgaaacccaggctctaccgcagcgtcagaaaaaacagcaaactgtgactctgctgccagctgcggacctggatgatttttccaagcagctgcaacagtctatgagctctgcggactctacgcaggctggtggttctggtcaccatcatcaccatcattaa

SEQ ID NO: 2892 - DNA, 2421 bp, Artificial Sequence
  Description of Artificial Sequence: Synthetic polynucleotide
atgaaaatcgaagaaggtaaactggtaatctggattaacggcgataaaggctataacggtctcgctgaagtcggtaagaaattcgagaaagataccggaattaaagtcaccgttgagcatccggataaactggaagagaaattcccacaggttgcggcaactggcgatggccctgacattatcttctgggcacacgaccgctttggtggctacgctcaatctggcctgttggctgaaatcaccccggacaaagcgttccaggacaagctgtatccgtttacctgggatgccgtacgttacaacggcaagctgattgcttacccgatcgctgttgaagcgttatcgctgatttataacaaagatctgctgccgaacccgccaaaaacctgggaagagatcccggcgctggataaagaactgaaagcgaaaggtaagagcgcgctgatgttcaacctgcaagaaccgtacttcacctggccgctgattgctgctgacgggggttatgcgttcaagtatgaaaacggcaagtacgacattaaagacgtgggcgtggataacgctggcgcgaaagcgggtctgaccttcctggttgacctgattaaaaacaaacacatgaatgcagacaccgattactccatcgcagaagctgcctttaataaaggcgaaacagcgatgaccatcaacggcccgtgggcatggtccaacatcgacaccagcaaagtgaattatggtgtaacggtactgccgaccttcaagggtcaaccatccaaaccgttcgttggcgtgctgagcgcaggtattaacgccgccagtccgaacaaagagctggcgaaagagttcctcgaaaactatctgctgactgatgaaggtctggaagcggttaataaagacaaaccgctgggtgccgtagcgctgaagtcttacgaggaagagttggcgaaagatccacgtattgccgccaccatggaaaacgcccagaaaggtgaaatcatgccgaacatcccgcagatgtccgctttctggtatgccgtgcgtactgcggtgatcaacgccgccagcggtcgtcagactgtcgatgaagccctgaaagacgcgcagactggtggttctggtgagaacctgtactttcaaagctcagataatgggcctcaaaaccagcgcaacgctccacgtataaccttcggtggcccgtctgactccacaggcagcaaccagaatggtgagcgtagtggagccaggtctaagcagcgccgtccccagggtctgccgaacaacacggcgagctggtttactgcgcttacccaacacggtaaagaagacttaaaattcccgcgtggccagggcgtcccgatcaacactaactcttccccggatgatcagattggttattaccgcagagcaactcgtcggattcgcggcggcgacggtaaaatgaaagatttgtctccgcgttggtacttttactatctcggcaccggtccggaagctggactgccctacggggcaaacaaggacgggatcatttgggtggctaccgaaggtgccctgaatactccaaaagatcatatcggcacccgtaaccctgctaataacgctgcgatcgttctgcaactgcctcagggtacaactctgccaaaaggcttctatgcagaagggtcgcgtggtggcagccaggcgagtagccgtagcagctcccgctctcgcaactcgtcccgtaactccactccgggctcttctcgcggcacgtccccggctcgtatggcaggtaacggtggtgacgctgctctggcgctgctactgctggacaggctgaaccagctggagtcgaagatgagtggtaaaggccaacagcagcagggccagaccgttaccaaaaagagcgcagctgaagcatctaaaaaaccgcgacagaaacgtaccgcgactaaagcgtacaatgtaacacaggccttcggtcgtcgaggtccggagcaaactcaaggaaactttggcgatcaggaattaacgcgccaggggaccgactacaaacactggccgcaaattgcccagttcgccccatccgctagtgcattcttcggtatgagccgcatcggcatggaagtaacgccaagtggtacgtggctgacctacaccggtgctatcaagcttgatgacaaggacccgaactttaaagaccaggttattctgcttaacaaacatattgatgcctataaaactttcccgccgaccgaacccaaaaaggacaaaaagaaaaaagctgatgaaacccaggctctaccgcagcgtcagaaaaaacagcaaactgtgactctgctgccagctgcggacctggatgatttttccaagcagctgcaacagtctatgagctctgcggactctacgcaggctggtggttctggtcaccatcatcaccatcattaa

SEQ ID NO: 2893 - DNA, 2421 bp, Artificial Sequence
  Description of Artificial Sequence: Synthetic polynucleotide
atgaaaatcgaagaaggtaaactggtaatctggattaacggcgataaaggctataacggtctcgctgaagtcggtaagaaattcgagaaagataccggaattaaagtcaccgttgagcatccggataaactggaagagaaattcccacaggttgcggcaactggcgatggccctgacattatcttctgggcacacgaccgctttggtggctacgctcaatctggcctgttggctgaaatcaccccggacaaagcgttccaggacaagctgtatccgtttacctgggatgccgtacgttacaacggcaagctgattgcttacccgatcgctgttgaagcgttatcgctgatttataacaaagatctgctgccgaacccgccaaaaacctgggaagagatcccggcgctggataaagaactgaaagcgaaaggtaagagcgcgctgatgttcaacctgcaagaaccgtacttcacctggccgctgattgctgctgacgggggttatgcgttcaagtatgaaaacggcaagtacgacattaaagacgtgggcgtggataacgctggcgcgaaagcgggtctgaccttcctggttgacctgattaaaaacaaacacatgaatgcagacaccgattactccatcgcagaagctgcctttaataaaggcgaaacagcgatgaccatcaacggcccgtgggcatggtccaacatcgacaccagcaaagtgaattatggtgtaacggtactgccgaccttcaagggtcaaccatccaaaccgttcgttggcgtgctgagcgcaggtattaacgccgccagtccgaacaaagagctggcgaaagagttcctcgaaaactatctgctgactgatgaaggtctggaagcggttaataaagacaaaccgctgggtgccgtagcgctgaagtcttacgaggaagagttggcgaaagatccacgtattgccgccaccatggaaaacgcccagaaaggtgaaatcatgccgaacatcccgcagatgtccgctttctggtatgccgtgcgtactgcggtgatcaacgccgccagcggtcgtcagactgtcgatgaagccctgaaagacgcgcagactggtggttctggtgagaacctgtactttcaaagctcagataatgggcctcaaaaccagcgcaacgctccacgtataaccttcggtggcccgtctgactccacaggcagcaaccagaatggtgagcgtagtggagccaggtctaagcagcgccgtccccagggtctgccgaacaacacggcgagctggtttactgcgcttacccaacacggtaaagaagacttaaaattcccgcgtggccagggcgtcccgatcaacactaactcttccccggatgatcagattggttattaccgcagagcaactcgtcggattcgcggcggcgacggtaaaatgaaagatttgtctccgcgttggtacttttactatctcggcaccggtccggaagctggactgccctacggggcaaacaaggtggggatcatttgggtggctaccgaaggtgccctgaatactccaaaagatcatatcggcacccgtaaccctgctaataacgctgcgatcgttctgcaactgcctcagggtacaactctgccaaaaggcttctatgcagaagggtcgcgtggtggcagccaggcgagtagccgtagcagctcccgctctcgcaactcgtcccgtaactccactccgggctcttctcgcggcacgtccccggctcgtatggcaggtaacggtggtgacgctgctctggcgctgctactgctggacaggctgaaccagctggagtcgaagatgagtggtaaaggccaacagcagcagggccagaccgttaccaaaaagagcgcagctgaagcatctaaaaaaccgcgacagaaacgtaccgcgactaaagcgtacaatgtaacacaggccttcggtcgtcgaggtccggagcaaactcaaggaaactttggcgatcaggaattaatccgccaggggaccgactacaaacactggccgcaaattgcccagttcgccccatccgctagtgcattcttcggtatgagccgcatcggcatggaagtaacgccaagtggtacgtggctgacctacaccggtgctatcaagcttgatgacaaggacccgaactttaaagaccaggttattctgcttaacaaacatattgatgcctataaaactttcccgccgaccgaacccaaaaaggacaaaaagaaaaaagctgatgaaacccaggctctaccgcagcgtcagaaaaaacagcaaactgtgactctgctgccagctgcggacctggatgatttttccaagcagctgcaacagtctatgagctctgcggactctacgcaggctggtggttctggtcaccatcatcaccatcattaa

SEQ ID NO: 2894 - DNA, 2421 bp, Artificial Sequence
  Description of Artificial Sequence: Synthetic polynucleotide
atgaaaatcgaagaaggtaaactggtaatctggattaacggcgataaaggctataacggtctcgctgaagtcggtaagaaattcgagaaagataccggaattaaagtcaccgttgagcatccggataaactggaagagaaattcccacaggttgcggcaactggcgatggccctgacattatcttctgggcacacgaccgctttggtggctacgctcaatctggcctgttggctgaaatcaccccggacaaagcgttccaggacaagctgtatccgtttacctgggatgccgtacgttacaacggcaagctgattgcttacccgatcgctgttgaagcgttatcgctgatttataacaaagatctgctgccgaacccgccaaaaacctgggaagagatcccggcgctggataaagaactgaaagcgaaaggtaagagcgcgctgatgttcaacctgcaagaaccgtacttcacctggccgctgattgctgctgacgggggttatgcgttcaagtatgaaaacggcaagtacgacattaaagacgtgggcgtggataacgctggcgcgaaagcgggtctgaccttcctggttgacctgattaaaaacaaacacatgaatgcagacaccgattactccatcgcagaagctgcctttaataaaggcgaaacagcgatgaccatcaacggcccgtgggcatggtccaacatcgacaccagcaaagtgaattatggtgtaacggtactgccgaccttcaagggtcaaccatccaaaccgttcgttggcgtgctgagcgcaggtattaacgccgccagtccgaacaaagagctggcgaaagagttcctcgaaaactatctgctgactgatgaaggtctggaagcggttaataaagacaaaccgctgggtgccgtagcgctgaagtcttacgaggaagagttggcgaaagatccacgtattgccgccaccatggaaaacgcccagaaaggtgaaatcatgccgaacatcccgcagatgtccgctttctggtatgccgtgcgtactgcggtgatcaacgccgccagcggtcgtcagactgtcgatgaagccctgaaagacgcgcagactggtggttctggtgagaacctgtactttcaaagctcagataatgggcctcaaaaccagcgcaacgctccacgtataaccttcggtggcccgtctgactccacaggcagcaaccagaatggtgagcgtagtggagccaggtctaagcagcgccgtccccagggtctgccgaacaacacggcgagctggtttactgcgcttacccaacacggtaaagaagacttaaaattcccgcgtggccagggcgtcccgatcaacactaactcttccccggatgatcagattggttattaccgcagagcaactcgtcggattcgcggcggcgacggtaaaatgaaagatttgtctccgcgttggtacttttactatctcggcaccggtccggaagctggactgccctacggggcaaacaaggacgggatcatttgggtggctaccgaaggtgccctgaatactccaaaagatcatatcggcacccgtaaccctgctaataacgctgcgatcgttctgcaactgcctcagggtacaactctgccaaaaggcttctatgcagaagggtcgcgtggtggcagccaggcgagtagccgtagcagctcccgctctcgcaactcgtcccgtaactccactccgggctcttctcgcggcacgtccccggctcgtatggcaggtaacggtggtgacgctgctctggcgctgctactgctggacaggctgaaccagctggagtcgaagatgagtggtaaaggccaacagcagcagggccagaccgttaccaaaaagagcgcagctgaagcatctaaaaaaccgcgacagaaacgtaccgcgactaaagggtacaatgtaacacaggccttcggtcgtcgaggtccggagcaaactcaaggaaactttggcgatcaggatttaatcaaattagggaccgactacaaacactggccgcaaattgcccagttcgccccatccgctagtgcattcttcggtatgagccgcatctcgatggaagaaacgccaagtggtacgtggctgacctacaccggtgctatcaagcttgataaaaaggacccgaactttaaagaccaggttattctgcttaacaaacatattgatgcctataaaactttcccgccgaccgaacccaaaaaggacaaaaagaaaaaagctgatgaaacccaggctctaccgcagcgtcagaaaaaacagcaaactgtgactctgctgccagctgcggacctggatgatttttccaagcagctgcaacagtctatgagctctgcggactctacgcaggctggtggttctggtcaccatcatcaccatcattaa

SEQ ID NO: 2895 - DNA, 2421 bp, Artificial Sequence
  Description of Artificial Sequence: Synthetic polynucleotide
atgaaaatcgaagaaggtaaactggtaatctggattaacggcgataaaggctataacggtctcgctgaagtcggtaagaaattcgagaaagataccggaattaaagtcaccgttgagcatccggataaactggaagagaaattcccacaggttgcggcaactggcgatggccctgacattatcttctgggcacacgaccgctttggtggctacgctcaatctggcctgttggctgaaatcaccccggacaaagcgttccaggacaagctgtatccgtttacctgggatgccgtacgttacaacggcaagctgattgcttacccgatcgctgttgaagcgttatcgctgatttataacaaagatctgctgccgaacccgccaaaaacctgggaagagatcccggcgctggataaagaactgaaagcgaaaggtaagagcgcgctgatgttcaacctgcaagaaccgtacttcacctggccgctgattgctgctgacgggggttatgcgttcaagtatgaaaacggcaagtacgacattaaagacgtgggcgtggataacgctggcgcgaaagcgggtctgaccttcctggttgacctgattaaaaacaaacacatgaatgcagacaccgattactccatcgcagaagctgcctttaataaaggcgaaacagcgatgaccatcaacggcccgtgggcatggtccaacatcgacaccagcaaagtgaattatggtgtaacggtactgccgaccttcaagggtcaaccatccaaaccgttcgttggcgtgctgagcgcaggtattaacgccgccagtccgaacaaagagctggcgaaagagttcctcgaaaactatctgctgactgatgaaggtctggaagcggttaataaagacaaaccgctgggtgccgtagcgctgaagtcttacgaggaagagttggcgaaagatccacgtattgccgccaccatggaaaacgcccagaaaggtgaaatcatgccgaacatcccgcagatgtccgctttctggtatgccgtgcgtactgcggtgatcaacgccgccagcggtcgtcagactgtcgatgaagccctgaaagacgcgcagactggtggttctggtgagaacctgtactttcaaagctcagataatgggcctcaaaaccagcgcaacgctccacgtataaccttcggtggcccgtctgactccacaggcagcaaccagaatggtgagcgtagtggagccaggtctaagcagcgccgtccccagggtctgccgaacaacacggcgagctggtttactgcgcttacccaacacggtaaagaagacttaaaattcccgaaaggccagggcgtcccgatcaacactaactctaagccggatgatcagattggttattaccgcagacaagttcgtcggtatcgcggcggcgacggtcaaatgaaagatttggatccgcgttggtacttttactatctcggcaccggtccggaagctggactgccctacggggcaaacaaggacgggatcatttgggtggctaccgaaggtgccctgaatactccaaaagatcatatcggcacccgtaaccctgctaataacgctgcgatcgttctgcaactgcctcagggtacaactctgccaaaaggcttctatgcagaagggtcgcgtggtggcagccaggcgagtagccgtagcagctcccgctctcgcaactcgtcccgtaactccactccgggctcttctcgcggcacgtccccggctcgtatggcaggtaacggtggtgacgctgctctggcgctgctactgctggacaggctgaaccagctggagtcgaagatgagtggtaaaggccaacagcagcagggccagaccgttaccaaaaagagcgcagctgaagcatctaaaaaaccgcgacagaaacgtaccgcgactaaagcgtacaatgtaacacaggccttcggtcgtcgaggtccggagcaaactcaaggaaactttggcgatcaggaattaatccgccaggggaccgactacaaacactggccgcaaattgcccagttcgccccatccgctagtgcattcttcggtatgagccgcatcggcatggaagtaacgccaagtggtacgtggctgacctacaccggtgctatcaagcttgatgacaaggacccgaactttaaagaccaggttattctgcttaacaaacatattgatgcctataaaactttcccgccgaccgaacccaaaaaggacaaaaagaaaaaagctgatgaaacccaggctctaccgcagcgtcagaaaaaacagcaaactgtgactctgctgccagctgcggacctggatgatttttccaagcagctgcaacagtctatgagctctgcggactctacgcaggctggtggttctggtcaccatcatcaccatcattaa

SEQ ID NO: 2896 - DNA, 2421 bp, Artificial Sequence
  Description of Artificial Sequence: Synthetic polynucleotide
atgaaaatcgaagaaggtaaactggtaatctggattaacggcgataaaggctataacggtctcgctgaagtcggtaagaaattcgagaaagataccggaattaaagtcaccgttgagcatccggataaactggaagagaaattcccacaggttgcggcaactggcgatggccctgacattatcttctgggcacacgaccgctttggtggctacgctcaatctggcctgttggctgaaatcaccccggacaaagcgttccaggacaagctgtatccgtttacctgggatgccgtacgttacaacggcaagctgattgcttacccgatcgctgttgaagcgttatcgctgatttataacaaagatctgctgccgaacccgccaaaaacctgggaagagatcccggcgctggataaagaactgaaagcgaaaggtaagagcgcgctgatgttcaacctgcaagaaccgtacttcacctggccgctgattgctgctgacgggggttatgcgttcaagtatgaaaacggcaagtacgacattaaagacgtgggcgtggataacgctggcgcgaaagcgggtctgaccttcctggttgacctgattaaaaacaaacacatgaatgcagacaccgattactccatcgcagaagctgcctttaataaaggcgaaacagcgatgaccatcaacggcccgtgggcatggtccaacatcgacaccagcaaagtgaattatggtgtaacggtactgccgaccttcaagggtcaaccatccaaaccgttcgttggcgtgctgagcgcaggtattaacgccgccagtccgaacaaagagctggcgaaagagttcctcgaaaactatctgctgactgatgaaggtctggaagcggttaataaagacaaaccgctgggtgccgtagcgctgaagtcttacgaggaagagttggcgaaagatccacgtattgccgccaccatggaaaacgcccagaaaggtgaaatcatgccgaacatcccgcagatgtccgctttctggtatgccgtgcgtactgcggtgatcaacgccgccagcggtcgtcagactgtcgatgaagccctgaaagacgcgcagactggtggttctggtgagaacctgtactttcaaagctcagataatgggcctcaaaaccagcgcaacgctccacgtataaccttcggtggcccgtctgactccacaggcagcaaccagaatggtgagcgtagtggagccaggtctaagcagcgccgtccccagggtctgccgaacaacacggcgagctggtttactgcgcttacccaacacggtaaagaagacttaaaattcccgcgtggccagggcgtcccgatcaacactaactcttccccggatgatcagattggttattaccgcagagcaactcgtcggattcgcggcggcgacggtaaaatgaaagatttgtctccgcgttggtacttttactatctcggcaccggtccggaagctggactgccctacggggcaaacaaggacgggatcctgtgggtggctaccgaaggtgccctgaatactccaaaagatcatatcggcacccgtaaccctgctaataacgctgcgatcgttctgcaactgcctcagggtacaactctgccaaaaggcttctatgcagaagggtcgcgtggtggcagccaggcgagtagccgtagcagctcccgctctcgcaactcgtcccgtaactccactccgggctcttctcgcggcacgtccccggctcgtatggcaggtaacggtggtgacgctgctctggcgctgctactgctggacaggctgaaccagctggagtcgaagatgagtggtaaaggccaacagcagcagggccagaccgttaccaaaaagagcgcagctgaagcatctaaaaaaccgcgacagaaacgtaccgcgactaaagcgtacaatgtaacacaggccttcggtcgtcgaggtccggagcaaactcaaggaaactttggcgatcaggaattaatccgccaggggaccgactacaaacactggccgcaaattgcccagttcgccccatccgctagtgcattcttcggtatgagccgcatcggcatggaagtaacgccaagtggtacgtggctgacctacaccggtgctatcaagcttgatgacaaggacccgaactttaaagaccaggttattctgcttaacaaacatattgatgcctataaaactttcccgccgaccgaacccaaaaaggacaaaaagaaaaaagctgatgaaacccaggctctaccgcagcgtcagaaaaaacagcaaactgtgactctgctgccagctgcggacctggatgatttttccaagcagctgcaacagtctatgagctctgcggactctacgcaggctggtggttctggtcaccatcatcaccatcattaa

SEQ ID NO: 2897 - DNA, 2421 bp, Artificial Sequence
  Description of Artificial Sequence: Synthetic polynucleotide
atgaaaatcgaagaaggtaaactggtaatctggattaacggcgataaaggctataacggtctcgctgaagtcggtaagaaattcgagaaagataccggaattaaagtcaccgttgagcatccggataaactggaagagaaattcccacaggttgcggcaactggcgatggccctgacattatcttctgggcacacgaccgctttggtggctacgctcaatctggcctgttggctgaaatcaccccggacaaagcgttccaggacaagctgtatccgtttacctgggatgccgtacgttacaacggcaagctgattgcttacccgatcgctgttgaagcgttatcgctgatttataacaaagatctgctgccgaacccgccaaaaacctgggaagagatcccggcgctggataaagaactgaaagcgaaaggtaagagcgcgctgatgttcaacctgcaagaaccgtacttcacctggccgctgattgctgctgacgggggttatgcgttcaagtatgaaaacggcaagtacgacattaaagacgtgggcgtggataacgctggcgcgaaagcgggtctgaccttcctggttgacctgattaaaaacaaacacatgaatgcagacaccgattactccatcgcagaagctgcctttaataaaggcgaaacagcgatgaccatcaacggcccgtgggcatggtccaacatcgacaccagcaaagtgaattatggtgtaacggtactgccgaccttcaagggtcaaccatccaaaccgttcgttggcgtgctgagcgcaggtattaacgccgccagtccgaacaaagagctggcgaaagagttcctcgaaaactatctgctgactgatgaaggtctggaagcggttaataaagacaaaccgctgggtgccgtagcgctgaagtcttacgaggaagagttggcgaaagatccacgtattgccgccaccatggaaaacgcccagaaaggtgaaatcatgccgaacatcccgcagatgtccgctttctggtatgccgtgcgtactgcggtgatcaacgccgccagcggtcgtcagactgtcgatgaagccctgaaagacgcgcagactggtggttctggtgagaacctgtactttcaaagctcagataatgggcctcaaaaccagcgcaacgctccacgtataaccttcggtggcccgtctgactccacaggcagcaaccagaatggtgagcgtagtggagccaggtctaagcagcgccgtccccagggtctgccgaacaacacggcgagctggtttactgcgcttacccaacacggtaaagaagacttaaaattcccgcgtggccagggcgtcccgatcaacactaactcttccccggatgatcagattggttattaccgcagagcaactcgtcggattcgcggcggcgacggtaaaatgaaagatttgtctccgcgttggtacttttactatctcggcaccggtccggaagctggactgccctacggggcaaacaaggacgggatcatttgggtggctaccgaaggtgccctgaatactccaaaagatcatatcggcacccgtaaccctgctaataacgctgcgcgcgttctgcaactgcctcagggtacaactctgccaaaaggcttctatgcagaagggtcgcgtggtggcagccaggcgagtagccgtagcagctcccgctctcgcaactcgtcccgtaactccactccgggctcttctcgcggcacgtccccggctcgtatggcaggtaacggtggtgacgctgctctggcgctgctactgctggacaggctgaaccagctggagtcgaagatgagtggtaaaggccaacagcagcagggccagaccgttaccaaaaagagcgcagctgaagcatctaaaaaaccgcgacagaaacgtaccgcgactaaagcgtacaatgtaacacaggccttcggtcgtcgaggtccggagcaaactcaaggaaactttggcgatcaggaattaatccgccaggggaccgactacaaacactggccgcaaattgcccagttcgccccatccgctagtgcattcttcggtatgagccgcatcggcatggaagtaacgccaagtggtacgtggctgacctacaccggtgctatcaagcttgatgacaaggacccgaactttaaagaccaggttattctgcttaacaaacatattgatgcctataaaactttcccgccgaccgaacccaaaaaggacaaaaagaaaaaagctgatgaaacccaggctctaccgcagcgtcagaaaaaacagcaaactgtgactctgctgccagctgcggacctggatgatttttccaagcagctgcaacagtctatgagctctgcggactctacgcaggctggtggttctggtcaccatcatcaccatcattaa

SEQ ID NO: 2898 - DNA, 2421 bp, Artificial Sequence
  Description of Artificial Sequence: Synthetic polynucleotide
atgaaaatcgaagaaggtaaactggtaatctggattaacggcgataaaggctataacggtctcgctgaagtcggtaagaaattcgagaaagataccggaattaaagtcaccgttgagcatccggataaactggaagagaaattcccacaggttgcggcaactggcgatggccctgacattatcttctgggcacacgaccgctttggtggctacgctcaatctggcctgttggctgaaatcaccccggacaaagcgttccaggacaagctgtatccgtttacctgggatgccgtacgttacaacggcaagctgattgcttacccgatcgctgttgaagcgttatcgctgatttataacaaagatctgctgccgaacccgccaaaaacctgggaagagatcccggcgctggataaagaactgaaagcgaaaggtaagagcgcgctgatgttcaacctgcaagaaccgtacttcacctggccgctgattgctgctgacgggggttatgcgttcaagtatgaaaacggcaagtacgacattaaagacgtgggcgtggataacgctggcgcgaaagcgggtctgaccttcctggttgacctgattaaaaacaaacacatgaatgcagacaccgattactccatcgcagaagctgcctttaataaaggcgaaacagcgatgaccatcaacggcccgtgggcatggtccaacatcgacaccagcaaagtgaattatggtgtaacggtactgccgaccttcaagggtcaaccatccaaaccgttcgttggcgtgctgagcgcaggtattaacgccgccagtccgaacaaagagctggcgaaagagttcctcgaaaactatctgctgactgatgaaggtctggaagcggttaataaagacaaaccgctgggtgccgtagcgctgaagtcttacgaggaagagttggcgaaagatccacgtattgccgccaccatggaaaacgcccagaaaggtgaaatcatgccgaacatcccgcagatgtccgctttctggtatgccgtgcgtactgcggtgatcaacgccgccagcggtcgtcagactgtcgatgaagccctgaaagacgcgcagactggtggttctggtgagaacctgtactttcaaagctcagataatgggcctcaaaaccagcgcaacgctccacgtataaccttcggtggcccgtctgactccacaggcagcaaccagaatggtgagcgtagtggagccaggtctaagcagcgccgtccccagggtctgccgaacaacacggcgagctggtttactgcgcttacccaacacggtaaagaagacttaaaattcccgcgtggccagggcgtcccgatcaacactaactcttccccggatgatcagattggttattggcgcagagcaactcgtcggattcgcggcggcgacggtaaaatgaaagatttgtctccgcgttggtacttttactatctcggcaccggtccggaagctggactgccctacggggcaaacaaggacgggatcatttgggtggctaccgaaggtgccctgaatactccaaaagatcatatcggcacccgtaaccctgctaataacgctgcgatcgttctgcaactgcctcagggtacaactctgccaaaaggcttctatgcagaagggtcgcgtggtggcagccaggcgagtagccgtagcagctcccgctctcgcaactcgtcccgtaactccactccgggctcttctcgcggcacgtccccggctcgtatggcaggtaacggtggtgacgctgctctggcgctgctactgctggacaggctgaaccagctggagtcgaagatgagtggtaaaggccaacagcagcagggccagaccgttaccaaaaagagcgcagctgaagcatctaaaaaaccgcgacagaaacgtaccgcgactaaagcgtacaatgtaacacaggccttcggtcgtcgaggtccggagcaaactcaaggaaactttggcgatcaggaattaatccgccaggggaccgactacaaacactggccgcaaattgcccagttcgccccatccgctagtgcattcttcggtatgagccgcatcggcatggaagtaacgccaagtggtacgtggctgacctacaccggtgctatcaagcttgatgacaaggacccgaactttaaagaccaggttattctgcttaacaaacatattgatgcctataaaactttcccgccgaccgaacccaaaaaggacaaaaagaaaaaagctgatgaaacccaggctctaccgcagcgtcagaaaaaacagcaaactgtgactctgctgccagctgcggacctggatgatttttccaagcagctgcaacagtctatgagctctgcggactctacgcaggctggtggttctggtcaccatcatcaccatcattaa

SEQ ID NO: 2899 - DNA, 2421 bp, Artificial Sequence
  Description of Artificial Sequence: Synthetic polynucleotide
atgaaaatcgaagaaggtaaactggtaatctggattaacggcgataaaggctataacggtctcgctgaagtcggtaagaaattcgagaaagataccggaattaaagtcaccgttgagcatccggataaactggaagagaaattcccacaggttgcggcaactggcgatggccctgacattatcttctgggcacacgaccgctttggtggctacgctcaatctggcctgttggctgaaatcaccccggacaaagcgttccaggacaagctgtatccgtttacctgggatgccgtacgttacaacggcaagctgattgcttacccgatcgctgttgaagcgttatcgctgatttataacaaagatctgctgccgaacccgccaaaaacctgggaagagatcccggcgctggataaagaactgaaagcgaaaggtaagagcgcgctgatgttcaacctgcaagaaccgtacttcacctggccgctgattgctgctgacgggggttatgcgttcaagtatgaaaacggcaagtacgacattaaagacgtgggcgtggataacgctggcgcgaaagcgggtctgaccttcctggttgacctgattaaaaacaaacacatgaatgcagacaccgattactccatcgcagaagctgcctttaataaaggcgaaacagcgatgaccatcaacggcccgtgggcatggtccaacatcgacaccagcaaagtgaattatggtgtaacggtactgccgaccttcaagggtcaaccatccaaaccgttcgttggcgtgctgagcgcaggtattaacgccgccagtccgaacaaagagctggcgaaagagttcctcgaaaactatctgctgactgatgaaggtctggaagcggttaataaagacaaaccgctgggtgccgtagcgctgaagtcttacgaggaagagttggcgaaagatccacgtattgccgccaccatggaaaacgcccagaaaggtgaaatcatgccgaacatcccgcagatgtccgctttctggtatgccgtgcgtactgcggtgatcaacgccgccagcggtcgtcagactgtcgatgaagccctgaaagacgcgcagactggtggttctggtgagaacctgtactttcaaagctcagataatgggcctcaaaaccagcgcaacgctccacgtataaccttcggtggcccgtctgactccacaggcagcaaccagaatggtgagcgtagtggagccaggtctaagcagcgccgtccccagggtctgccgaacaacacggcgagctggtttactgcgcttacccaacacggtaaagaagacttaaaattcccgcgtggccagggcgtcccgatcaacactaactcttccccggatgatcagattggttattaccgcagatatactcgtcggattcgcggcggcgacggtaaaatgaaagatttgtctccgcgttggtacttttactatctcggcaccggtccggaagctggactgccctacggggcaaacaaggacgggatcatttgggtggctaccgaaggtgccctgaatactccaaaagatcatatcggcacccgtaaccctgctaataacgctgcgatcgttctgcaactgcctcagggtacaactctgccaaaaggcttctatgcagaagggtcgcgtggtggcagccaggcgagtagccgtagcagctcccgctctcgcaactcgtcccgtaactccactccgggctcttctcgcggcacgtccccggctcgtatggcaggtaacggtggtgacgctgctctggcgctgctactgctggacaggctgaaccagctggagtcgaagatgagtggtaaaggccaacagcagcagggccagaccgttaccaaaaagagcgcagctgaagcatctaaaaaaccgcgacagaaacgtaccgcgactaaagcgtacaatgtaacacaggccttcggtcgtcgaggtccggagcaaactcaaggaaactttggcgatcaggaattaatccgccaggggaccgactacaaacactggccgcaaattgcccagttcgccccatccgctagtgcattcttcggtatgagccgcatcggcatggaagtaacgccaagtggtacgtggctgacctacaccggtgctatcaagcttgatgacaaggacccgaactttaaagaccaggttattctgcttaacaaacatattgatgcctataaaactttcccgccgaccgaacccaaaaaggacaaaaagaaaaaagctgatgaaacccaggctctaccgcagcgtcagaaaaaacagcaaactgtgactctgctgccagctgcggacctggatgatttttccaagcagctgcaacagtctatgagctctgcggactctacgcaggctggtggttctggtcaccatcatcaccatcattaa

SEQ ID NO: 2900 - DNA, 2421 bp, Artificial Sequence
  Description of Artificial Sequence: Synthetic polynucleotide
atgaaaatcgaagaaggtaaactggtaatctggattaacggcgataaaggctataacggtctcgctgaagtcggtaagaaattcgagaaagataccggaattaaagtcaccgttgagcatccggataaactggaagagaaattcccacaggttgcggcaactggcgatggccctgacattatcttctgggcacacgaccgctttggtggctacgctcaatctggcctgttggctgaaatcaccccggacaaagcgttccaggacaagctgtatccgtttacctgggatgccgtacgttacaacggcaagctgattgcttacccgatcgctgttgaagcgttatcgctgatttataacaaagatctgctgccgaacccgccaaaaacctgggaagagatcccggcgctggataaagaactgaaagcgaaaggtaagagcgcgctgatgttcaacctgcaagaaccgtacttcacctggccgctgattgctgctgacgggggttatgcgttcaagtatgaaaacggcaagtacgacattaaagacgtgggcgtggataacgctggcgcgaaagcgggtctgaccttcctggttgacctgattaaaaacaaacacatgaatgcagacaccgattactccatcgcagaagctgcctttaataaaggcgaaacagcgatgaccatcaacggcccgtgggcatggtccaacatcgacaccagcaaagtgaattatggtgtaacggtactgccgaccttcaagggtcaaccatccaaaccgttcgttggcgtgctgagcgcaggtattaacgccgccagtccgaacaaagagctggcgaaagagttcctcgaaaactatctgctgactgatgaaggtctggaagcggttaataaagacaaaccgctgggtgccgtagcgctgaagtcttacgaggaagagttggcgaaagatccacgtattgccgccaccatggaaaacgcccagaaaggtgaaatcatgccgaacatcccgcagatgtccgctttctggtatgccgtgcgtactgcggtgatcaacgccgccagcggtcgtcagactgtcgatgaagccctgaaagacgcgcagactggtggttctggtgagaacctgtactttcaaagctcagataatgggcctcaaaaccagcgcaacgctccacgtataaccttcggtggcccgtctgactccacaggcagcaaccagaatggtgagcgtagtggagccaggtctaagcagcgccgtccccagggtctgccgaacaacacggcgagctggtttactgcgcttacccaacacggtaaagaagacttaaaattcccgcgtggccagggcgtcccgatcaacactaactcttccccggatgatcagattggttattaccgcagagcaactcgtcggattcgcggcggcgacggtaaaatgaaagatttgtctccggaatggtacttttactatctcggcaccggtccggaagctggactgccctacggggcaaacaaggacgggatcatttgggtggctaccgaaggtgccctgaatactccaaaagatcatatcggcacccgtaaccctgctaataacgctgcgatcgttctgcaactgcctcagggtacaactctgccaaaaggcttctatgcagaagggtcgcgtggtggcagccaggcgagtagccgtagcagctcccgctctcgcaactcgtcccgtaactccactccgggctcttctcgcggcacgtccccggctcgtatggcaggtaacggtggtgacgctgctctggcgctgctactgctggacaggctgaaccagctggagtcgaagatgagtggtaaaggccaacagcagcagggccagaccgttaccaaaaagagcgcagctgaagcatctaaaaaaccgcgacagaaacgtaccgcgactaaagcgtacaatgtaacacaggccttcggtcgtcgaggtccggagcaaactcaaggaaactttggcgatcaggaattaatccgccaggggaccgactacaaacactggccgcaaattgcccagttcgccccatccgctagtgcattcttcggtatgagccgcatcggcatggaagtaacgccaagtggtacgtggctgacctacaccggtgctatcaagcttgatgacaaggacccgaactttaaagaccaggttattctgcttaacaaacatattgatgcctataaaactttcccgccgaccgaacccaaaaaggacaaaaagaaaaaagctgatgaaacccaggctctaccgcagcgtcagaaaaaacagcaaactgtgactctgctgccagctgcggacctggatgatttttccaagcagctgcaacagtctatgagctctgcggactctacgcaggctggtggttctggtcaccatcatcaccatcattaa

SEQ ID NO: 2901 - DNA, 2421 bp, Artificial Sequence
  Description of Artificial Sequence: Synthetic polynucleotide
atgaaaatcgaagaaggtaaactggtaatctggattaacggcgataaaggctataacggtctcgctgaagtcggtaagaaattcgagaaagataccggaattaaagtcaccgttgagcatccggataaactggaagagaaattcccacaggttgcggcaactggcgatggccctgacattatcttctgggcacacgaccgctttggtggctacgctcaatctggcctgttggctgaaatcaccccggacaaagcgttccaggacaagctgtatccgtttacctgggatgccgtacgttacaacggcaagctgattgcttacccgatcgctgttgaagcgttatcgctgatttataacaaagatctgctgccgaacccgccaaaaacctgggaagagatcccggcgctggataaagaactgaaagcgaaaggtaagagcgcgctgatgttcaacctgcaagaaccgtacttcacctggccgctgattgctgctgacgggggttatgcgttcaagtatgaaaacggcaagtacgacattaaagacgtgggcgtggataacgctggcgcgaaagcgggtctgaccttcctggttgacctgattaaaaacaaacacatgaatgcagacaccgattactccatcgcagaagctgcctttaataaaggcgaaacagcgatgaccatcaacggcccgtgggcatggtccaacatcgacaccagcaaagtgaattatggtgtaacggtactgccgaccttcaagggtcaaccatccaaaccgttcgttggcgtgctgagcgcaggtattaacgccgccagtccgaacaaagagctggcgaaagagttcctcgaaaactatctgctgactgatgaaggtctggaagcggttaataaagacaaaccgctgggtgccgtagcgctgaagtcttacgaggaagagttggcgaaagatccacgtattgccgccaccatggaaaacgcccagaaaggtgaaatcatgccgaacatcccgcagatgtccgctttctggtatgccgtgcgtactgcggtgatcaacgccgccagcggtcgtcagactgtcgatgaagccctgaaagacgcgcagactggtggttctggtgagaacctgtactttcaaagctcagataatgggcctcaaaaccagcgcaacgctccacgtataaccttcggtggcccgtctgactccacaggcagcaaccagaatggtgagcgtagtggagccaggtctaagcagcgccgtccccagggtctgccgaacaacacggcgagctggtttactgcgcttacccaacacggtaaagaagacttaaaattcccgcgtggccagggcgtcccgatcaacactaactcttccccggatgatcagattggttattaccgcagagcaactcgtcggattcgcggcggcgacggtaaaatgaaagatttgtctccgcgttggtacttttactatctcggcaccggtccggaagctggactgccctacggggcaaacaaggacgggatcatttgggtggctaccgaaggtgccctgaatactccaaaagatcatatcggcacccgtaaccctgctaataacgctgcgtgggttctgcaactgcctcagggtacaactctgccaaaaggcttctatgcagaagggtcgcgtggtggcagccaggcgagtagccgtagcagctcccgctctcgcaactcgtcccgtaactccactccgggctcttctcgcggcacgtccccggctcgtatggcaggtaacggtggtgacgctgctctggcgctgctactgctggacaggctgaaccagctggagtcgaagatgagtggtaaaggccaacagcagcagggccagaccgttaccaaaaagagcgcagctgaagcatctaaaaaaccgcgacagaaacgtaccgcgactaaagcgtacaatgtaacacaggccttcggtcgtcgaggtccggagcaaactcaaggaaactttggcgatcaggaattaatccgccaggggaccgactacaaacactggccgcaaattgcccagttcgccccatccgctagtgcattcttcggtatgagccgcatcggcatggaagtaacgccaagtggtacgtggctgacctacaccggtgctatcaagcttgatgacaaggacccgaactttaaagaccaggttattctgcttaacaaacatattgatgcctataaaactttcccgccgaccgaacccaaaaaggacaaaaagaaaaaagctgatgaaacccaggctctaccgcagcgtcagaaaaaacagcaaactgtgactctgctgccagctgcggacctggatgatttttccaagcagctgcaacagtctatgagctctgcggactctacgcaggctggtggttctggtcaccatcatcaccatcattaa

SEQ ID NO: 2902 - DNA, 2421 bp, Artificial Sequence
  Description of Artificial Sequence: Synthetic polynucleotide
atgaaaatcgaagaaggtaaactggtaatctggattaacggcgataaaggctataacggtctcgctgaagtcggtaagaaattcgagaaagataccggaattaaagtcaccgttgagcatccggataaactggaagagaaattcccacaggttgcggcaactggcgatggccctgacattatcttctgggcacacgaccgctttggtggctacgctcaatctggcctgttggctgaaatcaccccggacaaagcgttccaggacaagctgtatccgtttacctgggatgccgtacgttacaacggcaagctgattgcttacccgatcgctgttgaagcgttatcgctgatttataacaaagatctgctgccgaacccgccaaaaacctgggaagagatcccggcgctggataaagaactgaaagcgaaaggtaagagcgcgctgatgttcaacctgcaagaaccgtacttcacctggccgctgattgctgctgacgggggttatgcgttcaagtatgaaaacggcaagtacgacattaaagacgtgggcgtggataacgctggcgcgaaagcgggtctgaccttcctggttgacctgattaaaaacaaacacatgaatgcagacaccgattactccatcgcagaagctgcctttaataaaggcgaaacagcgatgaccatcaacggcccgtgggcatggtccaacatcgacaccagcaaagtgaattatggtgtaacggtactgccgaccttcaagggtcaaccatccaaaccgttcgttggcgtgctgagcgcaggtattaacgccgccagtccgaacaaagagctggcgaaagagttcctcgaaaactatctgctgactgatgaaggtctggaagcggttaataaagacaaaccgctgggtgccgtagcgctgaagtcttacgaggaagagttggcgaaagatccacgtattgccgccaccatggaaaacgcccagaaaggtgaaatcatgccgaacatcccgcagatgtccgctttctggtatgccgtgcgtactgcggtgatcaacgccgccagcggtcgtcagactgtcgatgaagccctgaaagacgcgcagactggtggttctggtgagaacctgtactttcaaagctcagataatgggcctcaaaaccagcgcaacgctccacgtataaccttcggtggcccgtctgactccacaggcagcaaccagaatggtgagcgtagtggagccaggtctaagcagcgccgtccccagggtctgccgaacaacacggcgagctggtttactgcgcttacccaacacggtaaagaagacttaaaattcccgcgtggccagggcgtcccgatcaacactaactcttccccggatgatcagattggttattaccgcagagcaactcgtcggattcgcggcggcgacggtaaaatgaaagatttgtctccgcgttggtacttttactatctcggcaccggtccggaagctggactgccctacggggcaaacaaggacgggatcatttgggtggctaccgaaggtgccctgaatactccaaaagatcatatcggcacccgtaaccctgctaataacgctgcgatcgttctgcaactgcctcagggtacaactctgccaaaaggcttctatgcagaagggtcgcgtggtggcagccaggcgagtagccgtagcagctcccgctctcgcaactcgtcccgtaactccactccgggctcttctcgcggcacgtccccggctcgtatggcaggtaacggtggtgacgctgctctggcgctgctactgctggacaggctgaaccagctggagtcgaagatgagtggtaaaggccaacagcagcagggccagaccgttaccaaaaagagcgcagctgaagcatctaaaaaaccgcgacagaaacgtaccgcgactaaagcgtacaatgtaacacaggccttcggtcgtcgaggtccggagcaaactcaaggaaactttggcgatcaggaattaatccgccaggggtcagactacaaacactggccgcaaattgcccagttcgccccatccgctagtgcattcttcggtatgagccgcatcggcatggaagtaacgccaagtggtacgtggctgacctacaccggtgctatcaagcttgatgacaaggacccgaactttaaagaccaggttattctgcttaacaaacatattgatgcctataaaactttcccgccgaccgaacccaaaaaggacaaaaagaaaaaagctgatgaaacccaggctctaccgcagcgtcagaaaaaacagcaaactgtgactctgctgccagctgcggacctggatgatttttccaagcagctgcaacagtctatgagctctgcggactctacgcaggctggtggttctggtcaccatcatcaccatcattaa

SEQ ID NO: 2903 - DNA, 2421 bp, Artificial Sequence
  Description of Artificial Sequence: Synthetic polynucleotide
atgaaaatcgaagaaggtaaactggtaatctggattaacggcgataaaggctataacggtctcgctgaagtcggtaagaaattcgagaaagataccggaattaaagtcaccgttgagcatccggataaactggaagagaaattcccacaggttgcggcaactggcgatggccctgacattatcttctgggcacacgaccgctttggtggctacgctcaatctggcctgttggctgaaatcaccccggacaaagcgttccaggacaagctgtatccgtttacctgggatgccgtacgttacaacggcaagctgattgcttacccgatcgctgttgaagcgttatcgctgatttataacaaagatctgctgccgaacccgccaaaaacctgggaagagatcccggcgctggataaagaactgaaagcgaaaggtaagagcgcgctgatgttcaacctgcaagaaccgtacttcacctggccgctgattgctgctgacgggggttatgcgttcaagtatgaaaacggcaagtacgacattaaagacgtgggcgtggataacgctggcgcgaaagcgggtctgaccttcctggttgacctgattaaaaacaaacacatgaatgcagacaccgattactccatcgcagaagctgcctttaataaaggcgaaacagcgatgaccatcaacggcccgtgggcatggtccaacatcgacaccagcaaagtgaattatggtgtaacggtactgccgaccttcaagggtcaaccatccaaaccgttcgttggcgtgctgagcgcaggtattaacgccgccagtccgaacaaagagctggcgaaagagttcctcgaaaactatctgctgactgatgaaggtctggaagcggttaataaagacaaaccgctgggtgccgtagcgctgaagtcttacgaggaagagttggcgaaagatccacgtattgccgccaccatggaaaacgcccagaaaggtgaaatcatgccgaacatcccgcagatgtccgctttctggtatgccgtgcgtactgcggtgatcaacgccgccagcggtcgtcagactgtcgatgaagccctgaaagacgcgcagactggtggttctggtgagaacctgtactttcaaagctcagataatgggcctcaaaaccagcgcaacgctccacgtataaccttcggtggcccgtctgactccacaggcagcaaccagaatggtgagcgtagtggagccaggtctaagcagcgccgtccccagggtctgccgaacaacacggcgagctggtttcaagcgcttacccaacacggtaaagaagacttaaaattcccgcgtggccagggcgtcccgatcaacactaactcttccccggatgatcagattggttattaccgcagagcaactcgtcggattcgcggcggcgacggtaaaatgaaagatttgtctccgcgttggtacttttactatctcggcaccggtccggaagctggactgccctacggggcaaacaaggacgggatcatttgggtggctaccgaaggtgccctgaatactccaaaagatcatatcggcacccgtaaccctgctaataacgctgcgatcgttctgcaactgcctcagggtacaactctgccaaaaggcttctatgcagaagggtcgcgtggtggcagccaggcgagtagccgtagcagctcccgctctcgcaactcgtcccgtaactccactccgggctcttctcgcggcacgtccccggctcgtatggcaggtaacggtggtgacgctgctctggcgctgctactgctggacaggctgaaccagctggagtcgaagatgagtggtaaaggccaacagcagcagggccagaccgttaccaaaaagagcgcagctgaagcatctaaaaaaccgcgacagaaacgtaccgcgactaaagcgtacaatgtaacacaggccttcggtcgtcgaggtccggagcaaactcaaggaaactttggcgatcaggaattaatccgccaggggaccgactacaaacactggccgcaaattgcccagttcgccccatccgctagtgcattcttcggtatgagccgcatcggcatggaagtaacgccaagtggtacgtggctgacctacaccggtgctatcaagcttgatgacaaggacccgaactttaaagaccaggttattctgcttaacaaacatattgatgcctataaaactttcccgccgaccgaacccaaaaaggacaaaaagaaaaaagctgatgaaacccaggctctaccgcagcgtcagaaaaaacagcaaactgtgactctgctgccagctgcggacctggatgatttttccaagcagctgcaacagtctatgagctctgcggactctacgcaggctggtggttctggtcaccatcatcaccatcattaa

SEQ ID NO: 2904 - DNA, 2421 bp, Artificial Sequence
  Description of Artificial Sequence: Synthetic polynucleotide
atgaaaatcgaagaaggtaaactggtaatctggattaacggcgataaaggctataacggtctcgctgaagtcggtaagaaattcgagaaagataccggaattaaagtcaccgttgagcatccggataaactggaagagaaattcccacaggttgcggcaactggcgatggccctgacattatcttctgggcacacgaccgctttggtggctacgctcaatctggcctgttggctgaaatcaccccggacaaagcgttccaggacaagctgtatccgtttacctgggatgccgtacgttacaacggcaagctgattgcttacccgatcgctgttgaagcgttatcgctgatttataacaaagatctgctgccgaacccgccaaaaacctgggaagagatcccggcgctggataaagaactgaaagcgaaaggtaagagcgcgctgatgttcaacctgcaagaaccgtacttcacctggccgctgattgctgctgacgggggttatgcgttcaagtatgaaaacggcaagtacgacattaaagacgtgggcgtggataacgctggcgcgaaagcgggtctgaccttcctggttgacctgattaaaaacaaacacatgaatgcagacaccgattactccatcgcagaagctgcctttaataaaggcgaaacagcgatgaccatcaacggcccgtgggcatggtccaacatcgacaccagcaaagtgaattatggtgtaacggtactgccgaccttcaagggtcaaccatccaaaccgttcgttggcgtgctgagcgcaggtattaacgccgccagtccgaacaaagagctggcgaaagagttcctcgaaaactatctgctgactgatgaaggtctggaagcggttaataaagacaaaccgctgggtgccgtagcgctgaagtcttacgaggaagagttggcgaaagatccacgtattgccgccaccatggaaaacgcccagaaaggtgaaatcatgccgaacatcccgcagatgtccgctttctggtatgccgtgcgtactgcggtgatcaacgccgccagcggtcgtcagactgtcgatgaagccctgaaagacgcgcagactggtggttctggtgagaacctgtactttcaaagctcagataatgggcctcaaaaccagcgcaacgctccacgtataaccttcggtggcccgtctgactccacaggcagcaaccagaatggtgagcgtagtggagccaggtctaagcagcgccgtccccagggtctgccgaacaacacggcgagctggtttactgcgcttacccaacacggtaaagaagacttaaaattcccgcgtggccagggcgtcccgatcaacactaactcttccccggatgatcagattggttattaccgcagagcaactcgtcggattcgcggcggcgacggtaaaatgaaagatttgtctccgcgttggtacttttactatctcggcaccggtccggaagctggactgccctacggggcaaacaaggacgggatcatttgggtggctaccgaaggtgccctgaatactccaaaagatcatatcggcacccgtaaccctgctaataacgctgcgatcgttctgcaactgcctcagggtacaactctgccaaaaggcttctatgcagaagggtcgcgtggtggcagccaggcgagtagccgtagcagctcccgctctcgcaactcgtcccgtaactccactccgggctcttctcgcggcacgtccccggctcgtatggcaggtaacggtggtgacgctgctctggcgctgctactgctggacaggctgaaccagctggagtcgaagatgagtggtaaaggccaacagcagcagggccagaccgttaccaaaaagagcgcagctgaagcatctaaaaaaccgcgacagaaacgtaccgcgactaaagcgtacaatgtaacacaggccttcggtccacgaggtccggagcaaactcaaggaaactttggcgatcaggaattaatccgccaggggaccgactacaaacactggccgcaaattgcccagttcgccccatccgctagtgcattcttcggtatgagccgcatcggcatggaagtaacgccaagtggtacgtggctgacctacaccggtgctatcaagcttgatgacaaggacccgaactttaaagaccaggttattctgcttaacaaacatattgatgcctataaaactttcccgccgaccgaacccaaaaaggacaaaaagaaaaaagctgatgaaacccaggctctaccgcagcgtcagaaaaaacagcaaactgtgactctgctgccagctgcggacctggatgatttttccaagcagctgcaacagtctatgagctctgcggactctacgcaggctggtggttctggtcaccatcatcaccatcattaa

SEQ ID NO: 2905 - DNA, 2421 bp, Artificial Sequence
  Description of Artificial Sequence: Synthetic polynucleotide
atgaaaatcgaagaaggtaaactggtaatctggattaacggcgataaaggctataacggtctcgctgaagtcggtaagaaattcgagaaagataccggaattaaagtcaccgttgagcatccggataaactggaagagaaattcccacaggttgcggcaactggcgatggccctgacattatcttctgggcacacgaccgctttggtggctacgctcaatctggcctgttggctgaaatcaccccggacaaagcgttccaggacaagctgtatccgtttacctgggatgccgtacgttacaacggcaagctgattgcttacccgatcgctgttgaagcgttatcgctgatttataacaaagatctgctgccgaacccgccaaaaacctgggaagagatcccggcgctggataaagaactgaaagcgaaaggtaagagcgcgctgatgttcaacctgcaagaaccgtacttcacctggccgctgattgctgctgacgggggttatgcgttcaagtatgaaaacggcaagtacgacattaaagacgtgggcgtggataacgctggcgcgaaagcgggtctgaccttcctggttgacctgattaaaaacaaacacatgaatgcagacaccgattactccatcgcagaagctgcctttaataaaggcgaaacagcgatgaccatcaacggcccgtgggcatggtccaacatcgacaccagcaaagtgaattatggtgtaacggtactgccgaccttcaagggtcaaccatccaaaccgttcgttggcgtgctgagcgcaggtattaacgccgccagtccgaacaaagagctggcgaaagagttcctcgaaaactatctgctgactgatgaaggtctggaagcggttaataaagacaaaccgctgggtgccgtagcgctgaagtcttacgaggaagagttggcgaaagatccacgtattgccgccaccatggaaaacgcccagaaaggtgaaatcatgccgaacatcccgcagatgtccgctttctggtatgccgtgcgtactgcggtgatcaacgccgccagcggtcgtcagactgtcgatgaagccctgaaagacgcgcagactggtggttctggtgagaacctgtactttcaaagctcagataatgggcctcaaaaccagcgcaacgctccacgtataaccttcggtggcccgtctgactccacaggcagcaaccagaatggtgagcgtagtggagccaggtctaagcagcgccgtccccagggtctgccgaacaacacggcgagctggtttactgcgcttacccaacacggtaaagaagacttaaaattcccgcgtggccagggcgtcccgatcaacactaactcttccccggatgatcagattggttattaccgcagagcaactcgtcggattcgcggcggcgacggtaaaatgaaagatttgtctccgcgttggtacttttactatctcggcaccggtccggaagctgatctgccctacggggcaaacaaggacgggatcgtatgggtggctaccgaaggtgccctgaatactccaaaagatcatatcggcacccgtaaccctgctaataacgctgcgatcgttctgcaactgcctcagggtacaactctgccaaaaggcttctatgcagaagggtcgcgtggtggcagccaggcgagtagccgtagcagctcccgctctcgcaactcgtcccgtaactccactccgggctcttctcgcggcacgtccccggctcgtatggcaggtaacggtggtgacgctgctctggcgctgctactgctggacaggctgaaccagctggagtcgaagatgagtggtaaaggccaacagcagcagggccagaccgttaccaaaaagagcgcagctgaagcatctaaaaaaccgcgacagaaacgtaccgcgactaaagcgtacaatgtaacacaggccttcggtcgtcgaggtccggagcaaactcaaggaaactttggcgatcaggaattaatccgccaggggaccgactacaaacactggccgcaaattgcccagttcgccccatccgctagtgcattcttcggtatgagccgcatcggcatggaagtaacgccaagtggtacgtggctgacctacaccggtgctatcaagcttgatgacaaggacccgaactttaaagaccaggttattctgcttaacaaacatattgatgcctataaaactttcccgccgaccgaacccaaaaaggacaaaaagaaaaaagctgatgaaacccaggctctaccgcagcgtcagaaaaaacagcaaactgtgactctgctgccagctgcggacctggatgatttttccaagcagctgcaacagtctatgagctctgcggactctacgcaggctggtggttctggtcaccatcatcaccatcattaa

SEQ ID NO: 2906 - DNA, 2421 bp, Artificial Sequence
  Description of Artificial Sequence: Synthetic polynucleotide
atgaaaatcgaagaaggtaaactggtaatctggattaacggcgataaaggctataacggtctcgctgaagtcggtaagaaattcgagaaagataccggaattaaagtcaccgttgagcatccggataaactggaagagaaattcccacaggttgcggcaactggcgatggccctgacattatcttctgggcacacgaccgctttggtggctacgctcaatctggcctgttggctgaaatcaccccggacaaagcgttccaggacaagctgtatccgtttacctgggatgccgtacgttacaacggcaagctgattgcttacccgatcgctgttgaagcgttatcgctgatttataacaaagatctgctgccgaacccgccaaaaacctgggaagagatcccggcgctggataaagaactgaaagcgaaaggtaagagcgcgctgatgttcaacctgcaagaaccgtacttcacctggccgctgattgctgctgacgggggttatgcgttcaagtatgaaaacggcaagtacgacattaaagacgtgggcgtggataacgctggcgcgaaagcgggtctgaccttcctggttgacctgattaaaaacaaacacatgaatgcagacaccgattactccatcgcagaagctgcctttaataaaggcgaaacagcgatgaccatcaacggcccgtgggcatggtccaacatcgacaccagcaaagtgaattatggtgtaacggtactgccgaccttcaagggtcaaccatccaaaccgttcgttggcgtgctgagcgcaggtattaacgccgccagtccgaacaaagagctggcgaaagagttcctcgaaaactatctgctgactgatgaaggtctggaagcggttaataaagacaaaccgctgggtgccgtagcgctgaagtcttacgaggaagagttggcgaaagatccacgtattgccgccaccatggaaaacgcccagaaaggtgaaatcatgccgaacatcccgcagatgtccgctttctggtatgccgtgcgtactgcggtgatcaacgccgccagcggtcgtcagactgtcgatgaagccctgaaagacgcgcagactggtggttctggtgagaacctgtactttcaaagctcagataatgggcctcaaaaccagcgcaacgctccacgtataaccttcggtggcccgtctgactccacaggcagcaaccagaatggtgagcgtagtggagccaggtctaagcagcgccgtccccagggtctgccgaacaacacggcgagctggtttactgcgcttacccaacacggtaaagaagacttaaaattcccgcgtggccagggcatgccgatcaacactaactcttccccggatgatcagattggttattaccgcagagcaactcgtcggattcgcggcggcgacggtaaaatgaaagatttgtctccgcgttggtacttttactatctcggcaccggtccggaagctggactgccctacggggcaaacaaggacgggatcatttgggtggctaccgaaggtgccctgaatactccaaaagatcatatcggcacccgtaaccctgctaataacgctgcgatcgttctgcaactgcctcagggtacaactctgccaaaaggcttctatgcagaagggtcgcgtggtggcagccaggcgagtagccgtagcagctcccgctctcgcaactcgtcccgtaactccactccgggctcttctcgcggcacgtccccggctcgtatggcaggtaacggtggtgacgctgctctggcgctgctactgctggacaggctgaaccagctggagtcgaagatgagtggtaaaggccaacagcagcagggccagaccgttaccaaaaagagcgcagctgaagcatctaaaaaaccgcgacagaaacgtaccgcgactaaagcgtacaatgtaacacaggccttcggtcgtcgaggtccggagcaaactcaaggaaactttggcgatcaggaattaatccgccaggggaccgactacaaacactggccgcaaattgcccagttcgccccatccgctagtgcattcttcggtatgagccgcatcggcatggaagtaacgccaagtggtacgtggctgacctacaccggtgctatcaagcttgatgacaaggacccgaactttaaagaccaggttattctgcttaacaaacatattgatgcctataaaactttcccgccgaccgaacccaaaaaggacaaaaagaaaaaagctgatgaaacccaggctctaccgcagcgtcagaaaaaacagcaaactgtgactctgctgccagctgcggacctggatgatttttccaagcagctgcaacagtctatgagctctgcggactctacgcaggctggtggttctggtcaccatcatcaccatcattaa

SEQ ID NO: 2907 - DNA, 2421 bp, Artificial Sequence
  Description of Artificial Sequence: Synthetic polynucleotide
atgaaaatcgaagaaggtaaactggtaatctggattaacggcgataaaggctataacggtctcgctgaagtcggtaagaaattcgagaaagataccggaattaaagtcaccgttgagcatccggataaactggaagagaaattcccacaggttgcggcaactggcgatggccctgacattatcttctgggcacacgaccgctttggtggctacgctcaatctggcctgttggctgaaatcaccccggacaaagcgttccaggacaagctgtatccgtttacctgggatgccgtacgttacaacggcaagctgattgcttacccgatcgctgttgaagcgttatcgctgatttataacaaagatctgctgccgaacccgccaaaaacctgggaagagatcccggcgctggataaagaactgaaagcgaaaggtaagagcgcgctgatgttcaacctgcaagaaccgtacttcacctggccgctgattgctgctgacgggggttatgcgttcaagtatgaaaacggcaagtacgacattaaagacgtgggcgtggataacgctggcgcgaaagcgggtctgaccttcctggttgacctgattaaaaacaaacacatgaatgcagacaccgattactccatcgcagaagctgcctttaataaaggcgaaacagcgatgaccatcaacggcccgtgggcatggtccaacatcgacaccagcaaagtgaattatggtgtaacggtactgccgaccttcaagggtcaaccatccaaaccgttcgttggcgtgctgagcgcaggtattaacgccgccagtccgaacaaagagctggcgaaagagttcctcgaaaactatctgctgactgatgaaggtctggaagcggttaataaagacaaaccgctgggtgccgtagcgctgaagtcttacgaggaagagttggcgaaagatccacgtattgccgccaccatggaaaacgcccagaaaggtgaaatcatgccgaacatcccgcagatgtccgctttctggtatgccgtgcgtactgcggtgatcaacgccgccagcggtcgtcagactgtcgatgaagccctgaaagacgcgcagactggtggttctggtgagaacctgtactttcaaagctcagataatgggcctcaaaaccagcgcaacgctccacgtataaccttcggtggcccgtctgactccacaggcagcaaccagaatggtgagcgtagtggagccaggtctaagcagcgccgtccccagggtctgccgaacaacacggcgagctggtttactgcgcttacccaacacggtaaagaagacttaaaattcccgcgtggccagggcgtcccgatcaacactaactcttccccggatgatcagattggttattaccgcagagcaactcgtcggattcgcggcggcgacggtaaaatgaaagatttgtctccgcgttggtacttttactatctcggcaccggtccggaagctggactgccctacggggcaaacaaggacgggatcatttgggtggctaccgaaggtgccctgaatactccaaaagatcatatcggcacccgtaaccctgctaataactcggcgatcgttctgcaactgcctcagggtacaactctgccaaaaggcttctatgcagaagggtcgcgtggtggcagccaggcgagtagccgtagcagctcccgctctcgcaactcgtcccgtaactccactccgggctcttctcgcggcacgtccccggctcgtatggcaggtaacggtggtgacgctgctctggcgctgctactgctggacaggctgaaccagctggagtcgaagatgagtggtaaaggccaacagcagcagggccagaccgttaccaaaaagagcgcagctgaagcatctaaaaaaccgcgacagaaacgtaccgcgactaaagcgtacaatgtaacacaggccttcggtcgtcgaggtccggagcaaactcaaggaaactttggcgatcaggaattaatccgccaggggaccgactacaaacactggccgcaaattgcccagttcgccccatccgctagtgcattcttcggtatgagccgcatcggcatggaagtaacgccaagtggtacgtggctgacctacaccggtgctatcaagcttgatgacaaggacccgaactttaaagaccaggttattctgcttaacaaacatattgatgcctataaaactttcccgccgaccgaacccaaaaaggacaaaaagaaaaaagctgatgaaacccaggctctaccgcagcgtcagaaaaaacagcaaactgtgactctgctgccagctgcggacctggatgatttttccaagcagctgcaacagtctatgagctctgcggactctacgcaggctggtggttctggtcaccatcatcaccatcattaa

SEQ ID NO: 2908 - DNA, 2421 bp, Artificial Sequence
  Description of Artificial Sequence: Synthetic polynucleotide
atgaaaatcgaagaaggtaaactggtaatctggattaacggcgataaaggctataacggtctcgctgaagtcggtaagaaattcgagaaagataccggaattaaagtcaccgttgagcatccggataaactggaagagaaattcccacaggttgcggcaactggcgatggccctgacattatcttctgggcacacgaccgctttggtggctacgctcaatctggcctgttggctgaaatcaccccggacaaagcgttccaggacaagctgtatccgtttacctgggatgccgtacgttacaacggcaagctgattgcttacccgatcgctgttgaagcgttatcgctgatttataacaaagatctgctgccgaacccgccaaaaacctgggaagagatcccggcgctggataaagaactgaaagcgaaaggtaagagcgcgctgatgttcaacctgcaagaaccgtacttcacctggccgctgattgctgctgacgggggttatgcgttcaagtatgaaaacggcaagtacgacattaaagacgtgggcgtggataacgctggcgcgaaagcgggtctgaccttcctggttgacctgattaaaaacaaacacatgaatgcagacaccgattactccatcgcagaagctgcctttaataaaggcgaaacagcgatgaccatcaacggcccgtgggcatggtccaacatcgacaccagcaaagtgaattatggtgtaacggtactgccgaccttcaagggtcaaccatccaaaccgttcgttggcgtgctgagcgcaggtattaacgccgccagtccgaacaaagagctggcgaaagagttcctcgaaaactatctgctgactgatgaaggtctggaagcggttaataaagacaaaccgctgggtgccgtagcgctgaagtcttacgaggaagagttggcgaaagatccacgtattgccgccaccatggaaaacgcccagaaaggtgaaatcatgccgaacatcccgcagatgtccgctttctggtatgccgtgcgtactgcggtgatcaacgccgccagcggtcgtcagactgtcgatgaagccctgaaagacgcgcagactggtggttctggtgagaacctgtactttcaaagctcagataatgggcctcaaaaccagcgcaacgctccacgtataaccttcggtggcccgtctgactccacaggcagcaaccagaatggtgagcgtagtggagccaggtctaagcagcgccgtccccagggtctgccgaacaacacggcgagctggtttactgcgcttacccaacacggtaaagaagacttaaaattcccgcgtggccagggcgtcccgatcaacactaactcttccccggatgatcagattggttattaccgcagagcaactcgtcggattcgcggcggcgacggtaaaatgaaagatttgtctccgcgttggcatttttactatctcggcaccggtccggaagctggactgccctacggggcaaacaaggacgggatcatttgggtggctaccgaaggtgccctgaatactccaaaagatcatatcggcacccgtaaccctgctaataacgctgcgatcgttctgcaactgcctcagggtacaactctgccaaaaggcttctatgcagaagggtcgcgtggtggcagccaggcgagtagccgtagcagctcccgctctcgcaactcgtcccgtaactccactccgggctcttctcgcggcacgtccccggctcgtatggcaggtaacggtggtgacgctgctctggcgctgctactgctggacaggctgaaccagctggagtcgaagatgagtggtaaaggccaacagcagcagggccagaccgttaccaaaaagagcgcagctgaagcatctaaaaaaccgcgacagaaacgtaccgcgactaaagcgtacaatgtaacacaggccttcggtcgtcgaggtccggagcaaactcaaggaaactttggcgatcaggaattaatccgccaggggaccgactacaaacactggccgcaaattgcccagttcgccccatccgctagtgcattcttcggtatgagccgcatcggcatggaagtaacgccaagtggtacgtggctgacctacaccggtgctatcaagcttgatgacaaggacccgaactttaaagaccaggttattctgcttaacaaacatattgatgcctataaaactttcccgccgaccgaacccaaaaaggacaaaaagaaaaaagctgatgaaacccaggctctaccgcagcgtcagaaaaaacagcaaactgtgactctgctgccagctgcggacctggatgatttttccaagcagctgcaacagtctatgagctctgcggactctacgcaggctggtggttctggtcaccatcatcaccatcattaa

SEQ ID NO: 2909 - DNA, 2421 bp, Artificial Sequence
  Description of Artificial Sequence: Synthetic polynucleotide
atgaaaatcgaagaaggtaaactggtaatctggattaacggcgataaaggctataacggtctcgctgaagtcggtaagaaattcgagaaagataccggaattaaagtcaccgttgagcatccggataaactggaagagaaattcccacaggttgcggcaactggcgatggccctgacattatcttctgggcacacgaccgctttggtggctacgctcaatctggcctgttggctgaaatcaccccggacaaagcgttccaggacaagctgtatccgtttacctgggatgccgtacgttacaacggcaagctgattgcttacccgatcgctgttgaagcgttatcgctgatttataacaaagatctgctgccgaacccgccaaaaacctgggaagagatcccggcgctggataaagaactgaaagcgaaaggtaagagcgcgctgatgttcaacctgcaagaaccgtacttcacctggccgctgattgctgctgacgggggttatgcgttcaagtatgaaaacggcaagtacgacattaaagacgtgggcgtggataacgctggcgcgaaagcgggtctgaccttcctggttgacctgattaaaaacaaacacatgaatgcagacaccgattactccatcgcagaagctgcctttaataaaggcgaaacagcgatgaccatcaacggcccgtgggcatggtccaacatcgacaccagcaaagtgaattatggtgtaacggtactgccgaccttcaagggtcaaccatccaaaccgttcgttggcgtgctgagcgcaggtattaacgccgccagtccgaacaaagagctggcgaaagagttcctcgaaaactatctgctgactgatgaaggtctggaagcggttaataaagacaaaccgctgggtgccgtagcgctgaagtcttacgaggaagagttggcgaaagatccacgtattgccgccaccatggaaaacgcccagaaaggtgaaatcatgccgaacatcccgcagatgtccgctttctggtatgccgtgcgtactgcggtgatcaacgccgccagcggtcgtcagactgtcgatgaagccctgaaagacgcgcagactggtggttctggtgagaacctgtactttcaaagctcagataatgggcctcaaaaccagcgcaacgctccacgtataaccttcggtggcccgtctgactccacaggcagcaaccagaatggtgagcgtagtggagccaggtctaagcagcgccgtccccagggtctgccgaacaacacggtaagctggtttactgcgcttacccaacacggtaaagaagacttaaaattcccgcgtggccagggcgtcccgatcaacactaactcttccccggatgatcagattggttattaccgcagagcaactcgtcggattcgcggcggcgacggtaaaatgaaagatttgtctccgcgttggtacttttactatctcggcaccggtccggaagctggactgccctacggggcaaacaaggacgggatcatttgggtggctaccgaaggtgccctgaatactccaaaagatcatatcggcacccgtaaccctgctaataacgctgcgatcgttctgcaactgcctcagggtacaactctgccaaaaggcttctatgcagaagggtcgcgtggtggcagccaggcgagtagccgtagcagctcccgctctcgcaactcgtcccgtaactccactccgggctcttctcgcggcacgtccccggctcgtatggcaggtaacggtggtgacgctgctctggcgctgctactgctggacaggctgaaccagctggagtcgaagatgagtggtaaaggccaacagcagcagggccagaccgttaccaaaaagagcgcagctgaagcatctaaaaaaccgcgacagaaacgtaccgcgactaaagcgtacaatgtaacacaggccttcggtcgtcgaggtccggagcaaactcaaggaaactttggcgatcaggaattaatccgccaggggaccgactacaaacactggccgcaaattgcccagttcgccccatccgctagtgcattcttcggtatgagccgcatcggcatggaagtaacgccaagtggtacgtggctgacctacaccggtgctatcaagcttgatgacaaggacccgaactttaaagaccaggttattctgcttaacaaacatattgatgcctataaaactttcccgccgaccgaacccaaaaaggacaaaaagaaaaaagctgatgaaacccaggctctaccgcagcgtcagaaaaaacagcaaactgtgactctgctgccagctgcggacctggatgatttttccaagcagctgcaacagtctatgagctctgcggactctacgcaggctggtggttctggtcaccatcatcaccatcattaa

SEQ ID NO: 2910 - DNA, 2421 bp, Artificial Sequence
  Description of Artificial Sequence: Synthetic polynucleotide
atgaaaatcgaagaaggtaaactggtaatctggattaacggcgataaaggctataacggtctcgctgaagtcggtaagaaattcgagaaagataccggaattaaagtcaccgttgagcatccggataaactggaagagaaattcccacaggttgcggcaactggcgatggccctgacattatcttctgggcacacgaccgctttggtggctacgctcaatctggcctgttggctgaaatcaccccggacaaagcgttccaggacaagctgtatccgtttacctgggatgccgtacgttacaacggcaagctgattgcttacccgatcgctgttgaagcgttatcgctgatttataacaaagatctgctgccgaacccgccaaaaacctgggaagagatcccggcgctggataaagaactgaaagcgaaaggtaagagcgcgctgatgttcaacctgcaagaaccgtacttcacctggccgctgattgctgctgacgggggttatgcgttcaagtatgaaaacggcaagtacgacattaaagacgtgggcgtggataacgctggcgcgaaagcgggtctgaccttcctggttgacctgattaaaaacaaacacatgaatgcagacaccgattactccatcgcagaagctgcctttaataaaggcgaaacagcgatgaccatcaacggcccgtgggcatggtccaacatcgacaccagcaaagtgaattatggtgtaacggtactgccgaccttcaagggtcaaccatccaaaccgttcgttggcgtgctgagcgcaggtattaacgccgccagtccgaacaaagagctggcgaaagagttcctcgaaaactatctgctgactgatgaaggtctggaagcggttaataaagacaaaccgctgggtgccgtagcgctgaagtcttacgaggaagagttggcgaaagatccacgtattgccgccaccatggaaaacgcccagaaaggtgaaatcatgccgaacatcccgcagatgtccgctttctggtatgccgtgcgtactgcggtgatcaacgccgccagcggtcgtcagactgtcgatgaagccctgaaagacgcgcagactggtggttctggtgagaacctgtactttcaaagctcagataatgggcctcaaaaccagcgcaacgctccacgtataaccttcggtggcccgtctgactccacaggcagcaaccagaatggtgagcgtagtggagccaggtctaagcagcgccgtccccagggtctgccgaacaacacggcgagctggtttactgcgcttacccaacacggtaaagaagacttaaaattcccgcgtggccagggcgtcccgatcaacactaactcttccccggatgatcagattggttattaccgcagagcaactcgtcggattcgcggcggcgacggtaaaatgaaagatttgtctccgcgttggtacttttactatctcggcaccggtccggaagctggactgccctacggggcaaacaaggacgggatcatttgggtggctaccgaaggtgccctgaatactccaaaagatcatatcggcacccgtaaccctgctaataacgctgcgatcgttctgcaactgcctcagggtacaactctgccaaaaggcttctatgcagaagggtcgcgtggtggcagccaggcgagtagccgtagcagctcccgctctcgcaactcgtcccgtaactccactccgggctcttctcgcggcacgtccccggctcgtatggcaggtaacggtggtgacgctgctctggcgctgctactgctggacaggctgaaccagctggagtcgaagatgagtggtaaaggccaacagcagcagggccagaccgttaccaaaaagagcgcagctgaagcatctaaaaaaccgcgacagaaacgtaccgcgactaaagcgtacaatgtaacacaggccttcggtcgtcgaggtccggagcaaactcaaggaaactttggcgatcaggaattaatccgccaggggaccgactacaaacactggccgcaaattgcccagttcgccccatccgctagtgcattcttcggtatgagccgcatcggcatggaagtaacgccaagtggtacgtggctgacctacaccggtgctatcaagcttgatgactcagacccgaactttaaagaccaggttattctgcttaacaaacatattgatgcctataaaactttcccgccgaccgaacccaaaaaggacaaaaagaaaaaagctgatgaaacccaggctctaccgcagcgtcagaaaaaacagcaaactgtgactctgctgccagctgcggacctggatgatttttccaagcagctgcaacagtctatgagctctgcggactctacgcaggctggtggttctggtcaccatcatcaccatcattaa

SEQ ID NO: 2911 - DNA, 2421 bp, Artificial Sequence
  Description of Artificial Sequence: Synthetic polynucleotide
atgaaaatcgaagaaggtaaactggtaatctggattaacggcgataaaggctataacggtctcgctgaagtcggtaagaaattcgagaaagataccggaattaaagtcaccgttgagcatccggataaactggaagagaaattcccacaggttgcggcaactggcgatggccctgacattatcttctgggcacacgaccgctttggtggctacgctcaatctggcctgttggctgaaatcaccccggacaaagcgttccaggacaagctgtatccgtttacctgggatgccgtacgttacaacggcaagctgattgcttacccgatcgctgttgaagcgttatcgctgatttataacaaagatctgctgccgaacccgccaaaaacctgggaagagatcccggcgctggataaagaactgaaagcgaaaggtaagagcgcgctgatgttcaacctgcaagaaccgtacttcacctggccgctgattgctgctgacgggggttatgcgttcaagtatgaaaacggcaagtacgacattaaagacgtgggcgtggataacgctggcgcgaaagcgggtctgaccttcctggttgacctgattaaaaacaaacacatgaatgcagacaccgattactccatcgcagaagctgcctttaataaaggcgaaacagcgatgaccatcaacggcccgtgggcatggtccaacatcgacaccagcaaagtgaattatggtgtaacggtactgccgaccttcaagggtcaaccatccaaaccgttcgttggcgtgctgagcgcaggtattaacgccgccagtccgaacaaagagctggcgaaagagttcctcgaaaactatctgctgactgatgaaggtctggaagcggttaataaagacaaaccgctgggtgccgtagcgctgaagtcttacgaggaagagttggcgaaagatccacgtattgccgccaccatggaaaacgcccagaaaggtgaaatcatgccgaacatcccgcagatgtccgctttctggtatgccgtgcgtactgcggtgatcaacgccgccagcggtcgtcagactgtcgatgaagccctgaaagacgcgcagactggtggttctggtgagaacctgtactttcaaagctcagataatgggcctcaaaaccagcgcaacgctccacgtataaccttcggtggcccgtctgactccacaggcagcaaccagaatggtgagcgtagtggagccaggtctaagcagcgccgtccccagggtctgccgaacaacacggcgagctggtttactgcgcttacccaacacggtaaagaagacttaaaattcccgcgtggccagggcgtcccgatcaacactaactcttccccggatgatcagattggttattaccgcagagcaactcgtcggattcgcggcggcgacggtaaaatgaaagatttgtctccgcgttggtacttttactatctcggcaccggtccggaagctggactgccctacggggcaaacaaggacgggatcatttgggtggctaccgaaggtgccctgaatactccaaaagatcatatcggcacccgtaaccctgctaataacgctgcgatcgttctgcaactgcctcagggtacaactctgccaaaaggcttctatgcagaagggtcgcgtggtggcagccaggcgagtagccgtagcagctcccgctctcgcaactcgtcccgtaactccactccgggctcttctcgcggcacgtccccggctcgtatggcaggtaacggtggtgacgctgctctggcgctgctactgctggacaggctgaaccagctggagtcgaagatgagtggtaaaggccaacagcagcagggccagaccgttaccaaaaagagcgcagctgaagcatctaaaaaaccgcgacagaaacgtaccgcgactaaagcgtacaatgtaacacaggccttcggtcgtcgaggtccggagcaaactcaaggaaactttggcgatcaggaattaatccgccaggggaccgactacaaacactggccgcaaattgcccagttcgccccatccgctagtgcattcttcggtatgagcaaaatcggcatggaagtaacgccaagtggtacgtggctgacctacaccggtgctatcaagcttgatgacaaggacccgaactttaaagaccaggttattctgcttaacaaacatattgatgcctataaaactttcccgccgaccgaacccaaaaaggacaaaaagaaaaaagctgatgaaacccaggctctaccgcagcgtcagaaaaaacagcaaactgtgactctgctgccagctgcggacctggatgatttttccaagcagctgcaacagtctatgagctctgcggactctacgcaggctggtggttctggtcaccatcatcaccatcattaa

SEQ ID NO: 2912 - DNA, 2421 bp, Artificial Sequence
  Description of Artificial Sequence: Synthetic polynucleotide
atgaaaatcgaagaaggtaaactggtaatctggattaacggcgataaaggctataacggtctcgctgaagtcggtaagaaattcgagaaagataccggaattaaagtcaccgttgagcatccggataaactggaagagaaattcccacaggttgcggcaactggcgatggccctgacattatcttctgggcacacgaccgctttggtggctacgctcaatctggcctgttggctgaaatcaccccggacaaagcgttccaggacaagctgtatccgtttacctgggatgccgtacgttacaacggcaagctgattgcttacccgatcgctgttgaagcgttatcgctgatttataacaaagatctgctgccgaacccgccaaaaacctgggaagagatcccggcgctggataaagaactgaaagcgaaaggtaagagcgcgctgatgttcaacctgcaagaaccgtacttcacctggccgctgattgctgctgacgggggttatgcgttcaagtatgaaaacggcaagtacgacattaaagacgtgggcgtggataacgctggcgcgaaagcgggtctgaccttcctggttgacctgattaaaaacaaacacatgaatgcagacaccgattactccatcgcagaagctgcctttaataaaggcgaaacagcgatgaccatcaacggcccgtgggcatggtccaacatcgacaccagcaaagtgaattatggtgtaacggtactgccgaccttcaagggtcaaccatccaaaccgttcgttggcgtgctgagcgcaggtattaacgccgccagtccgaacaaagagctggcgaaagagttcctcgaaaactatctgctgactgatgaaggtctggaagcggttaataaagacaaaccgctgggtgccgtagcgctgaagtcttacgaggaagagttggcgaaagatccacgtattgccgccaccatggaaaacgcccagaaaggtgaaatcatgccgaacatcccgcagatgtccgctttctggtatgccgtgcgtactgcggtgatcaacgccgccagcggtcgtcagactgtcgatgaagccctgaaagacgcgcagactggtggttctggtgagaacctgtactttcaaagctcagataatgggcctcaaaaccagcgcaacgctccacgtataaccttcggtggcccgtctgactccacaggcagcaaccagaatggtgagcgtagtggagccaggtctaagcagcgccgtccccagggtctgccgaacaacacggcgagctggtttactgcgcttacccaacacggtaaagaagacttaaaattcccgcgtggccagggcgtcccgatcaacactaactcttccccggatgatcagattggttattaccgcagagcaactcgtcggattcgcggcggcgacggtaaaatgaaagatttgtctccgcgttggtacttttactatctcggcaccggtccggaagctggactgccctacggggcaaacaaggacgggatcatttgggtggctaccgaaggtgccctgaatactccaaaagatcatatcggcacccgtaaccctgctaataacgctgcgatcgttctgcaactgcctcagggtacaggcctgccaaaaggcttctatgcagaagggtcgcgtggtggcagccaggcgagtagccgtagcagctcccgctctcgcaactcgtcccgtaactccactccgggctcttctcgcggcacgtccccggctcgtatggcaggtaacggtggtgacgctgctctggcgctgctactgctggacaggctgaaccagctggagtcgaagatgagtggtaaaggccaacagcagcagggccagaccgttaccaaaaagagcgcagctgaagcatctaaaaaaccgcgacagaaacgtaccgcgactaaagcgtacaatgtaacacaggccttcggtcgtcgaggtccggagcaaactcaaggaaactttggcgatcaggaattaatccgccaggggaccgactacaaacactggccgcaaattgcccagttcgccccatccgctagtgcattcttcggtatgagccgcatcggcatggaagtaacgccaagtggtacgtggctgacctacaccggtgctatcaagcttgatgacaaggacccgaactttaaagaccaggttattctgcttaacaaacatattgatgcctataaaactttcccgccgaccgaacccaaaaaggacaaaaagaaaaaagctgatgaaacccaggctctaccgcagcgtcagaaaaaacagcaaactgtgactctgctgccagctgcggacctggatgatttttccaagcagctgcaacagtctatgagctctgcggactctacgcaggctggtggttctggtcaccatcatcaccatcattaa

SEQ ID NO: 2913 - DNA, 2421 bp, Artificial Sequence
  Description of Artificial Sequence: Synthetic polynucleotide
atgaaaatcgaagaaggtaaactggtaatctggattaacggcgataaaggctataacggtctcgctgaagtcggtaagaaattcgagaaagataccggaattaaagtcaccgttgagcatccggataaactggaagagaaattcccacaggttgcggcaactggcgatggccctgacattatcttctgggcacacgaccgctttggtggctacgctcaatctggcctgttggctgaaatcaccccggacaaagcgttccaggacaagctgtatccgtttacctgggatgccgtacgttacaacggcaagctgattgcttacccgatcgctgttgaagcgttatcgctgatttataacaaagatctgctgccgaacccgccaaaaacctgggaagagatcccggcgctggataaagaactgaaagcgaaaggtaagagcgcgctgatgttcaacctgcaagaaccgtacttcacctggccgctgattgctgctgacgggggttatgcgttcaagtatgaaaacggcaagtacgacattaaagacgtgggcgtggataacgctggcgcgaaagcgggtctgaccttcctggttgacctgattaaaaacaaacacatgaatgcagacaccgattactccatcgcagaagctgcctttaataaaggcgaaacagcgatgaccatcaacggcccgtgggcatggtccaacatcgacaccagcaaagtgaattatggtgtaacggtactgccgaccttcaagggtcaaccatccaaaccgttcgttggcgtgctgagcgcaggtattaacgccgccagtccgaacaaagagctggcgaaagagttcctcgaaaactatctgctgactgatgaaggtctggaagcggttaataaagacaaaccgctgggtgccgtagcgctgaagtcttacgaggaagagttggcgaaagatccacgtattgccgccaccatggaaaacgcccagaaaggtgaaatcatgccgaacatcccgcagatgtccgctttctggtatgccgtgcgtactgcggtgatcaacgccgccagcggtcgtcagactgtcgatgaagccctgaaagacgcgcagactggtggttctggtgagaacctgtactttcaaagctcagataatgggcctcaaaaccagcgcaacgctccacgtataaccttcggtggcccgtctgactccacaggcagcaaccagaatggtgagcgtagtggagccaggtctaagcagcgccgtccccagggtctgccgaacaacacggcgagctggtttactgcgcttacccaacacggtaaagaagacttaaaattcccgcgtggccagggcgtcccgatcaacactaactcttccccggatgatcagattggttattaccgcagagcaactcgtcggattcgcggcggcgacggtaaaatgaaagatttgtctccgcgttggtacttttactatctcggcaccggtccggaagctggactgccctacggggcaaacaaggacgggatcatttgggtggctaccgaaggtgccctgaatactccaaaagatcatatcggcacccgtaaccctgctaataacgctgcgatcgttctgcaactgcctcagggtacaactctgccaaaaggcttctatgcagaagggtcgcgtggtggcagccaggcgagtagccgtagcagctcccgctctcgcaactcgtcccgtaactccactccgggctcttctcgcggcacgtccccggctcgtatggcaggtaacggtggtgacgctgctctggcgctgctactgctggacaggctgaaccagctggagtcgaagatgagtggtaaaggccaacagcagcagggccagaccgttaccaaaaagagcgcagctgaagcatctaaaaaaccgcgacagaaacgtaccgcgactaaagcgtacaatgtaacacaggccttcggtcgtcgaggtccgcaacaaactcaaggaaactttggcgatcaggaattaatccgccaggggaccgactacaaacactggccgcaaattgcccagttcgccccatccgctagtgcattcttcggtatgagccgcatcggcatggaagtaacgccaagtggtacgtggctgacctacaccggtgctatcaagcttgatgacaaggacccgaactttaaagaccaggttattctgcttaacaaacatattgatgcctataaaactttcccgccgaccgaacccaaaaaggacaaaaagaaaaaagctgatgaaacccaggctctaccgcagcgtcagaaaaaacagcaaactgtgactctgctgccagctgcggacctggatgatttttccaagcagctgcaacagtctatgagctctgcggactctacgcaggctggtggttctggtcaccatcatcaccatcattaa

SEQ ID NO: 2914 - DNA, 2421 bp, Artificial Sequence
  Description of Artificial Sequence: Synthetic polynucleotide
atgaaaatcgaagaaggtaaactggtaatctggattaacggcgataaaggctataacggtctcgctgaagtcggtaagaaattcgagaaagataccggaattaaagtcaccgttgagcatccggataaactggaagagaaattcccacaggttgcggcaactggcgatggccctgacattatcttctgggcacacgaccgctttggtggctacgctcaatctggcctgttggctgaaatcaccccggacaaagcgttccaggacaagctgtatccgtttacctgggatgccgtacgttacaacggcaagctgattgcttacccgatcgctgttgaagcgttatcgctgatttataacaaagatctgctgccgaacccgccaaaaacctgggaagagatcccggcgctggataaagaactgaaagcgaaaggtaagagcgcgctgatgttcaacctgcaagaaccgtacttcacctggccgctgattgctgctgacgggggttatgcgttcaagtatgaaaacggcaagtacgacattaaagacgtgggcgtggataacgctggcgcgaaagcgggtctgaccttcctggttgacctgattaaaaacaaacacatgaatgcagacaccgattactccatcgcagaagctgcctttaataaaggcgaaacagcgatgaccatcaacggcccgtgggcatggtccaacatcgacaccagcaaagtgaattatggtgtaacggtactgccgaccttcaagggtcaaccatccaaaccgttcgttggcgtgctgagcgcaggtattaacgccgccagtccgaacaaagagctggcgaaagagttcctcgaaaactatctgctgactgatgaaggtctggaagcggttaataaagacaaaccgctgggtgccgtagcgctgaagtcttacgaggaagagttggcgaaagatccacgtattgccgccaccatggaaaacgcccagaaaggtgaaatcatgccgaacatcccgcagatgtccgctttctggtatgccgtgcgtactgcggtgatcaacgccgccagcggtcgtcagactgtcgatgaagccctgaaagacgcgcagactggtggttctggtgagaacctgtactttcaaagctcagataatgggcctcaaaaccagcgcaacgctccacgtataaccttcggtggcccgtctgactccacaggcagcaaccagaatggtgagcgtagtggagccaggtctaagcagcgccgtccccagggtctgccgaacaacacggcgagctggtttactgcgcttacccaacacggtaaagaagacttaaaattcccgcgtggccagggcgtcccgatcaacactaactcttccccggatgatcagattggttattaccgcagagcaactcgtcggattcgcggcggcgacggtaaaatgaaagatttgtctccgcgttggtacttttactatctcggcaccggtccggaagctggactgccctacggggcaaacaaggacgggatcatttgggtggctaccgaaggtgccctgaatactccaaaagatcatatcggcacccgtaaccctgctaataacgctgcgatcgttctgcaactgcctcagggtacaactctgccaaaaggcttctatgcagaagggtcgcgtggtggcagccaggcgagtagccgtagcagctcccgctctcgcaactcgtcccgtaactccactccgggctcttctcgcggcacgtccccggctcgtatggcaggtaacggtggtgacgctgctctggcgctgctactgctggacaggctgaaccagctggagtcgaagatgagtggtaaaggccaacagcagcagggccagaccgttaccaaaaagagcgcagctgaagcatctaaaaaaccgcgacagaaacgtaccgcgactaaagcgtacaatgtaacacaggccttcggtcgtcgaggtccggagcaaactcaaggaaactttggcgatcttgaattaatccgccaggggaccgactacaaacactggccgcaaattgcccagttcgccccatccgctagtgcattcttcggtatgagccgcatcggcatggaagtaacgccaagtggtacgtggctgacctacaccggtgctatcaagcttgatgacaaggacccgaactttaaagaccaggttattctgcttaacaaacatattgatgcctataaaactttcccgccgaccgaacccaaaaaggacaaaaagaaaaaagctgatgaaacccaggctctaccgcagcgtcagaaaaaacagcaaactgtgactctgctgccagctgcggacctggatgatttttccaagcagctgcaacagtctatgagctctgcggactctacgcaggctggtggttctggtcaccatcatcaccatcattaa

SEQ ID NO: 2915 - DNA, 2421 bp, Artificial Sequence
  Description of Artificial Sequence: Synthetic polynucleotide
atgaaaatcgaagaaggtaaactggtaatctggattaacggcgataaaggctataacggtctcgctgaagtcggtaagaaattcgagaaagataccggaattaaagtcaccgttgagcatccggataaactggaagagaaattcccacaggttgcggcaactggcgatggccctgacattatcttctgggcacacgaccgctttggtggctacgctcaatctggcctgttggctgaaatcaccccggacaaagcgttccaggacaagctgtatccgtttacctgggatgccgtacgttacaacggcaagctgattgcttacccgatcgctgttgaagcgttatcgctgatttataacaaagatctgctgccgaacccgccaaaaacctgggaagagatcccggcgctggataaagaactgaaagcgaaaggtaagagcgcgctgatgttcaacctgcaagaaccgtacttcacctggccgctgattgctgctgacgggggttatgcgttcaagtatgaaaacggcaagtacgacattaaagacgtgggcgtggataacgctggcgcgaaagcgggtctgaccttcctggttgacctgattaaaaacaaacacatgaatgcagacaccgattactccatcgcagaagctgcctttaataaaggcgaaacagcgatgaccatcaacggcccgtgggcatggtccaacatcgacaccagcaaagtgaattatggtgtaacggtactgccgaccttcaagggtcaaccatccaaaccgttcgttggcgtgctgagcgcaggtattaacgccgccagtccgaacaaagagctggcgaaagagttcctcgaaaactatctgctgactgatgaaggtctggaagcggttaataaagacaaaccgctgggtgccgtagcgctgaagtcttacgaggaagagttggcgaaagatccacgtattgccgccaccatggaaaacgcccagaaaggtgaaatcatgccgaacatcccgcagatgtccgctttctggtatgccgtgcgtactgcggtgatcaacgccgccagcggtcgtcagactgtcgatgaagccctgaaagacgcgcagactggtggttctggtgagaacctgtactttcaaagctcagataatgggcctcaaaaccagcgcaacgctccacgtataaccttcggtggcccgtctgactccacaggcagcaaccagaatggtgagcgtagtggagccaggtctaagcagcgccgtccccagggtctgccgaacaacacggcgagctggtttactgcgcttacccaacacggtaaagaagacttaaaattcccgcgtggccagggcgtcccgatcaacactaactcttccccggatgatcagattggttattaccgcagagcaactcgtcggattcgcggcggcgacggtaaaatgaaagatttgtctccgcgttggtacttttactatctcggcaccggtccggaagctggactgccctacggggcaaacaaggacgggatcatttgggtggctaccgaaggtgccctgaatactccaaaagatcatatcggcacccgtaaccctgctaataacgctgcgatcgttctgcaactgcctcagggtacaactctgccaaaaggcttctatgcagaagggtcgcgtggtggcagccaggcgagtagccgtagcagctcccgctctcgcaactcgtcccgtaactccactccgggctcttctcgcggcacgtccccggctcgtatggcaggtaacggtggtgacgctgctctggcgctgctactgctggacaggctgaaccagctggagtcgaagatgagtggtaaaggccaacagcagcagggccagaccgttaccaaaaagagcgcagctgaagcatctaaaaaaccgcgacagaaacgtaccgcgactaaagattacaatgtaacacaggccttcggtcgtcgaggtccggagcaaactcaaggaaactttggcgatcaggatttaatcaaattagggaccgactacaaacactggccgcaaattgcccagttcgccccatccgctagtgcattcttcggtatgagccgcatcggcatggaagaaacgccaagtggtacgtggctgacctacaccggtgctatcaagcttgataagaaggacccgaactttaaagaccaggttattctgcttaacaaacatattgatgcctataaaactttcccgccgaccgaacccaaaaaggacaaaaagaaaaaagctgatgaaacccaggctctaccgcagcgtcagaaaaaacagcaaactgtgactctgctgccagctgcggacctggatgatttttccaagcagctgcaacagtctatgagctctgcggactctacgcaggctggtggttctggtcaccatcatcaccatcattaa

SEQ ID NO: 2916 - DNA, 2421 bp, Artificial Sequence
  Description of Artificial Sequence: Synthetic polynucleotide
atgaaaatcgaagaaggtaaactggtaatctggattaacggcgataaaggctataacggtctcgctgaagtcggtaagaaattcgagaaagataccggaattaaagtcaccgttgagcatccggataaactggaagagaaattcccacaggttgcggcaactggcgatggccctgacattatcttctgggcacacgaccgctttggtggctacgctcaatctggcctgttggctgaaatcaccccggacaaagcgttccaggacaagctgtatccgtttacctgggatgccgtacgttacaacggcaagctgattgcttacccgatcgctgttgaagcgttatcgctgatttataacaaagatctgctgccgaacccgccaaaaacctgggaagagatcccggcgctggataaagaactgaaagcgaaaggtaagagcgcgctgatgttcaacctgcaagaaccgtacttcacctggccgctgattgctgctgacgggggttatgcgttcaagtatgaaaacggcaagtacgacattaaagacgtgggcgtggataacgctggcgcgaaagcgggtctgaccttcctggttgacctgattaaaaacaaacacatgaatgcagacaccgattactccatcgcagaagctgcctttaataaaggcgaaacagcgatgaccatcaacggcccgtgggcatggtccaacatcgacaccagcaaagtgaattatggtgtaacggtactgccgaccttcaagggtcaaccatccaaaccgttcgttggcgtgctgagcgcaggtattaacgccgccagtccgaacaaagagctggcgaaagagttcctcgaaaactatctgctgactgatgaaggtctggaagcggttaataaagacaaaccgctgggtgccgtagcgctgaagtcttacgaggaagagttggcgaaagatccacgtattgccgccaccatggaaaacgcccagaaaggtgaaatcatgccgaacatcccgcagatgtccgctttctggtatgccgtgcgtactgcggtgatcaacgccgccagcggtcgtcagactgtcgatgaagccctgaaagacgcgcagactggtggttctggtgagaacctgtactttcaaagctcagataatgggcctcaaaaccagcgcaacgctccacgtataaccttcggtggcccgtctgactccacaggcagcaaccagaatggtgagcgtagtggagccaggtctaagcagcgccgtccccagggtctgccgaacaacacggcgagctggtttactgcgcttacccaacacggtaaagaagacttaaaattcccgcgtggccagggcgtcccgatcaacactaactcttccccggatgatcagattggttattaccgcagagcaactcgtcggattcgcggcggcgacggtaaaatgaaagatttgtctccgcgttggtacttttactatctcggcaccggtccggaagctggactgccctacggggcaaacaaggacgggatcatttgggtggctaccgaaggtgccctgaatactccaaaagatcatatcggcacccgtaaccctgctaataacgctgcgatcgttctgcaactgcctcagggtacaactctgccaaaaggcttctatgcagaagggtcgcgtggtggcagccaggcgagtagccgtagcagctcccgctctcgcaactcgtcccgtaactccactccgggctcttctcgcggcacgtccccggctcgtatggcaggtaacggtggtgacgctgctctggcgctgctactgctggacaggctgaaccagctggagtcgaagatgagtggtaaaggccaacagcagcagggccagaccgttaccaaaaagagcgcagctgaagcatctaaaaaaccgcgacagaaacgtaccgcgactaaaggctacaatgtaacacaggccttcggtcgtcgaggtccggagcaaactcaaggaaactttggcgatcaggatttaaataaattggggaccgactacaaacactggccgcaaattgcccagttcgccccatccgctagtgcattcttcggtatgagccgcatctcgacggaagaaacgccaagtggtacgtggctgacctacaccggtgctatcaagcttgataaaaaggacccgaactttaaagaccaggttattctgcttaacaaacatattgatgcctataaaactttcccgccgaccgaacccaaaaaggacaaaaagaaaaaagctgatgaaacccaggctctaccgcagcgtcagaaaaaacagcaaactgtgactctgctgccagctgcggacctggatgatttttccaagcagctgcaacagtctatgagctctgcggactctacgcaggctggtggttctggtcaccatcatcaccatcattaa

SEQ ID NO: 2917 - DNA, 2421 bp, Artificial Sequence
  Description of Artificial Sequence: Synthetic polynucleotide
atgaaaatcgaagaaggtaaactggtaatctggattaacggcgataaaggctataacggtctcgctgaagtcggtaagaaattcgagaaagataccggaattaaagtcaccgttgagcatccggataaactggaagagaaattcccacaggttgcggcaactggcgatggccctgacattatcttctgggcacacgaccgctttggtggctacgctcaatctggcctgttggctgaaatcaccccggacaaagcgttccaggacaagctgtatccgtttacctgggatgccgtacgttacaacggcaagctgattgcttacccgatcgctgttgaagcgttatcgctgatttataacaaagatctgctgccgaacccgccaaaaacctgggaagagatcccggcgctggataaagaactgaaagcgaaaggtaagagcgcgctgatgttcaacctgcaagaaccgtacttcacctggccgctgattgctgctgacgggggttatgcgttcaagtatgaaaacggcaagtacgacattaaagacgtgggcgtggataacgctggcgcgaaagcgggtctgaccttcctggttgacctgattaaaaacaaacacatgaatgcagacaccgattactccatcgcagaagctgcctttaataaaggcgaaacagcgatgaccatcaacggcccgtgggcatggtccaacatcgacaccagcaaagtgaattatggtgtaacggtactgccgaccttcaagggtcaaccatccaaaccgttcgttggcgtgctgagcgcaggtattaacgccgccagtccgaacaaagagctggcgaaagagttcctcgaaaactatctgctgactgatgaaggtctggaagcggttaataaagacaaaccgctgggtgccgtagcgctgaagtcttacgaggaagagttggcgaaagatccacgtattgccgccaccatggaaaacgcccagaaaggtgaaatcatgccgaacatcccgcagatgtccgctttctggtatgccgtgcgtactgcggtgatcaacgccgccagcggtcgtcagactgtcgatgaagccctgaaagacgcgcagactggtggttctggtgagaacctgtactttcaaagctcagataatgggcctcaaaaccagcgcaacgctccacgtataaccttcggtggcccgtctgactccacaggcagcaaccagaatggtgagcgtagtggagccaggtctaagcagcgccgtccccagggtctgccgaacaacacggcgagctggtttactccgcttacccaattcggtaaagaagacttaaaattcccgcctggccagggcgtcccgatcaacactaactcttccccggatgatcagattggttattaccgcagagcaactcgtcggattcgcggcggcgacggtaaaatgaaagatttgccaccgaaatggtacttttactatctcggcaccggtccgcatgctgatctgccctacgggcaaaagaaggacggggttgtatgggtggctcggcctggtgccctgaatactccaaaagatcatatcggcacccgtaaccctgctaataacgctgcgatccccctgcaactgcctccgggtacaaaactgccaaaaggcttctatgcagaagggtcgcgtggtggcagccaggcgagtagccgtagcagctcccgctctcgcaactcgtcccgtaactccactccgggctcttctcgcggcacgtccccggctcgtatggcaggtaacggtggtgacgctgctctggcgctgctactgctggacaggctgaaccagctggagtcgaagatgagtggtaaaggccaacagcagcagggccagaccgttaccaaaaagagcgcagctgaagcatctaaaaaaccgcgacagaaacgtaccgcgactaaagcgtacaatgtaacacaggccttcggtcgtcgaggtccggagcaaactcaaggaaactttggcgatcaggaattaatccgccaggggaccgactacaaacactggccgcaaattgcccagttcgccccatccgctagtgcattcttcggtatgagccgcatcggcatggaagtaacgccaagtggtacgtggctgacctacaccggtgctatcaagcttgatgacaaggacccgaactttaaagaccaggttattctgcttaacaaacatattgatgcctataaaactttcccgccgaccgaacccaaaaaggacaaaaagaaaaaagctgatgaaacccaggctctaccgcagcgtcagaaaaaacagcaaactgtgactctgctgccagctgcggacctggatgatttttccaagcagctgcaacagtctatgagctctgcggactctacgcaggctggtggttctggtcaccatcatcaccatcattaa

SEQ ID NO: 2918 - DNA, 2421 bp, Artificial Sequence
  Description of Artificial Sequence: Synthetic polynucleotide
atgaaaatcgaagaaggtaaactggtaatctggattaacggcgataaaggctataacggtctcgctgaagtcggtaagaaattcgagaaagataccggaattaaagtcaccgttgagcatccggataaactggaagagaaattcccacaggttgcggcaactggcgatggccctgacattatcttctgggcacacgaccgctttggtggctacgctcaatctggcctgttggctgaaatcaccccggacaaagcgttccaggacaagctgtatccgtttacctgggatgccgtacgttacaacggcaagctgattgcttacccgatcgctgttgaagcgttatcgctgatttataacaaagatctgctgccgaacccgccaaaaacctgggaagagatcccggcgctggataaagaactgaaagcgaaaggtaagagcgcgctgatgttcaacctgcaagaaccgtacttcacctggccgctgattgctgctgacgggggttatgcgttcaagtatgaaaacggcaagtacgacattaaagacgtgggcgtggataacgctggcgcgaaagcgggtctgaccttcctggttgacctgattaaaaacaaacacatgaatgcagacaccgattactccatcgcagaagctgcctttaataaaggcgaaacagcgatgaccatcaacggcccgtgggcatggtccaacatcgacaccagcaaagtgaattatggtgtaacggtactgccgaccttcaagggtcaaccatccaaaccgttcgttggcgtgctgagcgcaggtattaacgccgccagtccgaacaaagagctggcgaaagagttcctcgaaaactatctgctgactgatgaaggtctggaagcggttaataaagacaaaccgctgggtgccgtagcgctgaagtcttacgaggaagagttggcgaaagatccacgtattgccgccaccatggaaaacgcccagaaaggtgaaatcatgccgaacatcccgcagatgtccgctttctggtatgccgtgcgtactgcggtgatcaacgccgccagcggtcgtcagactgtcgatgaagccctgaaagacgcgcagactggtggttctggtgagaacctgtactttcaaagctcagataatgggcctcaaaaccagcgcaacgctccacgtataaccttcggtggcccgtctgactccacaggcagcaaccagaatggtgagcgtagtggagccaggtctaagcagcgccgtccccagggtctgccgaacaacacggcgagctggtttactgcgcttacccaacacggtaaagaagacttaaaattcccgcgtggccagggcgtcccgatcaacactaactcttccccggatgatcagattggttattaccgcagagcaactcgtcggattcgcggcggcgacggtaaaatgaaagatttgtctccgcgttggtacttttactatatcggcaccggtccggaagctggactgccctacggggcaaacaaggacgggatcatttgggtggctaccgaaggtgccctgaatactccaaaagatcatatcggcacccgtaaccctgctaataacgctgcgatcgttctgcaactgcctcagggtacaactctgccaaaaggcttctatgcagaagggtcgcgtggtggcagccaggcgagtagccgtagcagctcccgctctcgcaactcgtcccgtaactccactccgggctcttctcgcggcacgtccccggctcgtatggcaggtaacggtggtgacgctgctctggcgctgctactgctggacaggctgaaccagctggagtcgaagatgagtggtaaaggccaacagcagcagggccagaccgttaccaaaaagagcgcagctgaagcatctaaaaaaccgcgacagaaacgtaccgcgactaaagcgtacaatgtaacacaggccttcggtcgtcgaggtccggagcaaactcaaggaaactttggcgatcaggaattaatccgccaggggaccgactacaaacactggccgcaaattgcccagttcgccccatccgctagtgcattcttcggtatgagccgcatcggcatggaagtaacgccaagtggtacgtggctgacctacaccggtgctatcaagcttgatgacaaggacccgaactttaaagaccaggttattctgcttaacaaacatattgatgcctataaaactttcccgccgaccgaacccaaaaaggacaaaaagaaaaaagctgatgaaacccaggctctaccgcagcgtcagaaaaaacagcaaactgtgactctgctgccagctgcggacctggatgatttttccaagcagctgcaacagtctatgagctctgcggactctacgcaggctggtggttctggtcaccatcatcaccatcattaa

SEQ ID NO: 2919 - DNA, 2421 bp, Artificial Sequence
  Description of Artificial Sequence: Synthetic polynucleotide
atgaaaatcgaagaaggtaaactggtaatctggattaacggcgataaaggctataacggtctcgctgaagtcggtaagaaattcgagaaagataccggaattaaagtcaccgttgagcatccggataaactggaagagaaattcccacaggttgcggcaactggcgatggccctgacattatcttctgggcacacgaccgctttggtggctacgctcaatctggcctgttggctgaaatcaccccggacaaagcgttccaggacaagctgtatccgtttacctgggatgccgtacgttacaacggcaagctgattgcttacccgatcgctgttgaagcgttatcgctgatttataacaaagatctgctgccgaacccgccaaaaacctgggaagagatcccggcgctggataaagaactgaaagcgaaaggtaagagcgcgctgatgttcaacctgcaagaaccgtacttcacctggccgctgattgctgctgacgggggttatgcgttcaagtatgaaaacggcaagtacgacattaaagacgtgggcgtggataacgctggcgcgaaagcgggtctgaccttcctggttgacctgattaaaaacaaacacatgaatgcagacaccgattactccatcgcagaagctgcctttaataaaggcgaaacagcgatgaccatcaacggcccgtgggcatggtccaacatcgacaccagcaaagtgaattatggtgtaacggtactgccgaccttcaagggtcaaccatccaaaccgttcgttggcgtgctgagcgcaggtattaacgccgccagtccgaacaaagagctggcgaaagagttcctcgaaaactatctgctgactgatgaaggtctggaagcggttaataaagacaaaccgctgggtgccgtagcgctgaagtcttacgaggaagagttggcgaaagatccacgtattgccgccaccatggaaaacgcccagaaaggtgaaatcatgccgaacatcccgcagatgtccgctttctggtatgccgtgcgtactgcggtgatcaacgccgccagcggtcgtcagactgtcgatgaagccctgaaagacgcgcagactggtggttctggtgagaacctgtactttcaaagctcagataatgggcctcaaaaccagcgcaacgctccacgtataaccttcggtggcccgtctgactccacaggcagcaaccagaatggtgagcgtagtggagccaggtctaagcagcgccgtccccagggtctgccgaacaacacggcgagctggtttactgcgcttacccaacacggtaaagaagacttaaaattcccgcgtggccagggcgtcccgatcaacactaactcttccccggatgatcagattggttattaccgcagagcaactcgtcggattcgcggcggcgacggtaaaatgaaagatttgtctccgcgttggtacttttactatctcggcaccggtccggaagctggactgccctacggggcaaacaaggacgggatcatttgggtggctaccgaaggtgccctgaatactccaaaagatcatatcggcacccgtaaccctgctaataacgctgcgatcgttctgcaactgcctcagggtacaactctgccaaaaggcttctatgcagaagggtcgcgtggtggcagccaggcgagtagccgtagcagctcccgctctcgcaactcgtcccgtaactccactccgggctcttctcgcggcacgtccccggctcgtatggcaggtaacggtggtgacgctgctctggcgctgctactgctggacaggctgaaccagctggagtcgaagatgagtggtaaaggccaacagcagcagggccagaccgttaccaaaaagagcgcagctgaagcatctaaaaaaccgcgacagaaacgtaccgcgactaaagagtacaatgtaacacaggccttcggtcgtcgaggtccggagcaaactcaaggaaactttggcgatcaggatttaatcaaattggggaccgactacaaacactggccgcaaattgcccagttcgccccatccgctagtgcattcttcggtatgagccgcatctcgacgcgcgaaacgccaagtggtacgtggctgacctacaccggtgctatcaagcttgataagaaggacccgaactttaaagaccaggttattctgcttaacaaacatattgatgcctataaaactttcccgccgaccgaacccaaaaaggacaaaaagaaaaaagctgatgaaacccaggctctaccgcagcgtcagaaaaaacagcaaactgtgactctgctgccagctgcggacctggatgatttttccaagcagctgcaacagtctatgagctctgcggactctacgcaggctggtggttctggtcaccatcatcaccatcattaa

SEQ ID NO: 2920 - DNA, 2421 bp, Artificial Sequence
  Description of Artificial Sequence: Synthetic polynucleotide
atgaaaatcgaagaaggtaaactggtaatctggattaacggcgataaaggctataacggtctcgctgaagtcggtaagaaattcgagaaagataccggaattaaagtcaccgttgagcatccggataaactggaagagaaattcccacaggttgcggcaactggcgatggccctgacattatcttctgggcacacgaccgctttggtggctacgctcaatctggcctgttggctgaaatcaccccggacaaagcgttccaggacaagctgtatccgtttacctgggatgccgtacgttacaacggcaagctgattgcttacccgatcgctgttgaagcgttatcgctgatttataacaaagatctgctgccgaacccgccaaaaacctgggaagagatcccggcgctggataaagaactgaaagcgaaaggtaagagcgcgctgatgttcaacctgcaagaaccgtacttcacctggccgctgattgctgctgacgggggttatgcgttcaagtatgaaaacggcaagtacgacattaaagacgtgggcgtggataacgctggcgcgaaagcgggtctgaccttcctggttgacctgattaaaaacaaacacatgaatgcagacaccgattactccatcgcagaagctgcctttaataaaggcgaaacagcgatgaccatcaacggcccgtgggcatggtccaacatcgacaccagcaaagtgaattatggtgtaacggtactgccgaccttcaagggtcaaccatccaaaccgttcgttggcgtgctgagcgcaggtattaacgccgccagtccgaacaaagagctggcgaaagagttcctcgaaaactatctgctgactgatgaaggtctggaagcggttaataaagacaaaccgctgggtgccgtagcgctgaagtcttacgaggaagagttggcgaaagatccacgtattgccgccaccatggaaaacgcccagaaaggtgaaatcatgccgaacatcccgcagatgtccgctttctggtatgccgtgcgtactgcggtgatcaacgccgccagcggtcgtcagactgtcgatgaagccctgaaagacgcgcagactggtggttctggtgagaacctgtactttcaaagctcagataatgggcctcaaaaccagcgcaacgctccacgtataaccttcggtggcccgtctgactccacaggcagcaaccagaatggtgagcgtagtggagccaggtctaagcagcgccgtccccagggtctgccgaacaacacggcgagctggtttactgcgcttacccaacacggtaaagaagacttaaaattcccgcgtggccagggcgtcccgatcaacactaactcttccccggatgatcagattggttattaccgcagagcaactcgtcggattcgcggcggcgacggtaaaatgaaagatttgtctccgcgttggtacttttactatctcggcaccggtccggaagctggactgccctacggggcaaacaaggacgggatcatttgggtggctaccgaaggtgccctgaatactccaaaagatcatatcggcacccgtaaccctgctaataacgctgcggtagttctgcaactgcctcagggtacaactctgccaaaaggcttctatgcagaagggtcgcgtggtggcagccaggcgagtagccgtagcagctcccgctctcgcaactcgtcccgtaactccactccgggctcttctcgcggcacgtccccggctcgtatggcaggtaacggtggtgacgctgctctggcgctgctactgctggacaggctgaaccagctggagtcgaagatgagtggtaaaggccaacagcagcagggccagaccgttaccaaaaagagcgcagctgaagcatctaaaaaaccgcgacagaaacgtaccgcgactaaagcgtacaatgtaacacaggccttcggtcgtcgaggtccggagcaaactcaaggaaactttggcgatcaggaattaatccgccaggggaccgactacaaacactggccgcaaattgcccagttcgccccatccgctagtgcattcttcggtatgagccgcatcggcatggaagtaacgccaagtggtacgtggctgacctacaccggtgctatcaagcttgatgacaaggacccgaactttaaagaccaggttattctgcttaacaaacatattgatgcctataaaactttcccgccgaccgaacccaaaaaggacaaaaagaaaaaagctgatgaaacccaggctctaccgcagcgtcagaaaaaacagcaaactgtgactctgctgccagctgcggacctggatgatttttccaagcagctgcaacagtctatgagctctgcggactctacgcaggctggtggttctggtcaccatcatcaccatcattaa

SEQ ID NO: 2921 - DNA, 2421 bp, Artificial Sequence
  Description of Artificial Sequence: Synthetic polynucleotide
atgaaaatcgaagaaggtaaactggtaatctggattaacggcgataaaggctataacggtctcgctgaagtcggtaagaaattcgagaaagataccggaattaaagtcaccgttgagcatccggataaactggaagagaaattcccacaggttgcggcaactggcgatggccctgacattatcttctgggcacacgaccgctttggtggctacgctcaatctggcctgttggctgaaatcaccccggacaaagcgttccaggacaagctgtatccgtttacctgggatgccgtacgttacaacggcaagctgattgcttacccgatcgctgttgaagcgttatcgctgatttataacaaagatctgctgccgaacccgccaaaaacctgggaagagatcccggcgctggataaagaactgaaagcgaaaggtaagagcgcgctgatgttcaacctgcaagaaccgtacttcacctggccgctgattgctgctgacgggggttatgcgttcaagtatgaaaacggcaagtacgacattaaagacgtgggcgtggataacgctggcgcgaaagcgggtctgaccttcctggttgacctgattaaaaacaaacacatgaatgcagacaccgattactccatcgcagaagctgcctttaataaaggcgaaacagcgatgaccatcaacggcccgtgggcatggtccaacatcgacaccagcaaagtgaattatggtgtaacggtactgccgaccttcaagggtcaaccatccaaaccgttcgttggcgtgctgagcgcaggtattaacgccgccagtccgaacaaagagctggcgaaagagttcctcgaaaactatctgctgactgatgaaggtctggaagcggttaataaagacaaaccgctgggtgccgtagcgctgaagtcttacgaggaagagttggcgaaagatccacgtattgccgccaccatggaaaacgcccagaaaggtgaaatcatgccgaacatcccgcagatgtccgctttctggtatgccgtgcgtactgcggtgatcaacgccgccagcggtcgtcagactgtcgatgaagccctgaaagacgcgcagactggtggttctggtgagaacctgtactttcaaagctcagataatgggcctcaaaaccagcgcaacgctccacgtataaccttcggtggcccgtctgactccacaggcagcaaccagaatggtgagcgtagtggagccaggtctaagcagcgccgtccccagggtctgccgaacaacacggcgagctggtttactgcgcttacccaacacggtaaagaagacttaaaattcccgcgtggccagggcgtcccgatcaacactaactcttccccggatgatcagattggttattaccgcagagcaactcgtcggattcgcggcggcgacggtaaaatgaaagatttgtctccgcgttggtacttttactatctcggcaccggtccggaagctggactgccctacggggcaaacaaggacgggatcatttgggtggctaccgaaggtgccctgaatactccaaaagatcatatcggcacccgtaaccctgctaataacgctgcgatcgttctgcaactgcctcagggtacaactctgccaaaaggcttctatgcagaagggtcgcgtggtggcagccaggcgagtagccgtagcagctcccgctctcgcaactcgtcccgtaactccactccgggctcttctcgcggcacgtccccggctcgtatggcaggtaacggtggtgacgctgctctggcgctgctactgctggacaggctgaaccagctggagtcgaagatgagtggtaaaggccaacagcagcagggccagaccgttaccaaaaagagcgcagctgaagcatctaaaaaaccgcgacagaaacgtaccgcgactaaagcgtacaatgtaacacaggccttcggtcgtcgaggtccggagcaaactcaaggaaactttggcgatcaggaattaatcaaacaggggaccgactacaaacactggccgcaaattgcccagttcgccccatccgctagtgcattcttcggtatgagccgcatcggcatggaagtaacgccaagtggtacgtggctgacctacaccggtgctatcaagcttgatgacaaggacccgaactttaaagaccaggttattctgcttaacaaacatattgatgcctataaaactttcccgccgaccgaacccaaaaaggacaaaaagaaaaaagctgatgaaacccaggctctaccgcagcgtcagaaaaaacagcaaactgtgactctgctgccagctgcggacctggatgatttttccaagcagctgcaacagtctatgagctctgcggactctacgcaggctggtggttctggtcaccatcatcaccatcattaa

SEQ ID NO: 2922 - DNA, 2421 bp, Artificial Sequence
  Description of Artificial Sequence: Synthetic polynucleotide
atgaaaatcgaagaaggtaaactggtaatctggattaacggcgataaaggctataacggtctcgctgaagtcggtaagaaattcgagaaagataccggaattaaagtcaccgttgagcatccggataaactggaagagaaattcccacaggttgcggcaactggcgatggccctgacattatcttctgggcacacgaccgctttggtggctacgctcaatctggcctgttggctgaaatcaccccggacaaagcgttccaggacaagctgtatccgtttacctgggatgccgtacgttacaacggcaagctgattgcttacccgatcgctgttgaagcgttatcgctgatttataacaaagatctgctgccgaacccgccaaaaacctgggaagagatcccggcgctggataaagaactgaaagcgaaaggtaagagcgcgctgatgttcaacctgcaagaaccgtacttcacctggccgctgattgctgctgacgggggttatgcgttcaagtatgaaaacggcaagtacgacattaaagacgtgggcgtggataacgctggcgcgaaagcgggtctgaccttcctggttgacctgattaaaaacaaacacatgaatgcagacaccgattactccatcgcagaagctgcctttaataaaggcgaaacagcgatgaccatcaacggcccgtgggcatggtccaacatcgacaccagcaaagtgaattatggtgtaacggtactgccgaccttcaagggtcaaccatccaaaccgttcgttggcgtgctgagcgcaggtattaacgccgccagtccgaacaaagagctggcgaaagagttcctcgaaaactatctgctgactgatgaaggtctggaagcggttaataaagacaaaccgctgggtgccgtagcgctgaagtcttacgaggaagagttggcgaaagatccacgtattgccgccaccatggaaaacgcccagaaaggtgaaatcatgccgaacatcccgcagatgtccgctttctggtatgccgtgcgtactgcggtgatcaacgccgccagcggtcgtcagactgtcgatgaagccctgaaagacgcgcagactggtggttctggtgagaacctgtactttcaaagctcagataatgggcctcaaaaccagcgcaacgctccacgtataaccttcggtggcccgtctgactccacaggcagcaaccagaatggtgagcgtagtggagccaggtctaagcagcgccgtccccagggtctgccgaacaacacggcgagctggtttactgcgcttacccaacacggtaaagaagacttaaaattcccgcgtggccagggcgtcccgatcaacactaactcttccccggatgatcagattggttattaccgcagagcaactcgtcggattcgcggcggcgacggtaaaatgaaagatttgtctccgcgttggtacttttactatctcggcaccggtccggaagctggactgccctacggggcaaacaaggacgggatcatttgggtggctaccgaaggtgccctgaatactccaaaagatcatatcggcacccgtaaccctgctaataacgctgcgatcgttctgcaactgcctcagggtacaactctgccaaaaggcttctatgcagaagggtcgcgtggtggcagccaggcgagtagccgtagcagctcccgctctcgcaactcgtcccgtaactccactccgggctcttctcgcggcacgtccccggctcgtatggcaggtaacggtggtgacgctgctctggcgctgctactgctggacaggctgaaccagctggagtcgaagatgagtggtaaaggccaacagcagcagggccagaccgttaccaaaaagagcgcagctgaagcatctaaaaaaccgcgacagaaacgtaccgcgactaaagcgtacaatgtaacacaggccttcggtcgtcgaggtccggagcaaactcaaggaaactttggcgatcaggaattaatccgccaggggaccgactacaaacactggccgcaaattgcccagttcgccccatccgctagtgcattcttcggtatgagccgcatcggcatggaagatacgccaagtggtacgtggctgacctacaccggtgctatcaagcttgatgacaaggacccgaactttaaagaccaggttattctgcttaacaaacatattgatgcctataaaactttcccgccgaccgaacccaaaaaggacaaaaagaaaaaagctgatgaaacccaggctctaccgcagcgtcagaaaaaacagcaaactgtgactctgctgccagctgcggacctggatgatttttccaagcagctgcaacagtctatgagctctgcggactctacgcaggctggtggttctggtcaccatcatcaccatcattaa

SEQ ID NO: 2923 - DNA, 2421 bp, Artificial Sequence
  Description of Artificial Sequence: Synthetic polynucleotide
atgaaaatcgaagaaggtaaactggtaatctggattaacggcgataaaggctataacggtctcgctgaagtcggtaagaaattcgagaaagataccggaattaaagtcaccgttgagcatccggataaactggaagagaaattcccacaggttgcggcaactggcgatggccctgacattatcttctgggcacacgaccgctttggtggctacgctcaatctggcctgttggctgaaatcaccccggacaaagcgttccaggacaagctgtatccgtttacctgggatgccgtacgttacaacggcaagctgattgcttacccgatcgctgttgaagcgttatcgctgatttataacaaagatctgctgccgaacccgccaaaaacctgggaagagatcccggcgctggataaagaactgaaagcgaaaggtaagagcgcgctgatgttcaacctgcaagaaccgtacttcacctggccgctgattgctgctgacgggggttatgcgttcaagtatgaaaacggcaagtacgacattaaagacgtgggcgtggataacgctggcgcgaaagcgggtctgaccttcctggttgacctgattaaaaacaaacacatgaatgcagacaccgattactccatcgcagaagctgcctttaataaaggcgaaacagcgatgaccatcaacggcccgtgggcatggtccaacatcgacaccagcaaagtgaattatggtgtaacggtactgccgaccttcaagggtcaaccatccaaaccgttcgttggcgtgctgagcgcaggtattaacgccgccagtccgaacaaagagctggcgaaagagttcctcgaaaactatctgctgactgatgaaggtctggaagcggttaataaagacaaaccgctgggtgccgtagcgctgaagtcttacgaggaagagttggcgaaagatccacgtattgccgccaccatggaaaacgcccagaaaggtgaaatcatgccgaacatcccgcagatgtccgctttctggtatgccgtgcgtactgcggtgatcaacgccgccagcggtcgtcagactgtcgatgaagccctgaaagacgcgcagactggtggttctggtgagaacctgtactttcaaagctcagataatgggcctcaaaaccagcgcaacgctccacgtataaccttcggtggcccgtctgactccacaggcagcaaccagaatggtgagcgtagtggagccaggtctaagcagcgccgtccccagggtctgccgaacaacacggcgagctggtttactgcgcttacccaacacggtaaagaagacttaaaattcccgcgtggccagggcgtcccgatcaacactaactcttccccggatgatcagattggttattaccgcagagcaactcgtcggattcgcggcggcgacggtaaaatgaaagatttgtctccgcgttggtacttttactatctcggcaccggtccggaagctggactgccctacggggcaaacaaggacgggatcatttgggtggctaccgaaggtgccctgaatactccaaaagatcatatcggcacccgtaaccctgctaataacgctgcgatctggctgcaactgcctcagggtacaactctgccaaaaggcttctatgcagaagggtcgcgtggtggcagccaggcgagtagccgtagcagctcccgctctcgcaactcgtcccgtaactccactccgggctcttctcgcggcacgtccccggctcgtatggcaggtaacggtggtgacgctgctctggcgctgctactgctggacaggctgaaccagctggagtcgaagatgagtggtaaaggccaacagcagcagggccagaccgttaccaaaaagagcgcagctgaagcatctaaaaaaccgcgacagaaacgtaccgcgactaaagcgtacaatgtaacacaggccttcggtcgtcgaggtccggagcaaactcaaggaaactttggcgatcaggaattaatccgccaggggaccgactacaaacactggccgcaaattgcccagttcgccccatccgctagtgcattcttcggtatgagccgcatcggcatggaagtaacgccaagtggtacgtggctgacctacaccggtgctatcaagcttgatgacaaggacccgaactttaaagaccaggttattctgcttaacaaacatattgatgcctataaaactttcccgccgaccgaacccaaaaaggacaaaaagaaaaaagctgatgaaacccaggctctaccgcagcgtcagaaaaaacagcaaactgtgactctgctgccagctgcggacctggatgatttttccaagcagctgcaacagtctatgagctctgcggactctacgcaggctggtggttctggtcaccatcatcaccatcattaa

SEQ ID NO: 2924 - DNA, 2421 bp, Artificial Sequence
  Description of Artificial Sequence: Synthetic polynucleotide
atgaaaatcgaagaaggtaaactggtaatctggattaacggcgataaaggctataacggtctcgctgaagtcggtaagaaattcgagaaagataccggaattaaagtcaccgttgagcatccggataaactggaagagaaattcccacaggttgcggcaactggcgatggccctgacattatcttctgggcacacgaccgctttggtggctacgctcaatctggcctgttggctgaaatcaccccggacaaagcgttccaggacaagctgtatccgtttacctgggatgccgtacgttacaacggcaagctgattgcttacccgatcgctgttgaagcgttatcgctgatttataacaaagatctgctgccgaacccgccaaaaacctgggaagagatcccggcgctggataaagaactgaaagcgaaaggtaagagcgcgctgatgttcaacctgcaagaaccgtacttcacctggccgctgattgctgctgacgggggttatgcgttcaagtatgaaaacggcaagtacgacattaaagacgtgggcgtggataacgctggcgcgaaagcgggtctgaccttcctggttgacctgattaaaaacaaacacatgaatgcagacaccgattactccatcgcagaagctgcctttaataaaggcgaaacagcgatgaccatcaacggcccgtgggcatggtccaacatcgacaccagcaaagtgaattatggtgtaacggtactgccgaccttcaagggtcaaccatccaaaccgttcgttggcgtgctgagcgcaggtattaacgccgccagtccgaacaaagagctggcgaaagagttcctcgaaaactatctgctgactgatgaaggtctggaagcggttaataaagacaaaccgctgggtgccgtagcgctgaagtcttacgaggaagagttggcgaaagatccacgtattgccgccaccatggaaaacgcccagaaaggtgaaatcatgccgaacatcccgcagatgtccgctttctggtatgccgtgcgtactgcggtgatcaacgccgccagcggtcgtcagactgtcgatgaagccctgaaagacgcgcagactggtggttctggtgagaacctgtactttcaaagctcagataatgggcctcaaaaccagcgcaacgctccacgtataaccttcggtggcccgtctgactccacaggcagcaaccagaatggtgagcgtagtggagccaggtctaagcagcgccgtccccagggtctgccgaacaacacggcgagctggtttactggccttacccaaaatggtaaagaagacttaaaattcccgccaggccagggcgtcccgatcaacactaactcttccccggatgatcagattggttattaccgcagagcaactcgtcggattcgcggcggcgacggtaaaatgaaagatttgccaccgaaatggtacttttactatctcggcaccggtccgcatgctgatctgccctacgggcaaaagcacgacggggtgttttgggtggctcgaccgggtgccctgaatactccaaaagatcatatcggcacccgtaaccctgctaataacgctgcgatcccgctgcaactgcctccgggtacaaaactgccaaaaggcttctatgcagaagggtcgcgtggtggcagccaggcgagtagccgtagcagctcccgctctcgcaactcgtcccgtaactccactccgggctcttctcgcggcacgtccccggctcgtatggcaggtaacggtggtgacgctgctctggcgctgctactgctggacaggctgaaccagctggagtcgaagatgagtggtaaaggccaacagcagcagggccagaccgttaccaaaaagagcgcagctgaagcatctaaaaaaccgcgacagaaacgtaccgcgactaaagcgtacaatgtaacacaggccttcggtcgtcgaggtccggagcaaactcaaggaaactttggcgatcaggaattaatccgccaggggaccgactacaaacactggccgcaaattgcccagttcgccccatccgctagtgcattcttcggtatgagccgcatcggcatggaagtaacgccaagtggtacgtggctgacctacaccggtgctatcaagcttgatgacaaggacccgaactttaaagaccaggttattctgcttaacaaacatattgatgcctataaaactttcccgccgaccgaacccaaaaaggacaaaaagaaaaaagctgatgaaacccaggctctaccgcagcgtcagaaaaaacagcaaactgtgactctgctgccagctgcggacctggatgatttttccaagcagctgcaacagtctatgagctctgcggactctacgcaggctggtggttctggtcaccatcatcaccatcattaa

SEQ ID NO: 2925 - DNA, 2421 bp, Artificial Sequence
  Description of Artificial Sequence: Synthetic polynucleotide
atgaaaatcgaagaaggtaaactggtaatctggattaacggcgataaaggctataacggtctcgctgaagtcggtaagaaattcgagaaagataccggaattaaagtcaccgttgagcatccggataaactggaagagaaattcccacaggttgcggcaactggcgatggccctgacattatcttctgggcacacgaccgctttggtggctacgctcaatctggcctgttggctgaaatcaccccggacaaagcgttccaggacaagctgtatccgtttacctgggatgccgtacgttacaacggcaagctgattgcttacccgatcgctgttgaagcgttatcgctgatttataacaaagatctgctgccgaacccgccaaaaacctgggaagagatcccggcgctggataaagaactgaaagcgaaaggtaagagcgcgctgatgttcaacctgcaagaaccgtacttcacctggccgctgattgctgctgacgggggttatgcgttcaagtatgaaaacggcaagtacgacattaaagacgtgggcgtggataacgctggcgcgaaagcgggtctgaccttcctggttgacctgattaaaaacaaacacatgaatgcagacaccgattactccatcgcagaagctgcctttaataaaggcgaaacagcgatgaccatcaacggcccgtgggcatggtccaacatcgacaccagcaaagtgaattatggtgtaacggtactgccgaccttcaagggtcaaccatccaaaccgttcgttggcgtgctgagcgcaggtattaacgccgccagtccgaacaaagagctggcgaaagagttcctcgaaaactatctgctgactgatgaaggtctggaagcggttaataaagacaaaccgctgggtgccgtagcgctgaagtcttacgaggaagagttggcgaaagatccacgtattgccgccaccatggaaaacgcccagaaaggtgaaatcatgccgaacatcccgcagatgtccgctttctggtatgccgtgcgtactgcggtgatcaacgccgccagcggtcgtcagactgtcgatgaagccctgaaagacgcgcagactggtggttctggtgagaacctgtactttcaaagctcagataatgggcctcaaaaccagcgcaacgctccacgtataaccttcggtggcccgtctgactccacaggcagcaaccagaatggtgagcgtagtggagccaggtctaagcagcgccgtccccagggtctgccgaacaacacggcgagctggtttactgcgattacccaacacggtaaagaagacttaaaattcccgcgtggccagggcgtcccgatcaacactaactcttccccggatgatcagattggttattaccgcagagcaactcgtcggattcgcggcggcgacggtaaaatgaaagatttgtctccgcgttggtacttttactatctcggcaccggtccggaagctggactgccctacggggcaaacaaggacgggatcatttgggtggctaccgaaggtgccctgaatactccaaaagatcatatcggcacccgtaaccctgctaataacgctgcgatcgttctgcaactgcctcagggtacaactctgccaaaaggcttctatgcagaagggtcgcgtggtggcagccaggcgagtagccgtagcagctcccgctctcgcaactcgtcccgtaactccactccgggctcttctcgcggcacgtccccggctcgtatggcaggtaacggtggtgacgctgctctggcgctgctactgctggacaggctgaaccagctggagtcgaagatgagtggtaaaggccaacagcagcagggccagaccgttaccaaaaagagcgcagctgaagcatctaaaaaaccgcgacagaaacgtaccgcgactaaagcgtacaatgtaacacaggccttcggtcgtcgaggtccggagcaaactcaaggaaactttggcgatcaggaattaatccgccaggggaccgactacaaacactggccgcaaattgcccagttcgccccatccgctagtgcattcttcggtatgagccgcatcggcatggaagtaacgccaagtggtacgtggctgacctacaccggtgctatcaagcttgatgacaaggacccgaactttaaagaccaggttattctgcttaacaaacatattgatgcctataaaactttcccgccgaccgaacccaaaaaggacaaaaagaaaaaagctgatgaaacccaggctctaccgcagcgtcagaaaaaacagcaaactgtgactctgctgccagctgcggacctggatgatttttccaagcagctgcaacagtctatgagctctgcggactctacgcaggctggtggttctggtcaccatcatcaccatcattaa

SEQ ID NO: 2926 - DNA, 2421 bp, Artificial Sequence
  Description of Artificial Sequence: Synthetic polynucleotide
atgaaaatcgaagaaggtaaactggtaatctggattaacggcgataaaggctataacggtctcgctgaagtcggtaagaaattcgagaaagataccggaattaaagtcaccgttgagcatccggataaactggaagagaaattcccacaggttgcggcaactggcgatggccctgacattatcttctgggcacacgaccgctttggtggctacgctcaatctggcctgttggctgaaatcaccccggacaaagcgttccaggacaagctgtatccgtttacctgggatgccgtacgttacaacggcaagctgattgcttacccgatcgctgttgaagcgttatcgctgatttataacaaagatctgctgccgaacccgccaaaaacctgggaagagatcccggcgctggataaagaactgaaagcgaaaggtaagagcgcgctgatgttcaacctgcaagaaccgtacttcacctggccgctgattgctgctgacgggggttatgcgttcaagtatgaaaacggcaagtacgacattaaagacgtgggcgtggataacgctggcgcgaaagcgggtctgaccttcctggttgacctgattaaaaacaaacacatgaatgcagacaccgattactccatcgcagaagctgcctttaataaaggcgaaacagcgatgaccatcaacggcccgtgggcatggtccaacatcgacaccagcaaagtgaattatggtgtaacggtactgccgaccttcaagggtcaaccatccaaaccgttcgttggcgtgctgagcgcaggtattaacgccgccagtccgaacaaagagctggcgaaagagttcctcgaaaactatctgctgactgatgaaggtctggaagcggttaataaagacaaaccgctgggtgccgtagcgctgaagtcttacgaggaagagttggcgaaagatccacgtattgccgccaccatggaaaacgcccagaaaggtgaaatcatgccgaacatcccgcagatgtccgctttctggtatgccgtgcgtactgcggtgatcaacgccgccagcggtcgtcagactgtcgatgaagccctgaaagacgcgcagactggtggttctggtgagaacctgtactttcaaagctcagataatgggcctcaaaaccagcgcaacgctccacgtataaccttcggtggcccgtctgactccacaggcagcaaccagaatggtgagcgtagtggagccaggtctaagcagcgccgtccccagggtctgccgaacaacacggcgagctggtttactgcgcttacccaacacggtaaagaagacttaaaattcccgcgtggccagggcgtcccgatcaacactaactcttccccggatgatcagattggttattaccgcagagcaactcgtcggattcgcggcggcgacggtaaaatgaaagatttgtctccgcgttggtacttttactatctcggcaccggtccggaagctggactgccctacggggcaaacaaggacgggatcatttgggtggctaccgaaggtgccctgaatactccaaaagatcatatcggcacccgtaaccctgctaataacgctgcgatcgttctgcaactgcctcagggtacaactctgccaaaaggcttctatgcagaagggtcgcgtggtggcagccaggcgagtagccgtagcagctcccgctctcgcaactcgtcccgtaactccactccgggctcttctcgcggcacgtccccggctcgtatggcaggtaacggtggtgacgctgctctggcgctgctactgctggacaggctgaaccagctggagtcgaagatgagtggtaaaggccaacagcagcagggccagaccgttaccaaaaagagcgcagctgaagcatctaaaaaaccgcgacagaaacgtaccgcgactaaagcgtacaatgtaacacaggccttcggtcgtcgaggtccggagcaaactcaaggaaactttggcgatcaggaattaatccgccaggggaccgactacaaacactggccgcaaattgcccagttcgccccatccgctagtgcattcttcggtatgagccgcatcggcatggaagtaacgccaagtggtacgtggctgacctacaccggtgctatcaagcttgatgacgatgacccgaactttaaagaccaggttattctgcttaacaaacatattgatgcctataaaactttcccgccgaccgaacccaaaaaggacaaaaagaaaaaagctgatgaaacccaggctctaccgcagcgtcagaaaaaacagcaaactgtgactctgctgccagctgcggacctggatgatttttccaagcagctgcaacagtctatgagctctgcggactctacgcaggctggtggttctggtcaccatcatcaccatcattaa

SEQ ID NO: 2927 - DNA, 2421 bp, Artificial Sequence
  Description of Artificial Sequence: Synthetic polynucleotide
atgaaaatcgaagaaggtaaactggtaatctggattaacggcgataaaggctataacggtctcgctgaagtcggtaagaaattcgagaaagataccggaattaaagtcaccgttgagcatccggataaactggaagagaaattcccacaggttgcggcaactggcgatggccctgacattatcttctgggcacacgaccgctttggtggctacgctcaatctggcctgttggctgaaatcaccccggacaaagcgttccaggacaagctgtatccgtttacctgggatgccgtacgttacaacggcaagctgattgcttacccgatcgctgttgaagcgttatcgctgatttataacaaagatctgctgccgaacccgccaaaaacctgggaagagatcccggcgctggataaagaactgaaagcgaaaggtaagagcgcgctgatgttcaacctgcaagaaccgtacttcacctggccgctgattgctgctgacgggggttatgcgttcaagtatgaaaacggcaagtacgacattaaagacgtgggcgtggataacgctggcgcgaaagcgggtctgaccttcctggttgacctgattaaaaacaaacacatgaatgcagacaccgattactccatcgcagaagctgcctttaataaaggcgaaacagcgatgaccatcaacggcccgtgggcatggtccaacatcgacaccagcaaagtgaattatggtgtaacggtactgccgaccttcaagggtcaaccatccaaaccgttcgttggcgtgctgagcgcaggtattaacgccgccagtccgaacaaagagctggcgaaagagttcctcgaaaactatctgctgactgatgaaggtctggaagcggttaataaagacaaaccgctgggtgccgtagcgctgaagtcttacgaggaagagttggcgaaagatccacgtattgccgccaccatggaaaacgcccagaaaggtgaaatcatgccgaacatcccgcagatgtccgctttctggtatgccgtgcgtactgcggtgatcaacgccgccagcggtcgtcagactgtcgatgaagccctgaaagacgcgcagactggtggttctggtgagaacctgtactttcaaagctcagataatgggcctcaaaaccagcgcaacgctccacgtataaccttcggtggcccgtctgactccacaggcagcaaccagaatggtgagcgtagtggagccaggtctaagcagcgccgtccccagggtctgccgaacaacacggcgagctggtttactgcgcttacccaacacggtaaagaagacttaaaattcccgcgtggccagggcgtcccgatcaacactaactcttccccggatgatcagattggttattaccgcagagcaactcgtcggattcgcggcggcgacggtaaaatgaaagatttgtctccgcgttggtacttttactatctcggcaccggtccggaagctggactgccctacggggcaaacaaggacgggatcatttgggtggctaccgaaggtgccctgaatactccaaaagatcatatcggcacccgtaaccctgctaataacgctgcgatcgttctgcaactgcctcagggtacaactctgccaaaaggcttctatgcagaagggtcgcgtggtggcagccaggcgagtagccgtagcagctcccgctctcgcaactcgtcccgtaactccactccgggctcttctcgcggcacgtccccggctcgtatggcaggtaacggtggtgacgctgctctggcgctgctactgctggacaggctgaaccagctggagtcgaagatgagtggtaaaggccaacagcagcagggccagaccgttaccaaaaagagcgcagctgaagcatctaaaaaaccgcgacagaaacgtaccgcgactaaagcgtacaatgtaacacaggccttcggtcgtcgaggtccggagcaaactcaaggaaactttggcgatcaggaattaatcgagcaggggaccgactacaaacactggccgcaaattgcccagttcgccccatccgctagtgcattcttcggtatgagccgcatcggcatggaagtaacgccaagtggtacgtggctgacctacaccggtgctatcaagcttgatgacaaggacccgaactttaaagaccaggttattctgcttaacaaacatattgatgcctataaaactttcccgccgaccgaacccaaaaaggacaaaaagaaaaaagctgatgaaacccaggctctaccgcagcgtcagaaaaaacagcaaactgtgactctgctgccagctgcggacctggatgatttttccaagcagctgcaacagtctatgagctctgcggactctacgcaggctggtggttctggtcaccatcatcaccatcattaa

SEQ ID NO: 2928 - DNA, 2421 bp, Artificial Sequence
  Description of Artificial Sequence: Synthetic polynucleotide
atgaaaatcgaagaaggtaaactggtaatctggattaacggcgataaaggctataacggtctcgctgaagtcggtaagaaattcgagaaagataccggaattaaagtcaccgttgagcatccggataaactggaagagaaattcccacaggttgcggcaactggcgatggccctgacattatcttctgggcacacgaccgctttggtggctacgctcaatctggcctgttggctgaaatcaccccggacaaagcgttccaggacaagctgtatccgtttacctgggatgccgtacgttacaacggcaagctgattgcttacccgatcgctgttgaagcgttatcgctgatttataacaaagatctgctgccgaacccgccaaaaacctgggaagagatcccggcgctggataaagaactgaaagcgaaaggtaagagcgcgctgatgttcaacctgcaagaaccgtacttcacctggccgctgattgctgctgacgggggttatgcgttcaagtatgaaaacggcaagtacgacattaaagacgtgggcgtggataacgctggcgcgaaagcgggtctgaccttcctggttgacctgattaaaaacaaacacatgaatgcagacaccgattactccatcgcagaagctgcctttaataaaggcgaaacagcgatgaccatcaacggcccgtgggcatggtccaacatcgacaccagcaaagtgaattatggtgtaacggtactgccgaccttcaagggtcaaccatccaaaccgttcgttggcgtgctgagcgcaggtattaacgccgccagtccgaacaaagagctggcgaaagagttcctcgaaaactatctgctgactgatgaaggtctggaagcggttaataaagacaaaccgctgggtgccgtagcgctgaagtcttacgaggaagagttggcgaaagatccacgtattgccgccaccatggaaaacgcccagaaaggtgaaatcatgccgaacatcccgcagatgtccgctttctggtatgccgtgcgtactgcggtgatcaacgccgccagcggtcgtcagactgtcgatgaagccctgaaagacgcgcagactggtggttctggtgagaacctgtactttcaaagctcagataatgggcctcaaaaccagcgcaacgctccacgtataaccttcggtggcccgtctgactccacaggcagcaaccagaatggtgagcgtagtggagccaggtctaagcagcgccgtccccagggtctgccgaacaacacggcgagctggtttactgcgcttacccaacacggtaaagaagacttaaaattcccgcgtggccagggcgtcccgatcaacactaactcttccccggatgatcagattggttattaccgcagagcaactcgtcggattcgcggcggcgacggtaaaatgaaagatttgtctccgcgttggtacttttactatctcggcaccggtccggaagctggactgccctacggggcaaacaaggacgggatcatttgggtggctaccgaaggtgccctgaatactccaaaagatcatatcggcacccgtaaccctgctaataacgctgcgatcgttctgcaactgcctcagggtacaactctgccaaaaggcttctatgcagaagggtcgcgtggtggcagccaggcgagtagccgtagcagctcccgctctcgcaactcgtcccgtaactccactccgggctcttctcgcggcacgtccccggctcgtatggcaggtaacggtggtgacgctgctctggcgctgctactgctggacaggctgaaccagctggagtcgaagatgagtggtaaaggccaacagcagcagggccagaccgttaccaaaaagagcgcagctgaagcatctaaaaaaccgcgacagaaacgtaccgcgactaaatcatacaatgtaacacaggccttcggtcgtcgaggtccggagcaaactcaaggaaactttggcgatcaggaattaatccgccaggggaccgactacaaacactggccgcaaattgcccagttcgccccatccgctagtgcattcttcggtatgagccgcatcggcatggaagtaacgccaagtggtacgtggctgacctacaccggtgctatcaagcttgatgacaaggacccgaactttaaagaccaggttattctgcttaacaaacatattgatgcctataaaactttcccgccgaccgaacccaaaaaggacaaaaagaaaaaagctgatgaaacccaggctctaccgcagcgtcagaaaaaacagcaaactgtgactctgctgccagctgcggacctggatgatttttccaagcagctgcaacagtctatgagctctgcggactctacgcaggctggtggttctggtcaccatcatcaccatcattaa

SEQ ID NO: 2929 - DNA, 2421 bp, Artificial Sequence
  Description of Artificial Sequence: Synthetic polynucleotide
atgaaaatcgaagaaggtaaactggtaatctggattaacggcgataaaggctataacggtctcgctgaagtcggtaagaaattcgagaaagataccggaattaaagtcaccgttgagcatccggataaactggaagagaaattcccacaggttgcggcaactggcgatggccctgacattatcttctgggcacacgaccgctttggtggctacgctcaatctggcctgttggctgaaatcaccccggacaaagcgttccaggacaagctgtatccgtttacctgggatgccgtacgttacaacggcaagctgattgcttacccgatcgctgttgaagcgttatcgctgatttataacaaagatctgctgccgaacccgccaaaaacctgggaagagatcccggcgctggataaagaactgaaagcgaaaggtaagagcgcgctgatgttcaacctgcaagaaccgtacttcacctggccgctgattgctgctgacgggggttatgcgttcaagtatgaaaacggcaagtacgacattaaagacgtgggcgtggataacgctggcgcgaaagcgggtctgaccttcctggttgacctgattaaaaacaaacacatgaatgcagacaccgattactccatcgcagaagctgcctttaataaaggcgaaacagcgatgaccatcaacggcccgtgggcatggtccaacatcgacaccagcaaagtgaattatggtgtaacggtactgccgaccttcaagggtcaaccatccaaaccgttcgttggcgtgctgagcgcaggtattaacgccgccagtccgaacaaagagctggcgaaagagttcctcgaaaactatctgctgactgatgaaggtctggaagcggttaataaagacaaaccgctgggtgccgtagcgctgaagtcttacgaggaagagttggcgaaagatccacgtattgccgccaccatggaaaacgcccagaaaggtgaaatcatgccgaacatcccgcagatgtccgctttctggtatgccgtgcgtactgcggtgatcaacgccgccagcggtcgtcagactgtcgatgaagccctgaaagacgcgcagactggtggttctggtgagaacctgtactttcaaagctcagataatgggcctcaaaaccagcgcaacgctccacgtataaccttcggtggcccgtctgactccacaggcagcaaccagaatggtgagcgtagtggagccaggtctaagcagcgccgtccccagggtctgccgaacaacacggcgagctggtttactgcgcttacccaacacggtaaagaagacttaaaattcccgcgtggccagggcgtcccgatcaacactaactcttccccggatgatcagattggttattaccgcagagcaactcgtcggattcgcggcggcgacggtaaaatgaaagatttgtctccgcgttggtacttttactatctcggcaccggtccggaagctggactgccctacggggcaaacaaggacgggatcatttgggtggctaccgaaggtgccctgaatactccaaaagatcatatcggcacccgtaaccctgctaataacgctgcgatcgttctgcaactgcctcagggtacaactctgccaaaaggcttctatgcagaagggtcgcgtggtggcagccaggcgagtagccgtagcagctcccgctctcgcaactcgtcccgtaactccactccgggctcttctcgcggcacgtccccggctcgtatggcaggtaacggtggtgacgctgctctggcgctgctactgctggacaggctgaaccagctggagtcgaagatgagtggtaaaggccaacagcagcagggccagaccgttaccaaaaagagcgcagctgaagcatctaaaaaaccgcgacagaaacgtaccgcgactaaattttacaatgtaacacaggccttcggtcgtcgaggtccggagcaaactcaaggaaactttggcgatcaggaattaatccgccaggggaccgactacaaacactggccgcaaattgcccagttcgccccatccgctagtgcattcttcggtatgagccgcatcggcatggaagtaacgccaagtggtacgtggctgacctacaccggtgctatcaagcttgatgacaaggacccgaactttaaagaccaggttattctgcttaacaaacatattgatgcctataaaactttcccgccgaccgaacccaaaaaggacaaaaagaaaaaagctgatgaaacccaggctctaccgcagcgtcagaaaaaacagcaaactgtgactctgctgccagctgcggacctggatgatttttccaagcagctgcaacagtctatgagctctgcggactctacgcaggctggtggttctggtcaccatcatcaccatcattaa

SEQ ID NO: 2930 - DNA, 2421 bp, Artificial Sequence
  Description of Artificial Sequence: Synthetic polynucleotide
atgaaaatcgaagaaggtaaactggtaatctggattaacggcgataaaggctataacggtctcgctgaagtcggtaagaaattcgagaaagataccggaattaaagtcaccgttgagcatccggataaactggaagagaaattcccacaggttgcggcaactggcgatggccctgacattatcttctgggcacacgaccgctttggtggctacgctcaatctggcctgttggctgaaatcaccccggacaaagcgttccaggacaagctgtatccgtttacctgggatgccgtacgttacaacggcaagctgattgcttacccgatcgctgttgaagcgttatcgctgatttataacaaagatctgctgccgaacccgccaaaaacctgggaagagatcccggcgctggataaagaactgaaagcgaaaggtaagagcgcgctgatgttcaacctgcaagaaccgtacttcacctggccgctgattgctgctgacgggggttatgcgttcaagtatgaaaacggcaagtacgacattaaagacgtgggcgtggataacgctggcgcgaaagcgggtctgaccttcctggttgacctgattaaaaacaaacacatgaatgcagacaccgattactccatcgcagaagctgcctttaataaaggcgaaacagcgatgaccatcaacggcccgtgggcatggtccaacatcgacaccagcaaagtgaattatggtgtaacggtactgccgaccttcaagggtcaaccatccaaaccgttcgttggcgtgctgagcgcaggtattaacgccgccagtccgaacaaagagctggcgaaagagttcctcgaaaactatctgctgactgatgaaggtctggaagcggttaataaagacaaaccgctgggtgccgtagcgctgaagtcttacgaggaagagttggcgaaagatccacgtattgccgccaccatggaaaacgcccagaaaggtgaaatcatgccgaacatcccgcagatgtccgctttctggtatgccgtgcgtactgcggtgatcaacgccgccagcggtcgtcagactgtcgatgaagccctgaaagacgcgcagactggtggttctggtgagaacctgtactttcaaagctcagataatgggcctcaaaaccagcgcaacgctccacgtataaccttcggtggcccgtctgactccacaggcagcaaccagaatggtgagcgtagtggagccaggtctaagcagcgccgtccccagggtctgccgaacaacacggcgagctggtttactccacttgtccaatttggtaaagaagacttaaaattcccgccgggccagggcgtcccgatcaacactaactcttccccggatgatcagattggttattaccgcagagcaactcgtcggattcgcggcggcgacggtaaaatgaaagatttgcctccgaagtggtacttttactatctcggcaccggtccgcatgctgatctgccctacgggcaaaagaaggacggggttttttgggtggctcggcccggtgccctgaatactccaaaagatcatatcggcacccgtaaccctgctaataacgctgcgatcccgctgcaactgcctccgggtacaaaactgccaaaaggcttctatgcagaagggtcgcgtggtggcagccaggcgagtagccgtagcagctcccgctctcgcaactcgtcccgtaactccactccgggctcttctcgcggcacgtccccggctcgtatggcaggtaacggtggtgacgctgctctggcgctgctactgctggacaggctgaaccagctggagtcgaagatgagtggtaaaggccaacagcagcagggccagaccgttaccaaaaagagcgcagctgaagcatctaaaaaaccgcgacagaaacgtaccgcgactaaagcgtacaatgtaacacaggccttcggtcgtcgaggtccggagcaaactcaaggaaactttggcgatcaggaattaatccgccaggggaccgactacaaacactggccgcaaattgcccagttcgccccatccgctagtgcattcttcggtatgagccgcatcggcatggaagtaacgccaagtggtacgtggctgacctacaccggtgctatcaagcttgatgacaaggacccgaactttaaagaccaggttattctgcttaacaaacatattgatgcctataaaactttcccgccgaccgaacccaaaaaggacaaaaagaaaaaagctgatgaaacccaggctctaccgcagcgtcagaaaaaacagcaaactgtgactctgctgccagctgcggacctggatgatttttccaagcagctgcaacagtctatgagctctgcggactctacgcaggctggtggttctggtcaccatcatcaccatcattaa

SEQ ID NO: 2931 - DNA, 2421 bp, Artificial Sequence
  Description of Artificial Sequence: Synthetic polynucleotide
atgaaaatcgaagaaggtaaactggtaatctggattaacggcgataaaggctataacggtctcgctgaagtcggtaagaaattcgagaaagataccggaattaaagtcaccgttgagcatccggataaactggaagagaaattcccacaggttgcggcaactggcgatggccctgacattatcttctgggcacacgaccgctttggtggctacgctcaatctggcctgttggctgaaatcaccccggacaaagcgttccaggacaagctgtatccgtttacctgggatgccgtacgttacaacggcaagctgattgcttacccgatcgctgttgaagcgttatcgctgatttataacaaagatctgctgccgaacccgccaaaaacctgggaagagatcccggcgctggataaagaactgaaagcgaaaggtaagagcgcgctgatgttcaacctgcaagaaccgtacttcacctggccgctgattgctgctgacgggggttatgcgttcaagtatgaaaacggcaagtacgacattaaagacgtgggcgtggataacgctggcgcgaaagcgggtctgaccttcctggttgacctgattaaaaacaaacacatgaatgcagacaccgattactccatcgcagaagctgcctttaataaaggcgaaacagcgatgaccatcaacggcccgtgggcatggtccaacatcgacaccagcaaagtgaattatggtgtaacggtactgccgaccttcaagggtcaaccatccaaaccgttcgttggcgtgctgagcgcaggtattaacgccgccagtccgaacaaagagctggcgaaagagttcctcgaaaactatctgctgactgatgaaggtctggaagcggttaataaagacaaaccgctgggtgccgtagcgctgaagtcttacgaggaagagttggcgaaagatccacgtattgccgccaccatggaaaacgcccagaaaggtgaaatcatgccgaacatcccgcagatgtccgctttctggtatgccgtgcgtactgcggtgatcaacgccgccagcggtcgtcagactgtcgatgaagccctgaaagacgcgcagactggtggttctggtgagaacctgtactttcaaagctcagataatgggcctcaaaaccagcgcaacgctccacgtataaccttcggtggcccgtctgactccacaggcagcaaccagaatggtgagcgtagtggagccaggtctaagcagcgccgtccccagggtctgccgaacaacacggcgagctggtttactgcgcttacccaacacggtaaagaagacttaaaattcccgcgtggccagggcgtcccgatcaacactaactcttccccggatgatcagattggttattaccgcagacatactcgtcggattcgcggcggcgacggtaaaatgaaagatttgtctccgcgttggtacttttactatctcggcaccggtccggaagctggactgccctacggggcaaacaaggacgggatcatttgggtggctaccgaaggtgccctgaatactccaaaagatcatatcggcacccgtaaccctgctaataacgctgcgatcgttctgcaactgcctcagggtacaactctgccaaaaggcttctatgcagaagggtcgcgtggtggcagccaggcgagtagccgtagcagctcccgctctcgcaactcgtcccgtaactccactccgggctcttctcgcggcacgtccccggctcgtatggcaggtaacggtggtgacgctgctctggcgctgctactgctggacaggctgaaccagctggagtcgaagatgagtggtaaaggccaacagcagcagggccagaccgttaccaaaaagagcgcagctgaagcatctaaaaaaccgcgacagaaacgtaccgcgactaaagcgtacaatgtaacacaggccttcggtcgtcgaggtccggagcaaactcaaggaaactttggcgatcaggaattaatccgccaggggaccgactacaaacactggccgcaaattgcccagttcgccccatccgctagtgcattcttcggtatgagccgcatcggcatggaagtaacgccaagtggtacgtggctgacctacaccggtgctatcaagcttgatgacaaggacccgaactttaaagaccaggttattctgcttaacaaacatattgatgcctataaaactttcccgccgaccgaacccaaaaaggacaaaaagaaaaaagctgatgaaacccaggctctaccgcagcgtcagaaaaaacagcaaactgtgactctgctgccagctgcggacctggatgatttttccaagcagctgcaacagtctatgagctctgcggactctacgcaggctggtggttctggtcaccatcatcaccatcattaa

SEQ ID NO: 2932 - DNA, 2421 bp, Artificial Sequence
  Description of Artificial Sequence: Synthetic polynucleotide
atgaaaatcgaagaaggtaaactggtaatctggattaacggcgataaaggctataacggtctcgctgaagtcggtaagaaattcgagaaagataccggaattaaagtcaccgttgagcatccggataaactggaagagaaattcccacaggttgcggcaactggcgatggccctgacattatcttctgggcacacgaccgctttggtggctacgctcaatctggcctgttggctgaaatcaccccggacaaagcgttccaggacaagctgtatccgtttacctgggatgccgtacgttacaacggcaagctgattgcttacccgatcgctgttgaagcgttatcgctgatttataacaaagatctgctgccgaacccgccaaaaacctgggaagagatcccggcgctggataaagaactgaaagcgaaaggtaagagcgcgctgatgttcaacctgcaagaaccgtacttcacctggccgctgattgctgctgacgggggttatgcgttcaagtatgaaaacggcaagtacgacattaaagacgtgggcgtggataacgctggcgcgaaagcgggtctgaccttcctggttgacctgattaaaaacaaacacatgaatgcagacaccgattactccatcgcagaagctgcctttaataaaggcgaaacagcgatgaccatcaacggcccgtgggcatggtccaacatcgacaccagcaaagtgaattatggtgtaacggtactgccgaccttcaagggtcaaccatccaaaccgttcgttggcgtgctgagcgcaggtattaacgccgccagtccgaacaaagagctggcgaaagagttcctcgaaaactatctgctgactgatgaaggtctggaagcggttaataaagacaaaccgctgggtgccgtagcgctgaagtcttacgaggaagagttggcgaaagatccacgtattgccgccaccatggaaaacgcccagaaaggtgaaatcatgccgaacatcccgcagatgtccgctttctggtatgccgtgcgtactgcggtgatcaacgccgccagcggtcgtcagactgtcgatgaagccctgaaagacgcgcagactggtggttctggtgagaacctgtactttcaaagctcagataatgggcctcaaaaccagcgcaacgctccacgtataaccttcggtggcccgtctgactccacaggcagcaaccagaatggtgagcgtagtggagccaggtctaagcagcgccgtccccagggtctgccgaacaacacggcgagctggtttactgcgcttacccaacacggtaaagaagacttaaaattcccgcgtggccagggcgtcccgatcaacactaactcttccccggatgatcagattggttattaccgcagagcaactcgtcggattcgcggcggcgacggtaaaaagaaagatttgtctccgcgttggtacttttactatctcggcaccggtccggaagctggactgccctacggggcaaacaaggacgggatcatttgggtggctaccgaaggtgccctgaatactccaaaagatcatatcggcacccgtaaccctgctaataacgctgcgatcgttctgcaactgcctcagggtacaactctgccaaaaggcttctatgcagaagggtcgcgtggtggcagccaggcgagtagccgtagcagctcccgctctcgcaactcgtcccgtaactccactccgggctcttctcgcggcacgtccccggctcgtatggcaggtaacggtggtgacgctgctctggcgctgctactgctggacaggctgaaccagctggagtcgaagatgagtggtaaaggccaacagcagcagggccagaccgttaccaaaaagagcgcagctgaagcatctaaaaaaccgcgacagaaacgtaccgcgactaaagcgtacaatgtaacacaggccttcggtcgtcgaggtccggagcaaactcaaggaaactttggcgatcaggaattaatccgccaggggaccgactacaaacactggccgcaaattgcccagttcgccccatccgctagtgcattcttcggtatgagccgcatcggcatggaagtaacgccaagtggtacgtggctgacctacaccggtgctatcaagcttgatgacaaggacccgaactttaaagaccaggttattctgcttaacaaacatattgatgcctataaaactttcccgccgaccgaacccaaaaaggacaaaaagaaaaaagctgatgaaacccaggctctaccgcagcgtcagaaaaaacagcaaactgtgactctgctgccagctgcggacctggatgatttttccaagcagctgcaacagtctatgagctctgcggactctacgcaggctggtggttctggtcaccatcatcaccatcattaa

SEQ ID NO: 2933 - DNA, 2421 bp, Artificial Sequence
  Description of Artificial Sequence: Synthetic polynucleotide
atgaaaatcgaagaaggtaaactggtaatctggattaacggcgataaaggctataacggtctcgctgaagtcggtaagaaattcgagaaagataccggaattaaagtcaccgttgagcatccggataaactggaagagaaattcccacaggttgcggcaactggcgatggccctgacattatcttctgggcacacgaccgctttggtggctacgctcaatctggcctgttggctgaaatcaccccggacaaagcgttccaggacaagctgtatccgtttacctgggatgccgtacgttacaacggcaagctgattgcttacccgatcgctgttgaagcgttatcgctgatttataacaaagatctgctgccgaacccgccaaaaacctgggaagagatcccggcgctggataaagaactgaaagcgaaaggtaagagcgcgctgatgttcaacctgcaagaaccgtacttcacctggccgctgattgctgctgacgggggttatgcgttcaagtatgaaaacggcaagtacgacattaaagacgtgggcgtggataacgctggcgcgaaagcgggtctgaccttcctggttgacctgattaaaaacaaacacatgaatgcagacaccgattactccatcgcagaagctgcctttaataaaggcgaaacagcgatgaccatcaacggcccgtgggcatggtccaacatcgacaccagcaaagtgaattatggtgtaacggtactgccgaccttcaagggtcaaccatccaaaccgttcgttggcgtgctgagcgcaggtattaacgccgccagtccgaacaaagagctggcgaaagagttcctcgaaaactatctgctgactgatgaaggtctggaagcggttaataaagacaaaccgctgggtgccgtagcgctgaagtcttacgaggaagagttggcgaaagatccacgtattgccgccaccatggaaaacgcccagaaaggtgaaatcatgccgaacatcccgcagatgtccgctttctggtatgccgtgcgtactgcggtgatcaacgccgccagcggtcgtcagactgtcgatgaagccctgaaagacgcgcagactggtggttctggtgagaacctgtactttcaaagctcagataatgggcctcaaaaccagcgcaacgctccacgtataaccttcggtggcccgtctgactccacaggcagcaaccagaatggtgagcgtagtggagccaggtctaagcagcgccgtccccagggtctgccgaacaacacggcgagctggtttactgcgcttacccaacacggtaaagaagacttaaaattcccgaaaggccagggcgtcccgatcaacactaactcttccccggatgatcagattggttattaccgcagagcaactcgtcggattcgcggcggcgacggtaaaatgaaagatttgtctccgcgttggtacttttactatctcggcaccggtccggaagctggactgccctacggggcaaacaaggacgggatcatttgggtggctaccgaaggtgccctgaatactccaaaagatcatatcggcacccgtaaccctgctaataacgctgcgatcgttctgcaactgcctcagggtacaactctgccaaaaggcttctatgcagaagggtcgcgtggtggcagccaggcgagtagccgtagcagctcccgctctcgcaactcgtcccgtaactccactccgggctcttctcgcggcacgtccccggctcgtatggcaggtaacggtggtgacgctgctctggcgctgctactgctggacaggctgaaccagctggagtcgaagatgagtggtaaaggccaacagcagcagggccagaccgttaccaaaaagagcgcagctgaagcatctaaaaaaccgcgacagaaacgtaccgcgactaaagcgtacaatgtaacacaggccttcggtcgtcgaggtccggagcaaactcaaggaaactttggcgatcaggaattaatccgccaggggaccgactacaaacactggccgcaaattgcccagttcgccccatccgctagtgcattcttcggtatgagccgcatcggcatggaagtaacgccaagtggtacgtggctgacctacaccggtgctatcaagcttgatgacaaggacccgaactttaaagaccaggttattctgcttaacaaacatattgatgcctataaaactttcccgccgaccgaacccaaaaaggacaaaaagaaaaaagctgatgaaacccaggctctaccgcagcgtcagaaaaaacagcaaactgtgactctgctgccagctgcggacctggatgatttttccaagcagctgcaacagtctatgagctctgcggactctacgcaggctggtggttctggtcaccatcatcaccatcattaa

SEQ ID NO: 2934 - DNA, 2421 bp, Artificial Sequence
  Description of Artificial Sequence: Synthetic polynucleotide
atgaaaatcgaagaaggtaaactggtaatctggattaacggcgataaaggctataacggtctcgctgaagtcggtaagaaattcgagaaagataccggaattaaagtcaccgttgagcatccggataaactggaagagaaattcccacaggttgcggcaactggcgatggccctgacattatcttctgggcacacgaccgctttggtggctacgctcaatctggcctgttggctgaaatcaccccggacaaagcgttccaggacaagctgtatccgtttacctgggatgccgtacgttacaacggcaagctgattgcttacccgatcgctgttgaagcgttatcgctgatttataacaaagatctgctgccgaacccgccaaaaacctgggaagagatcccggcgctggataaagaactgaaagcgaaaggtaagagcgcgctgatgttcaacctgcaagaaccgtacttcacctggccgctgattgctgctgacgggggttatgcgttcaagtatgaaaacggcaagtacgacattaaagacgtgggcgtggataacgctggcgcgaaagcgggtctgaccttcctggttgacctgattaaaaacaaacacatgaatgcagacaccgattactccatcgcagaagctgcctttaataaaggcgaaacagcgatgaccatcaacggcccgtgggcatggtccaacatcgacaccagcaaagtgaattatggtgtaacggtactgccgaccttcaagggtcaaccatccaaaccgttcgttggcgtgctgagcgcaggtattaacgccgccagtccgaacaaagagctggcgaaagagttcctcgaaaactatctgctgactgatgaaggtctggaagcggttaataaagacaaaccgctgggtgccgtagcgctgaagtcttacgaggaagagttggcgaaagatccacgtattgccgccaccatggaaaacgcccagaaaggtgaaatcatgccgaacatcccgcagatgtccgctttctggtatgccgtgcgtactgcggtgatcaacgccgccagcggtcgtcagactgtcgatgaagccctgaaagacgcgcagactggtggttctggtgagaacctgtactttcaaagctcagataatgggcctcaaaaccagcgcaacgctccacgtataaccttcggtggcccgtctgactccacaggcagcaaccagaatggtgagcgtagtggagccaggtctaagcagcgccgtccccagggtctgccgaacaacacggcgagctggtttactgcgcttacccaacacggtaaagaagacttaaaattcccgcgtggccagggcgtcccgatcaacactaactcttccccggatgatcagattggttattaccgcagagcaactcgtcggattcgcggcggcgacggtaaaatgaaagatttgtctccgcgttggtacttttactatctcggcaccggtccggaagctggactgccctacggggcaaacaaggacgggatcatttgggtggctaccgaaggtgccctgaatactccaaaagatcatatcggcacccgtaaccctgctaataacgctgcgatcgttctgcaactgcctcagggtacaactctgccaaaaggcttctatgcagaagggtcgcgtggtggcagccaggcgagtagccgtagcagcgagcgctctcgcaactcgtcccgtaactccactccgggcgaatctcgcggcacggagccggctcgtatggcaggtaacggtggtgacgctgctctggcgctgctactgctggacaggctgaaccagctggagtcgaagatgagtggtaaaggccaacagcagcagggccagaccgttaccaaaaagagcgcagctgaagcatctaaaaaaccgcgacagaaacgtaccgcgactaaagcgtacaatgtaacacaggccttcggtcgtcgaggtccggagcaaactcaaggaaactttggcgatcaggaattaatccgccaggggaccgactacaaacactggccgcaaattgcccagttcgccccatccgctagtgcattcttcggtatgagccgcatcggcatggaagtaacgccaagtggtacgtggctgacctacaccggtgctatcaagcttgatgacaaggacccgaactttaaagaccaggttattctgcttaacaaacatattgatgcctataaaactttcccgccgaccgaacccaaaaaggacaaaaagaaaaaagctgatgaaacccaggctctaccgcagcgtcagaaaaaacagcaaactgtgactctgctgccagctgcggacctggatgatttttccaagcagctgcaacagtctatgagctctgcggactctacgcaggctggtggttctggtcaccatcatcaccatcattaa

SEQ ID NO: 2935 - DNA, 2421 bp, Artificial Sequence
  Description of Artificial Sequence: Synthetic polynucleotide
atgaaaatcgaagaaggtaaactggtaatctggattaacggcgataaaggctataacggtctcgctgaagtcggtaagaaattcgagaaagataccggaattaaagtcaccgttgagcatccggataaactggaagagaaattcccacaggttgcggcaactggcgatggccctgacattatcttctgggcacacgaccgctttggtggctacgctcaatctggcctgttggctgaaatcaccccggacaaagcgttccaggacaagctgtatccgtttacctgggatgccgtacgttacaacggcaagctgattgcttacccgatcgctgttgaagcgttatcgctgatttataacaaagatctgctgccgaacccgccaaaaacctgggaagagatcccggcgctggataaagaactgaaagcgaaaggtaagagcgcgctgatgttcaacctgcaagaaccgtacttcacctggccgctgattgctgctgacgggggttatgcgttcaagtatgaaaacggcaagtacgacattaaagacgtgggcgtggataacgctggcgcgaaagcgggtctgaccttcctggttgacctgattaaaaacaaacacatgaatgcagacaccgattactccatcgcagaagctgcctttaataaaggcgaaacagcgatgaccatcaacggcccgtgggcatggtccaacatcgacaccagcaaagtgaattatggtgtaacggtactgccgaccttcaagggtcaaccatccaaaccgttcgttggcgtgctgagcgcaggtattaacgccgccagtccgaacaaagagctggcgaaagagttcctcgaaaactatctgctgactgatgaaggtctggaagcggttaataaagacaaaccgctgggtgccgtagcgctgaagtcttacgaggaagagttggcgaaagatccacgtattgccgccaccatggaaaacgcccagaaaggtgaaatcatgccgaacatcccgcagatgtccgctttctggtatgccgtgcgtactgcggtgatcaacgccgccagcggtcgtcagactgtcgatgaagccctgaaagacgcgcagactggtggttctggtgagaacctgtactttcaaagctcagataatgggcctcaaaaccagcgcaacgctccacgtataaccttcggtggcccgtctgactccacaggcagcaaccagaatggtgagcgtagtggagccaggtctaagcagcgccgtccccagggtctgccgaacaacacggcgagctggtttactgcgcttacccaacacggtaaagaagacttaaaattcccgcgtggccagggcgtcccgatcaacactaactcttccccggatgatcagattggttattaccgcagagcaactcgtcggattcgcggcggcgacggtaaaatgaaagatttgtctccgcgttggtacttttactatctcggcaccggtccggaagctggactgccctacggggcaaacaaggacgggatcatttgggtggctaccgaaggtgccctgaatactccaaaagatcatatcggcacccgtaaccctgataataacgctgcgatcgttctgcaactgcctcagggtacaactctgccaaaaggcttctatgcagaagggtcgcgtggtggcagccaggcgagtagccgtagcagctcccgctctcgcaactcgtcccgtaactccactccgggctcttctcgcggcacgtccccggctcgtatggcaggtaacggtggtgacgctgctctggcgctgctactgctggacaggctgaaccagctggagtcgaagatgagtggtaaaggccaacagcagcagggccagaccgttaccaaaaagagcgcagctgaagcatctaaaaaaccgcgacagaaacgtaccgcgactaaagcgtacaatgtaacacaggccttcggtcgtcgaggtccggagcaaactcaaggaaactttggcgatcaggaattaatccgccaggggaccgactacaaacactggccgcaaattgcccagttcgccccatccgctagtgcattcttcggtatgagccgcatcggcatggaagtaacgccaagtggtacgtggctgacctacaccggtgctatcaagcttgatgacaaggacccgaactttaaagaccaggttattctgcttaacaaacatattgatgcctataaaactttcccgccgaccgaacccaaaaaggacaaaaagaaaaaagctgatgaaacccaggctctaccgcagcgtcagaaaaaacagcaaactgtgactctgctgccagctgcggacctggatgatttttccaagcagctgcaacagtctatgagctctgcggactctacgcaggctggtggttctggtcaccatcatcaccatcattaa

SEQ ID NO: 2936 - DNA, 2421 bp, Artificial Sequence
  Description of Artificial Sequence: Synthetic polynucleotide
atgaaaatcgaagaaggtaaactggtaatctggattaacggcgataaaggctataacggtctcgctgaagtcggtaagaaattcgagaaagataccggaattaaagtcaccgttgagcatccggataaactggaagagaaattcccacaggttgcggcaactggcgatggccctgacattatcttctgggcacacgaccgctttggtggctacgctcaatctggcctgttggctgaaatcaccccggacaaagcgttccaggacaagctgtatccgtttacctgggatgccgtacgttacaacggcaagctgattgcttacccgatcgctgttgaagcgttatcgctgatttataacaaagatctgctgccgaacccgccaaaaacctgggaagagatcccggcgctggataaagaactgaaagcgaaaggtaagagcgcgctgatgttcaacctgcaagaaccgtacttcacctggccgctgattgctgctgacgggggttatgcgttcaagtatgaaaacggcaagtacgacattaaagacgtgggcgtggataacgctggcgcgaaagcgggtctgaccttcctggttgacctgattaaaaacaaacacatgaatgcagacaccgattactccatcgcagaagctgcctttaataaaggcgaaacagcgatgaccatcaacggcccgtgggcatggtccaacatcgacaccagcaaagtgaattatggtgtaacggtactgccgaccttcaagggtcaaccatccaaaccgttcgttggcgtgctgagcgcaggtattaacgccgccagtccgaacaaagagctggcgaaagagttcctcgaaaactatctgctgactgatgaaggtctggaagcggttaataaagacaaaccgctgggtgccgtagcgctgaagtcttacgaggaagagttggcgaaagatccacgtattgccgccaccatggaaaacgcccagaaaggtgaaatcatgccgaacatcccgcagatgtccgctttctggtatgccgtgcgtactgcggtgatcaacgccgccagcggtcgtcagactgtcgatgaagccctgaaagacgcgcagactggtggttctggtgagaacctgtactttcaaagctcagataatgggcctcaaaaccagcgcaacgctccacgtataaccttcggtggcccgtctgactccacaggcagcaaccagaatggtgagcgtagtggagccaggtctaagcagcgccgtccccagggtctgccgaacaacacggcgagctggtttactgcgcttacccaacacggtaaagaagacttaaaattcccgcgtggccagggcgtcccgatcaacactaactcttccccggatgatcagattggttattaccgcagagcaactcgtcggattcgcggcggcgacggtaaaatgaaagatttgtctccgcgttggtacttttactatctcggcaccggtccggaagctggactgccctacggggcaaacaaggacgggatcatttgggtggctaccgaaggtgccctgaatactccaaaagatcatatcggcacccgtaaccctgctaataacgctgcgatcgttctgcaactgcctcagggtacaactctgccaaaaggcttctatgcagaagggtcgcgtggtggcagccaggcgagtagccgtagcagctcccgctctcgcaactcgtcccgtaactccactccgggctcttctcgcggcacgtccccggctcgtatggcaggtaacggtggtgacgctgctctggcgctgctactgctggacaggctgaaccagctggagtcgaagatgagtggtaaaggccaacagcagcagggccagaccgttaccaaaaagagcgcagctgaagcagcgaaaaaaccgcgacagaaacgtaccgcgactaaagcgtacaatgtaacacaggccttcggtcgtcgaggtccggagcaaactcaaggaaactttggcgatcaggaattaatccgccaggggaccgactacaaacactggccgcaaattgcccagttcgccccatccgctagtgcattcttcggtatgagccgcatcggcatggaagtaacgccaagtggtacgtggctgacctacaccggtgctatcaagcttgatgacaaggacccgaactttaaagaccaggttattctgcttaacaaacatattgatgcctataaaactttcccgccgaccgaacccaaaaaggacaaaaagaaaaaagctgatgaaacccaggctctaccgcagcgtcagaaaaaacagcaaactgtgactctgctgccagctgcggacctggatgatttttccaagcagctgcaacagtctatgagctctgcggactctacgcaggctggtggttctggtcaccatcatcaccatcattaa

SEQ ID NO: 2937 - DNA, 2421 bp, Artificial Sequence
  Description of Artificial Sequence: Synthetic polynucleotide
atgaaaatcgaagaaggtaaactggtaatctggattaacggcgataaaggctataacggtctcgctgaagtcggtaagaaattcgagaaagataccggaattaaagtcaccgttgagcatccggataaactggaagagaaattcccacaggttgcggcaactggcgatggccctgacattatcttctgggcacacgaccgctttggtggctacgctcaatctggcctgttggctgaaatcaccccggacaaagcgttccaggacaagctgtatccgtttacctgggatgccgtacgttacaacggcaagctgattgcttacccgatcgctgttgaagcgttatcgctgatttataacaaagatctgctgccgaacccgccaaaaacctgggaagagatcccggcgctggataaagaactgaaagcgaaaggtaagagcgcgctgatgttcaacctgcaagaaccgtacttcacctggccgctgattgctgctgacgggggttatgcgttcaagtatgaaaacggcaagtacgacattaaagacgtgggcgtggataacgctggcgcgaaagcgggtctgaccttcctggttgacctgattaaaaacaaacacatgaatgcagacaccgattactccatcgcagaagctgcctttaataaaggcgaaacagcgatgaccatcaacggcccgtgggcatggtccaacatcgacaccagcaaagtgaattatggtgtaacggtactgccgaccttcaagggtcaaccatccaaaccgttcgttggcgtgctgagcgcaggtattaacgccgccagtccgaacaaagagctggcgaaagagttcctcgaaaactatctgctgactgatgaaggtctggaagcggttaataaagacaaaccgctgggtgccgtagcgctgaagtcttacgaggaagagttggcgaaagatccacgtattgccgccaccatggaaaacgcccagaaaggtgaaatcatgccgaacatcccgcagatgtccgctttctggtatgccgtgcgtactgcggtgatcaacgccgccagcggtcgtcagactgtcgatgaagccctgaaagacgcgcagactggtggttctggtgagaacctgtactttcaaagctcagataatgggcctcaaaaccagcgcaacgctccacgtataaccttcggtggcccgtctgactccacaggcagcaaccagaatggtgagcgtagtggagccaggtctaagcagcgccgtccccagggtctgccgaacaacacggcgagctggtttactgcgcttacccaacacggtaaagaagacttaaaattcccgcgtggccagggcgtcccgatcaacactaactcttccccggatgatcagattggttattaccgcagagcaactcgtcggattcgcggcggcgacggtaaaatgaaagatttgtctccgtcgtggtacttttactatctcggcaccggtccggaagctggactgccctacggggcaaacaaggacgggatcatttgggtggctaccgaaggtgccctgaatactccaaaagatcatatcggcacccgtaaccctgctaataacgctgcgatcgttctgcaactgcctcagggtacaactctgccaaaaggcttctatgcagaagggtcgcgtggtggcagccaggcgagtagccgtagcagctcccgctctcgcaactcgtcccgtaactccactccgggctcttctcgcggcacgtccccggctcgtatggcaggtaacggtggtgacgctgctctggcgctgctactgctggacaggctgaaccagctggagtcgaagatgagtggtaaaggccaacagcagcagggccagaccgttaccaaaaagagcgcagctgaagcatctaaaaaaccgcgacagaaacgtaccgcgactaaagcgtacaatgtaacacaggccttcggtcgtcgaggtccggagcaaactcaaggaaactttggcgatcaggaattaatccgccaggggaccgactacaaacactggccgcaaattgcccagttcgccccatccgctagtgcattcttcggtatgagccgcatcggcatggaagtaacgccaagtggtacgtggctgacctacaccggtgctatcaagcttgatgacaaggacccgaactttaaagaccaggttattctgcttaacaaacatattgatgcctataaaactttcccgccgaccgaacccaaaaaggacaaaaagaaaaaagctgatgaaacccaggctctaccgcagcgtcagaaaaaacagcaaactgtgactctgctgccagctgcggacctggatgatttttccaagcagctgcaacagtctatgagctctgcggactctacgcaggctggtggttctggtcaccatcatcaccatcattaa

SEQ ID NO: 2938 - DNA, 2421 bp, Artificial Sequence
  Description of Artificial Sequence: Synthetic polynucleotide
atgaaaatcgaagaaggtaaactggtaatctggattaacggcgataaaggctataacggtctcgctgaagtcggtaagaaattcgagaaagataccggaattaaagtcaccgttgagcatccggataaactggaagagaaattcccacaggttgcggcaactggcgatggccctgacattatcttctgggcacacgaccgctttggtggctacgctcaatctggcctgttggctgaaatcaccccggacaaagcgttccaggacaagctgtatccgtttacctgggatgccgtacgttacaacggcaagctgattgcttacccgatcgctgttgaagcgttatcgctgatttataacaaagatctgctgccgaacccgccaaaaacctgggaagagatcccggcgctggataaagaactgaaagcgaaaggtaagagcgcgctgatgttcaacctgcaagaaccgtacttcacctggccgctgattgctgctgacgggggttatgcgttcaagtatgaaaacggcaagtacgacattaaagacgtgggcgtggataacgctggcgcgaaagcgggtctgaccttcctggttgacctgattaaaaacaaacacatgaatgcagacaccgattactccatcgcagaagctgcctttaataaaggcgaaacagcgatgaccatcaacggcccgtgggcatggtccaacatcgacaccagcaaagtgaattatggtgtaacggtactgccgaccttcaagggtcaaccatccaaaccgttcgttggcgtgctgagcgcaggtattaacgccgccagtccgaacaaagagctggcgaaagagttcctcgaaaactatctgctgactgatgaaggtctggaagcggttaataaagacaaaccgctgggtgccgtagcgctgaagtcttacgaggaagagttggcgaaagatccacgtattgccgccaccatggaaaacgcccagaaaggtgaaatcatgccgaacatcccgcagatgtccgctttctggtatgccgtgcgtactgcggtgatcaacgccgccagcggtcgtcagactgtcgatgaagccctgaaagacgcgcagactggtggttctggtgagaacctgtactttcaaagctcagataatgggcctcaaaaccagcgcaacgctccacgtataaccttcggtggcccgtctgactccacaggcagcaaccagaatggtgagcgtagtggagccaggtctaagcagcgccgtccccagggtctgccgaacaacacggcgagctggtttactgcgcttacccaacacggtaaagaagacttaaaattcccgcgtggccagggcgtcccgatcaacactaactcttccccggatgatcagattggttattaccgcagagcaactcgtcggattcgcggcggcgacggtaaaatgaaagatttgtctccgcgttggtacttttactatctcggcaccggtccggaagctggactgccctacggggcaaacaaggacgggatcatttgggtggctaccgaaggtgccctgaatactccaaaagatcatatcggcacccgtaaccctgctaataacgctgcgatcgttctgcaactgcctcagggtacaactctgccacccggcttctatgcagaagggtcgcgtggtggcagccaggcgagtagccgtagcagctcccgctctcgcaactcgtcccgtaactccactccgggctcttctcgcggcacgtccccggctcgtatggcaggtaacggtggtgacgctgctctggcgctgctactgctggacaggctgaaccagctggagtcgaagatgagtggtaaaggccaacagcagcagggccagaccgttaccaaaaagagcgcagctgaagcatctaaaaaaccgcgacagaaacgtaccgcgactaaagcgtacaatgtaacacaggccttcggtcgtcgaggtccggagcaaactcaaggaaactttggcgatcaggaattaatccgccaggggaccgactacaaacactggccgcaaattgcccagttcgccccatccgctagtgcattcttcggtatgagccgcatcggcatggaagtaacgccaagtggtacgtggctgacctacaccggtgctatcaagcttgatgacaaggacccgaactttaaagaccaggttattctgcttaacaaacatattgatgcctataaaactttcccgccgaccgaacccaaaaaggacaaaaagaaaaaagctgatgaaacccaggctctaccgcagcgtcagaaaaaacagcaaactgtgactctgctgccagctgcggacctggatgatttttccaagcagctgcaacagtctatgagctctgcggactctacgcaggctggtggttctggtcaccatcatcaccatcattaa

SEQ ID NO: 2939 - DNA, 2421 bp, Artificial Sequence
  Description of Artificial Sequence: Synthetic polynucleotide
atgaaaatcgaagaaggtaaactggtaatctggattaacggcgataaaggctataacggtctcgctgaagtcggtaagaaattcgagaaagataccggaattaaagtcaccgttgagcatccggataaactggaagagaaattcccacaggttgcggcaactggcgatggccctgacattatcttctgggcacacgaccgctttggtggctacgctcaatctggcctgttggctgaaatcaccccggacaaagcgttccaggacaagctgtatccgtttacctgggatgccgtacgttacaacggcaagctgattgcttacccgatcgctgttgaagcgttatcgctgatttataacaaagatctgctgccgaacccgccaaaaacctgggaagagatcccggcgctggataaagaactgaaagcgaaaggtaagagcgcgctgatgttcaacctgcaagaaccgtacttcacctggccgctgattgctgctgacgggggttatgcgttcaagtatgaaaacggcaagtacgacattaaagacgtgggcgtggataacgctggcgcgaaagcgggtctgaccttcctggttgacctgattaaaaacaaacacatgaatgcagacaccgattactccatcgcagaagctgcctttaataaaggcgaaacagcgatgaccatcaacggcccgtgggcatggtccaacatcgacaccagcaaagtgaattatggtgtaacggtactgccgaccttcaagggtcaaccatccaaaccgttcgttggcgtgctgagcgcaggtattaacgccgccagtccgaacaaagagctggcgaaagagttcctcgaaaactatctgctgactgatgaaggtctggaagcggttaataaagacaaaccgctgggtgccgtagcgctgaagtcttacgaggaagagttggcgaaagatccacgtattgccgccaccatggaaaacgcccagaaaggtgaaatcatgccgaacatcccgcagatgtccgctttctggtatgccgtgcgtactgcggtgatcaacgccgccagcggtcgtcagactgtcgatgaagccctgaaagacgcgcagactggtggttctggtgagaacctgtactttcaaagctcagataatgggcctcaaaaccagcgcaacgctccacgtataaccttcggtggcccgtctgactccacaggcagcaaccagaatggtgagcgtagtggagccaggtctaagcagcgccgtccccagggtctgccgaacaacacggcgagctggtttactgcgcttacccaacacggtaaagaagacttaaaattcccgcgtggccagggcgtcccgatcaacactaactcttccccggatgatcagattggttattaccgcagagcaactcgtcggattcgcggcggcgacggtaaaatgaaagatttgtctccgcgttggtacttttactatctcggcaccggtccggaagctggactgccctacggggcaaacaaggacgggatcatttgggtggctaccgaaggtgccctgaatactccaaaagatcatatcggcacccgtaaccctgctaataacgctgcgatcgttctgcaactgcctcagggtacaactctgccaaaaggcttctatgcagaagggtcgcgtggtggcagccaggcgagtagccgtagcagctcccgctctcgcaactcgtcccgtaactccactccgggctcttctcgcggcacgtccccggctcgtatggcaggtaacggtggtgacgctgctctggcgctgctactgctggacaggctgaaccagctggagtcgaagatgagtggtaaaggccaacagcagcagggccagaccgttaccaaaaagagcgcagctgaaatgtctaaaaaaccgcgacagaaacgtaccgcgactaaaggatgcaatgtaacacagtgtttcggtccccgaggtccggagcaaactcaaggaaactttggcgatgccgaattaaataagaaaggggtggactacaaacactggccgcaaattgcccagttcgccccatccgctagtgcattcttcggtatgagccgcatctcaagtaaagaaacgccaagtggtacgtggctgacctacaccggtgctatcaagcttgataaagatgacccgaactttaaagaccaggttattctgcttaacaaacatattgatgcctataaaactttcccgccgaccgaacccaaaaaggacaaaaagaaaaaagctgatgaaacccaggctctaccgcagcgtcagaaaaaacagcaaactgtgactctgctgccagctgcggacctggatgatttttccaagcagctgcaacagtctatgagctctgcggactctacgcaggctggtggttctggtcaccatcatcaccatcattaa

SEQ ID NO: 2940 - DNA, 2421 bp, Artificial Sequence
  Description of Artificial Sequence: Synthetic polynucleotide
atgaaaatcgaagaaggtaaactggtaatctggattaacggcgataaaggctataacggtctcgctgaagtcggtaagaaattcgagaaagataccggaattaaagtcaccgttgagcatccggataaactggaagagaaattcccacaggttgcggcaactggcgatggccctgacattatcttctgggcacacgaccgctttggtggctacgctcaatctggcctgttggctgaaatcaccccggacaaagcgttccaggacaagctgtatccgtttacctgggatgccgtacgttacaacggcaagctgattgcttacccgatcgctgttgaagcgttatcgctgatttataacaaagatctgctgccgaacccgccaaaaacctgggaagagatcccggcgctggataaagaactgaaagcgaaaggtaagagcgcgctgatgttcaacctgcaagaaccgtacttcacctggccgctgattgctgctgacgggggttatgcgttcaagtatgaaaacggcaagtacgacattaaagacgtgggcgtggataacgctggcgcgaaagcgggtctgaccttcctggttgacctgattaaaaacaaacacatgaatgcagacaccgattactccatcgcagaagctgcctttaataaaggcgaaacagcgatgaccatcaacggcccgtgggcatggtccaacatcgacaccagcaaagtgaattatggtgtaacggtactgccgaccttcaagggtcaaccatccaaaccgttcgttggcgtgctgagcgcaggtattaacgccgccagtccgaacaaagagctggcgaaagagttcctcgaaaactatctgctgactgatgaaggtctggaagcggttaataaagacaaaccgctgggtgccgtagcgctgaagtcttacgaggaagagttggcgaaagatccacgtattgccgccaccatggaaaacgcccagaaaggtgaaatcatgccgaacatcccgcagatgtccgctttctggtatgccgtgcgtactgcggtgatcaacgccgccagcggtcgtcagactgtcgatgaagccctgaaagacgcgcagactggtggttctggtgagaacctgtactttcaaagctcagataatgggcctcaaaaccagcgcaacgctccacgtataaccttcggtggcccgtctgactccacaggcagcaaccagaatggtgagcgtagtggagccaggtctaagcagcgccgtccccagggtctgccgaacaacacggcgagctggtttactgcgcttacccaacacggtaaacaagacttaaaattcccgcgtggccagggcgtcccgatcaacactaactcttccccggatgatcagattggttattaccgcagagcaactcgtcggattcgcggcggcgacggtaaaatgaaagatttgtctccgcgttggtacttttactatctcggcaccggtccggaagctggactgccctacggggcaaacaaggacgggatcatttgggtggctaccgaaggtgccctgaatactccaaaagatcatatcggcacccgtaaccctgctaataacgctgcgatcgttctgcaactgcctcagggtacaactctgccaaaaggcttctatgcagaagggtcgcgtggtggcagccaggcgagtagccgtagcagctcccgctctcgcaactcgtcccgtaactccactccgggctcttctcgcggcacgtccccggctcgtatggcaggtaacggtggtgacgctgctctggcgctgctactgctggacaggctgaaccagctggagtcgaagatgagtggtaaaggccaacagcagcagggccagaccgttaccaaaaagagcgcagctgaagcatctaaaaaaccgcgacagaaacgtaccgcgactaaagcgtacaatgtaacacaggccttcggtcgtcgaggtccggagcaaactcaaggaaactttggcgatcaggaattaatccgccaggggaccgactacaaacactggccgcaaattgcccagttcgccccatccgctagtgcattcttcggtatgagccgcatcggcatggaagtaacgccaagtggtacgtggctgacctacaccggtgctatcaagcttgatgacaaggacccgaactttaaagaccaggttattctgcttaacaaacatattgatgcctataaaactttcccgccgaccgaacccaaaaaggacaaaaagaaaaaagctgatgaaacccaggctctaccgcagcgtcagaaaaaacagcaaactgtgactctgctgccagctgcggacctggatgatttttccaagcagctgcaacagtctatgagctctgcggactctacgcaggctggtggttctggtcaccatcatcaccatcattaa

SEQ ID NO: 2941 - DNA, 2421 bp, Artificial Sequence
  Description of Artificial Sequence: Synthetic polynucleotide
atgaaaatcgaagaaggtaaactggtaatctggattaacggcgataaaggctataacggtctcgctgaagtcggtaagaaattcgagaaagataccggaattaaagtcaccgttgagcatccggataaactggaagagaaattcccacaggttgcggcaactggcgatggccctgacattatcttctgggcacacgaccgctttggtggctacgctcaatctggcctgttggctgaaatcaccccggacaaagcgttccaggacaagctgtatccgtttacctgggatgccgtacgttacaacggcaagctgattgcttacccgatcgctgttgaagcgttatcgctgatttataacaaagatctgctgccgaacccgccaaaaacctgggaagagatcccggcgctggataaagaactgaaagcgaaaggtaagagcgcgctgatgttcaacctgcaagaaccgtacttcacctggccgctgattgctgctgacgggggttatgcgttcaagtatgaaaacggcaagtacgacattaaagacgtgggcgtggataacgctggcgcgaaagcgggtctgaccttcctggttgacctgattaaaaacaaacacatgaatgcagacaccgattactccatcgcagaagctgcctttaataaaggcgaaacagcgatgaccatcaacggcccgtgggcatggtccaacatcgacaccagcaaagtgaattatggtgtaacggtactgccgaccttcaagggtcaaccatccaaaccgttcgttggcgtgctgagcgcaggtattaacgccgccagtccgaacaaagagctggcgaaagagttcctcgaaaactatctgctgactgatgaaggtctggaagcggttaataaagacaaaccgctgggtgccgtagcgctgaagtcttacgaggaagagttggcgaaagatccacgtattgccgccaccatggaaaacgcccagaaaggtgaaatcatgccgaacatcccgcagatgtccgctttctggtatgccgtgcgtactgcggtgatcaacgccgccagcggtcgtcagactgtcgatgaagccctgaaagacgcgcagactggtggttctggtgagaacctgtactttcaaagctcagataatgggcctcaaaaccagcgcaacgctccacgtataaccttcggtggcccgtctgactccacaggcagcaaccagaatggtgagcgtagtggagccaggtctaagcagcgccgtccccagggtctgccgaacaacacggcgagctggtttactccgcttacccaaaatggtaaagaagacttaaaattcccgccaggccagggcgtcccgatcaacactaactcttccccggatgatcagattggttattaccgcagagcaactcgtcggattcgcggcggcgacggtaaaatgaaagatttgccaccgaagtggtacttttactatctcggcaccggtccgcatgctgatctgccctacgggcaaaaacaggacggggtggtatgggtggctcgaccaggtgccctgaatactccaaaagatcatatcggcacccgtaaccctgctaataacgctgcgatcccgctgcaactgcctcctggtacaaaactgccaaaaggcttctatgcagaagggtcgcgtggtggcagccaggcgagtagccgtagcagctcccgctctcgcaactcgtcccgtaactccactccgggctcttctcgcggcacgtccccggctcgtatggcaggtaacggtggtgacgctgctctggcgctgctactgctggacaggctgaaccagctggagtcgaagatgagtggtaaaggccaacagcagcagggccagaccgttaccaaaaagagcgcagctgaagcatctaaaaaaccgcgacagaaacgtaccgcgactaaagcgtacaatgtaacacaggccttcggtcgtcgaggtccggagcaaactcaaggaaactttggcgatcaggaattaatccgccaggggaccgactacaaacactggccgcaaattgcccagttcgccccatccgctagtgcattcttcggtatgagccgcatcggcatggaagtaacgccaagtggtacgtggctgacctacaccggtgctatcaagcttgatgacaaggacccgaactttaaagaccaggttattctgcttaacaaacatattgatgcctataaaactttcccgccgaccgaacccaaaaaggacaaaaagaaaaaagctgatgaaacccaggctctaccgcagcgtcagaaaaaacagcaaactgtgactctgctgccagctgcggacctggatgatttttccaagcagctgcaacagtctatgagctctgcggactctacgcaggctggtggttctggtcaccatcatcaccatcattaa

SEQ ID NO: 2942 - DNA, 2421 bp, Artificial Sequence
  Description of Artificial Sequence: Synthetic polynucleotide
atgaaaatcgaagaaggtaaactggtaatctggattaacggcgataaaggctataacggtctcgctgaagtcggtaagaaattcgagaaagataccggaattaaagtcaccgttgagcatccggataaactggaagagaaattcccacaggttgcggcaactggcgatggccctgacattatcttctgggcacacgaccgctttggtggctacgctcaatctggcctgttggctgaaatcaccccggacaaagcgttccaggacaagctgtatccgtttacctgggatgccgtacgttacaacggcaagctgattgcttacccgatcgctgttgaagcgttatcgctgatttataacaaagatctgctgccgaacccgccaaaaacctgggaagagatcccggcgctggataaagaactgaaagcgaaaggtaagagcgcgctgatgttcaacctgcaagaaccgtacttcacctggccgctgattgctgctgacgggggttatgcgttcaagtatgaaaacggcaagtacgacattaaagacgtgggcgtggataacgctggcgcgaaagcgggtctgaccttcctggttgacctgattaaaaacaaacacatgaatgcagacaccgattactccatcgcagaagctgcctttaataaaggcgaaacagcgatgaccatcaacggcccgtgggcatggtccaacatcgacaccagcaaagtgaattatggtgtaacggtactgccgaccttcaagggtcaaccatccaaaccgttcgttggcgtgctgagcgcaggtattaacgccgccagtccgaacaaagagctggcgaaagagttcctcgaaaactatctgctgactgatgaaggtctggaagcggttaataaagacaaaccgctgggtgccgtagcgctgaagtcttacgaggaagagttggcgaaagatccacgtattgccgccaccatggaaaacgcccagaaaggtgaaatcatgccgaacatcccgcagatgtccgctttctggtatgccgtgcgtactgcggtgatcaacgccgccagcggtcgtcagactgtcgatgaagccctgaaagacgcgcagactggtggttctggtgagaacctgtactttcaaagctcagataatgggcctcaaaaccagcgcaacgctccacgtataaccttcggtggcccgtctgactccacaggcagcaaccagaatggtgagcgtagtggagccaggtctaagcagcgccgtccccagggtctgccgaacaacacggcgagctggtttactgcgcttacccaacacggtaaagaagacttaaaattcccgcgtggccagggcgtcccgatcaacactaactcttccccggatgatcagattggttattaccgcagagcaactcgtcggattcgcggcggcgacggtaaaatgaaagatttgtctccgcgttggtacttttactatctcggcaccggtccggaagctggactgccctacggggcaaacaaggccgggatcatttgggtggctaccgaaggtgccctgaatactccaaaagatcatatcggcacccgtaaccctgctaataacgctgcgatcgttctgcaactgcctcagggtacaactctgccaaaaggcttctatgcagaagggtcgcgtggtggcagccaggcgagtagccgtagcagctcccgctctcgcaactcgtcccgtaactccactccgggctcttctcgcggcacgtccccggctcgtatggcaggtaacggtggtgacgctgctctggcgctgctactgctggacaggctgaaccagctggagtcgaagatgagtggtaaaggccaacagcagcagggccagaccgttaccaaaaagagcgcagctgaagcatctaaaaaaccgcgacagaaacgtaccgcgactaaagcgtacaatgtaacacaggccttcggtcgtcgaggtccggagcaaactcaaggaaactttggcgatcaggaattaatccgccaggggaccgactacaaacactggccgcaaattgcccagttcgccccatccgctagtgcattcttcggtatgagccgcatcggcatggaagtaacgccaagtggtacgtggctgacctacaccggtgctatcaagcttgatgacaaggacccgaactttaaagaccaggttattctgcttaacaaacatattgatgcctataaaactttcccgccgaccgaacccaaaaaggacaaaaagaaaaaagctgatgaaacccaggctctaccgcagcgtcagaaaaaacagcaaactgtgactctgctgccagctgcggacctggatgatttttccaagcagctgcaacagtctatgagctctgcggactctacgcaggctggtggttctggtcaccatcatcaccatcattaa

SEQ ID NO: 2943 - DNA, 2421 bp, Artificial Sequence
  Description of Artificial Sequence: Synthetic polynucleotide
atgaaaatcgaagaaggtaaactggtaatctggattaacggcgataaaggctataacggtctcgctgaagtcggtaagaaattcgagaaagataccggaattaaagtcaccgttgagcatccggataaactggaagagaaattcccacaggttgcggcaactggcgatggccctgacattatcttctgggcacacgaccgctttggtggctacgctcaatctggcctgttggctgaaatcaccccggacaaagcgttccaggacaagctgtatccgtttacctgggatgccgtacgttacaacggcaagctgattgcttacccgatcgctgttgaagcgttatcgctgatttataacaaagatctgctgccgaacccgccaaaaacctgggaagagatcccggcgctggataaagaactgaaagcgaaaggtaagagcgcgctgatgttcaacctgcaagaaccgtacttcacctggccgctgattgctgctgacgggggttatgcgttcaagtatgaaaacggcaagtacgacattaaagacgtgggcgtggataacgctggcgcgaaagcgggtctgaccttcctggttgacctgattaaaaacaaacacatgaatgcagacaccgattactccatcgcagaagctgcctttaataaaggcgaaacagcgatgaccatcaacggcccgtgggcatggtccaacatcgacaccagcaaagtgaattatggtgtaacggtactgccgaccttcaagggtcaaccatccaaaccgttcgttggcgtgctgagcgcaggtattaacgccgccagtccgaacaaagagctggcgaaagagttcctcgaaaactatctgctgactgatgaaggtctggaagcggttaataaagacaaaccgctgggtgccgtagcgctgaagtcttacgaggaagagttggcgaaagatccacgtattgccgccaccatggaaaacgcccagaaaggtgaaatcatgccgaacatcccgcagatgtccgctttctggtatgccgtgcgtactgcggtgatcaacgccgccagcggtcgtcagactgtcgatgaagccctgaaagacgcgcagactggtggttctggtgagaacctgtactttcaaagctcagataatgggcctcaaaaccagcgcaacgctccacgtataaccttcggtggcccgtctgactccacaggcagcaaccagaatggtgagcgtagtggagccaggtctaagcagcgccgtccccagggtctgccgaacaacacggcgagctggtttactgcgcttacccaacacggtaaagaagacttaaaattcccgcctggccagggcgtcccgatcaacccgaactctaaaccggatgatcagattggttattaccgcagacaagtgcgtcggtatcgcggcggcgacggtcagatgaaagatttgccaccgcgttggtacttttactatctcggcaccggtccggaagctggactgccctacggggcaaacaaggacgggatcatttgggtggctaccgaaggtgccctgaatactccaaaagatcatatcggcacccgtaaccctgctaataacgctgcgatcgttctgcaactgcctcagggtacaactctgccaaaaggcttctatgcagaagggtcgcgtggtggcagccaggcgagtagccgtagcagctcccgctctcgcaactcgtcccgtaactccactccgggctcttctcgcggcacgtccccggctcgtatggcaggtaacggtggtgacgctgctctggcgctgctactgctggacaggctgaaccagctggagtcgaagatgagtggtaaaggccaacagcagcagggccagaccgttaccaaaaagagcgcagctgaagcatctaaaaaaccgcgacagaaacgtaccgcgactaaagcgtacaatgtaacacaggccttcggtcgtcgaggtccggagcaaactcaaggaaactttggcgatcaggaattaatccgccaggggaccgactacaaacactggccgcaaattgcccagttcgccccatccgctagtgcattcttcggtatgagccgcatcggcatggaagtaacgccaagtggtacgtggctgacctacaccggtgctatcaagcttgatgacaaggacccgaactttaaagaccaggttattctgcttaacaaacatattgatgcctataaaactttcccgccgaccgaacccaaaaaggacaaaaagaaaaaagctgatgaaacccaggctctaccgcagcgtcagaaaaaacagcaaactgtgactctgctgccagctgcggacctggatgatttttccaagcagctgcaacagtctatgagctctgcggactctacgcaggctggtggttctggtcaccatcatcaccatcattaa

SEQ ID NO: 2944 - DNA, 2421 bp, Artificial Sequence
  Description of Artificial Sequence: Synthetic polynucleotide
atgaaaatcgaagaaggtaaactggtaatctggattaacggcgataaaggctataacggtctcgctgaagtcggtaagaaattcgagaaagataccggaattaaagtcaccgttgagcatccggataaactggaagagaaattcccacaggttgcggcaactggcgatggccctgacattatcttctgggcacacgaccgctttggtggctacgctcaatctggcctgttggctgaaatcaccccggacaaagcgttccaggacaagctgtatccgtttacctgggatgccgtacgttacaacggcaagctgattgcttacccgatcgctgttgaagcgttatcgctgatttataacaaagatctgctgccgaacccgccaaaaacctgggaagagatcccggcgctggataaagaactgaaagcgaaaggtaagagcgcgctgatgttcaacctgcaagaaccgtacttcacctggccgctgattgctgctgacgggggttatgcgttcaagtatgaaaacggcaagtacgacattaaagacgtgggcgtggataacgctggcgcgaaagcgggtctgaccttcctggttgacctgattaaaaacaaacacatgaatgcagacaccgattactccatcgcagaagctgcctttaataaaggcgaaacagcgatgaccatcaacggcccgtgggcatggtccaacatcgacaccagcaaagtgaattatggtgtaacggtactgccgaccttcaagggtcaaccatccaaaccgttcgttggcgtgctgagcgcaggtattaacgccgccagtccgaacaaagagctggcgaaagagttcctcgaaaactatctgctgactgatgaaggtctggaagcggttaataaagacaaaccgctgggtgccgtagcgctgaagtcttacgaggaagagttggcgaaagatccacgtattgccgccaccatggaaaacgcccagaaaggtgaaatcatgccgaacatcccgcagatgtccgctttctggtatgccgtgcgtactgcggtgatcaacgccgccagcggtcgtcagactgtcgatgaagccctgaaagacgcgcagactggtggttctggtgagaacctgtactttcaaagctcagataatgggcctcaaaaccagcgcaacgctccacgtataaccttcggtggcccgtctgactccacaggcagcaaccagaatggtgagcgtagtggagccaggtctaagcagcgccgtccccagggtctgccgaacaacacggcgagctggtttactgcgcttacccaacacggtaaagaagacttaaaattcccgcgtggccagggcgtcccgatcaacactaactcttccccggatgatcagattggttattaccgcagagcaactcgtcggattcgcggcggcgacggtaaaatgaaagatttgtctccgcgttggtacttttactatctcggcaccggtccggaagctggactgccctacggggcaaacaaggacgggatcatttgggtggctaccgaaggtgccctgaatactccaaaagatcatatcggcacccgtaaccctgctaataacgctgcgatcgttctgcaactgcctcagggtacaactctgccaaaaggcttctatgcagaagggtcgcgtggtggcagccaggcgagtagccgtagcagctcccgctctcgcaactcgtcccgtaactccactccgggctcttctcgcggcacgtccccggctcgtatggcaggtaacggtggtgacgctgctctggcgctgctactgctggacaggctgaaccagctggagtcgaagatgagtggtaaaggccaacagcagcagggccagaccgttaccaaaaagagcgcagctgaaatgtctaaaaaaccgcgatggaaacgtaccgcgactaaagggtacaatgtaacacaggccttcggtaaacgaggtccgaaagatactcaaggaaactttggcgatgccgaattaatcaagcaggggaccgactacaaacactggccgcaaattgcccagttcgtgccatccgctgcggcattcttctttatgagccgcatcagtatgaaagaaacgccagatggtgtttggctgacctacaccggtacgatcaagcttgataaggatgacccgaactttgatgaccaggttaaactgcttaacaaacatattgatgcctataaaactttcccgccgaccgaacccaaaaaggacaaaaagaaaaaagctgatgaaacccaggctctaccgcagcgtcagaaaaaacagcaaactgtgactctgctgccagctgcggacctggatgatttttccaagcagctgcaacagtctatgagctctgcggactctacgcaggctggtggttctggtcaccatcatcaccatcattaa

SEQ ID NO: 2945 - DNA, 2421 bp, Artificial Sequence
  Description of Artificial Sequence: Synthetic polynucleotide
atgaaaatcgaagaaggtaaactggtaatctggattaacggcgataaaggctataacggtctcgctgaagtcggtaagaaattcgagaaagataccggaattaaagtcaccgttgagcatccggataaactggaagagaaattcccacaggttgcggcaactggcgatggccctgacattatcttctgggcacacgaccgctttggtggctacgctcaatctggcctgttggctgaaatcaccccggacaaagcgttccaggacaagctgtatccgtttacctgggatgccgtacgttacaacggcaagctgattgcttacccgatcgctgttgaagcgttatcgctgatttataacaaagatctgctgccgaacccgccaaaaacctgggaagagatcccggcgctggataaagaactgaaagcgaaaggtaagagcgcgctgatgttcaacctgcaagaaccgtacttcacctggccgctgattgctgctgacgggggttatgcgttcaagtatgaaaacggcaagtacgacattaaagacgtgggcgtggataacgctggcgcgaaagcgggtctgaccttcctggttgacctgattaaaaacaaacacatgaatgcagacaccgattactccatcgcagaagctgcctttaataaaggcgaaacagcgatgaccatcaacggcccgtgggcatggtccaacatcgacaccagcaaagtgaattatggtgtaacggtactgccgaccttcaagggtcaaccatccaaaccgttcgttggcgtgctgagcgcaggtattaacgccgccagtccgaacaaagagctggcgaaagagttcctcgaaaactatctgctgactgatgaaggtctggaagcggttaataaagacaaaccgctgggtgccgtagcgctgaagtcttacgaggaagagttggcgaaagatccacgtattgccgccaccatggaaaacgcccagaaaggtgaaatcatgccgaacatcccgcagatgtccgctttctggtatgccgtgcgtactgcggtgatcaacgccgccagcggtcgtcagactgtcgatgaagccctgaaagacgcgcagactggtggttctggtgagaacctgtactttcaaagctcagataatgggcctcaaaaccagcgcaacgctccacgtataaccttcggtggcccgtctgactccacaggcagcaaccagaatggtgagcgtagtggagccaggtctaagcagcgccgtccccagggtctgccgaacaacacggcgagctggtttactgcgcttacccaacacggtaaagaagacttaaaattcccgcgtggccagggcgtcccgatcaacactaactcttccccggatgatcagattggttattaccgcagagcaactcgtcggattcgcggcggcgacggtaaaatgaaagatttgtctccgcgttggtacttttactatctcggcaccggtccggaagctggactgccctacggggcaaacaaggacgggatcatttgggtggctaccgaaggtgccctgaatactccaaaagatcatatcggcacccgtaaccctgctaataacgctgcgatcgttctgcaactgcctcagggtacaactctgccaaaaggcttctatgcagaagggtcgcgtggtggcagccaggcgagtagccgtagcagctcccgctctcgcaactcgtcccgtaactccactccgggctcttctcgcggcacgtccccggctcgtatggcaggtaacggtggtgacgctgctctggcgctgctactgctggacaggctgaaccagctggagtcgaagatgagtggtaaaggccaacagcagcagggccagaccgttaccaaaaagagcgcagctgaagcatctaaaaaaccgcgacagaaacgtaccgcgactaaagcgtacaatgtaacacaggccttcggtcgtcgaggtccggagcaaactcaaggaaactttggcgatcaggaattaatccgccaggggaccgactacaaacactggccgcaaattgcccagttcgccccatccgtgagtgcattcttcggtatgagccgcatcggcatggaagtaacgccaagtggtacgtggctgacctacaccggtgctatcaagcttgatgacaaggacccgaactttaaagaccaggttattctgcttaacaaacatattgatgcctataaaactttcccgccgaccgaacccaaaaaggacaaaaagaaaaaagctgatgaaacccaggctctaccgcagcgtcagaaaaaacagcaaactgtgactctgctgccagctgcggacctggatgatttttccaagcagctgcaacagtctatgagctctgcggactctacgcaggctggtggttctggtcaccatcatcaccatcattaa

SEQ ID NO: 2946 - DNA, 2421 bp, Artificial Sequence
  Description of Artificial Sequence: Synthetic polynucleotide
atgaaaatcgaagaaggtaaactggtaatctggattaacggcgataaaggctataacggtctcgctgaagtcggtaagaaattcgagaaagataccggaattaaagtcaccgttgagcatccggataaactggaagagaaattcccacaggttgcggcaactggcgatggccctgacattatcttctgggcacacgaccgctttggtggctacgctcaatctggcctgttggctgaaatcaccccggacaaagcgttccaggacaagctgtatccgtttacctgggatgccgtacgttacaacggcaagctgattgcttacccgatcgctgttgaagcgttatcgctgatttataacaaagatctgctgccgaacccgccaaaaacctgggaagagatcccggcgctggataaagaactgaaagcgaaaggtaagagcgcgctgatgttcaacctgcaagaaccgtacttcacctggccgctgattgctgctgacgggggttatgcgttcaagtatgaaaacggcaagtacgacattaaagacgtgggcgtggataacgctggcgcgaaagcgggtctgaccttcctggttgacctgattaaaaacaaacacatgaatgcagacaccgattactccatcgcagaagctgcctttaataaaggcgaaacagcgatgaccatcaacggcccgtgggcatggtccaacatcgacaccagcaaagtgaattatggtgtaacggtactgccgaccttcaagggtcaaccatccaaaccgttcgttggcgtgctgagcgcaggtattaacgccgccagtccgaacaaagagctggcgaaagagttcctcgaaaactatctgctgactgatgaaggtctggaagcggttaataaagacaaaccgctgggtgccgtagcgctgaagtcttacgaggaagagttggcgaaagatccacgtattgccgccaccatggaaaacgcccagaaaggtgaaatcatgccgaacatcccgcagatgtccgctttctggtatgccgtgcgtactgcggtgatcaacgccgccagcggtcgtcagactgtcgatgaagccctgaaagacgcgcagactggtggttctggtgagaacctgtactttcaaagctcagataatgggcctcaaaaccagcgcaacgctccacgtataaccttcggtggcccgtctgactccacaggcagcaaccagaatggtgagcgtagtggagccaggtctaagcagcgccgtccccagggtctgccgaacaacacggcgagctggtttactgcgcttacccaacacggtaaagaagacttaaaattcccgcgtggccagggcgtcccgatcaacactaactcttccccggatgatcagattggttattaccgcagagcaactcgtcggattcgcggcggcgacggtaaaatgaaagatttgtctccgcgttggtacttttactatctcggcaccggtccggaagctggactgccctacggggcaaacaaggacgggatcatttgggtggctaccgaaggtgccctgaatactccaaaagatcatatcggcacccgtaaccctgctaataacgctgcgatcgttctgcaactgcctcagggtacaactccgccaaaaggcttctatgcagaagggtcgcgtggtggcagccaggcgagtagccgtagcagctcccgctctcgcaactcgtcccgtaactccactccgggctcttctcgcggcacgtccccggctcgtatggcaggtaacggtggtgacgctgctctggcgctgctactgctggacaggctgaaccagctggagtcgaagatgagtggtaaaggccaacagcagcagggccagaccgttaccaaaaagagcgcagctgaagcatctaaaaaaccgcgacagaaacgtaccgcgactaaagcgtacaatgtaacacaggccttcggtcgtcgaggtccggagcaaactcaaggaaactttggcgatcaggaattaatccgccaggggaccgactacaaacactggccgcaaattgcccagttcgccccatccgctagtgcattcttcggtatgagccgcatcggcatggaagtaacgccaagtggtacgtggctgacctacaccggtgctatcaagcttgatgacaaggacccgaactttaaagaccaggttattctgcttaacaaacatattgatgcctataaaactttcccgccgaccgaacccaaaaaggacaaaaagaaaaaagctgatgaaacccaggctctaccgcagcgtcagaaaaaacagcaaactgtgactctgctgccagctgcggacctggatgatttttccaagcagctgcaacagtctatgagctctgcggactctacgcaggctggtggttctggtcaccatcatcaccatcattaa

SEQ ID NO: 2947 - DNA, 2421 bp, Artificial Sequence
  Description of Artificial Sequence: Synthetic polynucleotide
atgaaaatcgaagaaggtaaactggtaatctggattaacggcgataaaggctataacggtctcgctgaagtcggtaagaaattcgagaaagataccggaattaaagtcaccgttgagcatccggataaactggaagagaaattcccacaggttgcggcaactggcgatggccctgacattatcttctgggcacacgaccgctttggtggctacgctcaatctggcctgttggctgaaatcaccccggacaaagcgttccaggacaagctgtatccgtttacctgggatgccgtacgttacaacggcaagctgattgcttacccgatcgctgttgaagcgttatcgctgatttataacaaagatctgctgccgaacccgccaaaaacctgggaagagatcccggcgctggataaagaactgaaagcgaaaggtaagagcgcgctgatgttcaacctgcaagaaccgtacttcacctggccgctgattgctgctgacgggggttatgcgttcaagtatgaaaacggcaagtacgacattaaagacgtgggcgtggataacgctggcgcgaaagcgggtctgaccttcctggttgacctgattaaaaacaaacacatgaatgcagacaccgattactccatcgcagaagctgcctttaataaaggcgaaacagcgatgaccatcaacggcccgtgggcatggtccaacatcgacaccagcaaagtgaattatggtgtaacggtactgccgaccttcaagggtcaaccatccaaaccgttcgttggcgtgctgagcgcaggtattaacgccgccagtccgaacaaagagctggcgaaagagttcctcgaaaactatctgctgactgatgaaggtctggaagcggttaataaagacaaaccgctgggtgccgtagcgctgaagtcttacgaggaagagttggcgaaagatccacgtattgccgccaccatggaaaacgcccagaaaggtgaaatcatgccgaacatcccgcagatgtccgctttctggtatgccgtgcgtactgcggtgatcaacgccgccagcggtcgtcagactgtcgatgaagccctgaaagacgcgcagactggtggttctggtgagaacctgtactttcaaagctcagataatgggcctcaaaaccagcgcaacgctccacgtataaccttcggtggcccgtctgactccacaggcagcaaccagaatggtgagcgtagtggagccaggtctaagcagcgccgtccccagggtctgccgaacaacacggcgagctggtttactgcgcttacccaacacggtaaagaagacttaaaattcccgcgtggccagggcgtcccgatcaacactaactcttccccggatgatcagattggttattaccgcagagcaactcgtcggattcgcggcggcgacggtaaaatgaaagatttgtctccgcgttggtacttttactatctcggcaccggtccggaagctggactgccctacggggcaaacaaggacgggatcatttgggtggctaccgaaggtgccctgaatactccaaaagatcatatcggcacccgtaaccctgctaataacgctgcgatcgttctgcaactgcctcagggtacaactctgccaaaaggcttctatgcagaagggtcgcgtggtggcagccaggcgagtagccgtagcagctcccgctctcgcaactcgtcccgtaactccactccgggctcttctcgcggcacgtccccggctcgtatggcaggtaacggtggtgacgctgctctggcgctgctactgctggacaggctgaaccagctggagtcgaagatgagtggtaaaggccaacagcagcagggccagaccgttaccaaaaagagcgcagctgaagcatctaaaaaaccgcgacagaaacgtaccgcgactaaagcgtacaatgtaacacaggccttcggtcgtcgaggtccggagcaaactcaaggaaactttggcgatcaggaattaatccgccaggggaccgactacaaacgctggccgcaaattgcccagttcgccccatccgctagtgcattcttcggtatgagccgcatcggcatggaagtaacgccaagtggtacgtggctgacctacaccggtgctatcaagcttgatgacaaggacccgaactttaaagaccaggttattctgcttaacaaacatattgatgcctataaaactttcccgccgaccgaacccaaaaaggacaaaaagaaaaaagctgatgaaacccaggctctaccgcagcgtcagaaaaaacagcaaactgtgactctgctgccagctgcggacctggatgatttttccaagcagctgcaacagtctatgagctctgcggactctacgcaggctggtggttctggtcaccatcatcaccatcattaa

SEQ ID NO: 2948 - DNA, 2421 bp, Artificial Sequence
  Description of Artificial Sequence: Synthetic polynucleotide
atgaaaatcgaagaaggtaaactggtaatctggattaacggcgataaaggctataacggtctcgctgaagtcggtaagaaattcgagaaagataccggaattaaagtcaccgttgagcatccggataaactggaagagaaattcccacaggttgcggcaactggcgatggccctgacattatcttctgggcacacgaccgctttggtggctacgctcaatctggcctgttggctgaaatcaccccggacaaagcgttccaggacaagctgtatccgtttacctgggatgccgtacgttacaacggcaagctgattgcttacccgatcgctgttgaagcgttatcgctgatttataacaaagatctgctgccgaacccgccaaaaacctgggaagagatcccggcgctggataaagaactgaaagcgaaaggtaagagcgcgctgatgttcaacctgcaagaaccgtacttcacctggccgctgattgctgctgacgggggttatgcgttcaagtatgaaaacggcaagtacgacattaaagacgtgggcgtggataacgctggcgcgaaagcgggtctgaccttcctggttgacctgattaaaaacaaacacatgaatgcagacaccgattactccatcgcagaagctgcctttaataaaggcgaaacagcgatgaccatcaacggcccgtgggcatggtccaacatcgacaccagcaaagtgaattatggtgtaacggtactgccgaccttcaagggtcaaccatccaaaccgttcgttggcgtgctgagcgcaggtattaacgccgccagtccgaacaaagagctggcgaaagagttcctcgaaaactatctgctgactgatgaaggtctggaagcggttaataaagacaaaccgctgggtgccgtagcgctgaagtcttacgaggaagagttggcgaaagatccacgtattgccgccaccatggaaaacgcccagaaaggtgaaatcatgccgaacatcccgcagatgtccgctttctggtatgccgtgcgtactgcggtgatcaacgccgccagcggtcgtcagactgtcgatgaagccctgaaagacgcgcagactggtggttctggtgagaacctgtactttcaaagctcagataatgggcctcaaaaccagcgcaacgctccacgtataaccttcggtggcccgtctgactccacaggcagcaaccagaatggtgagcgtagtggagccaggtctaagcagcgccgtccccagggtctgccgaacaacacggcgagctggtttactgcgcttacccaacacggtaaagaagacttaaaattcccgcgtggccagggcgtcccgatcaacactaactcttccccggatgatcagattggttattaccgcagagcaactcgtcggattcgcggcggcgacggtaaaatgaaagatttgtctccgcgttggtacttttactatctcggcaccggtccggaagctggactgccctacggggcaaacaaggacgggatcatttgggtggctaccgaaggtgccctgaatactccaaaagatcatatcggcacccgtaaccctgctaataacgctgcgatcgttctgcaactgcctcagggtacaactctgccaaaaggcttctatgcagaagggtcgcgtggtggcagccaggcgagtagccgtagcagctcccgctctcgcaactcgtcccgtaactccactccgggctcttctcgcggcacgtccccggctcgtatggcaggtaacggtggtgacgctgctctggcgctgctactgctggacaggctgaaccagctggagtcgaagatgagtggtaaaggccaacagcagcagggccagaccgttaccaaaaagagcgcagctgaagcatctaaaaaaccgcgacagaaacgtaccgcgactaaagcgtacaatgtaacacaggccttcggtcgtcgaggtccggagcaaactcaaggaaactttggcgatcaggaattaaatcgccaggggaccgactacaaacactggccgcaaattgcccagttcgccccatccgctagtgcattcttcggtatgagccgcatcggcatggaagtaacgccaagtggtacgtggctgacctacaccggtgctatcaagcttgatgacaaggacccgaactttaaagaccaggttattctgcttaacaaacatattgatgcctataaaactttcccgccgaccgaacccaaaaaggacaaaaagaaaaaagctgatgaaacccaggctctaccgcagcgtcagaaaaaacagcaaactgtgactctgctgccagctgcggacctggatgatttttccaagcagctgcaacagtctatgagctctgcggactctacgcaggctggtggttctggtcaccatcatcaccatcattaa

SEQ ID NO: 2949 - DNA, 2421 bp, Artificial Sequence
  Description of Artificial Sequence: Synthetic polynucleotide
atgaaaatcgaagaaggtaaactggtaatctggattaacggcgataaaggctataacggtctcgctgaagtcggtaagaaattcgagaaagataccggaattaaagtcaccgttgagcatccggataaactggaagagaaattcccacaggttgcggcaactggcgatggccctgacattatcttctgggcacacgaccgctttggtggctacgctcaatctggcctgttggctgaaatcaccccggacaaagcgttccaggacaagctgtatccgtttacctgggatgccgtacgttacaacggcaagctgattgcttacccgatcgctgttgaagcgttatcgctgatttataacaaagatctgctgccgaacccgccaaaaacctgggaagagatcccggcgctggataaagaactgaaagcgaaaggtaagagcgcgctgatgttcaacctgcaagaaccgtacttcacctggccgctgattgctgctgacgggggttatgcgttcaagtatgaaaacggcaagtacgacattaaagacgtgggcgtggataacgctggcgcgaaagcgggtctgaccttcctggttgacctgattaaaaacaaacacatgaatgcagacaccgattactccatcgcagaagctgcctttaataaaggcgaaacagcgatgaccatcaacggcccgtgggcatggtccaacatcgacaccagcaaagtgaattatggtgtaacggtactgccgaccttcaagggtcaaccatccaaaccgttcgttggcgtgctgagcgcaggtattaacgccgccagtccgaacaaagagctggcgaaagagttcctcgaaaactatctgctgactgatgaaggtctggaagcggttaataaagacaaaccgctgggtgccgtagcgctgaagtcttacgaggaagagttggcgaaagatccacgtattgccgccaccatggaaaacgcccagaaaggtgaaatcatgccgaacatcccgcagatgtccgctttctggtatgccgtgcgtactgcggtgatcaacgccgccagcggtcgtcagactgtcgatgaagccctgaaagacgcgcagactggtggttctggtgagaacctgtactttcaaagctcagataatgggcctcaaaaccagcgcaacgctccacgtataaccttcggtggcccgtctgactccacaggcagcaaccagaatggtgagcgtagtggagccaggtctaagcagcgccgtccccagggtctgccgaacaacacggcgagctggtttactgcgcttacccaacacggtaaagaagacttaaaattcccgcgtggccagggcgtcccgatcaaccaaaactcttccccggatgatcagattggttattaccgcagagcaactcgtcggattcgcggcggcgacggtaaaatgaaagatttgtctccgcgttggtacttttactatctcggcaccggtccggaagctggactgccctacggggcaaacaaggacgggatcatttgggtggctaccgaaggtgccctgaatactccaaaagatcatatcggcacccgtaaccctgctaataacgctgcgatcgttctgcaactgcctcagggtacaactctgccaaaaggcttctatgcagaagggtcgcgtggtggcagccaggcgagtagccgtagcagctcccgctctcgcaactcgtcccgtaactccactccgggctcttctcgcggcacgtccccggctcgtatggcaggtaacggtggtgacgctgctctggcgctgctactgctggacaggctgaaccagctggagtcgaagatgagtggtaaaggccaacagcagcagggccagaccgttaccaaaaagagcgcagctgaagcatctaaaaaaccgcgacagaaacgtaccgcgactaaagcgtacaatgtaacacaggccttcggtcgtcgaggtccggagcaaactcaaggaaactttggcgatcaggaattaatccgccaggggaccgactacaaacactggccgcaaattgcccagttcgccccatccgctagtgcattcttcggtatgagccgcatcggcatggaagtaacgccaagtggtacgtggctgacctacaccggtgctatcaagcttgatgacaaggacccgaactttaaagaccaggttattctgcttaacaaacatattgatgcctataaaactttcccgccgaccgaacccaaaaaggacaaaaagaaaaaagctgatgaaacccaggctctaccgcagcgtcagaaaaaacagcaaactgtgactctgctgccagctgcggacctggatgatttttccaagcagctgcaacagtctatgagctctgcggactctacgcaggctggtggttctggtcaccatcatcaccatcattaa

SEQ ID NO: 2950 - DNA, 2421 bp, Artificial Sequence
  Description of Artificial Sequence: Synthetic polynucleotide
atgaaaatcgaagaaggtaaactggtaatctggattaacggcgataaaggctataacggtctcgctgaagtcggtaagaaattcgagaaagataccggaattaaagtcaccgttgagcatccggataaactggaagagaaattcccacaggttgcggcaactggcgatggccctgacattatcttctgggcacacgaccgctttggtggctacgctcaatctggcctgttggctgaaatcaccccggacaaagcgttccaggacaagctgtatccgtttacctgggatgccgtacgttacaacggcaagctgattgcttacccgatcgctgttgaagcgttatcgctgatttataacaaagatctgctgccgaacccgccaaaaacctgggaagagatcccggcgctggataaagaactgaaagcgaaaggtaagagcgcgctgatgttcaacctgcaagaaccgtacttcacctggccgctgattgctgctgacgggggttatgcgttcaagtatgaaaacggcaagtacgacattaaagacgtgggcgtggataacgctggcgcgaaagcgggtctgaccttcctggttgacctgattaaaaacaaacacatgaatgcagacaccgattactccatcgcagaagctgcctttaataaaggcgaaacagcgatgaccatcaacggcccgtgggcatggtccaacatcgacaccagcaaagtgaattatggtgtaacggtactgccgaccttcaagggtcaaccatccaaaccgttcgttggcgtgctgagcgcaggtattaacgccgccagtccgaacaaagagctggcgaaagagttcctcgaaaactatctgctgactgatgaaggtctggaagcggttaataaagacaaaccgctgggtgccgtagcgctgaagtcttacgaggaagagttggcgaaagatccacgtattgccgccaccatggaaaacgcccagaaaggtgaaatcatgccgaacatcccgcagatgtccgctttctggtatgccgtgcgtactgcggtgatcaacgccgccagcggtcgtcagactgtcgatgaagccctgaaagacgcgcagactggtggttctggtgagaacctgtactttcaaagctcagataatgggcctcaaaaccagcgcaacgctccacgtataaccttcggtggcccgtctgactccacaggcagcaaccagaatggtgagcgtagtggagccaggtctaagcagcgccgtccccagggtctgccgaacaacacggcgagctggtttactgcgcttacccaacacggtaaagaagacttaaaattcccgcgtggccagggcgtcccgatcaacactaactcttccccggatgatcagattggttattaccgcagagcaactcgtcggattcgcggcggcgacggtaaaatgaaagatttgtctccgcgttggtacttttactatctcggcaccggtccggaagctggactgccctacggggcaaacaaggacgggatcatttgggtggctaccgaaggtgccctgaatactccaaaagatcatatcggcacccgtaaccctgctaataacgctgcgtttgttctgcaactgcctcagggtacaactctgccaaaaggcttctatgcagaagggtcgcgtggtggcagccaggcgagtagccgtagcagctcccgctctcgcaactcgtcccgtaactccactccgggctcttctcgcggcacgtccccggctcgtatggcaggtaacggtggtgacgctgctctggcgctgctactgctggacaggctgaaccagctggagtcgaagatgagtggtaaaggccaacagcagcagggccagaccgttaccaaaaagagcgcagctgaagcatctaaaaaaccgcgacagaaacgtaccgcgactaaagcgtacaatgtaacacaggccttcggtcgtcgaggtccggagcaaactcaaggaaactttggcgatcaggaattaatccgccaggggaccgactacaaacactggccgcaaattgcccagttcgccccatccgctagtgcattcttcggtatgagccgcatcggcatggaagtaacgccaagtggtacgtggctgacctacaccggtgctatcaagcttgatgacaaggacccgaactttaaagaccaggttattctgcttaacaaacatattgatgcctataaaactttcccgccgaccgaacccaaaaaggacaaaaagaaaaaagctgatgaaacccaggctctaccgcagcgtcagaaaaaacagcaaactgtgactctgctgccagctgcggacctggatgatttttccaagcagctgcaacagtctatgagctctgcggactctacgcaggctggtggttctggtcaccatcatcaccatcattaa

SEQ ID NO: 2951 - DNA, 2421 bp, Artificial Sequence
  Description of Artificial Sequence: Synthetic polynucleotide
atgaaaatcgaagaaggtaaactggtaatctggattaacggcgataaaggctataacggtctcgctgaagtcggtaagaaattcgagaaagataccggaattaaagtcaccgttgagcatccggataaactggaagagaaattcccacaggttgcggcaactggcgatggccctgacattatcttctgggcacacgaccgctttggtggctacgctcaatctggcctgttggctgaaatcaccccggacaaagcgttccaggacaagctgtatccgtttacctgggatgccgtacgttacaacggcaagctgattgcttacccgatcgctgttgaagcgttatcgctgatttataacaaagatctgctgccgaacccgccaaaaacctgggaagagatcccggcgctggataaagaactgaaagcgaaaggtaagagcgcgctgatgttcaacctgcaagaaccgtacttcacctggccgctgattgctgctgacgggggttatgcgttcaagtatgaaaacggcaagtacgacattaaagacgtgggcgtggataacgctggcgcgaaagcgggtctgaccttcctggttgacctgattaaaaacaaacacatgaatgcagacaccgattactccatcgcagaagctgcctttaataaaggcgaaacagcgatgaccatcaacggcccgtgggcatggtccaacatcgacaccagcaaagtgaattatggtgtaacggtactgccgaccttcaagggtcaaccatccaaaccgttcgttggcgtgctgagcgcaggtattaacgccgccagtccgaacaaagagctggcgaaagagttcctcgaaaactatctgctgactgatgaaggtctggaagcggttaataaagacaaaccgctgggtgccgtagcgctgaagtcttacgaggaagagttggcgaaagatccacgtattgccgccaccatggaaaacgcccagaaaggtgaaatcatgccgaacatcccgcagatgtccgctttctggtatgccgtgcgtactgcggtgatcaacgccgccagcggtcgtcagactgtcgatgaagccctgaaagacgcgcagactggtggttctggtgagaacctgtactttcaaagctcagataatgggcctcaaaaccagcgcaacgctccacgtataaccttcggtggcccgtctgactccacaggcagcaaccagaatggtgagcgtagtggagccaggtctaagcagcgccgtccccagggtctgccgaacaacacggcgagctggtttactgcgcttaaacaacacggtaaagaagacttaaaattcccgcgtggccagggcgtcccgatcaacactaactcttccccggatgatcagattggttattaccgcagagcaactcgtcggattcgcggcggcgacggtaaaatgaaagatttgtctccgcgttggtacttttactatctcggcaccggtccggaagctggactgccctacggggcaaacaaggacgggatcatttgggtggctaccgaaggtgccctgaatactccaaaagatcatatcggcacccgtaaccctgctaataacgctgcgatcgttctgcaactgcctcagggtacaactctgccaaaaggcttctatgcagaagggtcgcgtggtggcagccaggcgagtagccgtagcagctcccgctctcgcaactcgtcccgtaactccactccgggctcttctcgcggcacgtccccggctcgtatggcaggtaacggtggtgacgctgctctggcgctgctactgctggacaggctgaaccagctggagtcgaagatgagtggtaaaggccaacagcagcagggccagaccgttaccaaaaagagcgcagctgaagcatctaaaaaaccgcgacagaaacgtaccgcgactaaagcgtacaatgtaacacaggccttcggtcgtcgaggtccggagcaaactcaaggaaactttggcgatcaggaattaatccgccaggggaccgactacaaacactggccgcaaattgcccagttcgccccatccgctagtgcattcttcggtatgagccgcatcggcatggaagtaacgccaagtggtacgtggctgacctacaccggtgctatcaagcttgatgacaaggacccgaactttaaagaccaggttattctgcttaacaaacatattgatgcctataaaactttcccgccgaccgaacccaaaaaggacaaaaagaaaaaagctgatgaaacccaggctctaccgcagcgtcagaaaaaacagcaaactgtgactctgctgccagctgcggacctggatgatttttccaagcagctgcaacagtctatgagctctgcggactctacgcaggctggtggttctggtcaccatcatcaccatcattaa

SEQ ID NO: 2952 - DNA, 2421 bp, Artificial Sequence
  Description of Artificial Sequence: Synthetic polynucleotide
atgaaaatcgaagaaggtaaactggtaatctggattaacggcgataaaggctataacggtctcgctgaagtcggtaagaaattcgagaaagataccggaattaaagtcaccgttgagcatccggataaactggaagagaaattcccacaggttgcggcaactggcgatggccctgacattatcttctgggcacacgaccgctttggtggctacgctcaatctggcctgttggctgaaatcaccccggacaaagcgttccaggacaagctgtatccgtttacctgggatgccgtacgttacaacggcaagctgattgcttacccgatcgctgttgaagcgttatcgctgatttataacaaagatctgctgccgaacccgccaaaaacctgggaagagatcccggcgctggataaagaactgaaagcgaaaggtaagagcgcgctgatgttcaacctgcaagaaccgtacttcacctggccgctgattgctgctgacgggggttatgcgttcaagtatgaaaacggcaagtacgacattaaagacgtgggcgtggataacgctggcgcgaaagcgggtctgaccttcctggttgacctgattaaaaacaaacacatgaatgcagacaccgattactccatcgcagaagctgcctttaataaaggcgaaacagcgatgaccatcaacggcccgtgggcatggtccaacatcgacaccagcaaagtgaattatggtgtaacggtactgccgaccttcaagggtcaaccatccaaaccgttcgttggcgtgctgagcgcaggtattaacgccgccagtccgaacaaagagctggcgaaagagttcctcgaaaactatctgctgactgatgaaggtctggaagcggttaataaagacaaaccgctgggtgccgtagcgctgaagtcttacgaggaagagttggcgaaagatccacgtattgccgccaccatggaaaacgcccagaaaggtgaaatcatgccgaacatcccgcagatgtccgctttctggtatgccgtgcgtactgcggtgatcaacgccgccagcggtcgtcagactgtcgatgaagccctgaaagacgcgcagactggtggttctggtgagaacctgtactttcaaagctcagataatgggcctcaaaaccagcgcaacgctccacgtataaccttcggtggcccgtctgactccacaggcagcaaccagaatggtgagcgtagtggagccaggtctaagcagcgccgtccccagggtctgccgaacaacacggcgagctggtttactgcgcttacccaacacggtaaagaagacttaaaattcccgcgtggccagggcgtcccgatcaacactaactcttccccggatgatcagattggttattaccgcagagcaactcgtcggattcgcggcggcgacggtaaaatgaaagatttgtctccgcgttggtacttttactatctcggcaccggtccggaagctggactgccctacggggcaaacaaggacgggatcatttgggtggctaccgaaggtgccctgaatactccaaaagatcatatcggcacccgtaaccctgctaataacgctgcgatcgttctgcaactgcctcagggtacaactctgccaaaaggcttctatgcagaagggtcgcgtggtggcagccaggcgagtagccgtagcagctcccgctctcgcaactcgtcccgtaactccactccgggctcttctcgcggcacgtccccggctcgtatggcaggtaacggtggtgacgctgctctggcgctgctactgctggacaggctgaaccagctggagtcgaagatgagtggtaaaggccaacagcagcagggccagaccgttaccaaaaagagcgcagctgaagcatctaaaaaaccgcgacagaaacgtaccgcgactaaagcgtacaatgtaacacaggccttcggtcgtcgaggtccggagcaaactcaaggaaactttggcgatcaggaattaatccgccaggggaccgactacaaacactggccgcaaattgcccagttcgccccatccgctagtgcattcttcggtatgagccgcatcggcgtcgaagtaacgccaagtggtacgtggctgacctacaccggtgctatcaagcttgatgacaaggacccgaactttaaagaccaggttattctgcttaacaaacatattgatgcctataaaactttcccgccgaccgaacccaaaaaggacaaaaagaaaaaagctgatgaaacccaggctctaccgcagcgtcagaaaaaacagcaaactgtgactctgctgccagctgcggacctggatgatttttccaagcagctgcaacagtctatgagctctgcggactctacgcaggctggtggttctggtcaccatcatcaccatcattaa

SEQ ID NO: 2953 - DNA, 2421 bp, Artificial Sequence
  Description of Artificial Sequence: Synthetic polynucleotide
atgaaaatcgaagaaggtaaactggtaatctggattaacggcgataaaggctataacggtctcgctgaagtcggtaagaaattcgagaaagataccggaattaaagtcaccgttgagcatccggataaactggaagagaaattcccacaggttgcggcaactggcgatggccctgacattatcttctgggcacacgaccgctttggtggctacgctcaatctggcctgttggctgaaatcaccccggacaaagcgttccaggacaagctgtatccgtttacctgggatgccgtacgttacaacggcaagctgattgcttacccgatcgctgttgaagcgttatcgctgatttataacaaagatctgctgccgaacccgccaaaaacctgggaagagatcccggcgctggataaagaactgaaagcgaaaggtaagagcgcgctgatgttcaacctgcaagaaccgtacttcacctggccgctgattgctgctgacgggggttatgcgttcaagtatgaaaacggcaagtacgacattaaagacgtgggcgtggataacgctggcgcgaaagcgggtctgaccttcctggttgacctgattaaaaacaaacacatgaatgcagacaccgattactccatcgcagaagctgcctttaataaaggcgaaacagcgatgaccatcaacggcccgtgggcatggtccaacatcgacaccagcaaagtgaattatggtgtaacggtactgccgaccttcaagggtcaaccatccaaaccgttcgttggcgtgctgagcgcaggtattaacgccgccagtccgaacaaagagctggcgaaagagttcctcgaaaactatctgctgactgatgaaggtctggaagcggttaataaagacaaaccgctgggtgccgtagcgctgaagtcttacgaggaagagttggcgaaagatccacgtattgccgccaccatggaaaacgcccagaaaggtgaaatcatgccgaacatcccgcagatgtccgctttctggtatgccgtgcgtactgcggtgatcaacgccgccagcggtcgtcagactgtcgatgaagccctgaaagacgcgcagactggtggttctggtgagaacctgtactttcaaagctcagataatgggcctcaaaaccagcgcaacgctccacgtataaccttcggtggcccgtctgactccacaggcagcaaccagaatggtgagcgtagtggagccaggtctaagcagcgccgtccccagggtctgccgaacaacacggcgagctggtttactgcgcttacccaacacggtaaagaagacttaaaattcccgcgtggccagggcgtcccgatcaacactaactcttccccggatgatcagattggttattaccgcagagcaactcgtcggattcgcggcggcgacggtaaaatgaaagatttgtctccgcgttggtacttttactatctcggcaccggtccggaagctggactgccctacggggcaaacaaggacgggatcatttgggtggctaccgaaggtgccctgaatactccaaaagatcatatcggcacccgtaaccctgctaataacgctgcgatcgttctgcaactgcctcagggtacaactctgccaaaaggcttctatgcagaagggtcgcgtggtggcagccaggcgagtagccgtagcagcgagcgctctcgcaactcgtcccgtaactccactccgggctctgagcgcggcacggaaccggctcgtatggcaggtaacggtggtgacgctgctctggcgctgctactgctggacaggctgaaccagctggagtcgaagatgagtggtaaaggccaacagcagcagggccagaccgttaccaaaaagagcgcagctgaagcatctaaaaaaccgcgacagaaacgtaccgcgactaaagcgtacaatgtaacacaggccttcggtcgtcgaggtccggagcaaactcaaggaaactttggcgatcaggaattaatccgccaggggaccgactacaaacactggccgcaaattgcccagttcgccccatccgctagtgcattcttcggtatgagccgcatcggcatggaagtaacgccaagtggtacgtggctgacctacaccggtgctatcaagcttgatgacaaggacccgaactttaaagaccaggttattctgcttaacaaacatattgatgcctataaaactttcccgccgaccgaacccaaaaaggacaaaaagaaaaaagctgatgaaacccaggctctaccgcagcgtcagaaaaaacagcaaactgtgactctgctgccagctgcggacctggatgatttttccaagcagctgcaacagtctatgagctctgcggactctacgcaggctggtggttctggtcaccatcatcaccatcattaa

SEQ ID NO: 2954 - DNA, 2421 bp, Artificial Sequence
  Description of Artificial Sequence: Synthetic polynucleotide
atgaaaatcgaagaaggtaaactggtaatctggattaacggcgataaaggctataacggtctcgctgaagtcggtaagaaattcgagaaagataccggaattaaagtcaccgttgagcatccggataaactggaagagaaattcccacaggttgcggcaactggcgatggccctgacattatcttctgggcacacgaccgctttggtggctacgctcaatctggcctgttggctgaaatcaccccggacaaagcgttccaggacaagctgtatccgtttacctgggatgccgtacgttacaacggcaagctgattgcttacccgatcgctgttgaagcgttatcgctgatttataacaaagatctgctgccgaacccgccaaaaacctgggaagagatcccggcgctggataaagaactgaaagcgaaaggtaagagcgcgctgatgttcaacctgcaagaaccgtacttcacctggccgctgattgctgctgacgggggttatgcgttcaagtatgaaaacggcaagtacgacattaaagacgtgggcgtggataacgctggcgcgaaagcgggtctgaccttcctggttgacctgattaaaaacaaacacatgaatgcagacaccgattactccatcgcagaagctgcctttaataaaggcgaaacagcgatgaccatcaacggcccgtgggcatggtccaacatcgacaccagcaaagtgaattatggtgtaacggtactgccgaccttcaagggtcaaccatccaaaccgttcgttggcgtgctgagcgcaggtattaacgccgccagtccgaacaaagagctggcgaaagagttcctcgaaaactatctgctgactgatgaaggtctggaagcggttaataaagacaaaccgctgggtgccgtagcgctgaagtcttacgaggaagagttggcgaaagatccacgtattgccgccaccatggaaaacgcccagaaaggtgaaatcatgccgaacatcccgcagatgtccgctttctggtatgccgtgcgtactgcggtgatcaacgccgccagcggtcgtcagactgtcgatgaagccctgaaagacgcgcagactggtggttctggtgagaacctgtactttcaaagctcagataatgggcctcaaaaccagcgcaacgctccacgtataaccttcggtggcccgtctgactccacaggcagcaaccagaatggtgagcgtagtggagccaggtctaagcagcgccgtccccagggtctgccgaacaacacggcgagctggtttactgcgcttacccaacacggtaaagaagacttaaaattcccgcgtggccagggcgtcccgatcaacactaactcttccccggatgatcagattggttattaccgcagagcaactcgtcggattcgcggcggcgacggtaaaatgaaagatttgtctccgcgttggtacttttactatctcggcaccggtccggaagctggactgccctacggggcaaacaaggacgggatcatttgggtggctaccgaaggtgccctgaatactccaaaagatcatatcggcacccgtaaccctgctaataacgctgcgatcgttctgcaactgcctcagggtacaactctgccaaaaggcttctatgcagaagggtcgcgtggtggcagccaggcgagtagccgtagcagctcccgctctcgcaactcgtcccgtaactccactccgggctcttctcgcggcacgtccccggctcgtatggcaggtaacggtggtgacgctgctctggcgctgctactgctggacaggctgaaccagctggagtcgaagatgagtggtaaaggccaacagcagcagggccagaccgttaccaaaaagagcgcagctgaagcatctaaaaaaccgcgacagaaacgtaccgcgactaaagcgtacaatgtaacacaggccttcggtcgtcgaggtccggagcaaactcaaggaaactttggcgatcaggaattaatccgccaggggaccgactacaaacactggccgcaaattgcccagttcgccccatccgctagtgcattcttcggtatgagccgcatcggcatggaagtaacgccaagtggtacgtggctgacctacaccggtgctatcaagcttgatgacacggacccgaactttaaagaccaggttattctgcttaacaaacatattgatgcctataaaactttcccgccgaccgaacccaaaaaggacaaaaagaaaaaagctgatgaaacccaggctctaccgcagcgtcagaaaaaacagcaaactgtgactctgctgccagctgcggacctggatgatttttccaagcagctgcaacagtctatgagctctgcggactctacgcaggctggtggttctggtcaccatcatcaccatcattaa

SEQ ID NO: 2955 - DNA, 2421 bp, Artificial Sequence
  Description of Artificial Sequence: Synthetic polynucleotide
atgaaaatcgaagaaggtaaactggtaatctggattaacggcgataaaggctataacggtctcgctgaagtcggtaagaaattcgagaaagataccggaattaaagtcaccgttgagcatccggataaactggaagagaaattcccacaggttgcggcaactggcgatggccctgacattatcttctgggcacacgaccgctttggtggctacgctcaatctggcctgttggctgaaatcaccccggacaaagcgttccaggacaagctgtatccgtttacctgggatgccgtacgttacaacggcaagctgattgcttacccgatcgctgttgaagcgttatcgctgatttataacaaagatctgctgccgaacccgccaaaaacctgggaagagatcccggcgctggataaagaactgaaagcgaaaggtaagagcgcgctgatgttcaacctgcaagaaccgtacttcacctggccgctgattgctgctgacgggggttatgcgttcaagtatgaaaacggcaagtacgacattaaagacgtgggcgtggataacgctggcgcgaaagcgggtctgaccttcctggttgacctgattaaaaacaaacacatgaatgcagacaccgattactccatcgcagaagctgcctttaataaaggcgaaacagcgatgaccatcaacggcccgtgggcatggtccaacatcgacaccagcaaagtgaattatggtgtaacggtactgccgaccttcaagggtcaaccatccaaaccgttcgttggcgtgctgagcgcaggtattaacgccgccagtccgaacaaagagctggcgaaagagttcctcgaaaactatctgctgactgatgaaggtctggaagcggttaataaagacaaaccgctgggtgccgtagcgctgaagtcttacgaggaagagttggcgaaagatccacgtattgccgccaccatggaaaacgcccagaaaggtgaaatcatgccgaacatcccgcagatgtccgctttctggtatgccgtgcgtactgcggtgatcaacgccgccagcggtcgtcagactgtcgatgaagccctgaaagacgcgcagactggtggttctggtgagaacctgtactttcaaagctcagataatgggcctcaaaaccagcgcaacgctccacgtataaccttcggtggcccgtctgactccacaggcagcaaccagaatggtgagcgtagtggagccaggtctaagcagcgccgtccccagggtctgccgaacaacacggcgagctggtttactgcgcttacccaacacggtaaagaagacttaaaattcccgcgtggccagggcgtcccgatcaacactaactcttccccggatgatcagattggttattaccgcagagcaactcgtcggattcgcggcggcgacggtaaaatgaaagatttgtctccgcgttggtacttttactatctcggcaccggtccggaagctggactgccctacggggcaaacaaggacgggatcatttgggtggctaccgaaggtgccctgaatactccaaaagatcatatcggcacccgtaaccctgctaataacgctgcgatcgttctgcaactgcctcagggtacaactctgccaaaaggcttctatgcagaagggtcgcgtggtggcagccaggcgagtagccgtagcagctcccgctctcgcaactcgtcccgtaactccactccgggctcttctcgcggcacgtccccggctcgtatggcaggtaacggtggtgacgctgctctggcgctgctactgctggacaggctgaaccagctggagtcgaagatgagtggtaaaggccaacagcagcagggccagaccgttaccaaaaagagcgcagctgaagcatctaaaaaaccgcgacagaaacgtaccgcgactaaagcgtacaatgtaacacaggccttcggtcgtcgaggtccggagcaaactcaaggaaactttggcgatcaggaattaatccgccaggggaccgactacaaacactggccgcaaattgcccagttcgccccatccacgagtgcattcttcggtatgagccgcatcggcatggaagtaacgccaagtggtacgtggctgacctacaccggtgctatcaagcttgatgacaaggacccgaactttaaagaccaggttattctgcttaacaaacatattgatgcctataaaactttcccgccgaccgaacccaaaaaggacaaaaagaaaaaagctgatgaaacccaggctctaccgcagcgtcagaaaaaacagcaaactgtgactctgctgccagctgcggacctggatgatttttccaagcagctgcaacagtctatgagctctgcggactctacgcaggctggtggttctggtcaccatcatcaccatcattaa

SEQ ID NO: 2956 - DNA, 2421 bp, Artificial Sequence
  Description of Artificial Sequence: Synthetic polynucleotide
atgaaaatcgaagaaggtaaactggtaatctggattaacggcgataaaggctataacggtctcgctgaagtcggtaagaaattcgagaaagataccggaattaaagtcaccgttgagcatccggataaactggaagagaaattcccacaggttgcggcaactggcgatggccctgacattatcttctgggcacacgaccgctttggtggctacgctcaatctggcctgttggctgaaatcaccccggacaaagcgttccaggacaagctgtatccgtttacctgggatgccgtacgttacaacggcaagctgattgcttacccgatcgctgttgaagcgttatcgctgatttataacaaagatctgctgccgaacccgccaaaaacctgggaagagatcccggcgctggataaagaactgaaagcgaaaggtaagagcgcgctgatgttcaacctgcaagaaccgtacttcacctggccgctgattgctgctgacgggggttatgcgttcaagtatgaaaacggcaagtacgacattaaagacgtgggcgtggataacgctggcgcgaaagcgggtctgaccttcctggttgacctgattaaaaacaaacacatgaatgcagacaccgattactccatcgcagaagctgcctttaataaaggcgaaacagcgatgaccatcaacggcccgtgggcatggtccaacatcgacaccagcaaagtgaattatggtgtaacggtactgccgaccttcaagggtcaaccatccaaaccgttcgttggcgtgctgagcgcaggtattaacgccgccagtccgaacaaagagctggcgaaagagttcctcgaaaactatctgctgactgatgaaggtctggaagcggttaataaagacaaaccgctgggtgccgtagcgctgaagtcttacgaggaagagttggcgaaagatccacgtattgccgccaccatggaaaacgcccagaaaggtgaaatcatgccgaacatcccgcagatgtccgctttctggtatgccgtgcgtactgcggtgatcaacgccgccagcggtcgtcagactgtcgatgaagccctgaaagacgcgcagactggtggttctggtgagaacctgtactttcaaagctcagataatgggcctcaaaaccagcgcaacgctccacgtataaccttcggtggcccgtctgactccacaggcagcaaccagaatggtgagcgtagtggagccaggtctaagcagcgccgtccccagggtctgccgaacaacacggcgagctggtttactgcgcttacccaacacggtaaagaagacttaaaattcccgcgtggccagggcgtcccgatcaacactaactcttccccggatgatcagattggttattaccgcagagcaactcgtcggattcgcggcggcgacggtaaaatgaaagatttgtctccgcgttggtacttttactatctcggcaccggtccggaagctggactgccctacggggcaaacaaggacgggatcatttgggtggctaccgaaggtgccctgaatactccaaaagatcatatcggcacccgtaaccctgctaataacgctgcgatcgttctgcaactgcctcagggtacaactctgccaaaaggcttctatgcagaagggtcgcgtggtggcagccaggcgagtagccgtagcagctcccgctctcgcaactcgtcccgtaactccactccgggctcttctcgcggcacgtccccggctcgtatggcaggtaacggtggtgacgctgctctggcgctgctactgctggacaggctgaaccagctggagtcgaagatgagtggtaaaggccaacagcagcagggccagaccgttaccaaaaagagcgcagctgaagcatctaaaaaaccgcgacagaaacgtaccgcgactaaagcgtacaatgtaacacaggccttcggtacgcgaggtccggagcaaactcaaggaaactttggcgatcaggaattaatccgccaggggaccgactacaaacactggccgcaaattgcccagttcgccccatccgctagtgcattcttcggtatgagccgcatcggcatggaagtaacgccaagtggtacgtggctgacctacaccggtgctatcaagcttgatgacaaggacccgaactttaaagaccaggttattctgcttaacaaacatattgatgcctataaaactttcccgccgaccgaacccaaaaaggacaaaaagaaaaaagctgatgaaacccaggctctaccgcagcgtcagaaaaaacagcaaactgtgactctgctgccagctgcggacctggatgatttttccaagcagctgcaacagtctatgagctctgcggactctacgcaggctggtggttctggtcaccatcatcaccatcattaa

SEQ ID NO: 2957 - DNA, 2421 bp, Artificial Sequence
  Description of Artificial Sequence: Synthetic polynucleotide
atgaaaatcgaagaaggtaaactggtaatctggattaacggcgataaaggctataacggtctcgctgaagtcggtaagaaattcgagaaagataccggaattaaagtcaccgttgagcatccggataaactggaagagaaattcccacaggttgcggcaactggcgatggccctgacattatcttctgggcacacgaccgctttggtggctacgctcaatctggcctgttggctgaaatcaccccggacaaagcgttccaggacaagctgtatccgtttacctgggatgccgtacgttacaacggcaagctgattgcttacccgatcgctgttgaagcgttatcgctgatttataacaaagatctgctgccgaacccgccaaaaacctgggaagagatcccggcgctggataaagaactgaaagcgaaaggtaagagcgcgctgatgttcaacctgcaagaaccgtacttcacctggccgctgattgctgctgacgggggttatgcgttcaagtatgaaaacggcaagtacgacattaaagacgtgggcgtggataacgctggcgcgaaagcgggtctgaccttcctggttgacctgattaaaaacaaacacatgaatgcagacaccgattactccatcgcagaagctgcctttaataaaggcgaaacagcgatgaccatcaacggcccgtgggcatggtccaacatcgacaccagcaaagtgaattatggtgtaacggtactgccgaccttcaagggtcaaccatccaaaccgttcgttggcgtgctgagcgcaggtattaacgccgccagtccgaacaaagagctggcgaaagagttcctcgaaaactatctgctgactgatgaaggtctggaagcggttaataaagacaaaccgctgggtgccgtagcgctgaagtcttacgaggaagagttggcgaaagatccacgtattgccgccaccatggaaaacgcccagaaaggtgaaatcatgccgaacatcccgcagatgtccgctttctggtatgccgtgcgtactgcggtgatcaacgccgccagcggtcgtcagactgtcgatgaagccctgaaagacgcgcagactggtggttctggtgagaacctgtactttcaaagctcagataatgggcctcaaaaccagcgcaacgctccacgtataaccttcggtggcccgtctgactccacaggcagcaaccagaatggtgagcgtagtggagccaggtctaagcagcgccgtccccagggtctgccgaacaacacggcgagctggtttactgcgcttacccaacacggtaaagaagacttaaaattcccgcgtggccagggcgtcccgatcaacactaactcttccccggatgatcagattggttattaccgcagagcaactcgtcggattcgcggcggcgacggtaaaatgaaagatttgtctccgcgttggtacttttactatctcggcaccggtccggaagctggactgccctacggggcaaacaaggacgggatcatttgggtggctaccgaaggtgccctgaatactccaaaagatcatatcggcacccgtaaccctgctaataacgctgcgatcggcctgcaactgcctcagggtacaactctgccaaaaggcttctatgcagaagggtcgcgtggtggcagccaggcgagtagccgtagcagctcccgctctcgcaactcgtcccgtaactccactccgggctcttctcgcggcacgtccccggctcgtatggcaggtaacggtggtgacgctgctctggcgctgctactgctggacaggctgaaccagctggagtcgaagatgagtggtaaaggccaacagcagcagggccagaccgttaccaaaaagagcgcagctgaagcatctaaaaaaccgcgacagaaacgtaccgcgactaaagcgtacaatgtaacacaggccttcggtcgtcgaggtccggagcaaactcaaggaaactttggcgatcaggaattaatccgccaggggaccgactacaaacactggccgcaaattgcccagttcgccccatccgctagtgcattcttcggtatgagccgcatcggcatggaagtaacgccaagtggtacgtggctgacctacaccggtgctatcaagcttgatgacaaggacccgaactttaaagaccaggttattctgcttaacaaacatattgatgcctataaaactttcccgccgaccgaacccaaaaaggacaaaaagaaaaaagctgatgaaacccaggctctaccgcagcgtcagaaaaaacagcaaactgtgactctgctgccagctgcggacctggatgatttttccaagcagctgcaacagtctatgagctctgcggactctacgcaggctggtggttctggtcaccatcatcaccatcattaa

SEQ ID NO: 2958 - DNA, 2421 bp, Artificial Sequence
  Description of Artificial Sequence: Synthetic polynucleotide
atgaaaatcgaagaaggtaaactggtaatctggattaacggcgataaaggctataacggtctcgctgaagtcggtaagaaattcgagaaagataccggaattaaagtcaccgttgagcatccggataaactggaagagaaattcccacaggttgcggcaactggcgatggccctgacattatcttctgggcacacgaccgctttggtggctacgctcaatctggcctgttggctgaaatcaccccggacaaagcgttccaggacaagctgtatccgtttacctgggatgccgtacgttacaacggcaagctgattgcttacccgatcgctgttgaagcgttatcgctgatttataacaaagatctgctgccgaacccgccaaaaacctgggaagagatcccggcgctggataaagaactgaaagcgaaaggtaagagcgcgctgatgttcaacctgcaagaaccgtacttcacctggccgctgattgctgctgacgggggttatgcgttcaagtatgaaaacggcaagtacgacattaaagacgtgggcgtggataacgctggcgcgaaagcgggtctgaccttcctggttgacctgattaaaaacaaacacatgaatgcagacaccgattactccatcgcagaagctgcctttaataaaggcgaaacagcgatgaccatcaacggcccgtgggcatggtccaacatcgacaccagcaaagtgaattatggtgtaacggtactgccgaccttcaagggtcaaccatccaaaccgttcgttggcgtgctgagcgcaggtattaacgccgccagtccgaacaaagagctggcgaaagagttcctcgaaaactatctgctgactgatgaaggtctggaagcggttaataaagacaaaccgctgggtgccgtagcgctgaagtcttacgaggaagagttggcgaaagatccacgtattgccgccaccatggaaaacgcccagaaaggtgaaatcatgccgaacatcccgcagatgtccgctttctggtatgccgtgcgtactgcggtgatcaacgccgccagcggtcgtcagactgtcgatgaagccctgaaagacgcgcagactggtggttctggtgagaacctgtactttcaaagctcagataatgggcctcaaaaccagcgcaacgctccacgtataaccttcggtggcccgtctgactccacaggcagcaaccagaatggtgagcgtagtggagccaggtctaagcagcgccgtccccagggtctgccgaacaacacggcgagctggtttactgcgcttacccaacacggtaaagaagacttaaaattcccgcgtggccagggcgtcccgatcaacactaactcttccccggatgatcagattggttattaccgcagagcaactcgtcggattcgcggcggcgacggtaaaatgaaagatttgtctccgcgttggtacttttactatctcggcaccggtccggaagctggactgccctacggggcaaacaaggacgggatcatttgggtggctaccgaaggtgccctgaatactccaaaagatcatatcggcacccgtaaccctgctaataacgctgcgatcgttctgcaactgcctcagggtacaactctgccaaaaggcttctatgcagaagggtcgcgtggtggcagccaggcgagtagccgtagcagctcccgctctcgcaactcgtcccgtaactccactccgggctcttctcgcggcacgtccccggctcgtatggcaggtaacggtggtgacgctgctctggcgctgctactgctggacaggctgaaccagctggagtcgaagatgagtggtaaaggccaacagcagcagggccagaccgttaccaaaaagagcgcagctgaagcatctaaaaaaccgcgacagaaacgtaccgcgactaaagcgtacaatgtaacacaggccttcggtcgtcgaggtccggagcaaactcaaggaaactttggcgatcagaagttaatccgccaggggaccgactacaaacactggccgcaaattgcccagttcgccccatccgctagtgcattcttcggtatgagccgcatcggcatggaagtaacgccaagtggtacgtggctgacctacaccggtgctatcaagcttgatgacaaggacccgaactttaaagaccaggttattctgcttaacaaacatattgatgcctataaaactttcccgccgaccgaacccaaaaaggacaaaaagaaaaaagctgatgaaacccaggctctaccgcagcgtcagaaaaaacagcaaactgtgactctgctgccagctgcggacctggatgatttttccaagcagctgcaacagtctatgagctctgcggactctacgcaggctggtggttctggtcaccatcatcaccatcattaa

SEQ ID NO: 2959 - DNA, 2421 bp, Artificial Sequence
  Description of Artificial Sequence: Synthetic polynucleotide
atgaaaatcgaagaaggtaaactggtaatctggattaacggcgataaaggctataacggtctcgctgaagtcggtaagaaattcgagaaagataccggaattaaagtcaccgttgagcatccggataaactggaagagaaattcccacaggttgcggcaactggcgatggccctgacattatcttctgggcacacgaccgctttggtggctacgctcaatctggcctgttggctgaaatcaccccggacaaagcgttccaggacaagctgtatccgtttacctgggatgccgtacgttacaacggcaagctgattgcttacccgatcgctgttgaagcgttatcgctgatttataacaaagatctgctgccgaacccgccaaaaacctgggaagagatcccggcgctggataaagaactgaaagcgaaaggtaagagcgcgctgatgttcaacctgcaagaaccgtacttcacctggccgctgattgctgctgacgggggttatgcgttcaagtatgaaaacggcaagtacgacattaaagacgtgggcgtggataacgctggcgcgaaagcgggtctgaccttcctggttgacctgattaaaaacaaacacatgaatgcagacaccgattactccatcgcagaagctgcctttaataaaggcgaaacagcgatgaccatcaacggcccgtgggcatggtccaacatcgacaccagcaaagtgaattatggtgtaacggtactgccgaccttcaagggtcaaccatccaaaccgttcgttggcgtgctgagcgcaggtattaacgccgccagtccgaacaaagagctggcgaaagagttcctcgaaaactatctgctgactgatgaaggtctggaagcggttaataaagacaaaccgctgggtgccgtagcgctgaagtcttacgaggaagagttggcgaaagatccacgtattgccgccaccatggaaaacgcccagaaaggtgaaatcatgccgaacatcccgcagatgtccgctttctggtatgccgtgcgtactgcggtgatcaacgccgccagcggtcgtcagactgtcgatgaagccctgaaagacgcgcagactggtggttctggtgagaacctgtactttcaaagctcagataatgggcctcaaaaccagcgcaacgctccacgtataaccttcggtggcccgtctgactccacaggcagcaaccagaatggtgagcgtagtggagccaggtctaagcagcgccgtccccagggtctgccgaacaacacggcgagctggtttactccgcttacccaaaatggtaaagaagacttaaaattcccgcccggccagggcgtcccgatcaacactaactcttccccggatgatcagattggttattaccgcagagcaactcgtcggattcgcggcggcgacggtaaaatgaaagatttgcctccgaagtggtacttttactatctcggcaccggtccgcacgctgatctgccctacgggcaaaaacatccaggggtattttgggtggctcgaccaggtgccctgaatactccaaaagatcatatcggcacccgtaaccctgctaataacgctgcgatccctctgcaactgcctccgggtacaaaactgccaaaaggcttctatgcagaagggtcgcgtggtggcagccaggcgagtagccgtagcagctcccgctctcgcaactcgtcccgtaactccactccgggctcttctcgcggcacgtccccggctcgtatggcaggtaacggtggtgacgctgctctggcgctgctactgctggacaggctgaaccagctggagtcgaagatgagtggtaaaggccaacagcagcagggccagaccgttaccaaaaagagcgcagctgaagcatctaaaaaaccgcgacagaaacgtaccgcgactaaagcgtacaatgtaacacaggccttcggtcgtcgaggtccggagcaaactcaaggaaactttggcgatcaggaattaatccgccaggggaccgactacaaacactggccgcaaattgcccagttcgccccatccgctagtgcattcttcggtatgagccgcatcggcatggaagtaacgccaagtggtacgtggctgacctacaccggtgctatcaagcttgatgacaaggacccgaactttaaagaccaggttattctgcttaacaaacatattgatgcctataaaactttcccgccgaccgaacccaaaaaggacaaaaagaaaaaagctgatgaaacccaggctctaccgcagcgtcagaaaaaacagcaaactgtgactctgctgccagctgcggacctggatgatttttccaagcagctgcaacagtctatgagctctgcggactctacgcaggctggtggttctggtcaccatcatcaccatcattaa

SEQ ID NO: 2960 - DNA, 2421 bp, Artificial Sequence
  Description of Artificial Sequence: Synthetic polynucleotide
atgaaaatcgaagaaggtaaactggtaatctggattaacggcgataaaggctataacggtctcgctgaagtcggtaagaaattcgagaaagataccggaattaaagtcaccgttgagcatccggataaactggaagagaaattcccacaggttgcggcaactggcgatggccctgacattatcttctgggcacacgaccgctttggtggctacgctcaatctggcctgttggctgaaatcaccccggacaaagcgttccaggacaagctgtatccgtttacctgggatgccgtacgttacaacggcaagctgattgcttacccgatcgctgttgaagcgttatcgctgatttataacaaagatctgctgccgaacccgccaaaaacctgggaagagatcccggcgctggataaagaactgaaagcgaaaggtaagagcgcgctgatgttcaacctgcaagaaccgtacttcacctggccgctgattgctgctgacgggggttatgcgttcaagtatgaaaacggcaagtacgacattaaagacgtgggcgtggataacgctggcgcgaaagcgggtctgaccttcctggttgacctgattaaaaacaaacacatgaatgcagacaccgattactccatcgcagaagctgcctttaataaaggcgaaacagcgatgaccatcaacggcccgtgggcatggtccaacatcgacaccagcaaagtgaattatggtgtaacggtactgccgaccttcaagggtcaaccatccaaaccgttcgttggcgtgctgagcgcaggtattaacgccgccagtccgaacaaagagctggcgaaagagttcctcgaaaactatctgctgactgatgaaggtctggaagcggttaataaagacaaaccgctgggtgccgtagcgctgaagtcttacgaggaagagttggcgaaagatccacgtattgccgccaccatggaaaacgcccagaaaggtgaaatcatgccgaacatcccgcagatgtccgctttctggtatgccgtgcgtactgcggtgatcaacgccgccagcggtcgtcagactgtcgatgaagccctgaaagacgcgcagactggtggttctggtgagaacctgtactttcaaagctcagataatgggcctcaaaaccagcgcaacgctccacgtataaccttcggtggcccgtctgactccacaggcagcaaccagaatggtgagcgtagtggagccaggtctaagcagcgccgtccccagggtctgccgaacaacacggcgagctggtttactgcgcttacccaacacggtaaagaagacttaaaattcccgcgtggccagggcgtcccgatcaacactaactcttccccggatgatcagattggttattaccgcagagcaactcgtcggattcgcggcggcgacggtaaaatgaaagatttgtctccgcgttggtacttttactatctcggcaccggtccggaagctggactgccctacggggcaaacaaggacgggatcatttgggtggctaccgaaggtgccctgaatactccaaaagatcatatcggcacccgtaaccctgctaataacgctgcgatcgttctgcaactgcctcagggtacaactctgccaaaaggcttctatgcagaagggtcgcgtggtggcagccaggcgagtagccgtagcagctcccgctctcgcaactcgtcccgtaactccactccgggctcttctcgcggcacgtccccggctcgtatggcaggtaacggtggtgacgctgctctggcgctgctactgctggacaggctgaaccagctggagtcgaagatgagtggtaaaggccaacagcagcagggccagaccgttaccaaaaagagcgcagctgaagcatctaaaaaaccgcgacagaaacgtaccgcgactaaagcgtacaatgtaacacaggccttcggtcgtcgaggtccggagcaaactcaaggaaactttggcgatcaggaattaatccgccaggggaccgactacaaacactggccgcaaattgcccagttcgccccatccgctagtgcattcttcggtatgagccgcatcggcatggaagtaacgccaagtggtacgtggctgacctacaccggtgctatcaagcttgatgacaaggacccgaactttaaaaatcaggttattctgcttaacaaacatattgatgcctataaaactttcccgccgaccgaacccaaaaaggacaaaaagaaaaaagctgatgaaacccaggctctaccgcagcgtcagaaaaaacagcaaactgtgactctgctgccagctgcggacctggatgatttttccaagcagctgcaacagtctatgagctctgcggactctacgcaggctggtggttctggtcaccatcatcaccatcattaa

SEQ ID NO: 2961 - DNA, 2421 bp, Artificial Sequence
  Description of Artificial Sequence: Synthetic polynucleotide
atgaaaatcgaagaaggtaaactggtaatctggattaacggcgataaaggctataacggtctcgctgaagtcggtaagaaattcgagaaagataccggaattaaagtcaccgttgagcatccggataaactggaagagaaattcccacaggttgcggcaactggcgatggccctgacattatcttctgggcacacgaccgctttggtggctacgctcaatctggcctgttggctgaaatcaccccggacaaagcgttccaggacaagctgtatccgtttacctgggatgccgtacgttacaacggcaagctgattgcttacccgatcgctgttgaagcgttatcgctgatttataacaaagatctgctgccgaacccgccaaaaacctgggaagagatcccggcgctggataaagaactgaaagcgaaaggtaagagcgcgctgatgttcaacctgcaagaaccgtacttcacctggccgctgattgctgctgacgggggttatgcgttcaagtatgaaaacggcaagtacgacattaaagacgtgggcgtggataacgctggcgcgaaagcgggtctgaccttcctggttgacctgattaaaaacaaacacatgaatgcagacaccgattactccatcgcagaagctgcctttaataaaggcgaaacagcgatgaccatcaacggcccgtgggcatggtccaacatcgacaccagcaaagtgaattatggtgtaacggtactgccgaccttcaagggtcaaccatccaaaccgttcgttggcgtgctgagcgcaggtattaacgccgccagtccgaacaaagagctggcgaaagagttcctcgaaaactatctgctgactgatgaaggtctggaagcggttaataaagacaaaccgctgggtgccgtagcgctgaagtcttacgaggaagagttggcgaaagatccacgtattgccgccaccatggaaaacgcccagaaaggtgaaatcatgccgaacatcccgcagatgtccgctttctggtatgccgtgcgtactgcggtgatcaacgccgccagcggtcgtcagactgtcgatgaagccctgaaagacgcgcagactggtggttctggtgagaacctgtactttcaaagctcagataatgggcctcaaaaccagcgcaacgctccacgtataaccttcggtggcccgtctgactccacaggcagcaaccagaatggtgagcgtagtggagccaggtctaagcagcgccgtccccagggtctgccgaacaacacggcgagctggtttactgcgcttacccaacacggtaaagaagacttaaaattcccgcgtggccagggcgtcccgatcaacactaactcttccccggatgatcagattggttattaccgcagagcaactcgtcggattcgcggcggcgacggtaaaatgaaagatttgtctccgcgttggtacttttactatctcggcaccggtccggaagctggactgccctacggggcaaacaaggacgggatcatttgggtggctaccgaaggtgccctgaatactccaaaagatcatatcggcacccgtaaccctgctaataacgctgcgatcgttctgcaactgcctcagggtacaactctgccaaaaggcttctatgcagaagggtcgcgtggtggcagccaggcgagtagccgtagcagctcccgctctcgcaactcgtcccgtaactccactccgggctcttctcgcggcacgtccccggctcgtatggcaggtaacggtggtgacgctgctctggcgctgctactgctggacaggctgaaccagctggagtcgaagatgagtggtaaaggccaacagcagcagggccagaccgttaccaaaaagagcgcagctgaagcatctaaaaaaccgcgacagaaacgtaccgcgactaaagcgtacaatgtaacacaggccttcggtcgtcgaggtccggagcaaactcaaggaaactttggcgatcaggaattaatccgccaggggaccgactacaaacactggccgcaaattgcccagttcgccccatccgctagtgcattcttcggtatgagccgcatcggcatggaagtaacgccaagtggtacgtggctgacctacaccggtgctatcaagcttgatgacaaggacccgaactttaaaaaacaggttattctgcttaacaaacatattgatgcctataaaactttcccgccgaccgaacccaaaaaggacaaaaagaaaaaagctgatgaaacccaggctctaccgcagcgtcagaaaaaacagcaaactgtgactctgctgccagctgcggacctggatgatttttccaagcagctgcaacagtctatgagctctgcggactctacgcaggctggtggttctggtcaccatcatcaccatcattaa

SEQ ID NO: 2962 - DNA, 2421 bp, Artificial Sequence
  Description of Artificial Sequence: Synthetic polynucleotide
atgaaaatcgaagaaggtaaactggtaatctggattaacggcgataaaggctataacggtctcgctgaagtcggtaagaaattcgagaaagataccggaattaaagtcaccgttgagcatccggataaactggaagagaaattcccacaggttgcggcaactggcgatggccctgacattatcttctgggcacacgaccgctttggtggctacgctcaatctggcctgttggctgaaatcaccccggacaaagcgttccaggacaagctgtatccgtttacctgggatgccgtacgttacaacggcaagctgattgcttacccgatcgctgttgaagcgttatcgctgatttataacaaagatctgctgccgaacccgccaaaaacctgggaagagatcccggcgctggataaagaactgaaagcgaaaggtaagagcgcgctgatgttcaacctgcaagaaccgtacttcacctggccgctgattgctgctgacgggggttatgcgttcaagtatgaaaacggcaagtacgacattaaagacgtgggcgtggataacgctggcgcgaaagcgggtctgaccttcctggttgacctgattaaaaacaaacacatgaatgcagacaccgattactccatcgcagaagctgcctttaataaaggcgaaacagcgatgaccatcaacggcccgtgggcatggtccaacatcgacaccagcaaagtgaattatggtgtaacggtactgccgaccttcaagggtcaaccatccaaaccgttcgttggcgtgctgagcgcaggtattaacgccgccagtccgaacaaagagctggcgaaagagttcctcgaaaactatctgctgactgatgaaggtctggaagcggttaataaagacaaaccgctgggtgccgtagcgctgaagtcttacgaggaagagttggcgaaagatccacgtattgccgccaccatggaaaacgcccagaaaggtgaaatcatgccgaacatcccgcagatgtccgctttctggtatgccgtgcgtactgcggtgatcaacgccgccagcggtcgtcagactgtcgatgaagccctgaaagacgcgcagactggtggttctggtgagaacctgtactttcaaagctcagataatgggcctcaaaaccagcgcaacgctccacgtataaccttcggtggcccgtctgactccacaggcagcaaccagaatggtgagcgtagtggagccaggtctaagcagcgccgtccccagggtctgccgaacaacacggcgagctggtttactgcgcttacccaacacggtaaagaagacttaaaattcccggcaggccagggcgtcccgatcaacactaactcttccccggatgatcagattggttattaccgcagagcaactcgtcggattcgcggcggcgacggtaaaatgaaagatttgtctccgcgttggtacttttactatctcggcaccggtccggaagctggactgccctacggggcaaacaaggacgggatcatttgggtggctaccgaaggtgccctgaatactccaaaagatcatatcggcacccgtaaccctgctaataacgctgcgatcgttctgcaactgcctcagggtacaactctgccaaaaggcttctatgcagaagggtcgcgtggtggcagccaggcgagtagccgtagcagctcccgctctcgcaactcgtcccgtaactccactccgggctcttctcgcggcacgtccccggctcgtatggcaggtaacggtggtgacgctgctctggcgctgctactgctggacaggctgaaccagctggagtcgaagatgagtggtaaaggccaacagcagcagggccagaccgttaccaaaaagagcgcagctgaagcatctaaaaaaccgcgacagaaacgtaccgcgactaaagcgtacaatgtaacacaggccttcggtcgtcgaggtccggagcaaactcaaggaaactttggcgatcaggaattaatccgccaggggaccgactacaaacactggccgcaaattgcccagttcgccccatccgctagtgcattcttcggtatgagccgcatcggcatggaagtaacgccaagtggtacgtggctgacctacaccggtgctatcaagcttgatgacaaggacccgaactttaaagaccaggttattctgcttaacaaacatattgatgcctataaaactttcccgccgaccgaacccaaaaaggacaaaaagaaaaaagctgatgaaacccaggctctaccgcagcgtcagaaaaaacagcaaactgtgactctgctgccagctgcggacctggatgatttttccaagcagctgcaacagtctatgagctctgcggactctacgcaggctggtggttctggtcaccatcatcaccatcattaa

SEQ ID NO: 2963 - DNA, 2421 bp, Artificial Sequence
  Description of Artificial Sequence: Synthetic polynucleotide
atgaaaatcgaagaaggtaaactggtaatctggattaacggcgataaaggctataacggtctcgctgaagtcggtaagaaattcgagaaagataccggaattaaagtcaccgttgagcatccggataaactggaagagaaattcccacaggttgcggcaactggcgatggccctgacattatcttctgggcacacgaccgctttggtggctacgctcaatctggcctgttggctgaaatcaccccggacaaagcgttccaggacaagctgtatccgtttacctgggatgccgtacgttacaacggcaagctgattgcttacccgatcgctgttgaagcgttatcgctgatttataacaaagatctgctgccgaacccgccaaaaacctgggaagagatcccggcgctggataaagaactgaaagcgaaaggtaagagcgcgctgatgttcaacctgcaagaaccgtacttcacctggccgctgattgctgctgacgggggttatgcgttcaagtatgaaaacggcaagtacgacattaaagacgtgggcgtggataacgctggcgcgaaagcgggtctgaccttcctggttgacctgattaaaaacaaacacatgaatgcagacaccgattactccatcgcagaagctgcctttaataaaggcgaaacagcgatgaccatcaacggcccgtgggcatggtccaacatcgacaccagcaaagtgaattatggtgtaacggtactgccgaccttcaagggtcaaccatccaaaccgttcgttggcgtgctgagcgcaggtattaacgccgccagtccgaacaaagagctggcgaaagagttcctcgaaaactatctgctgactgatgaaggtctggaagcggttaataaagacaaaccgctgggtgccgtagcgctgaagtcttacgaggaagagttggcgaaagatccacgtattgccgccaccatggaaaacgcccagaaaggtgaaatcatgccgaacatcccgcagatgtccgctttctggtatgccgtgcgtactgcggtgatcaacgccgccagcggtcgtcagactgtcgatgaagccctgaaagacgcgcagactggtggttctggtgagaacctgtactttcaaagctcagataatgggcctcaaaaccagcgcaacgctccacgtataaccttcggtggcccgtctgactccacaggcagcaaccagaatggtgagcgtagtggagccaggtctaagcagcgccgtccccagggtctgccgaacaacacggcgagctggtttactgcgcttacccaacacggtaaagaagacttaaaattcccgcgtggccagggcgtcccgatcaacactaactcttccccgtcggatcagattggttattaccgcagagcaactcgtcggattcgcggcggcgacggtaaaatgaaagatttgtctccgcgttggtacttttactatctcggcaccggtccggaagctggactgccctacggggcaaacaaggacgggatcatttgggtggctaccgaaggtgccctgaatactccaaaagatcatatcggcacccgtaaccctgctaataacgctgcgatcgttctgcaactgcctcagggtacaactctgccaaaaggcttctatgcagaagggtcgcgtggtggcagccaggcgagtagccgtagcagctcccgctctcgcaactcgtcccgtaactccactccgggctcttctcgcggcacgtccccggctcgtatggcaggtaacggtggtgacgctgctctggcgctgctactgctggacaggctgaaccagctggagtcgaagatgagtggtaaaggccaacagcagcagggccagaccgttaccaaaaagagcgcagctgaagcatctaaaaaaccgcgacagaaacgtaccgcgactaaagcgtacaatgtaacacaggccttcggtcgtcgaggtccggagcaaactcaaggaaactttggcgatcaggaattaatccgccaggggaccgactacaaacactggccgcaaattgcccagttcgccccatccgctagtgcattcttcggtatgagccgcatcggcatggaagtaacgccaagtggtacgtggctgacctacaccggtgctatcaagcttgatgacaaggacccgaactttaaagaccaggttattctgcttaacaaacatattgatgcctataaaactttcccgccgaccgaacccaaaaaggacaaaaagaaaaaagctgatgaaacccaggctctaccgcagcgtcagaaaaaacagcaaactgtgactctgctgccagctgcggacctggatgatttttccaagcagctgcaacagtctatgagctctgcggactctacgcaggctggtggttctggtcaccatcatcaccatcattaa

SEQ ID NO: 2964 - DNA, 2421 bp, Artificial Sequence
  Description of Artificial Sequence: Synthetic polynucleotide
atgaaaatcgaagaaggtaaactggtaatctggattaacggcgataaaggctataacggtctcgctgaagtcggtaagaaattcgagaaagataccggaattaaagtcaccgttgagcatccggataaactggaagagaaattcccacaggttgcggcaactggcgatggccctgacattatcttctgggcacacgaccgctttggtggctacgctcaatctggcctgttggctgaaatcaccccggacaaagcgttccaggacaagctgtatccgtttacctgggatgccgtacgttacaacggcaagctgattgcttacccgatcgctgttgaagcgttatcgctgatttataacaaagatctgctgccgaacccgccaaaaacctgggaagagatcccggcgctggataaagaactgaaagcgaaaggtaagagcgcgctgatgttcaacctgcaagaaccgtacttcacctggccgctgattgctgctgacgggggttatgcgttcaagtatgaaaacggcaagtacgacattaaagacgtgggcgtggataacgctggcgcgaaagcgggtctgaccttcctggttgacctgattaaaaacaaacacatgaatgcagacaccgattactccatcgcagaagctgcctttaataaaggcgaaacagcgatgaccatcaacggcccgtgggcatggtccaacatcgacaccagcaaagtgaattatggtgtaacggtactgccgaccttcaagggtcaaccatccaaaccgttcgttggcgtgctgagcgcaggtattaacgccgccagtccgaacaaagagctggcgaaagagttcctcgaaaactatctgctgactgatgaaggtctggaagcggttaataaagacaaaccgctgggtgccgtagcgctgaagtcttacgaggaagagttggcgaaagatccacgtattgccgccaccatggaaaacgcccagaaaggtgaaatcatgccgaacatcccgcagatgtccgctttctggtatgccgtgcgtactgcggtgatcaacgccgccagcggtcgtcagactgtcgatgaagccctgaaagacgcgcagactggtggttctggtgagaacctgtactttcaaagctcagataatgggcctcaaaaccagcgcaacgctccacgtataaccttcggtggcccgtctgactccacaggcagcaaccagaatggtgagcgtagtggagccaggtctaagcagcgccgtccccagggtctgccgaacaacacggcgagctggtttactgcgcttacccaacacggtaaagaagacttaaaattcccgcgtggccagggcgtcccgatcaacactaactcttccccggatgatcagattggttattaccgcagagcaactcgtcggattcgcggcggcgacggtaaaatgaaagatttgtctccgcgttggtacttttactatctcggcaccggtccggaagctggactgccctacggggcaaacaaggacgggatcatttgggtggctaccgaaggtgccctgaatactccaaaagatcatatcggcacccgtaaccctgctaataacgctgcgtatgttctgcaactgcctcagggtacaactctgccaaaaggcttctatgcagaagggtcgcgtggtggcagccaggcgagtagccgtagcagctcccgctctcgcaactcgtcccgtaactccactccgggctcttctcgcggcacgtccccggctcgtatggcaggtaacggtggtgacgctgctctggcgctgctactgctggacaggctgaaccagctggagtcgaagatgagtggtaaaggccaacagcagcagggccagaccgttaccaaaaagagcgcagctgaagcatctaaaaaaccgcgacagaaacgtaccgcgactaaagcgtacaatgtaacacaggccttcggtcgtcgaggtccggagcaaactcaaggaaactttggcgatcaggaattaatccgccaggggaccgactacaaacactggccgcaaattgcccagttcgccccatccgctagtgcattcttcggtatgagccgcatcggcatggaagtaacgccaagtggtacgtggctgacctacaccggtgctatcaagcttgatgacaaggacccgaactttaaagaccaggttattctgcttaacaaacatattgatgcctataaaactttcccgccgaccgaacccaaaaaggacaaaaagaaaaaagctgatgaaacccaggctctaccgcagcgtcagaaaaaacagcaaactgtgactctgctgccagctgcggacctggatgatttttccaagcagctgcaacagtctatgagctctgcggactctacgcaggctggtggttctggtcaccatcatcaccatcattaa

SEQ ID NO: 2965 - DNA, 2421 bp, Artificial Sequence
  Description of Artificial Sequence: Synthetic polynucleotide
atgaaaatcgaagaaggtaaactggtaatctggattaacggcgataaaggctataacggtctcgctgaagtcggtaagaaattcgagaaagataccggaattaaagtcaccgttgagcatccggataaactggaagagaaattcccacaggttgcggcaactggcgatggccctgacattatcttctgggcacacgaccgctttggtggctacgctcaatctggcctgttggctgaaatcaccccggacaaagcgttccaggacaagctgtatccgtttacctgggatgccgtacgttacaacggcaagctgattgcttacccgatcgctgttgaagcgttatcgctgatttataacaaagatctgctgccgaacccgccaaaaacctgggaagagatcccggcgctggataaagaactgaaagcgaaaggtaagagcgcgctgatgttcaacctgcaagaaccgtacttcacctggccgctgattgctgctgacgggggttatgcgttcaagtatgaaaacggcaagtacgacattaaagacgtgggcgtggataacgctggcgcgaaagcgggtctgaccttcctggttgacctgattaaaaacaaacacatgaatgcagacaccgattactccatcgcagaagctgcctttaataaaggcgaaacagcgatgaccatcaacggcccgtgggcatggtccaacatcgacaccagcaaagtgaattatggtgtaacggtactgccgaccttcaagggtcaaccatccaaaccgttcgttggcgtgctgagcgcaggtattaacgccgccagtccgaacaaagagctggcgaaagagttcctcgaaaactatctgctgactgatgaaggtctggaagcggttaataaagacaaaccgctgggtgccgtagcgctgaagtcttacgaggaagagttggcgaaagatccacgtattgccgccaccatggaaaacgcccagaaaggtgaaatcatgccgaacatcccgcagatgtccgctttctggtatgccgtgcgtactgcggtgatcaacgccgccagcggtcgtcagactgtcgatgaagccctgaaagacgcgcagactggtggttctggtgagaacctgtactttcaaagctcagataatgggcctcaaaaccagcgcaacgctccacgtataaccttcggtggcccgtctgactccacaggcagcaaccagaatggtgagcgtagtggagccaggtctaagcagcgccgtccccagggtctgccgaacaacacggcgagctggtttactgcgcttacccaacacggtaaagaagacttaaaattcccgcgtggccagggcgtcccgatcaacactaactcttccccggatgatcagattggttattaccgcagagcaactcgtcggattcgcggcggcgacggtaaaatgaaagatttgtctccgcgttggtacttttactatctcggcaccggtccggaagctggactgccctacggggcaaacaaggacgggatcatttgggtggctaccgaaggtgccctgaatactccaaaagatcatatcggcacccgtaaccctgctaataacgctgcgatcgttctgcaactgcctcagggtacaactctgccaaaaggcttctatgcagaagggtcgcgtggtggcagccaggcgagtagccgtagcagctcccgctctcgcaactcgtcccgtaactccactccgggctcttctcgcggcacgtccccggctcgtatggcaggtaacggtggtgacgctgctctggcgctgctactgctggacaggctgaaccagctggagtcgaagatgagtggtaaaggccaacagcagcagggccagaccgttaccaaaaagagcgcagctgaagcatctaaaaaaccgcgacagaaacgtaccgcgactaaagcgtacaatgtaacacaggccttcggtcgtcgaggtccggagcaaactcaaggaaactttggcgatcaggaattaatccgccaggggaccgactacaaacactggccgcaaattgcccagttcgccccatccgctagtgcattcttcggtatgagccgcatcaagatggaagtaacgccaagtggtacgtggctgacctacaccggtgctatcaagcttgatgacaaggacccgaactttaaagaccaggttattctgcttaacaaacatattgatgcctataaaactttcccgccgaccgaacccaaaaaggacaaaaagaaaaaagctgatgaaacccaggctctaccgcagcgtcagaaaaaacagcaaactgtgactctgctgccagctgcggacctggatgatttttccaagcagctgcaacagtctatgagctctgcggactctacgcaggctggtggttctggtcaccatcatcaccatcattaa

SEQ ID NO: 2966 - DNA, 2421 bp, Artificial Sequence
  Description of Artificial Sequence: Synthetic polynucleotide
atgaaaatcgaagaaggtaaactggtaatctggattaacggcgataaaggctataacggtctcgctgaagtcggtaagaaattcgagaaagataccggaattaaagtcaccgttgagcatccggataaactggaagagaaattcccacaggttgcggcaactggcgatggccctgacattatcttctgggcacacgaccgctttggtggctacgctcaatctggcctgttggctgaaatcaccccggacaaagcgttccaggacaagctgtatccgtttacctgggatgccgtacgttacaacggcaagctgattgcttacccgatcgctgttgaagcgttatcgctgatttataacaaagatctgctgccgaacccgccaaaaacctgggaagagatcccggcgctggataaagaactgaaagcgaaaggtaagagcgcgctgatgttcaacctgcaagaaccgtacttcacctggccgctgattgctgctgacgggggttatgcgttcaagtatgaaaacggcaagtacgacattaaagacgtgggcgtggataacgctggcgcgaaagcgggtctgaccttcctggttgacctgattaaaaacaaacacatgaatgcagacaccgattactccatcgcagaagctgcctttaataaaggcgaaacagcgatgaccatcaacggcccgtgggcatggtccaacatcgacaccagcaaagtgaattatggtgtaacggtactgccgaccttcaagggtcaaccatccaaaccgttcgttggcgtgctgagcgcaggtattaacgccgccagtccgaacaaagagctggcgaaagagttcctcgaaaactatctgctgactgatgaaggtctggaagcggttaataaagacaaaccgctgggtgccgtagcgctgaagtcttacgaggaagagttggcgaaagatccacgtattgccgccaccatggaaaacgcccagaaaggtgaaatcatgccgaacatcccgcagatgtccgctttctggtatgccgtgcgtactgcggtgatcaacgccgccagcggtcgtcagactgtcgatgaagccctgaaagacgcgcagactggtggttctggtgagaacctgtactttcaaagctcagataatgggcctcaaaaccagcgcaacgctccacgtataaccttcggtggcccgtctgactccacaggcagcaaccagaatggtgagcgtagtggagccaggtctaagcagcgccgtccccagggtctgccgaacaacacggcgagctggtttactgcgcttacccaacacggtaaagaagacttaaaattcccgcgtggccagggcgtcccgatcaacgcaaactcttccccggatgatcagattggttattaccgcagagcaactcgtcggattcgcggcggcgacggtaaaatgaaagatttgtctccgcgttggtacttttactatctcggcaccggtccggaagctggactgccctacggggcaaacaaggacgggatcatttgggtggctaccgaaggtgccctgaatactccaaaagatcatatcggcacccgtaaccctgctaataacgctgcgatcgttctgcaactgcctcagggtacaactctgccaaaaggcttctatgcagaagggtcgcgtggtggcagccaggcgagtagccgtagcagctcccgctctcgcaactcgtcccgtaactccactccgggctcttctcgcggcacgtccccggctcgtatggcaggtaacggtggtgacgctgctctggcgctgctactgctggacaggctgaaccagctggagtcgaagatgagtggtaaaggccaacagcagcagggccagaccgttaccaaaaagagcgcagctgaagcatctaaaaaaccgcgacagaaacgtaccgcgactaaagcgtacaatgtaacacaggccttcggtcgtcgaggtccggagcaaactcaaggaaactttggcgatcaggaattaatccgccaggggaccgactacaaacactggccgcaaattgcccagttcgccccatccgctagtgcattcttcggtatgagccgcatcggcatggaagtaacgccaagtggtacgtggctgacctacaccggtgctatcaagcttgatgacaaggacccgaactttaaagaccaggttattctgcttaacaaacatattgatgcctataaaactttcccgccgaccgaacccaaaaaggacaaaaagaaaaaagctgatgaaacccaggctctaccgcagcgtcagaaaaaacagcaaactgtgactctgctgccagctgcggacctggatgatttttccaagcagctgcaacagtctatgagctctgcggactctacgcaggctggtggttctggtcaccatcatcaccatcattaa

SEQ ID NO: 2967 - DNA, 2421 bp, Artificial Sequence
  Description of Artificial Sequence: Synthetic polynucleotide
atgaaaatcgaagaaggtaaactggtaatctggattaacggcgataaaggctataacggtctcgctgaagtcggtaagaaattcgagaaagataccggaattaaagtcaccgttgagcatccggataaactggaagagaaattcccacaggttgcggcaactggcgatggccctgacattatcttctgggcacacgaccgctttggtggctacgctcaatctggcctgttggctgaaatcaccccggacaaagcgttccaggacaagctgtatccgtttacctgggatgccgtacgttacaacggcaagctgattgcttacccgatcgctgttgaagcgttatcgctgatttataacaaagatctgctgccgaacccgccaaaaacctgggaagagatcccggcgctggataaagaactgaaagcgaaaggtaagagcgcgctgatgttcaacctgcaagaaccgtacttcacctggccgctgattgctgctgacgggggttatgcgttcaagtatgaaaacggcaagtacgacattaaagacgtgggcgtggataacgctggcgcgaaagcgggtctgaccttcctggttgacctgattaaaaacaaacacatgaatgcagacaccgattactccatcgcagaagctgcctttaataaaggcgaaacagcgatgaccatcaacggcccgtgggcatggtccaacatcgacaccagcaaagtgaattatggtgtaacggtactgccgaccttcaagggtcaaccatccaaaccgttcgttggcgtgctgagcgcaggtattaacgccgccagtccgaacaaagagctggcgaaagagttcctcgaaaactatctgctgactgatgaaggtctggaagcggttaataaagacaaaccgctgggtgccgtagcgctgaagtcttacgaggaagagttggcgaaagatccacgtattgccgccaccatggaaaacgcccagaaaggtgaaatcatgccgaacatcccgcagatgtccgctttctggtatgccgtgcgtactgcggtgatcaacgccgccagcggtcgtcagactgtcgatgaagccctgaaagacgcgcagactggtggttctggtgagaacctgtactttcaaagctcagataatgggcctcaaaaccagcgcaacgctccacgtataaccttcggtggcccgtctgactccacaggcagcaaccagaatggtgagcgtagtggagccaggtctaagcagcgccgtccccagggtctgccgaacaacacggcgagctggtttactgcgcttacccaacacggtaaagaagacttaaaattcccgcgtggccagggcgtcccgatcaacactaactcttccccggatgatcagattggttattaccgcagagcaactcgtcggattcgcggcggcgacggtaaaatgaaagatttgtctccgcgttggtacttttactatctcggcaccggtccgtatgctggactgccctacggggcaaacaaggacgggatcatttgggtggctaccgaaggtgccctgaatactccaaaagatcatatcggcacccgtaaccctgctaataacgctgcgatcgttctgcaactgcctcagggtacaactctgccaaaaggcttctatgcagaagggtcgcgtggtggcagccaggcgagtagccgtagcagctcccgctctcgcaactcgtcccgtaactccactccgggctcttctcgcggcacgtccccggctcgtatggcaggtaacggtggtgacgctgctctggcgctgctactgctggacaggctgaaccagctggagtcgaagatgagtggtaaaggccaacagcagcagggccagaccgttaccaaaaagagcgcagctgaagcatctaaaaaaccgcgacagaaacgtaccgcgactaaagcgtacaatgtaacacaggccttcggtcgtcgaggtccggagcaaactcaaggaaactttggcgatcaggaattaatccgccaggggaccgactacaaacactggccgcaaattgcccagttcgccccatccgctagtgcattcttcggtatgagccgcatcggcatggaagtaacgccaagtggtacgtggctgacctacaccggtgctatcaagcttgatgacaaggacccgaactttaaagaccaggttattctgcttaacaaacatattgatgcctataaaactttcccgccgaccgaacccaaaaaggacaaaaagaaaaaagctgatgaaacccaggctctaccgcagcgtcagaaaaaacagcaaactgtgactctgctgccagctgcggacctggatgatttttccaagcagctgcaacagtctatgagctctgcggactctacgcaggctggtggttctggtcaccatcatcaccatcattaa

SEQ ID NO: 2968 - DNA, 2421 bp, Artificial Sequence
  Description of Artificial Sequence: Synthetic polynucleotide
atgaaaatcgaagaaggtaaactggtaatctggattaacggcgataaaggctataacggtctcgctgaagtcggtaagaaattcgagaaagataccggaattaaagtcaccgttgagcatccggataaactggaagagaaattcccacaggttgcggcaactggcgatggccctgacattatcttctgggcacacgaccgctttggtggctacgctcaatctggcctgttggctgaaatcaccccggacaaagcgttccaggacaagctgtatccgtttacctgggatgccgtacgttacaacggcaagctgattgcttacccgatcgctgttgaagcgttatcgctgatttataacaaagatctgctgccgaacccgccaaaaacctgggaagagatcccggcgctggataaagaactgaaagcgaaaggtaagagcgcgctgatgttcaacctgcaagaaccgtacttcacctggccgctgattgctgctgacgggggttatgcgttcaagtatgaaaacggcaagtacgacattaaagacgtgggcgtggataacgctggcgcgaaagcgggtctgaccttcctggttgacctgattaaaaacaaacacatgaatgcagacaccgattactccatcgcagaagctgcctttaataaaggcgaaacagcgatgaccatcaacggcccgtgggcatggtccaacatcgacaccagcaaagtgaattatggtgtaacggtactgccgaccttcaagggtcaaccatccaaaccgttcgttggcgtgctgagcgcaggtattaacgccgccagtccgaacaaagagctggcgaaagagttcctcgaaaactatctgctgactgatgaaggtctggaagcggttaataaagacaaaccgctgggtgccgtagcgctgaagtcttacgaggaagagttggcgaaagatccacgtattgccgccaccatggaaaacgcccagaaaggtgaaatcatgccgaacatcccgcagatgtccgctttctggtatgccgtgcgtactgcggtgatcaacgccgccagcggtcgtcagactgtcgatgaagccctgaaagacgcgcagactggtggttctggtgagaacctgtactttcaaagctcagataatgggcctcaaaaccagcgcaacgctccacgtataaccttcggtggcccgtctgactccacaggcagcaaccagaatggtgagcgtagtggagccaggtctaagcagcgccgtccccagggtctgccgaacaacacggcgagctggtttactgcgcttacccaacacggtaaagaagacttaaaattcccgcgtggccagggcgtcccgatcaacactaactcttccccggatgatcagattggttattaccgcagagcaactcgtcggattcgcggcggcgacggtaaaatgaaagatttgtctccgcgttggtacttttactatctcggcaccggtccggaagctggactgccctacggggcaaacaaggacgggatcatttgggtggctaccgaaggtgccctgaatactccaaaagatcatatcggcacccgtaaccctgctaataacgctgcgatcgttctgcaactgcctcagggtacaactctgccaaaaggcttctatgcagaagggtcgcgtggtggcagccaggcgagtagccgtagcagctcccgctctcgcaactcgtcccgtaactccactccgggctcttctcgcggcacgtccccggctcgtatggcaggtaacggtggtgacgctgctctggcgctgctactgctggacaggctgaaccagctggagtcgaagatgagtggtaaaggccaacagcagcagggccagaccgttaccaaaaagagcgcagctgaaaattctaaaaaaccgcgacagaaacgtaccgcgactaaagcgtacaatgtaacacaggccttcggtcgtcgaggtccggagcaaactcaaggaaactttggcgatcaggaattaatccgccaggggaccgactacaaacactggccgcaaattgcccagttcgccccatccgctagtgcattcttcggtatgagccgcatcggcatggaagtaacgccaagtggtacgtggctgacctacaccggtgctatcaagcttgatgacaaggacccgaactttaaagaccaggttattctgcttaacaaacatattgatgcctataaaactttcccgccgaccgaacccaaaaaggacaaaaagaaaaaagctgatgaaacccaggctctaccgcagcgtcagaaaaaacagcaaactgtgactctgctgccagctgcggacctggatgatttttccaagcagctgcaacagtctatgagctctgcggactctacgcaggctggtggttctggtcaccatcatcaccatcattaa

SEQ ID NO: 2969 - DNA, 2421 bp, Artificial Sequence
  Description of Artificial Sequence: Synthetic polynucleotide
atgaaaatcgaagaaggtaaactggtaatctggattaacggcgataaaggctataacggtctcgctgaagtcggtaagaaattcgagaaagataccggaattaaagtcaccgttgagcatccggataaactggaagagaaattcccacaggttgcggcaactggcgatggccctgacattatcttctgggcacacgaccgctttggtggctacgctcaatctggcctgttggctgaaatcaccccggacaaagcgttccaggacaagctgtatccgtttacctgggatgccgtacgttacaacggcaagctgattgcttacccgatcgctgttgaagcgttatcgctgatttataacaaagatctgctgccgaacccgccaaaaacctgggaagagatcccggcgctggataaagaactgaaagcgaaaggtaagagcgcgctgatgttcaacctgcaagaaccgtacttcacctggccgctgattgctgctgacgggggttatgcgttcaagtatgaaaacggcaagtacgacattaaagacgtgggcgtggataacgctggcgcgaaagcgggtctgaccttcctggttgacctgattaaaaacaaacacatgaatgcagacaccgattactccatcgcagaagctgcctttaataaaggcgaaacagcgatgaccatcaacggcccgtgggcatggtccaacatcgacaccagcaaagtgaattatggtgtaacggtactgccgaccttcaagggtcaaccatccaaaccgttcgttggcgtgctgagcgcaggtattaacgccgccagtccgaacaaagagctggcgaaagagttcctcgaaaactatctgctgactgatgaaggtctggaagcggttaataaagacaaaccgctgggtgccgtagcgctgaagtcttacgaggaagagttggcgaaagatccacgtattgccgccaccatggaaaacgcccagaaaggtgaaatcatgccgaacatcccgcagatgtccgctttctggtatgccgtgcgtactgcggtgatcaacgccgccagcggtcgtcagactgtcgatgaagccctgaaagacgcgcagactggtggttctggtgagaacctgtactttcaaagctcagataatgggcctcaaaaccagcgcaacgctccacgtataaccttcggtggcccgtctgactccacaggcagcaaccagaatggtgagcgtagtggagccaggtctaagcagcgccgtccccagggtctgccgaacaacacggcgagctggtttactgcgcttacccaacacggtaaagaagacttaaaattcccgcgtggccagggcgtcccgatcaacactaactcttccccggatgatcagattggttattaccgcagagcaactcgtcggattcgcggcggcgacggtaaaatgaaagatttgtctccgcgttggtacttttactatctcggcaccggtccggaagctggactgccctacggggcaaacaaggacgggatcatttgggtggctaccgaaggtgccctgaatactccaaaagatcatatcggcacccgtaaccctgctaataacgctgcgatcgttctgcaactgcctcagggtacaactctgccaaaaggcttctatgcagaagggtcgcgtggtggcagccaggcgagtagccgtagcagcgagcgctctcgcaactcgtcccgtaactccactccgggcgagtctcgcggcacgtccccggctcgtatggcaggtaacggtggtgacgctgctctggcgctgctactgctggacaggctgaaccagctggagtcgaagatgagtggtaaaggccaacagcagcagggccagaccgttaccaaaaagagcgcagctgaagcatctaaaaaaccgcgacagaaacgtaccgcgactaaagcgtacaatgtaacacaggccttcggtcgtcgaggtccggagcaaactcaaggaaactttggcgatcaggaattaatccgccaggggaccgactacaaacactggccgcaaattgcccagttcgccccatccgctagtgcattcttcggtatgagccgcatcggcatggaagtaacgccaagtggtacgtggctgacctacaccggtgctatcaagcttgatgacaaggacccgaactttaaagaccaggttattctgcttaacaaacatattgatgcctataaaactttcccgccgaccgaacccaaaaaggacaaaaagaaaaaagctgatgaaacccaggctctaccgcagcgtcagaaaaaacagcaaactgtgactctgctgccagctgcggacctggatgatttttccaagcagctgcaacagtctatgagctctgcggactctacgcaggctggtggttctggtcaccatcatcaccatcattaa

SEQ ID NO: 2970 - DNA, 2421 bp, Artificial Sequence
  Description of Artificial Sequence: Synthetic polynucleotide
atgaaaatcgaagaaggtaaactggtaatctggattaacggcgataaaggctataacggtctcgctgaagtcggtaagaaattcgagaaagataccggaattaaagtcaccgttgagcatccggataaactggaagagaaattcccacaggttgcggcaactggcgatggccctgacattatcttctgggcacacgaccgctttggtggctacgctcaatctggcctgttggctgaaatcaccccggacaaagcgttccaggacaagctgtatccgtttacctgggatgccgtacgttacaacggcaagctgattgcttacccgatcgctgttgaagcgttatcgctgatttataacaaagatctgctgccgaacccgccaaaaacctgggaagagatcccggcgctggataaagaactgaaagcgaaaggtaagagcgcgctgatgttcaacctgcaagaaccgtacttcacctggccgctgattgctgctgacgggggttatgcgttcaagtatgaaaacggcaagtacgacattaaagacgtgggcgtggataacgctggcgcgaaagcgggtctgaccttcctggttgacctgattaaaaacaaacacatgaatgcagacaccgattactccatcgcagaagctgcctttaataaaggcgaaacagcgatgaccatcaacggcccgtgggcatggtccaacatcgacaccagcaaagtgaattatggtgtaacggtactgccgaccttcaagggtcaaccatccaaaccgttcgttggcgtgctgagcgcaggtattaacgccgccagtccgaacaaagagctggcgaaagagttcctcgaaaactatctgctgactgatgaaggtctggaagcggttaataaagacaaaccgctgggtgccgtagcgctgaagtcttacgaggaagagttggcgaaagatccacgtattgccgccaccatggaaaacgcccagaaaggtgaaatcatgccgaacatcccgcagatgtccgctttctggtatgccgtgcgtactgcggtgatcaacgccgccagcggtcgtcagactgtcgatgaagccctgaaagacgcgcagactggtggttctggtgagaacctgtactttcaaagctcagataatgggcctcaaaaccagcgcaacgctccacgtataaccttcggtggcccgtctgactccacaggcagcaaccagaatggtgagcgtagtggagccaggtctaagcagcgccgtccccagggtctgccgaacaacacggcgagctggtttactgcgcttacccaacacggtaaagaagacttaaaattcccgcgtggccagggcgtcccgatcaacactaactcttccccggatgatcagattggttattaccgcagagcaactcgtcggattcgcggcggcgacggtaaaatgaaagatttgtctccgcgttggtacttttactatctcggcaccggtccggaagctggactgccctacggggcaaacaaggacgggatcatttgggtggctaccgaaggtgccctgaatactccaaaagatcatatcggcacccgtaaccctgctaataacgctgcgatcgttctgcaactgcctcagggtacaactctgccaaaaggcttctatgcagaagggtcgcgtggtggcagccaggcgagtagccgtagcagctcccgctctcgcaactcgtcccgtaactccactccgggctcttctcgcggcacgtccccggctcgtatggcaggtaacggtggtgacgctgctctggcgctgctactgctggacaggctgaaccagctggagtcgaagatgagtggtaaaggccaacagcagcagggccagaccgttaccaaaaagagcgcagctgaagcatctaaaaaaccgcgacagaaacgtaccgcgactaaagcgtacaatgtaacacaggccttcggtcgtcgaggtccggagcaaactcaaggaaactttggcgatcaggaattaatccgccaggggaccgactacaaacactggccgcaaattgcccagttcgccccatccgctagtgcattcttcggtatgagccgcatcgatatggaagtaacgccaagtggtacgtggctgacctacaccggtgctatcaagcttgatgacaaggacccgaactttaaagaccaggttattctgcttaacaaacatattgatgcctataaaactttcccgccgaccgaacccaaaaaggacaaaaagaaaaaagctgatgaaacccaggctctaccgcagcgtcagaaaaaacagcaaactgtgactctgctgccagctgcggacctggatgatttttccaagcagctgcaacagtctatgagctctgcggactctacgcaggctggtggttctggtcaccatcatcaccatcattaa

SEQ ID NO: 2971 - DNA, 2421 bp, Artificial Sequence
  Description of Artificial Sequence: Synthetic polynucleotide
atgaaaatcgaagaaggtaaactggtaatctggattaacggcgataaaggctataacggtctcgctgaagtcggtaagaaattcgagaaagataccggaattaaagtcaccgttgagcatccggataaactggaagagaaattcccacaggttgcggcaactggcgatggccctgacattatcttctgggcacacgaccgctttggtggctacgctcaatctggcctgttggctgaaatcaccccggacaaagcgttccaggacaagctgtatccgtttacctgggatgccgtacgttacaacggcaagctgattgcttacccgatcgctgttgaagcgttatcgctgatttataacaaagatctgctgccgaacccgccaaaaacctgggaagagatcccggcgctggataaagaactgaaagcgaaaggtaagagcgcgctgatgttcaacctgcaagaaccgtacttcacctggccgctgattgctgctgacgggggttatgcgttcaagtatgaaaacggcaagtacgacattaaagacgtgggcgtggataacgctggcgcgaaagcgggtctgaccttcctggttgacctgattaaaaacaaacacatgaatgcagacaccgattactccatcgcagaagctgcctttaataaaggcgaaacagcgatgaccatcaacggcccgtgggcatggtccaacatcgacaccagcaaagtgaattatggtgtaacggtactgccgaccttcaagggtcaaccatccaaaccgttcgttggcgtgctgagcgcaggtattaacgccgccagtccgaacaaagagctggcgaaagagttcctcgaaaactatctgctgactgatgaaggtctggaagcggttaataaagacaaaccgctgggtgccgtagcgctgaagtcttacgaggaagagttggcgaaagatccacgtattgccgccaccatggaaaacgcccagaaaggtgaaatcatgccgaacatcccgcagatgtccgctttctggtatgccgtgcgtactgcggtgatcaacgccgccagcggtcgtcagactgtcgatgaagccctgaaagacgcgcagactggtggttctggtgagaacctgtactttcaaagctcagataatgggcctcaaaaccagcgcaacgctccacgtataaccttcggtggcccgtctgactccacaggcagcaaccagaatggtgagcgtagtggagccaggtctaagcagcgccgtccccagggtctgccgaacaacacggcgagctggtttactgcgcttacccaacacggtaaagaagacttaaaattcccgcgtggccagggcgtcccggtaaacactaactcttccccggatgatcagattggttattaccgcagagcaactcgtcggattcgcggcggcgacggtaaaatgaaagatttgtctccgcgttggtacttttactatctcggcaccggtccggaagctggactgccctacggggcaaacaaggacgggatcatttgggtggctaccgaaggtgccctgaatactccaaaagatcatatcggcacccgtaaccctgctaataacgctgcgatcgttctgcaactgcctcagggtacaactctgccaaaaggcttctatgcagaagggtcgcgtggtggcagccaggcgagtagccgtagcagctcccgctctcgcaactcgtcccgtaactccactccgggctcttctcgcggcacgtccccggctcgtatggcaggtaacggtggtgacgctgctctggcgctgctactgctggacaggctgaaccagctggagtcgaagatgagtggtaaaggccaacagcagcagggccagaccgttaccaaaaagagcgcagctgaagcatctaaaaaaccgcgacagaaacgtaccgcgactaaagcgtacaatgtaacacaggccttcggtcgtcgaggtccggagcaaactcaaggaaactttggcgatcaggaattaatccgccaggggaccgactacaaacactggccgcaaattgcccagttcgccccatccgctagtgcattcttcggtatgagccgcatcggcatggaagtaacgccaagtggtacgtggctgacctacaccggtgctatcaagcttgatgacaaggacccgaactttaaagaccaggttattctgcttaacaaacatattgatgcctataaaactttcccgccgaccgaacccaaaaaggacaaaaagaaaaaagctgatgaaacccaggctctaccgcagcgtcagaaaaaacagcaaactgtgactctgctgccagctgcggacctggatgatttttccaagcagctgcaacagtctatgagctctgcggactctacgcaggctggtggttctggtcaccatcatcaccatcattaa

SEQ ID NO: 2972 - DNA, 2421 bp, Artificial Sequence
  Description of Artificial Sequence: Synthetic polynucleotide
atgaaaatcgaagaaggtaaactggtaatctggattaacggcgataaaggctataacggtctcgctgaagtcggtaagaaattcgagaaagataccggaattaaagtcaccgttgagcatccggataaactggaagagaaattcccacaggttgcggcaactggcgatggccctgacattatcttctgggcacacgaccgctttggtggctacgctcaatctggcctgttggctgaaatcaccccggacaaagcgttccaggacaagctgtatccgtttacctgggatgccgtacgttacaacggcaagctgattgcttacccgatcgctgttgaagcgttatcgctgatttataacaaagatctgctgccgaacccgccaaaaacctgggaagagatcccggcgctggataaagaactgaaagcgaaaggtaagagcgcgctgatgttcaacctgcaagaaccgtacttcacctggccgctgattgctgctgacgggggttatgcgttcaagtatgaaaacggcaagtacgacattaaagacgtgggcgtggataacgctggcgcgaaagcgggtctgaccttcctggttgacctgattaaaaacaaacacatgaatgcagacaccgattactccatcgcagaagctgcctttaataaaggcgaaacagcgatgaccatcaacggcccgtgggcatggtccaacatcgacaccagcaaagtgaattatggtgtaacggtactgccgaccttcaagggtcaaccatccaaaccgttcgttggcgtgctgagcgcaggtattaacgccgccagtccgaacaaagagctggcgaaagagttcctcgaaaactatctgctgactgatgaaggtctggaagcggttaataaagacaaaccgctgggtgccgtagcgctgaagtcttacgaggaagagttggcgaaagatccacgtattgccgccaccatggaaaacgcccagaaaggtgaaatcatgccgaacatcccgcagatgtccgctttctggtatgccgtgcgtactgcggtgatcaacgccgccagcggtcgtcagactgtcgatgaagccctgaaagacgcgcagactggtggttctggtgagaacctgtactttcaaagctcagataatgggcctcaaaaccagcgcaacgctccacgtataaccttcggtggcccgtctgactccacaggcagcaaccagaatggtgagcgtagtggagccaggtctaagcagcgccgtccccagggtctgccgaacaacacggcgagctggtttactgcgcttacccaacacggtaaagaagacttaaaattcccgcgtggccagggcgtcccgatcaacactaactcttccccggatgatcagattggttattaccgcagagcaactcgtcggattcgcggcggcgacggtaaaatgaaagatttgtctccgcgttggtacttttactatctcggcaccggtccggaagctggactgccctacggggcaaacaaggaagggatcatttgggtggctaccgaaggtgccctgaatactccaaaagatcatatcggcacccgtaaccctgctaataacgctgcgatcgttctgcaactgcctcagggtacaactctgccaaaaggcttctatgcagaagggtcgcgtggtggcagccaggcgagtagccgtagcagctcccgctctcgcaactcgtcccgtaactccactccgggctcttctcgcggcacgtccccggctcgtatggcaggtaacggtggtgacgctgctctggcgctgctactgctggacaggctgaaccagctggagtcgaagatgagtggtaaaggccaacagcagcagggccagaccgttaccaaaaagagcgcagctgaagcatctaaaaaaccgcgacagaaacgtaccgcgactaaagcgtacaatgtaacacaggccttcggtcgtcgaggtccggagcaaactcaaggaaactttggcgatcaggaattaatccgccaggggaccgactacaaacactggccgcaaattgcccagttcgccccatccgctagtgcattcttcggtatgagccgcatcggcatggaagtaacgccaagtggtacgtggctgacctacaccggtgctatcaagcttgatgacaaggacccgaactttaaagaccaggttattctgcttaacaaacatattgatgcctataaaactttcccgccgaccgaacccaaaaaggacaaaaagaaaaaagctgatgaaacccaggctctaccgcagcgtcagaaaaaacagcaaactgtgactctgctgccagctgcggacctggatgatttttccaagcagctgcaacagtctatgagctctgcggactctacgcaggctggtggttctggtcaccatcatcaccatcattaa

SEQ ID NO: 2973 - DNA, 2421 bp, Artificial Sequence
  Description of Artificial Sequence: Synthetic polynucleotide
atgaaaatcgaagaaggtaaactggtaatctggattaacggcgataaaggctataacggtctcgctgaagtcggtaagaaattcgagaaagataccggaattaaagtcaccgttgagcatccggataaactggaagagaaattcccacaggttgcggcaactggcgatggccctgacattatcttctgggcacacgaccgctttggtggctacgctcaatctggcctgttggctgaaatcaccccggacaaagcgttccaggacaagctgtatccgtttacctgggatgccgtacgttacaacggcaagctgattgcttacccgatcgctgttgaagcgttatcgctgatttataacaaagatctgctgccgaacccgccaaaaacctgggaagagatcccggcgctggataaagaactgaaagcgaaaggtaagagcgcgctgatgttcaacctgcaagaaccgtacttcacctggccgctgattgctgctgacgggggttatgcgttcaagtatgaaaacggcaagtacgacattaaagacgtgggcgtggataacgctggcgcgaaagcgggtctgaccttcctggttgacctgattaaaaacaaacacatgaatgcagacaccgattactccatcgcagaagctgcctttaataaaggcgaaacagcgatgaccatcaacggcccgtgggcatggtccaacatcgacaccagcaaagtgaattatggtgtaacggtactgccgaccttcaagggtcaaccatccaaaccgttcgttggcgtgctgagcgcaggtattaacgccgccagtccgaacaaagagctggcgaaagagttcctcgaaaactatctgctgactgatgaaggtctggaagcggttaataaagacaaaccgctgggtgccgtagcgctgaagtcttacgaggaagagttggcgaaagatccacgtattgccgccaccatggaaaacgcccagaaaggtgaaatcatgccgaacatcccgcagatgtccgctttctggtatgccgtgcgtactgcggtgatcaacgccgccagcggtcgtcagactgtcgatgaagccctgaaagacgcgcagactggtggttctggtgagaacctgtactttcaaagctcagataatgggcctcaaaaccagcgcaacgctccacgtataaccttcggtggcccgtctgactccacaggcagcaaccagaatggtgagcgtagtggagccaggtctaagcagcgccgtccccagggtctgccgaacaacacggcgagctggtttactgcgcttacccaacacggtaaagaagacttaaaattcccgcgtggccagggcgtcccgatcaacactaactcttccccggatgatcagattggttattaccgcagagcaactcgtcggattcgcggcggcgacggtaaaatgaaagatttgtctccgcgttggtacttttactatctcggcaccggtccggaagctggactgccctacggggcaaacaaggacgggatcatttgggtggctaccgaaggtgccctgaatactccaaaagatcatatcggcacccgtaaccctgctaatcaagctgcgatcgttctgcaactgcctcagggtacaactctgccaaaaggcttctatgcagaagggtcgcgtggtggcagccaggcgagtagccgtagcagctcccgctctcgcaactcgtcccgtaactccactccgggctcttctcgcggcacgtccccggctcgtatggcaggtaacggtggtgacgctgctctggcgctgctactgctggacaggctgaaccagctggagtcgaagatgagtggtaaaggccaacagcagcagggccagaccgttaccaaaaagagcgcagctgaagcatctaaaaaaccgcgacagaaacgtaccgcgactaaagcgtacaatgtaacacaggccttcggtcgtcgaggtccggagcaaactcaaggaaactttggcgatcaggaattaatccgccaggggaccgactacaaacactggccgcaaattgcccagttcgccccatccgctagtgcattcttcggtatgagccgcatcggcatggaagtaacgccaagtggtacgtggctgacctacaccggtgctatcaagcttgatgacaaggacccgaactttaaagaccaggttattctgcttaacaaacatattgatgcctataaaactttcccgccgaccgaacccaaaaaggacaaaaagaaaaaagctgatgaaacccaggctctaccgcagcgtcagaaaaaacagcaaactgtgactctgctgccagctgcggacctggatgatttttccaagcagctgcaacagtctatgagctctgcggactctacgcaggctggtggttctggtcaccatcatcaccatcattaa

SEQ ID NO: 2974 - DNA, 2421 bp, Artificial Sequence
  Description of Artificial Sequence: Synthetic polynucleotide
atgaaaatcgaagaaggtaaactggtaatctggattaacggcgataaaggctataacggtctcgctgaagtcggtaagaaattcgagaaagataccggaattaaagtcaccgttgagcatccggataaactggaagagaaattcccacaggttgcggcaactggcgatggccctgacattatcttctgggcacacgaccgctttggtggctacgctcaatctggcctgttggctgaaatcaccccggacaaagcgttccaggacaagctgtatccgtttacctgggatgccgtacgttacaacggcaagctgattgcttacccgatcgctgttgaagcgttatcgctgatttataacaaagatctgctgccgaacccgccaaaaacctgggaagagatcccggcgctggataaagaactgaaagcgaaaggtaagagcgcgctgatgttcaacctgcaagaaccgtacttcacctggccgctgattgctgctgacgggggttatgcgttcaagtatgaaaacggcaagtacgacattaaagacgtgggcgtggataacgctggcgcgaaagcgggtctgaccttcctggttgacctgattaaaaacaaacacatgaatgcagacaccgattactccatcgcagaagctgcctttaataaaggcgaaacagcgatgaccatcaacggcccgtgggcatggtccaacatcgacaccagcaaagtgaattatggtgtaacggtactgccgaccttcaagggtcaaccatccaaaccgttcgttggcgtgctgagcgcaggtattaacgccgccagtccgaacaaagagctggcgaaagagttcctcgaaaactatctgctgactgatgaaggtctggaagcggttaataaagacaaaccgctgggtgccgtagcgctgaagtcttacgaggaagagttggcgaaagatccacgtattgccgccaccatggaaaacgcccagaaaggtgaaatcatgccgaacatcccgcagatgtccgctttctggtatgccgtgcgtactgcggtgatcaacgccgccagcggtcgtcagactgtcgatgaagccctgaaagacgcgcagactggtggttctggtgagaacctgtactttcaaagctcagataatgggcctcaaaaccagcgcaacgctccacgtataaccttcggtggcccgtctgactccacaggcagcaaccagaatggtgagcgtagtggagccaggtctaagcagcgccgtccccagggtctgccgaacaacacggcgagctggtttactgcgcttacccaacacggtaaagaagacttaaaattcccgcgtggccagggcgtcccgatcaacactaactcttccccggatgatcagattggttattaccgcagagcaactcgtcggattcgcggcggcgacggtaaaatgaaagatttgtctccgcgttggtacttttactatctcggcaccggtccggaagctggactgccctacggggcaaacaaggacgggatcatttgggtggctaccgaaggtgccctgaatactccaaaagatcatatcggcacccgtaaccctgctaataacgctgcgatcgttctgcaactgcctcagggtacaactctgccaaaaggcttctatgcagaagggtcgcgtggtggcagccaggcgagtagccgtagcagctcccgctctcgcaactcgtcccgtaactccactccgggctcttctcgcggcacgtccccggctcgtatggcaggtaacggtggtgacgctgctctggcgctgctactgctggacaggctgaaccagctggagtcgaagatgagtggtaaaggccaacagcagcagggccagaccgttaccaaaaagagcgcagctgaagcatctaaaaaaccgcgacagaaacgtaccgcgactaaagcgtacaatgtaacacaggccttcggtcgtcgaggtccggagcaaactcaaggaaactttggcgatgaagaattaatccgccaggggaccgactacaaacactggccgcaaattgcccagttcgccccatccgctagtgcattcttcggtatgagccgcatcggcatggaagtaacgccaagtggtacgtggctgacctacaccggtgctatcaagcttgatgacaaggacccgaactttaaagaccaggttattctgcttaacaaacatattgatgcctataaaactttcccgccgaccgaacccaaaaaggacaaaaagaaaaaagctgatgaaacccaggctctaccgcagcgtcagaaaaaacagcaaactgtgactctgctgccagctgcggacctggatgatttttccaagcagctgcaacagtctatgagctctgcggactctacgcaggctggtggttctggtcaccatcatcaccatcattaa

SEQ ID NO: 2975 - DNA, 2421 bp, Artificial Sequence
  Description of Artificial Sequence: Synthetic polynucleotide
atgaaaatcgaagaaggtaaactggtaatctggattaacggcgataaaggctataacggtctcgctgaagtcggtaagaaattcgagaaagataccggaattaaagtcaccgttgagcatccggataaactggaagagaaattcccacaggttgcggcaactggcgatggccctgacattatcttctgggcacacgaccgctttggtggctacgctcaatctggcctgttggctgaaatcaccccggacaaagcgttccaggacaagctgtatccgtttacctgggatgccgtacgttacaacggcaagctgattgcttacccgatcgctgttgaagcgttatcgctgatttataacaaagatctgctgccgaacccgccaaaaacctgggaagagatcccggcgctggataaagaactgaaagcgaaaggtaagagcgcgctgatgttcaacctgcaagaaccgtacttcacctggccgctgattgctgctgacgggggttatgcgttcaagtatgaaaacggcaagtacgacattaaagacgtgggcgtggataacgctggcgcgaaagcgggtctgaccttcctggttgacctgattaaaaacaaacacatgaatgcagacaccgattactccatcgcagaagctgcctttaataaaggcgaaacagcgatgaccatcaacggcccgtgggcatggtccaacatcgacaccagcaaagtgaattatggtgtaacggtactgccgaccttcaagggtcaaccatccaaaccgttcgttggcgtgctgagcgcaggtattaacgccgccagtccgaacaaagagctggcgaaagagttcctcgaaaactatctgctgactgatgaaggtctggaagcggttaataaagacaaaccgctgggtgccgtagcgctgaagtcttacgaggaagagttggcgaaagatccacgtattgccgccaccatggaaaacgcccagaaaggtgaaatcatgccgaacatcccgcagatgtccgctttctggtatgccgtgcgtactgcggtgatcaacgccgccagcggtcgtcagactgtcgatgaagccctgaaagacgcgcagactggtggttctggtgagaacctgtactttcaaagctcagataatgggcctcaaaaccagcgcaacgctccacgtataaccttcggtggcccgtctgactccacaggcagcaaccagaatggtgagcgtagtggagccaggtctaagcagcgccgtccccagggtctgccgaacaacacggcgagctggtttactgcgcttacccaacacggtaaagaagacttaaaattcccgcgtggccagggcgtcccgatcaacactaactcttccccggatgatcagattggttattaccgcagagcaactcgtcggattcgcggcggcgacggtaaaatgaaagatttgtctccgcgttggtacttttactatctcggcaccggtccggaagctggactgccctacggggcaaacaaggacgggatcatttgggtggctaccgaaggtgccctgaatactccaaaagatcatatcggcacccgtaaccctgctaataacgctgcgatcgttctgcaactgcctcagggtacaactctgccaaaaggcttctatgcagaagggtcgcgtggtggcagccaggcgagtagccgtagcagctcccgctctcgcaactcgtcccgtaactccactccgggctcttctcgcggcacgtccccggctcgtatggcaggtaacggtggtgacgctgctctggcgctgctactgctggacaggctgaaccagctggagtcgaagatgagtggtaaaggccaacagcagcagggccagaccgttaccaaaaagagcgcagctgaagcatctaaaaaaccgcgacagaaacgtaccgcgactaaagcgtacaatgtaacacaggccttcggtcgtcgaggtccggagcaaactcaaggaaactttggcgatcaggaattattgcgccaggggaccgactacaaacactggccgcaaattgcccagttcgccccatccgctagtgcattcttcggtatgagccgcatcggcatggaagtaacgccaagtggtacgtggctgacctacaccggtgctatcaagcttgatgacaaggacccgaactttaaagaccaggttattctgcttaacaaacatattgatgcctataaaactttcccgccgaccgaacccaaaaaggacaaaaagaaaaaagctgatgaaacccaggctctaccgcagcgtcagaaaaaacagcaaactgtgactctgctgccagctgcggacctggatgatttttccaagcagctgcaacagtctatgagctctgcggactctacgcaggctggtggttctggtcaccatcatcaccatcattaa

SEQ ID NO: 2976 - DNA, 2421 bp, Artificial Sequence
  Description of Artificial Sequence: Synthetic polynucleotide
atgaaaatcgaagaaggtaaactggtaatctggattaacggcgataaaggctataacggtctcgctgaagtcggtaagaaattcgagaaagataccggaattaaagtcaccgttgagcatccggataaactggaagagaaattcccacaggttgcggcaactggcgatggccctgacattatcttctgggcacacgaccgctttggtggctacgctcaatctggcctgttggctgaaatcaccccggacaaagcgttccaggacaagctgtatccgtttacctgggatgccgtacgttacaacggcaagctgattgcttacccgatcgctgttgaagcgttatcgctgatttataacaaagatctgctgccgaacccgccaaaaacctgggaagagatcccggcgctggataaagaactgaaagcgaaaggtaagagcgcgctgatgttcaacctgcaagaaccgtacttcacctggccgctgattgctgctgacgggggttatgcgttcaagtatgaaaacggcaagtacgacattaaagacgtgggcgtggataacgctggcgcgaaagcgggtctgaccttcctggttgacctgattaaaaacaaacacatgaatgcagacaccgattactccatcgcagaagctgcctttaataaaggcgaaacagcgatgaccatcaacggcccgtgggcatggtccaacatcgacaccagcaaagtgaattatggtgtaacggtactgccgaccttcaagggtcaaccatccaaaccgttcgttggcgtgctgagcgcaggtattaacgccgccagtccgaacaaagagctggcgaaagagttcctcgaaaactatctgctgactgatgaaggtctggaagcggttaataaagacaaaccgctgggtgccgtagcgctgaagtcttacgaggaagagttggcgaaagatccacgtattgccgccaccatggaaaacgcccagaaaggtgaaatcatgccgaacatcccgcagatgtccgctttctggtatgccgtgcgtactgcggtgatcaacgccgccagcggtcgtcagactgtcgatgaagccctgaaagacgcgcagactggtggttctggtgagaacctgtactttcaaagctcagataatgggcctcaaaaccagcgcaacgctccacgtataaccttcggtggcccgtctgactccacaggcagcaaccagaatggtgagcgtagtggagccaggtctaagcagcgccgtccccagggtctgccgaacaacacggcgagctggtttactgcgcttacccaacacggtaaagaagacttaaaattcccgcgtggccagggcgtcccgatcaacactaactcttccccggatgatcagattggttattaccgcagagcaactcgtcggattcgcggcggcgacggtaaaatgaaagatttgtctccgcgttggtacttttactatctcggcaccggtccggaagctggactgccctacggggcaaacaaggacgggatcacctgggtggctaccgaaggtgccctgaatactccaaaagatcatatcggcacccgtaaccctgctaataacgctgcgatcgttctgcaactgcctcagggtacaactctgccaaaaggcttctatgcagaagggtcgcgtggtggcagccaggcgagtagccgtagcagctcccgctctcgcaactcgtcccgtaactccactccgggctcttctcgcggcacgtccccggctcgtatggcaggtaacggtggtgacgctgctctggcgctgctactgctggacaggctgaaccagctggagtcgaagatgagtggtaaaggccaacagcagcagggccagaccgttaccaaaaagagcgcagctgaagcatctaaaaaaccgcgacagaaacgtaccgcgactaaagcgtacaatgtaacacaggccttcggtcgtcgaggtccggagcaaactcaaggaaactttggcgatcaggaattaatccgccaggggaccgactacaaacactggccgcaaattgcccagttcgccccatccgctagtgcattcttcggtatgagccgcatcggcatggaagtaacgccaagtggtacgtggctgacctacaccggtgctatcaagcttgatgacaaggacccgaactttaaagaccaggttattctgcttaacaaacatattgatgcctataaaactttcccgccgaccgaacccaaaaaggacaaaaagaaaaaagctgatgaaacccaggctctaccgcagcgtcagaaaaaacagcaaactgtgactctgctgccagctgcggacctggatgatttttccaagcagctgcaacagtctatgagctctgcggactctacgcaggctggtggttctggtcaccatcatcaccatcattaa

SEQ ID NO: 2977 - DNA, 2421 bp, Artificial Sequence
  Description of Artificial Sequence: Synthetic polynucleotide
atgaaaatcgaagaaggtaaactggtaatctggattaacggcgataaaggctataacggtctcgctgaagtcggtaagaaattcgagaaagataccggaattaaagtcaccgttgagcatccggataaactggaagagaaattcccacaggttgcggcaactggcgatggccctgacattatcttctgggcacacgaccgctttggtggctacgctcaatctggcctgttggctgaaatcaccccggacaaagcgttccaggacaagctgtatccgtttacctgggatgccgtacgttacaacggcaagctgattgcttacccgatcgctgttgaagcgttatcgctgatttataacaaagatctgctgccgaacccgccaaaaacctgggaagagatcccggcgctggataaagaactgaaagcgaaaggtaagagcgcgctgatgttcaacctgcaagaaccgtacttcacctggccgctgattgctgctgacgggggttatgcgttcaagtatgaaaacggcaagtacgacattaaagacgtgggcgtggataacgctggcgcgaaagcgggtctgaccttcctggttgacctgattaaaaacaaacacatgaatgcagacaccgattactccatcgcagaagctgcctttaataaaggcgaaacagcgatgaccatcaacggcccgtgggcatggtccaacatcgacaccagcaaagtgaattatggtgtaacggtactgccgaccttcaagggtcaaccatccaaaccgttcgttggcgtgctgagcgcaggtattaacgccgccagtccgaacaaagagctggcgaaagagttcctcgaaaactatctgctgactgatgaaggtctggaagcggttaataaagacaaaccgctgggtgccgtagcgctgaagtcttacgaggaagagttggcgaaagatccacgtattgccgccaccatggaaaacgcccagaaaggtgaaatcatgccgaacatcccgcagatgtccgctttctggtatgccgtgcgtactgcggtgatcaacgccgccagcggtcgtcagactgtcgatgaagccctgaaagacgcgcagactggtggttctggtgagaacctgtactttcaaagctcagataatgggcctcaaaaccagcgcaacgctccacgtataaccttcggtggcccgtctgactccacaggcagcaaccagaatggtgagcgtagtggagccaggtctaagcagcgccgtccccagggtctgccgaacaacacggcgagctggtttactgcgcttacccaacacggtaaagaagacttaaaattcccgcgtggccagggcgtcccgatcaacactaactcttccccggatgatcagattggttattaccgcagagcaactcgtcggattcgcggcggcgacggtaaaatgaaagatttgtctccgcgttggtacttttactatctcggcaccggtccggaagctggactgccctacggggcaaacaaggacgggatcatttgggtggctaccgaaggtgccctgaatactccaaaagatcatatcggcacccgtaaccctgctaataacgctgcgatcgttctgcaactgcctcagggtacaactctgccaaaaggcttctatgcagaagggtcgcgtggtggcagccaggcgagtagccgtagcagctcccgctctcgcaactcgtcccgtaactccactccgggctcttctcgcggcacgtccccggctcgtatggcaggtaacggtggtgacgctgctctggcgctgctactgctggacaggctgaaccagctggagtcgaagatgagtggtaaaggccaacagcagcagggccagaccgttaccaaaaagagcgcagctgaagcatctaaaaaaccgcgacagaaacgtaccgcgactaaagcgtacaatgtaacacaggccttcggtcgtcgaggtccggagcaaactcaaggaaactttggcgatcaggaaatgatccgccaggggaccgactacaaacactggccgcaaattgcccagttcgccccatccgctagtgcattcttcggtatgagccgcatcggcatggaagtaacgccaagtggtacgtggctgacctacaccggtgctatcaagcttgatgacaaggacccgaactttaaagaccaggttattctgcttaacaaacatattgatgcctataaaactttcccgccgaccgaacccaaaaaggacaaaaagaaaaaagctgatgaaacccaggctctaccgcagcgtcagaaaaaacagcaaactgtgactctgctgccagctgcggacctggatgatttttccaagcagctgcaacagtctatgagctctgcggactctacgcaggctggtggttctggtcaccatcatcaccatcattaa

SEQ ID NO: 2978 - DNA, 2421 bp, Artificial Sequence
  Description of Artificial Sequence: Synthetic polynucleotide
atgaaaatcgaagaaggtaaactggtaatctggattaacggcgataaaggctataacggtctcgctgaagtcggtaagaaattcgagaaagataccggaattaaagtcaccgttgagcatccggataaactggaagagaaattcccacaggttgcggcaactggcgatggccctgacattatcttctgggcacacgaccgctttggtggctacgctcaatctggcctgttggctgaaatcaccccggacaaagcgttccaggacaagctgtatccgtttacctgggatgccgtacgttacaacggcaagctgattgcttacccgatcgctgttgaagcgttatcgctgatttataacaaagatctgctgccgaacccgccaaaaacctgggaagagatcccggcgctggataaagaactgaaagcgaaaggtaagagcgcgctgatgttcaacctgcaagaaccgtacttcacctggccgctgattgctgctgacgggggttatgcgttcaagtatgaaaacggcaagtacgacattaaagacgtgggcgtggataacgctggcgcgaaagcgggtctgaccttcctggttgacctgattaaaaacaaacacatgaatgcagacaccgattactccatcgcagaagctgcctttaataaaggcgaaacagcgatgaccatcaacggcccgtgggcatggtccaacatcgacaccagcaaagtgaattatggtgtaacggtactgccgaccttcaagggtcaaccatccaaaccgttcgttggcgtgctgagcgcaggtattaacgccgccagtccgaacaaagagctggcgaaagagttcctcgaaaactatctgctgactgatgaaggtctggaagcggttaataaagacaaaccgctgggtgccgtagcgctgaagtcttacgaggaagagttggcgaaagatccacgtattgccgccaccatggaaaacgcccagaaaggtgaaatcatgccgaacatcccgcagatgtccgctttctggtatgccgtgcgtactgcggtgatcaacgccgccagcggtcgtcagactgtcgatgaagccctgaaagacgcgcagactggtggttctggtgagaacctgtactttcaaagctcagataatgggcctcaaaaccagcgcaacgctccacgtataaccttcggtggcccgtctgactccacaggcagcaaccagaatggtgagcgtagtggagccaggtctaagcagcgccgtccccagggtctgccgaacaacacggcgagctggtttactgcgcttacccaacacggtaaagaagacttaaaattcccgcgtggccagggcgtcccgatcaacactaactcttccccggatgatcagattggttattaccgcagagcaactcgtcggattcgcggcggcgacggtaaaatgaaagatttgtctccgcgttggtacttttactatctcggcaccggtccggaagctggactgccctacggggcaaacaaggacgggatcatttgggtggctaccgaaggtgccctgaatactccaaaagatcatatcggcacccgtaaccctgctaataacgctgcgatcgttctgcaactgcctcagggtacaactctgccaaaaggcttctatgcagaagggtcgcgtggtggcagccaggcgagtagccgtagcagctcccgctctcgcaactcgtcccgtaactccactccgggctcttctcgcggcacgtccccggctcgtatggcaggtaacggtggtgacgctgctctggcgctgctactgctggacaggctgaaccagctggagtcgaagatgagtggtaaaggccaacagcagcagggccagaccgttaccaaaaagagcgcagctgaagcatctaaaaaaccgcgacagaaacgtaccgcgactaaagcgtacaatgtaacacaggccttcggtcgtcgaggtccggagcaaactcaaggaaactttggcgatcagaatttaatccgccaggggaccgactacaaacactggccgcaaattgcccagttcgccccatccgctagtgcattcttcggtatgagccgcatcggcatggaagtaacgccaagtggtacgtggctgacctacaccggtgctatcaagcttgatgacaaggacccgaactttaaagaccaggttattctgcttaacaaacatattgatgcctataaaactttcccgccgaccgaacccaaaaaggacaaaaagaaaaaagctgatgaaacccaggctctaccgcagcgtcagaaaaaacagcaaactgtgactctgctgccagctgcggacctggatgatttttccaagcagctgcaacagtctatgagctctgcggactctacgcaggctggtggttctggtcaccatcatcaccatcattaa

SEQ ID NO: 2979 - DNA, 2421 bp, Artificial Sequence
  Description of Artificial Sequence: Synthetic polynucleotide
atgaaaatcgaagaaggtaaactggtaatctggattaacggcgataaaggctataacggtctcgctgaagtcggtaagaaattcgagaaagataccggaattaaagtcaccgttgagcatccggataaactggaagagaaattcccacaggttgcggcaactggcgatggccctgacattatcttctgggcacacgaccgctttggtggctacgctcaatctggcctgttggctgaaatcaccccggacaaagcgttccaggacaagctgtatccgtttacctgggatgccgtacgttacaacggcaagctgattgcttacccgatcgctgttgaagcgttatcgctgatttataacaaagatctgctgccgaacccgccaaaaacctgggaagagatcccggcgctggataaagaactgaaagcgaaaggtaagagcgcgctgatgttcaacctgcaagaaccgtacttcacctggccgctgattgctgctgacgggggttatgcgttcaagtatgaaaacggcaagtacgacattaaagacgtgggcgtggataacgctggcgcgaaagcgggtctgaccttcctggttgacctgattaaaaacaaacacatgaatgcagacaccgattactccatcgcagaagctgcctttaataaaggcgaaacagcgatgaccatcaacggcccgtgggcatggtccaacatcgacaccagcaaagtgaattatggtgtaacggtactgccgaccttcaagggtcaaccatccaaaccgttcgttggcgtgctgagcgcaggtattaacgccgccagtccgaacaaagagctggcgaaagagttcctcgaaaactatctgctgactgatgaaggtctggaagcggttaataaagacaaaccgctgggtgccgtagcgctgaagtcttacgaggaagagttggcgaaagatccacgtattgccgccaccatggaaaacgcccagaaaggtgaaatcatgccgaacatcccgcagatgtccgctttctggtatgccgtgcgtactgcggtgatcaacgccgccagcggtcgtcagactgtcgatgaagccctgaaagacgcgcagactggtggttctggtgagaacctgtactttcaaagctcagataatgggcctcaaaaccagcgcaacgctccacgtataaccttcggtggcccgtctgactccacaggcagcaaccagaatggtgagcgtagtggagccaggtctaagcagcgccgtccccagggtctgccgaacaacacggcgagctggtttactgcgcttacccaacacggtaaagaagacttaaaattcccgcgtggccagggcgtcccgatcaacactaactcttccccggatgatcagattggttattaccgcagagcaactcgtcggattcgcggcggcgacggtaaaatgaaagatttgtctccgcgttggtacttttactatctcggcaccggtccggaagctggactgccctacggggcaaacaaggacgggatcatttgggtggctaccgaaggtgccctgaatactccaaaagatcatatcggcacccgtaaccctgctaataacgctgcgatcgttctgcaactgcctgcgggtacaactctgccaaaaggcttctatgcagaagggtcgcgtggtggcagccaggcgagtagccgtagcagctcccgctctcgcaactcgtcccgtaactccactccgggctcttctcgcggcacgtccccggctcgtatggcaggtaacggtggtgacgctgctctggcgctgctactgctggacaggctgaaccagctggagtcgaagatgagtggtaaaggccaacagcagcagggccagaccgttaccaaaaagagcgcagctgaagcatctaaaaaaccgcgacagaaacgtaccgcgactaaagcgtacaatgtaacacaggccttcggtcgtcgaggtccggagcaaactcaaggaaactttggcgatcaggaattaatccgccaggggaccgactacaaacactggccgcaaattgcccagttcgccccatccgctagtgcattcttcggtatgagccgcatcggcatggaagtaacgccaagtggtacgtggctgacctacaccggtgctatcaagcttgatgacaaggacccgaactttaaagaccaggttattctgcttaacaaacatattgatgcctataaaactttcccgccgaccgaacccaaaaaggacaaaaagaaaaaagctgatgaaacccaggctctaccgcagcgtcagaaaaaacagcaaactgtgactctgctgccagctgcggacctggatgatttttccaagcagctgcaacagtctatgagctctgcggactctacgcaggctggtggttctggtcaccatcatcaccatcattaa

SEQ ID NO: 2980 - DNA, 2421 bp, Artificial Sequence
  Description of Artificial Sequence: Synthetic polynucleotide
atgaaaatcgaagaaggtaaactggtaatctggattaacggcgataaaggctataacggtctcgctgaagtcggtaagaaattcgagaaagataccggaattaaagtcaccgttgagcatccggataaactggaagagaaattcccacaggttgcggcaactggcgatggccctgacattatcttctgggcacacgaccgctttggtggctacgctcaatctggcctgttggctgaaatcaccccggacaaagcgttccaggacaagctgtatccgtttacctgggatgccgtacgttacaacggcaagctgattgcttacccgatcgctgttgaagcgttatcgctgatttataacaaagatctgctgccgaacccgccaaaaacctgggaagagatcccggcgctggataaagaactgaaagcgaaaggtaagagcgcgctgatgttcaacctgcaagaaccgtacttcacctggccgctgattgctgctgacgggggttatgcgttcaagtatgaaaacggcaagtacgacattaaagacgtgggcgtggataacgctggcgcgaaagcgggtctgaccttcctggttgacctgattaaaaacaaacacatgaatgcagacaccgattactccatcgcagaagctgcctttaataaaggcgaaacagcgatgaccatcaacggcccgtgggcatggtccaacatcgacaccagcaaagtgaattatggtgtaacggtactgccgaccttcaagggtcaaccatccaaaccgttcgttggcgtgctgagcgcaggtattaacgccgccagtccgaacaaagagctggcgaaagagttcctcgaaaactatctgctgactgatgaaggtctggaagcggttaataaagacaaaccgctgggtgccgtagcgctgaagtcttacgaggaagagttggcgaaagatccacgtattgccgccaccatggaaaacgcccagaaaggtgaaatcatgccgaacatcccgcagatgtccgctttctggtatgccgtgcgtactgcggtgatcaacgccgccagcggtcgtcagactgtcgatgaagccctgaaagacgcgcagactggtggttctggtgagaacctgtactttcaaagctcagataatgggcctcaaaaccagcgcaacgctccacgtataaccttcggtggcccgtctgactccacaggcagcaaccagaatggtgagcgtagtggagccaggtctaagcagcgccgtccccagggtctgccgaacaacacggcgagctggtttactgcgcttacccaacacggtaaagaagacttaaaattcccgcgtggccagggcgtcccgatcaacactaactcttccccggatgatcagattggttattaccgcagagcaactcgtcggattcgcggcggcgacggtaaaatgaaagatttgccaccgcgttggtacttttactatctcggcaccggtccggaagctggactgccctacggggcaaacaaggacgggatcatttgggtggctaccgaaggtgccctgaatactccaaaagatcatatcggcacccgtaaccctgctaataacgctgcgatcgttctgcaactgcctcagggtacaactctgccaaaaggcttctatgcagaagggtcgcgtggtggcagccaggcgagtagccgtagcagctcccgctctcgcaactcgtcccgtaactccactccgggctcttctcgcggcacgtccccggctcgtatggcaggtaacggtggtgacgctgctctggcgctgctactgctggacaggctgaaccagctggagtcgaagatgagtggtaaaggccaacagcagcagggccagaccgttaccaaaaagagcgcagctgaagcatctaaaaaaccgcgacagaaacgtaccgcgactaaagcgtacaatgtaacacaggccttcggtcgtcgaggtccggagcaaactcaaggaaactttggcgatcaggaattaatccgccaggggaccgactacaaacactggccgcaaattgcccagttcgccccatccgctagtgcattcttcggtatgagccgcatcggcatggaagtaacgccaagtggtacgtggctgacctacaccggtgctatcaagcttgatgacaaggacccgaactttaaagaccaggttattctgcttaacaaacatattgatgcctataaaactttcccgccgaccgaacccaaaaaggacaaaaagaaaaaagctgatgaaacccaggctctaccgcagcgtcagaaaaaacagcaaactgtgactctgctgccagctgcggacctggatgatttttccaagcagctgcaacagtctatgagctctgcggactctacgcaggctggtggttctggtcaccatcatcaccatcattaa

SEQ ID NO: 2981 - DNA, 2421 bp, Artificial Sequence
  Description of Artificial Sequence: Synthetic polynucleotide
atgaaaatcgaagaaggtaaactggtaatctggattaacggcgataaaggctataacggtctcgctgaagtcggtaagaaattcgagaaagataccggaattaaagtcaccgttgagcatccggataaactggaagagaaattcccacaggttgcggcaactggcgatggccctgacattatcttctgggcacacgaccgctttggtggctacgctcaatctggcctgttggctgaaatcaccccggacaaagcgttccaggacaagctgtatccgtttacctgggatgccgtacgttacaacggcaagctgattgcttacccgatcgctgttgaagcgttatcgctgatttataacaaagatctgctgccgaacccgccaaaaacctgggaagagatcccggcgctggataaagaactgaaagcgaaaggtaagagcgcgctgatgttcaacctgcaagaaccgtacttcacctggccgctgattgctgctgacgggggttatgcgttcaagtatgaaaacggcaagtacgacattaaagacgtgggcgtggataacgctggcgcgaaagcgggtctgaccttcctggttgacctgattaaaaacaaacacatgaatgcagacaccgattactccatcgcagaagctgcctttaataaaggcgaaacagcgatgaccatcaacggcccgtgggcatggtccaacatcgacaccagcaaagtgaattatggtgtaacggtactgccgaccttcaagggtcaaccatccaaaccgttcgttggcgtgctgagcgcaggtattaacgccgccagtccgaacaaagagctggcgaaagagttcctcgaaaactatctgctgactgatgaaggtctggaagcggttaataaagacaaaccgctgggtgccgtagcgctgaagtcttacgaggaagagttggcgaaagatccacgtattgccgccaccatggaaaacgcccagaaaggtgaaatcatgccgaacatcccgcagatgtccgctttctggtatgccgtgcgtactgcggtgatcaacgccgccagcggtcgtcagactgtcgatgaagccctgaaagacgcgcagactggtggttctggtgagaacctgtactttcaaagctcagataatgggcctcaaaaccagcgcaacgctccacgtataaccttcggtggcccgtctgactccacaggcagcaaccagaatggtgagcgtagtggagccaggtctaagcagcgccgtccccagggtctgccgaacaacacggcgagctggtttactgcgcttacccaacacggtaaagaagacttaaaattcccgcgtggccagggcgtcccgatcaacactaactcttccccggatgatcagattggttattaccgcagagcaactcgtcggattcgcggcggcgacggtaaaatgaaagatttgtctccgcgttggtacttttactatctcggcaccggtccggaagctggactgccctacggggcaaacaaggacgggatcatttgggtggctaccgaaggtgccctgaatactccaaaagatcatatcggcacccgtaaccctgctaataacgctgcgatcgttctgcaactgcctcagggtacaactctgccaaaaggcttctatgcagaagggtcgcgtggtggcagccaggcgagtagccgtagcagctcccgctctcgcaactcgtcccgtaactccactccgggctcttctcgcggcacgtccccggctcgtatggcaggtaacggtggtgacgctgctctggcgctgctactgctggacaggctgaaccagctggagtcgaagatgagtggtaaaggccaacagcagcagggccagaccgttaccaaaaagagcgcagctgaagcatctaaaaaaccgcgacagaaacgtaccgcgactaaagcgtacaatgtaacacaggccttcggtcgtcgaggtccgaagcaaactcaaggaaactttggcgatcaggaattaatccgccaggggaccgactacaaacactggccgcaaattgcccagttcgccccatccgctagtgcattcttcggtatgagccgcatcggcatggaagtaacgccaagtggtacgtggctgacctacaccggtgctatcaagcttgatgacaaggacccgaactttaaagaccaggttattctgcttaacaaacatattgatgcctataaaactttcccgccgaccgaacccaaaaaggacaaaaagaaaaaagctgatgaaacccaggctctaccgcagcgtcagaaaaaacagcaaactgtgactctgctgccagctgcggacctggatgatttttccaagcagctgcaacagtctatgagctctgcggactctacgcaggctggtggttctggtcaccatcatcaccatcattaa

SEQ ID NO: 2982 - DNA, 2421 bp, Artificial Sequence
  Description of Artificial Sequence: Synthetic polynucleotide
atgaaaatcgaagaaggtaaactggtaatctggattaacggcgataaaggctataacggtctcgctgaagtcggtaagaaattcgagaaagataccggaattaaagtcaccgttgagcatccggataaactggaagagaaattcccacaggttgcggcaactggcgatggccctgacattatcttctgggcacacgaccgctttggtggctacgctcaatctggcctgttggctgaaatcaccccggacaaagcgttccaggacaagctgtatccgtttacctgggatgccgtacgttacaacggcaagctgattgcttacccgatcgctgttgaagcgttatcgctgatttataacaaagatctgctgccgaacccgccaaaaacctgggaagagatcccggcgctggataaagaactgaaagcgaaaggtaagagcgcgctgatgttcaacctgcaagaaccgtacttcacctggccgctgattgctgctgacgggggttatgcgttcaagtatgaaaacggcaagtacgacattaaagacgtgggcgtggataacgctggcgcgaaagcgggtctgaccttcctggttgacctgattaaaaacaaacacatgaatgcagacaccgattactccatcgcagaagctgcctttaataaaggcgaaacagcgatgaccatcaacggcccgtgggcatggtccaacatcgacaccagcaaagtgaattatggtgtaacggtactgccgaccttcaagggtcaaccatccaaaccgttcgttggcgtgctgagcgcaggtattaacgccgccagtccgaacaaagagctggcgaaagagttcctcgaaaactatctgctgactgatgaaggtctggaagcggttaataaagacaaaccgctgggtgccgtagcgctgaagtcttacgaggaagagttggcgaaagatccacgtattgccgccaccatggaaaacgcccagaaaggtgaaatcatgccgaacatcccgcagatgtccgctttctggtatgccgtgcgtactgcggtgatcaacgccgccagcggtcgtcagactgtcgatgaagccctgaaagacgcgcagactggtggttctggtgagaacctgtactttcaaagctcagataatgggcctcaaaaccagcgcaacgctccacgtataaccttcggtggcccgtctgactccacaggcagcaaccagaatggtgagcgtagtggagccaggtctaagcagcgccgtccccagggtctgccgaacaacacggcgagctggtttactgcgcttacccaacacggtaaagaagacttaaaattcccgcgtggccagggcgtcccgatcaacactaactcttccccggatgatcagattggttattaccgcagagcaactcgtcgggtgcgcggcggcgacggtaaaatgaaagatttgtctccgcgttggtacttttactatctcggcaccggtccggaagctggactgccctacggggcaaacaaggacgggatcatttgggtggctaccgaaggtgccctgaatactccaaaagatcatatcggcacccgtaaccctgctaataacgctgcgatcgttctgcaactgcctcagggtacaactctgccaaaaggcttctatgcagaagggtcgcgtggtggcagccaggcgagtagccgtagcagctcccgctctcgcaactcgtcccgtaactccactccgggctcttctcgcggcacgtccccggctcgtatggcaggtaacggtggtgacgctgctctggcgctgctactgctggacaggctgaaccagctggagtcgaagatgagtggtaaaggccaacagcagcagggccagaccgttaccaaaaagagcgcagctgaagcatctaaaaaaccgcgacagaaacgtaccgcgactaaagcgtacaatgtaacacaggccttcggtcgtcgaggtccggagcaaactcaaggaaactttggcgatcaggaattaatccgccaggggaccgactacaaacactggccgcaaattgcccagttcgccccatccgctagtgcattcttcggtatgagccgcatcggcatggaagtaacgccaagtggtacgtggctgacctacaccggtgctatcaagcttgatgacaaggacccgaactttaaagaccaggttattctgcttaacaaacatattgatgcctataaaactttcccgccgaccgaacccaaaaaggacaaaaagaaaaaagctgatgaaacccaggctctaccgcagcgtcagaaaaaacagcaaactgtgactctgctgccagctgcggacctggatgatttttccaagcagctgcaacagtctatgagctctgcggactctacgcaggctggtggttctggtcaccatcatcaccatcattaa

SEQ ID NO: 2983 - DNA, 2421 bp, Artificial Sequence
  Description of Artificial Sequence: Synthetic polynucleotide
atgaaaatcgaagaaggtaaactggtaatctggattaacggcgataaaggctataacggtctcgctgaagtcggtaagaaattcgagaaagataccggaattaaagtcaccgttgagcatccggataaactggaagagaaattcccacaggttgcggcaactggcgatggccctgacattatcttctgggcacacgaccgctttggtggctacgctcaatctggcctgttggctgaaatcaccccggacaaagcgttccaggacaagctgtatccgtttacctgggatgccgtacgttacaacggcaagctgattgcttacccgatcgctgttgaagcgttatcgctgatttataacaaagatctgctgccgaacccgccaaaaacctgggaagagatcccggcgctggataaagaactgaaagcgaaaggtaagagcgcgctgatgttcaacctgcaagaaccgtacttcacctggccgctgattgctgctgacgggggttatgcgttcaagtatgaaaacggcaagtacgacattaaagacgtgggcgtggataacgctggcgcgaaagcgggtctgaccttcctggttgacctgattaaaaacaaacacatgaatgcagacaccgattactccatcgcagaagctgcctttaataaaggcgaaacagcgatgaccatcaacggcccgtgggcatggtccaacatcgacaccagcaaagtgaattatggtgtaacggtactgccgaccttcaagggtcaaccatccaaaccgttcgttggcgtgctgagcgcaggtattaacgccgccagtccgaacaaagagctggcgaaagagttcctcgaaaactatctgctgactgatgaaggtctggaagcggttaataaagacaaaccgctgggtgccgtagcgctgaagtcttacgaggaagagttggcgaaagatccacgtattgccgccaccatggaaaacgcccagaaaggtgaaatcatgccgaacatcccgcagatgtccgctttctggtatgccgtgcgtactgcggtgatcaacgccgccagcggtcgtcagactgtcgatgaagccctgaaagacgcgcagactggtggttctggtgagaacctgtactttcaaagctcagataatgggcctcaaaaccagcgcaacgctccacgtataaccttcggtggcccgtctgactccacaggcagcaaccagaatggtgagcgtagtggagccaggtctaagcagcgccgtccccagggtctgccgaacaacacggcgagctggtttactgcgcttacccaacacggtaaagaagacttaaaattcccgcgtggccagggcgtcccgatcaacactaactcttccccggatgatcagattggttattaccgcagagcaactcgtcggattcgcggcggcgacggtaaaatgaaagatttgtctccgcgttggtacttttactatctcggcaccggtccggaagctggactgccctacggggcaaacaaggacgggatcatttgggtggctagtgaaggtgccctgaatactccaaaagatcatatcggcacccgtaaccctgctaataacgctgcgatcgttctgcaactgcctcagggtacaactctgccaaaaggcttctatgcagaagggtcgcgtggtggcagccaggcgagtagccgtagcagctcccgctctcgcaactcgtcccgtaactccactccgggctcttctcgcggcacgtccccggctcgtatggcaggtaacggtggtgacgctgctctggcgctgctactgctggacaggctgaaccagctggagtcgaagatgagtggtaaaggccaacagcagcagggccagaccgttaccaaaaagagcgcagctgaagcatctaaaaaaccgcgacagaaacgtaccgcgactaaagcgtacaatgtaacacaggccttcggtcgtcgaggtccggagcaaactcaaggaaactttggcgatcaggaattaatccgccaggggaccgactacaaacactggccgcaaattgcccagttcgccccatccgctagtgcattcttcggtatgagccgcatcggcatggaagtaacgccaagtggtacgtggctgacctacaccggtgctatcaagcttgatgacaaggacccgaactttaaagaccaggttattctgcttaacaaacatattgatgcctataaaactttcccgccgaccgaacccaaaaaggacaaaaagaaaaaagctgatgaaacccaggctctaccgcagcgtcagaaaaaacagcaaactgtgactctgctgccagctgcggacctggatgatttttccaagcagctgcaacagtctatgagctctgcggactctacgcaggctggtggttctggtcaccatcatcaccatcattaa

SEQ ID NO: 2984 - DNA, 2421 bp, Artificial Sequence
  Description of Artificial Sequence: Synthetic polynucleotide
atgaaaatcgaagaaggtaaactggtaatctggattaacggcgataaaggctataacggtctcgctgaagtcggtaagaaattcgagaaagataccggaattaaagtcaccgttgagcatccggataaactggaagagaaattcccacaggttgcggcaactggcgatggccctgacattatcttctgggcacacgaccgctttggtggctacgctcaatctggcctgttggctgaaatcaccccggacaaagcgttccaggacaagctgtatccgtttacctgggatgccgtacgttacaacggcaagctgattgcttacccgatcgctgttgaagcgttatcgctgatttataacaaagatctgctgccgaacccgccaaaaacctgggaagagatcccggcgctggataaagaactgaaagcgaaaggtaagagcgcgctgatgttcaacctgcaagaaccgtacttcacctggccgctgattgctgctgacgggggttatgcgttcaagtatgaaaacggcaagtacgacattaaagacgtgggcgtggataacgctggcgcgaaagcgggtctgaccttcctggttgacctgattaaaaacaaacacatgaatgcagacaccgattactccatcgcagaagctgcctttaataaaggcgaaacagcgatgaccatcaacggcccgtgggcatggtccaacatcgacaccagcaaagtgaattatggtgtaacggtactgccgaccttcaagggtcaaccatccaaaccgttcgttggcgtgctgagcgcaggtattaacgccgccagtccgaacaaagagctggcgaaagagttcctcgaaaactatctgctgactgatgaaggtctggaagcggttaataaagacaaaccgctgggtgccgtagcgctgaagtcttacgaggaagagttggcgaaagatccacgtattgccgccaccatggaaaacgcccagaaaggtgaaatcatgccgaacatcccgcagatgtccgctttctggtatgccgtgcgtactgcggtgatcaacgccgccagcggtcgtcagactgtcgatgaagccctgaaagacgcgcagactggtggttctggtgagaacctgtactttcaaagctcagataatgggcctcaaaaccagcgcaacgctccacgtataaccttcggtggcccgtctgactccacaggcagcaaccagaatggtgagcgtagtggagccaggtctaagcagcgccgtccccagggtctgccgaacaacacggcgagctggtttactgcgcttacccaacacggtaaagaagacttaaaattcccgcgtggccagggcgtcccgatcaacactaactcttccccggatgatcagattggttattaccgcagagcaactcgtcggattcgcggcggcgacggtaaaatgaaagatttgtctccgcgttggtacttttactatctcggcaccggtccggaagctggactgccctttggggcaaacaaggacgggatcatttgggtggctaccgaaggtgccctgaatactccaaaagatcatatcggcacccgtaaccctgctaataacgctgcgatcgttctgcaactgcctcagggtacaactctgccaaaaggcttctatgcagaagggtcgcgtggtggcagccaggcgagtagccgtagcagctcccgctctcgcaactcgtcccgtaactccactccgggctcttctcgcggcacgtccccggctcgtatggcaggtaacggtggtgacgctgctctggcgctgctactgctggacaggctgaaccagctggagtcgaagatgagtggtaaaggccaacagcagcagggccagaccgttaccaaaaagagcgcagctgaagcatctaaaaaaccgcgacagaaacgtaccgcgactaaagcgtacaatgtaacacaggccttcggtcgtcgaggtccggagcaaactcaaggaaactttggcgatcaggaattaatccgccaggggaccgactacaaacactggccgcaaattgcccagttcgccccatccgctagtgcattcttcggtatgagccgcatcggcatggaagtaacgccaagtggtacgtggctgacctacaccggtgctatcaagcttgatgacaaggacccgaactttaaagaccaggttattctgcttaacaaacatattgatgcctataaaactttcccgccgaccgaacccaaaaaggacaaaaagaaaaaagctgatgaaacccaggctctaccgcagcgtcagaaaaaacagcaaactgtgactctgctgccagctgcggacctggatgatttttccaagcagctgcaacagtctatgagctctgcggactctacgcaggctggtggttctggtcaccatcatcaccatcattaa

SEQ ID NO: 2985 - DNA, 2421 bp, Artificial Sequence
  Description of Artificial Sequence: Synthetic polynucleotide
atgaaaatcgaagaaggtaaactggtaatctggattaacggcgataaaggctataacggtctcgctgaagtcggtaagaaattcgagaaagataccggaattaaagtcaccgttgagcatccggataaactggaagagaaattcccacaggttgcggcaactggcgatggccctgacattatcttctgggcacacgaccgctttggtggctacgctcaatctggcctgttggctgaaatcaccccggacaaagcgttccaggacaagctgtatccgtttacctgggatgccgtacgttacaacggcaagctgattgcttacccgatcgctgttgaagcgttatcgctgatttataacaaagatctgctgccgaacccgccaaaaacctgggaagagatcccggcgctggataaagaactgaaagcgaaaggtaagagcgcgctgatgttcaacctgcaagaaccgtacttcacctggccgctgattgctgctgacgggggttatgcgttcaagtatgaaaacggcaagtacgacattaaagacgtgggcgtggataacgctggcgcgaaagcgggtctgaccttcctggttgacctgattaaaaacaaacacatgaatgcagacaccgattactccatcgcagaagctgcctttaataaaggcgaaacagcgatgaccatcaacggcccgtgggcatggtccaacatcgacaccagcaaagtgaattatggtgtaacggtactgccgaccttcaagggtcaaccatccaaaccgttcgttggcgtgctgagcgcaggtattaacgccgccagtccgaacaaagagctggcgaaagagttcctcgaaaactatctgctgactgatgaaggtctggaagcggttaataaagacaaaccgctgggtgccgtagcgctgaagtcttacgaggaagagttggcgaaagatccacgtattgccgccaccatggaaaacgcccagaaaggtgaaatcatgccgaacatcccgcagatgtccgctttctggtatgccgtgcgtactgcggtgatcaacgccgccagcggtcgtcagactgtcgatgaagccctgaaagacgcgcagactggtggttctggtgagaacctgtactttcaaagctcagataatgggcctcaaaaccagcgcaacgctccacgtataaccttcggtggcccgtctgactccacaggcagcaaccagaatggtgagcgtagtggagccaggtctaagcagcgccgtccccagggtctgccgaacaacacggcgagctggtttactgcgcttacccaacacggtaaagaagacttaaaattcccgcgtggccagggcgtcccgatcaacactaactcttccccggatgatcagattggttattaccgcagagcaactcgtcggattcgcggcggcgacggtaaaatgaaagatttgtctccgcgttggtacttttactatctcggcaccggtccggaagctggactgccctacggggcaaacaaggacgggatcatttgggtggctaccgaaggtgccctgaatactccaaaagatcatatcggcacccgtaaccctgctaataacgctgcgatcgttctgcaactgcctcagggtacaactctgccaaaaggcttctatgcagaagggtcgcgtggtggcagccaggcgagtagccgtagcagctcccgctctcgcaactcgtcccgtaactccactccgggctcttctcgcggcacgtccccggctcgtatggcaggtaacggtggtgacgctgctctggcgctgctactgctggacaggctgaaccagctggagtcgaagatgagtggtaaaggccaacagcagcagggccagaccgttaccaaaaagagcgcagctgaagcatctaaaaaaccgcgacagaaacgtaccgcgactaaagcgtacaatgtaacacaggccttcggtcgtcgaggtccggagcaaactcaaggaaactttggcgataaagaattaatccgccaggggaccgactacaaacactggccgcaaattgcccagttcgccccatccgctagtgcattcttcggtatgagccgcatcggcatggaagtaacgccaagtggtacgtggctgacctacaccggtgctatcaagcttgatgacaaggacccgaactttaaagaccaggttattctgcttaacaaacatattgatgcctataaaactttcccgccgaccgaacccaaaaaggacaaaaagaaaaaagctgatgaaacccaggctctaccgcagcgtcagaaaaaacagcaaactgtgactctgctgccagctgcggacctggatgatttttccaagcagctgcaacagtctatgagctctgcggactctacgcaggctggtggttctggtcaccatcatcaccatcattaa

SEQ ID NO: 2986 - DNA, 2421 bp, Artificial Sequence
  Description of Artificial Sequence: Synthetic polynucleotide
atgaaaatcgaagaaggtaaactggtaatctggattaacggcgataaaggctataacggtctcgctgaagtcggtaagaaattcgagaaagataccggaattaaagtcaccgttgagcatccggataaactggaagagaaattcccacaggttgcggcaactggcgatggccctgacattatcttctgggcacacgaccgctttggtggctacgctcaatctggcctgttggctgaaatcaccccggacaaagcgttccaggacaagctgtatccgtttacctgggatgccgtacgttacaacggcaagctgattgcttacccgatcgctgttgaagcgttatcgctgatttataacaaagatctgctgccgaacccgccaaaaacctgggaagagatcccggcgctggataaagaactgaaagcgaaaggtaagagcgcgctgatgttcaacctgcaagaaccgtacttcacctggccgctgattgctgctgacgggggttatgcgttcaagtatgaaaacggcaagtacgacattaaagacgtgggcgtggataacgctggcgcgaaagcgggtctgaccttcctggttgacctgattaaaaacaaacacatgaatgcagacaccgattactccatcgcagaagctgcctttaataaaggcgaaacagcgatgaccatcaacggcccgtgggcatggtccaacatcgacaccagcaaagtgaattatggtgtaacggtactgccgaccttcaagggtcaaccatccaaaccgttcgttggcgtgctgagcgcaggtattaacgccgccagtccgaacaaagagctggcgaaagagttcctcgaaaactatctgctgactgatgaaggtctggaagcggttaataaagacaaaccgctgggtgccgtagcgctgaagtcttacgaggaagagttggcgaaagatccacgtattgccgccaccatggaaaacgcccagaaaggtgaaatcatgccgaacatcccgcagatgtccgctttctggtatgccgtgcgtactgcggtgatcaacgccgccagcggtcgtcagactgtcgatgaagccctgaaagacgcgcagactggtggttctggtgagaacctgtactttcaaagctcagataatgggcctcaaaaccagcgcaacgctccacgtataaccttcggtggcccgtctgactccacaggcagcaaccagaatggtgagcgtagtggagccaggtctaagcagcgccgtccccagggtctgccgaacaacacggcgagctggtttactgcgcttacccaacacggtaaagaagacttaaaattcccgcgtggccagggcgtcccgatcaacactaactcttccccggatgatcagattggttattaccgcagagcaactcgtcggattcgcggcggcgacggtaaaatgaaagatttgtctccgcgttggtacttttactatctcggcaccggtccggaagctggactgccctacggggcaaacaaggacgggatcatttgggtggctaccgaaggtgccctgaatactccaaaagatcatatcggcacccgtaaccctgctaataacgctgcgatcgttctgcaactgcctcagggtacaactctgccagagggcttctatgcagaagggtcgcgtggtggcagccaggcgagtagccgtagcagctcccgctctcgcaactcgtcccgtaactccactccgggctcttctcgcggcacgtccccggctcgtatggcaggtaacggtggtgacgctgctctggcgctgctactgctggacaggctgaaccagctggagtcgaagatgagtggtaaaggccaacagcagcagggccagaccgttaccaaaaagagcgcagctgaagcatctaaaaaaccgcgacagaaacgtaccgcgactaaagcgtacaatgtaacacaggccttcggtcgtcgaggtccggagcaaactcaaggaaactttggcgatcaggaattaatccgccaggggaccgactacaaacactggccgcaaattgcccagttcgccccatccgctagtgcattcttcggtatgagccgcatcggcatggaagtaacgccaagtggtacgtggctgacctacaccggtgctatcaagcttgatgacaaggacccgaactttaaagaccaggttattctgcttaacaaacatattgatgcctataaaactttcccgccgaccgaacccaaaaaggacaaaaagaaaaaagctgatgaaacccaggctctaccgcagcgtcagaaaaaacagcaaactgtgactctgctgccagctgcggacctggatgatttttccaagcagctgcaacagtctatgagctctgcggactctacgcaggctggtggttctggtcaccatcatcaccatcattaa

SEQ ID NO: 2987 - DNA, 2421 bp, Artificial Sequence
  Description of Artificial Sequence: Synthetic polynucleotide
atgaaaatcgaagaaggtaaactggtaatctggattaacggcgataaaggctataacggtctcgctgaagtcggtaagaaattcgagaaagataccggaattaaagtcaccgttgagcatccggataaactggaagagaaattcccacaggttgcggcaactggcgatggccctgacattatcttctgggcacacgaccgctttggtggctacgctcaatctggcctgttggctgaaatcaccccggacaaagcgttccaggacaagctgtatccgtttacctgggatgccgtacgttacaacggcaagctgattgcttacccgatcgctgttgaagcgttatcgctgatttataacaaagatctgctgccgaacccgccaaaaacctgggaagagatcccggcgctggataaagaactgaaagcgaaaggtaagagcgcgctgatgttcaacctgcaagaaccgtacttcacctggccgctgattgctgctgacgggggttatgcgttcaagtatgaaaacggcaagtacgacattaaagacgtgggcgtggataacgctggcgcgaaagcgggtctgaccttcctggttgacctgattaaaaacaaacacatgaatgcagacaccgattactccatcgcagaagctgcctttaataaaggcgaaacagcgatgaccatcaacggcccgtgggcatggtccaacatcgacaccagcaaagtgaattatggtgtaacggtactgccgaccttcaagggtcaaccatccaaaccgttcgttggcgtgctgagcgcaggtattaacgccgccagtccgaacaaagagctggcgaaagagttcctcgaaaactatctgctgactgatgaaggtctggaagcggttaataaagacaaaccgctgggtgccgtagcgctgaagtcttacgaggaagagttggcgaaagatccacgtattgccgccaccatggaaaacgcccagaaaggtgaaatcatgccgaacatcccgcagatgtccgctttctggtatgccgtgcgtactgcggtgatcaacgccgccagcggtcgtcagactgtcgatgaagccctgaaagacgcgcagactggtggttctggtgagaacctgtactttcaaagctcagataatgggcctcaaaaccagcgcaacgctccacgtataaccttcggtggcccgtctgactccacaggcagcaaccagaatggtgagcgtagtggagccaggtctaagcagcgccgtccccagggtctgccgaacaacacggcgagctggtttactgcgcttacccaacacggtaaagaagacttaaaattcccgcgtggccagggcgtcccgatcaacactaactcttccccggatgatcagattggttattaccgcagagcaactcgtcggattcgcggcggcgacggtaaaatgaaagatttgtctccgcgttggtacttttactatctcggcaccggtccggaagctggactgccctacggggcaaacaaggacgggatcatttgggtggctaccgaaggtgccctgaatactccaaaagatcatatcggcacccgtaaccctgctaataacgctgcgatcgttctgcaactgcctcagggtacaactctgccaaaaggcttctattgcgaagggtcgcgtggtggcagccaggcgagtagccgtagcagctcccgctctcgcaactcgtcccgtaactccactccgggctcttctcgcggcacgtccccggctcgtatggcaggtaacggtggtgacgctgctctggcgctgctactgctggacaggctgaaccagctggagtcgaagatgagtggtaaaggccaacagcagcagggccagaccgttaccaaaaagagcgcagctgaagcatctaaaaaaccgcgacagaaacgtaccgcgactaaagcgtacaatgtaacacaggccttcggtcgtcgaggtccggagcaaactcaaggaaactttggcgatcaggaattaatccgccaggggaccgactacaaacactggccgcaaattgcccagttcgccccatccgctagtgcattcttcggtatgagccgcatcggcatggaagtaacgccaagtggtacgtggctgacctacaccggtgctatcaagcttgatgacaaggacccgaactttaaagaccaggttattctgcttaacaaacatattgatgcctataaaactttcccgccgaccgaacccaaaaaggacaaaaagaaaaaagctgatgaaacccaggctctaccgcagcgtcagaaaaaacagcaaactgtgactctgctgccagctgcggacctggatgatttttccaagcagctgcaacagtctatgagctctgcggactctacgcaggctggtggttctggtcaccatcatcaccatcattaa

SEQ ID NO: 2988 - DNA, 2421 bp, Artificial Sequence
  Description of Artificial Sequence: Synthetic polynucleotide
atgaaaatcgaagaaggtaaactggtaatctggattaacggcgataaaggctataacggtctcgctgaagtcggtaagaaattcgagaaagataccggaattaaagtcaccgttgagcatccggataaactggaagagaaattcccacaggttgcggcaactggcgatggccctgacattatcttctgggcacacgaccgctttggtggctacgctcaatctggcctgttggctgaaatcaccccggacaaagcgttccaggacaagctgtatccgtttacctgggatgccgtacgttacaacggcaagctgattgcttacccgatcgctgttgaagcgttatcgctgatttataacaaagatctgctgccgaacccgccaaaaacctgggaagagatcccggcgctggataaagaactgaaagcgaaaggtaagagcgcgctgatgttcaacctgcaagaaccgtacttcacctggccgctgattgctgctgacgggggttatgcgttcaagtatgaaaacggcaagtacgacattaaagacgtgggcgtggataacgctggcgcgaaagcgggtctgaccttcctggttgacctgattaaaaacaaacacatgaatgcagacaccgattactccatcgcagaagctgcctttaataaaggcgaaacagcgatgaccatcaacggcccgtgggcatggtccaacatcgacaccagcaaagtgaattatggtgtaacggtactgccgaccttcaagggtcaaccatccaaaccgttcgttggcgtgctgagcgcaggtattaacgccgccagtccgaacaaagagctggcgaaagagttcctcgaaaactatctgctgactgatgaaggtctggaagcggttaataaagacaaaccgctgggtgccgtagcgctgaagtcttacgaggaagagttggcgaaagatccacgtattgccgccaccatggaaaacgcccagaaaggtgaaatcatgccgaacatcccgcagatgtccgctttctggtatgccgtgcgtactgcggtgatcaacgccgccagcggtcgtcagactgtcgatgaagccctgaaagacgcgcagactggtggttctggtgagaacctgtactttcaaagctcagataatgggcctcaaaaccagcgcaacgctccacgtataaccttcggtggcccgtctgactccacaggcagcaaccagaatggtgagcgtagtggagccaggtctaagcagcgccgtccccagggtctgccgaacaacacggcgagctggtttactgcgcttacccaacacggtaaagaagacttaaaattcccgcgtggccagggcgtcccgatcaacactaactcttccccggatgatcagattggttattaccgcagagcaactcgtcggattcgcggcggcgacggtaaaatgaaagatttgtctccgcgttggtacttttactatctcggcaccggtccggaagctggactgccctacggggcaaacaaggacgggatcatttgggtggctaccgaaggtgccctgaatactccaaaagatcatatcggcacccgtaaccctgctaataacgctgcgatcgttctgcaactgcctcagggtacagagctgccaaaaggcttctatgcagaagggtcgcgtggtggcagccaggcgagtagccgtagcagctcccgctctcgcaactcgtcccgtaactccactccgggctcttctcgcggcacgtccccggctcgtatggcaggtaacggtggtgacgctgctctggcgctgctactgctggacaggctgaaccagctggagtcgaagatgagtggtaaaggccaacagcagcagggccagaccgttaccaaaaagagcgcagctgaagcatctaaaaaaccgcgacagaaacgtaccgcgactaaagcgtacaatgtaacacaggccttcggtcgtcgaggtccggagcaaactcaaggaaactttggcgatcaggaattaatccgccaggggaccgactacaaacactggccgcaaattgcccagttcgccccatccgctagtgcattcttcggtatgagccgcatcggcatggaagtaacgccaagtggtacgtggctgacctacaccggtgctatcaagcttgatgacaaggacccgaactttaaagaccaggttattctgcttaacaaacatattgatgcctataaaactttcccgccgaccgaacccaaaaaggacaaaaagaaaaaagctgatgaaacccaggctctaccgcagcgtcagaaaaaacagcaaactgtgactctgctgccagctgcggacctggatgatttttccaagcagctgcaacagtctatgagctctgcggactctacgcaggctggtggttctggtcaccatcatcaccatcattaa

SEQ ID NO: 2989 - DNA, 2421 bp, Artificial Sequence
  Description of Artificial Sequence: Synthetic polynucleotide
atgaaaatcgaagaaggtaaactggtaatctggattaacggcgataaaggctataacggtctcgctgaagtcggtaagaaattcgagaaagataccggaattaaagtcaccgttgagcatccggataaactggaagagaaattcccacaggttgcggcaactggcgatggccctgacattatcttctgggcacacgaccgctttggtggctacgctcaatctggcctgttggctgaaatcaccccggacaaagcgttccaggacaagctgtatccgtttacctgggatgccgtacgttacaacggcaagctgattgcttacccgatcgctgttgaagcgttatcgctgatttataacaaagatctgctgccgaacccgccaaaaacctgggaagagatcccggcgctggataaagaactgaaagcgaaaggtaagagcgcgctgatgttcaacctgcaagaaccgtacttcacctggccgctgattgctgctgacgggggttatgcgttcaagtatgaaaacggcaagtacgacattaaagacgtgggcgtggataacgctggcgcgaaagcgggtctgaccttcctggttgacctgattaaaaacaaacacatgaatgcagacaccgattactccatcgcagaagctgcctttaataaaggcgaaacagcgatgaccatcaacggcccgtgggcatggtccaacatcgacaccagcaaagtgaattatggtgtaacggtactgccgaccttcaagggtcaaccatccaaaccgttcgttggcgtgctgagcgcaggtattaacgccgccagtccgaacaaagagctggcgaaagagttcctcgaaaactatctgctgactgatgaaggtctggaagcggttaataaagacaaaccgctgggtgccgtagcgctgaagtcttacgaggaagagttggcgaaagatccacgtattgccgccaccatggaaaacgcccagaaaggtgaaatcatgccgaacatcccgcagatgtccgctttctggtatgccgtgcgtactgcggtgatcaacgccgccagcggtcgtcagactgtcgatgaagccctgaaagacgcgcagactggtggttctggtgagaacctgtactttcaaagctcagataatgggcctcaaaaccagcgcaacgctccacgtataaccttcggtggcccgtctgactccacaggcagcaaccagaatggtgagcgtagtggagccaggtctaagcagcgccgtccccagggtctgccgaacaacacggcgagctggtttactgcgcttacccaacacggtaaagaagacttaaaattcccgcgtggccagggcgtcccgatcaacactaactcttccccggatgatcagattggttattaccgcagagcaactcgtcggattcgcggcggcgacggtaaaatgaaagatttgtctccgcgttggtacttttactatctcggcaccggtccggaagctggactgccctacggggcaaacaaggacgggatcatttgggtggctaccgaaggtgccctgaatactccaaaagatcatatcggcacccgtaaccctgctaataacgctgcgatcgttctgcaactgcctcagggtacaactctgccaaaaggcttctatgcagaagggtcgcgtggtggcagccaggcgagtagccgtagcagctcccgctctcgcaactcgtcccgtaactccactccgggctcttctcgcggcacgtccccggctcgtatggcaggtaacggtggtgacgctgctctggcgctgctactgctggacaggctgaaccagctggagtcgaagatgagtggtaaaggccaacagcagcagggccagaccgttaccaaaaagagcgcagctgaagcatctaaaaaaccgcgacagaaacgtaccgcgactaaagcgtacaatgtaacacaggccttcggtcgtcgaggtccggatcaaactcaaggaaactttggcgatcaggaattaatccgccaggggaccgactacaaacactggccgcaaattgcccagttcgccccatccgctagtgcattcttcggtatgagccgcatcggcatggaagtaacgccaagtggtacgtggctgacctacaccggtgctatcaagcttgatgacaaggacccgaactttaaagaccaggttattctgcttaacaaacatattgatgcctataaaactttcccgccgaccgaacccaaaaaggacaaaaagaaaaaagctgatgaaacccaggctctaccgcagcgtcagaaaaaacagcaaactgtgactctgctgccagctgcggacctggatgatttttccaagcagctgcaacagtctatgagctctgcggactctacgcaggctggtggttctggtcaccatcatcaccatcattaa

SEQ ID NO: 2990 - DNA, 2421 bp, Artificial Sequence
  Description of Artificial Sequence: Synthetic polynucleotide
atgaaaatcgaagaaggtaaactggtaatctggattaacggcgataaaggctataacggtctcgctgaagtcggtaagaaattcgagaaagataccggaattaaagtcaccgttgagcatccggataaactggaagagaaattcccacaggttgcggcaactggcgatggccctgacattatcttctgggcacacgaccgctttggtggctacgctcaatctggcctgttggctgaaatcaccccggacaaagcgttccaggacaagctgtatccgtttacctgggatgccgtacgttacaacggcaagctgattgcttacccgatcgctgttgaagcgttatcgctgatttataacaaagatctgctgccgaacccgccaaaaacctgggaagagatcccggcgctggataaagaactgaaagcgaaaggtaagagcgcgctgatgttcaacctgcaagaaccgtacttcacctggccgctgattgctgctgacgggggttatgcgttcaagtatgaaaacggcaagtacgacattaaagacgtgggcgtggataacgctggcgcgaaagcgggtctgaccttcctggttgacctgattaaaaacaaacacatgaatgcagacaccgattactccatcgcagaagctgcctttaataaaggcgaaacagcgatgaccatcaacggcccgtgggcatggtccaacatcgacaccagcaaagtgaattatggtgtaacggtactgccgaccttcaagggtcaaccatccaaaccgttcgttggcgtgctgagcgcaggtattaacgccgccagtccgaacaaagagctggcgaaagagttcctcgaaaactatctgctgactgatgaaggtctggaagcggttaataaagacaaaccgctgggtgccgtagcgctgaagtcttacgaggaagagttggcgaaagatccacgtattgccgccaccatggaaaacgcccagaaaggtgaaatcatgccgaacatcccgcagatgtccgctttctggtatgccgtgcgtactgcggtgatcaacgccgccagcggtcgtcagactgtcgatgaagccctgaaagacgcgcagactggtggttctggtgagaacctgtactttcaaagctcagataatgggcctcaaaaccagcgcaacgctccacgtataaccttcggtggcccgtctgactccacaggcagcaaccagaatggtgagcgtagtggagccaggtctaagcagcgccgtccccagggtctgccgaacaacacggcgagctggtttactgcgcttacccaacacggtaaagaagacttaaaattcccgcgtggccagggcgtcccgatcaacactaactcttccccggatgatcagattggttattaccgcagagcaactcgtcggattcgcggcggcgacggtaaaatgaaagatttgtctccgcgttggtacttttactatctcggcaccggtccggaagctggactgccctacggggcaaacaaggacgggatcatttgggtggctaccgaaggtgccctgaatactccaaaagatcatatcggcacccgtaaccctgctaataacgctgcgatcgttctgcaactgcctcagggtacaactctgccaaaaggcttctatgcagaagggtcgcgtggtggcagccaggcgagtagccgtagcagctcccgctctcgcaactcgtcccgtaactccactccgggctcttctcgcggcacgtccccggctcgtatggcaggtaacggtggtgacgctgctctggcgctgctactgctggacaggctgaaccagctggagtcgaagatgagtggtaaaggccaacagcagcagggccagaccgttaccaaaaagagcgcagatgaagcatctaaaaaaccgcgacagaaacgtaccgcgactaaagcgtacaatgtaacacaggccttcggtcgtcgaggtccggagcaaactcaaggaaactttggcgatcaggaattaatccgccaggggaccgactacaaacactggccgcaaattgcccagttcgccccatccgctagtgcattcttcggtatgagccgcatcggcatggaagtaacgccaagtggtacgtggctgacctacaccggtgctatcaagcttgatgacaaggacccgaactttaaagaccaggttattctgcttaacaaacatattgatgcctataaaactttcccgccgaccgaacccaaaaaggacaaaaagaaaaaagctgatgaaacccaggctctaccgcagcgtcagaaaaaacagcaaactgtgactctgctgccagctgcggacctggatgatttttccaagcagctgcaacagtctatgagctctgcggactctacgcaggctggtggttctggtcaccatcatcaccatcattaa

SEQ ID NO: 2991 - DNA, 2421 bp, Artificial Sequence
  Description of Artificial Sequence: Synthetic polynucleotide
atgaaaatcgaagaaggtaaactggtaatctggattaacggcgataaaggctataacggtctcgctgaagtcggtaagaaattcgagaaagataccggaattaaagtcaccgttgagcatccggataaactggaagagaaattcccacaggttgcggcaactggcgatggccctgacattatcttctgggcacacgaccgctttggtggctacgctcaatctggcctgttggctgaaatcaccccggacaaagcgttccaggacaagctgtatccgtttacctgggatgccgtacgttacaacggcaagctgattgcttacccgatcgctgttgaagcgttatcgctgatttataacaaagatctgctgccgaacccgccaaaaacctgggaagagatcccggcgctggataaagaactgaaagcgaaaggtaagagcgcgctgatgttcaacctgcaagaaccgtacttcacctggccgctgattgctgctgacgggggttatgcgttcaagtatgaaaacggcaagtacgacattaaagacgtgggcgtggataacgctggcgcgaaagcgggtctgaccttcctggttgacctgattaaaaacaaacacatgaatgcagacaccgattactccatcgcagaagctgcctttaataaaggcgaaacagcgatgaccatcaacggcccgtgggcatggtccaacatcgacaccagcaaagtgaattatggtgtaacggtactgccgaccttcaagggtcaaccatccaaaccgttcgttggcgtgctgagcgcaggtattaacgccgccagtccgaacaaagagctggcgaaagagttcctcgaaaactatctgctgactgatgaaggtctggaagcggttaataaagacaaaccgctgggtgccgtagcgctgaagtcttacgaggaagagttggcgaaagatccacgtattgccgccaccatggaaaacgcccagaaaggtgaaatcatgccgaacatcccgcagatgtccgctttctggtatgccgtgcgtactgcggtgatcaacgccgccagcggtcgtcagactgtcgatgaagccctgaaagacgcgcagactggtggttctggtgagaacctgtactttcaaagctcagataatgggcctcaaaaccagcgcaacgctccacgtataaccttcggtggcccgtctgactccacaggcagcaaccagaatggtgagcgtagtggagccaggtctaagcagcgccgtccccagggtctgccgaacaacacggcgagctggtttactgcgcttacccaacacggtaaagaagacttaaaattcccgcgtggccagggcgtcccgatcaacaataactcttccccggatgatcagattggttattaccgcagagcaactcgtcggattcgcggcggcgacggtaaaatgaaagatttgtctccgcgttggtacttttactatctcggcaccggtccggaagctggactgccctacggggcaaacaaggacgggatcatttgggtggctaccgaaggtgccctgaatactccaaaagatcatatcggcacccgtaaccctgctaataacgctgcgatcgttctgcaactgcctcagggtacaactctgccaaaaggcttctatgcagaagggtcgcgtggtggcagccaggcgagtagccgtagcagctcccgctctcgcaactcgtcccgtaactccactccgggctcttctcgcggcacgtccccggctcgtatggcaggtaacggtggtgacgctgctctggcgctgctactgctggacaggctgaaccagctggagtcgaagatgagtggtaaaggccaacagcagcagggccagaccgttaccaaaaagagcgcagctgaagcatctaaaaaaccgcgacagaaacgtaccgcgactaaagcgtacaatgtaacacaggccttcggtcgtcgaggtccggagcaaactcaaggaaactttggcgatcaggaattaatccgccaggggaccgactacaaacactggccgcaaattgcccagttcgccccatccgctagtgcattcttcggtatgagccgcatcggcatggaagtaacgccaagtggtacgtggctgacctacaccggtgctatcaagcttgatgacaaggacccgaactttaaagaccaggttattctgcttaacaaacatattgatgcctataaaactttcccgccgaccgaacccaaaaaggacaaaaagaaaaaagctgatgaaacccaggctctaccgcagcgtcagaaaaaacagcaaactgtgactctgctgccagctgcggacctggatgatttttccaagcagctgcaacagtctatgagctctgcggactctacgcaggctggtggttctggtcaccatcatcaccatcattaa

SEQ ID NO: 2992 - DNA, 2421 bp, Artificial Sequence
  Description of Artificial Sequence: Synthetic polynucleotide
atgaaaatcgaagaaggtaaactggtaatctggattaacggcgataaaggctataacggtctcgctgaagtcggtaagaaattcgagaaagataccggaattaaagtcaccgttgagcatccggataaactggaagagaaattcccacaggttgcggcaactggcgatggccctgacattatcttctgggcacacgaccgctttggtggctacgctcaatctggcctgttggctgaaatcaccccggacaaagcgttccaggacaagctgtatccgtttacctgggatgccgtacgttacaacggcaagctgattgcttacccgatcgctgttgaagcgttatcgctgatttataacaaagatctgctgccgaacccgccaaaaacctgggaagagatcccggcgctggataaagaactgaaagcgaaaggtaagagcgcgctgatgttcaacctgcaagaaccgtacttcacctggccgctgattgctgctgacgggggttatgcgttcaagtatgaaaacggcaagtacgacattaaagacgtgggcgtggataacgctggcgcgaaagcgggtctgaccttcctggttgacctgattaaaaacaaacacatgaatgcagacaccgattactccatcgcagaagctgcctttaataaaggcgaaacagcgatgaccatcaacggcccgtgggcatggtccaacatcgacaccagcaaagtgaattatggtgtaacggtactgccgaccttcaagggtcaaccatccaaaccgttcgttggcgtgctgagcgcaggtattaacgccgccagtccgaacaaagagctggcgaaagagttcctcgaaaactatctgctgactgatgaaggtctggaagcggttaataaagacaaaccgctgggtgccgtagcgctgaagtcttacgaggaagagttggcgaaagatccacgtattgccgccaccatggaaaacgcccagaaaggtgaaatcatgccgaacatcccgcagatgtccgctttctggtatgccgtgcgtactgcggtgatcaacgccgccagcggtcgtcagactgtcgatgaagccctgaaagacgcgcagactggtggttctggtgagaacctgtactttcaaagctcagataatgggcctcaaaaccagcgcaacgctccacgtataaccttcggtggcccgtctgactccacaggcagcaaccagaatggtgagcgtagtggagccaggtctaagcagcgccgtccccagggtctgccgaacaacacggcgagctggtttactgcgcttacccaacacggtaaagaagacttaaaattcccgcgtggccagggcgtcccgatcaacactaactcttccccggatgatcagattggttattaccgcagagcaactcgtcggattcgcggcggcgacggtaaaatgaaagatttgtctccgcgttggtacttttactatctcggcaccggtccggaagctggactgccctacggggcaaacaaggacgggatcatttgggtggctaccgaaggtgccctgaatactccaaaagatcatatcggcacccgtaaccctgctaataacgctgcgatcgttctgcaactgcctcagggtacaactctgccaaaaggcttctatgcagaagggtcgcgtggtggcagccaggcgagtagccgtagcagctcccgctctcgcaactcgtcccgtaactccactccgggcgagtctcgcggcacgtccccggctcgtatggcaggtaacggtggtgacgctgctctggcgctgctactgctggacaggctgaaccagctggagtcgaagatgagtggtaaaggccaacagcagcagggccagaccgttaccaaaaagagcgcagctgaagcatctaaaaaaccgcgacagaaacgtaccgcgactaaagcgtacaatgtaacacaggccttcggtcgtcgaggtccggagcaaactcaaggaaactttggcgatcaggaattaatccgccaggggaccgactacaaacactggccgcaaattgcccagttcgccccatccgctagtgcattcttcggtatgagccgcatcggcatggaagtaacgccaagtggtacgtggctgacctacaccggtgctatcaagcttgatgacaaggacccgaactttaaagaccaggttattctgcttaacaaacatattgatgcctataaaactttcccgccgaccgaacccaaaaaggacaaaaagaaaaaagctgatgaaacccaggctctaccgcagcgtcagaaaaaacagcaaactgtgactctgctgccagctgcggacctggatgatttttccaagcagctgcaacagtctatgagctctgcggactctacgcaggctggtggttctggtcaccatcatcaccatcattaa

SEQ ID NO: 2993 - DNA, 2421 bp, Artificial Sequence
  Description of Artificial Sequence: Synthetic polynucleotide
atgaaaatcgaagaaggtaaactggtaatctggattaacggcgataaaggctataacggtctcgctgaagtcggtaagaaattcgagaaagataccggaattaaagtcaccgttgagcatccggataaactggaagagaaattcccacaggttgcggcaactggcgatggccctgacattatcttctgggcacacgaccgctttggtggctacgctcaatctggcctgttggctgaaatcaccccggacaaagcgttccaggacaagctgtatccgtttacctgggatgccgtacgttacaacggcaagctgattgcttacccgatcgctgttgaagcgttatcgctgatttataacaaagatctgctgccgaacccgccaaaaacctgggaagagatcccggcgctggataaagaactgaaagcgaaaggtaagagcgcgctgatgttcaacctgcaagaaccgtacttcacctggccgctgattgctgctgacgggggttatgcgttcaagtatgaaaacggcaagtacgacattaaagacgtgggcgtggataacgctggcgcgaaagcgggtctgaccttcctggttgacctgattaaaaacaaacacatgaatgcagacaccgattactccatcgcagaagctgcctttaataaaggcgaaacagcgatgaccatcaacggcccgtgggcatggtccaacatcgacaccagcaaagtgaattatggtgtaacggtactgccgaccttcaagggtcaaccatccaaaccgttcgttggcgtgctgagcgcaggtattaacgccgccagtccgaacaaagagctggcgaaagagttcctcgaaaactatctgctgactgatgaaggtctggaagcggttaataaagacaaaccgctgggtgccgtagcgctgaagtcttacgaggaagagttggcgaaagatccacgtattgccgccaccatggaaaacgcccagaaaggtgaaatcatgccgaacatcccgcagatgtccgctttctggtatgccgtgcgtactgcggtgatcaacgccgccagcggtcgtcagactgtcgatgaagccctgaaagacgcgcagactggtggttctggtgagaacctgtactttcaaagctcagataatgggcctcaaaaccagcgcaacgctccacgtataaccttcggtggcccgtctgactccacaggcagcaaccagaatggtgagcgtagtggagccaggtctaagcagcgccgtccccagggtctgccgaacaacacggcgagctggtttactgcgcttacccaacacggtaaagaagacttaaaattcccgcgtggccagggcgtcccgatcaacactaactcttccccggatgatcagattggttattaccgcagagcaactcgtcggattcgcggcggcgacggtaaaatgaaagatttgtctccgcgttggtacttttactatctcggcaccggtccggaagctggactgccctacggggcaaacaaggacgggatcatttgggtggctaccgaaggtgccctgaatactccaaaagatcatatcggcacccgtaaccctgctaataacgctgcgatcgttctgcaactgcctcagggtacaactctgccaaaaggcttctatatggaagggtcgcgtggtggcagccaggcgagtagccgtagcagctcccgctctcgcaactcgtcccgtaactccactccgggctcttctcgcggcacgtccccggctcgtatggcaggtaacggtggtgacgctgctctggcgctgctactgctggacaggctgaaccagctggagtcgaagatgagtggtaaaggccaacagcagcagggccagaccgttaccaaaaagagcgcagctgaagcatctaaaaaaccgcgacagaaacgtaccgcgactaaagcgtacaatgtaacacaggccttcggtcgtcgaggtccggagcaaactcaaggaaactttggcgatcaggaattaatccgccaggggaccgactacaaacactggccgcaaattgcccagttcgccccatccgctagtgcattcttcggtatgagccgcatcggcatggaagtaacgccaagtggtacgtggctgacctacaccggtgctatcaagcttgatgacaaggacccgaactttaaagaccaggttattctgcttaacaaacatattgatgcctataaaactttcccgccgaccgaacccaaaaaggacaaaaagaaaaaagctgatgaaacccaggctctaccgcagcgtcagaaaaaacagcaaactgtgactctgctgccagctgcggacctggatgatttttccaagcagctgcaacagtctatgagctctgcggactctacgcaggctggtggttctggtcaccatcatcaccatcattaa

SEQ ID NO: 2994 - DNA, 2421 bp, Artificial Sequence
  Description of Artificial Sequence: Synthetic polynucleotide
atgaaaatcgaagaaggtaaactggtaatctggattaacggcgataaaggctataacggtctcgctgaagtcggtaagaaattcgagaaagataccggaattaaagtcaccgttgagcatccggataaactggaagagaaattcccacaggttgcggcaactggcgatggccctgacattatcttctgggcacacgaccgctttggtggctacgctcaatctggcctgttggctgaaatcaccccggacaaagcgttccaggacaagctgtatccgtttacctgggatgccgtacgttacaacggcaagctgattgcttacccgatcgctgttgaagcgttatcgctgatttataacaaagatctgctgccgaacccgccaaaaacctgggaagagatcccggcgctggataaagaactgaaagcgaaaggtaagagcgcgctgatgttcaacctgcaagaaccgtacttcacctggccgctgattgctgctgacgggggttatgcgttcaagtatgaaaacggcaagtacgacattaaagacgtgggcgtggataacgctggcgcgaaagcgggtctgaccttcctggttgacctgattaaaaacaaacacatgaatgcagacaccgattactccatcgcagaagctgcctttaataaaggcgaaacagcgatgaccatcaacggcccgtgggcatggtccaacatcgacaccagcaaagtgaattatggtgtaacggtactgccgaccttcaagggtcaaccatccaaaccgttcgttggcgtgctgagcgcaggtattaacgccgccagtccgaacaaagagctggcgaaagagttcctcgaaaactatctgctgactgatgaaggtctggaagcggttaataaagacaaaccgctgggtgccgtagcgctgaagtcttacgaggaagagttggcgaaagatccacgtattgccgccaccatggaaaacgcccagaaaggtgaaatcatgccgaacatcccgcagatgtccgctttctggtatgccgtgcgtactgcggtgatcaacgccgccagcggtcgtcagactgtcgatgaagccctgaaagacgcgcagactggtggttctggtgagaacctgtactttcaaagctcagataatgggcctcaaaaccagcgcaacgctccacgtataaccttcggtggcccgtctgactccacaggcagcaaccagaatggtgagcgtagtggagccaggtctaagcagcgccgtccccagggtctgccgaacaacacggcgagctggtttactgcgcttacccaacacggtaaagaagacttaaaattcccgcgtggccagggcgtcccgatcaacactaactcttccccggatgatcagattggttattaccgcagagcaactcgtcggattcgcggcggcgacggtaaaatgaaagatttgtctccgcgttggtacttttactatctcggcaccggtccggaagctggactgccctacggggcaaacaaggacgggatcatttgggtggctaccgaaggtgccctgaatactccaaaagatcatatcggcacccgtaaccctgctaataacgctgcgatcgttctgcaactgcctcagggtacaactctgccaaaaggcttctatgcagaagggtcgcgtggtggcagccaggcgagtagccgtagcagctcccgctctcgcaactcgtcccgtaactccactccgggctcttctcgcggcacgtccccggctcgtatggcaggtaacggtggtgacgctgctctggcgctgctactgctggacaggctgaaccagctggagtcgaagatgagtggtaaaggccaacagcagcagggccagaccgttaccaaaaagagcgcagctgaagcatctaaaaaaccgcgacagaaacgtaccgcgactaaagcgtacaatgtaacacaggccttcggtcgtcgaggtccggagcaaactcaaggaaactttggcgatcaggaattaatccgccaggggaccgactacaaacactggccgcaaattgcccagttcgccccatccgctagtgcattcttcggtatgagccgcatcggcatggaacgcacgccaagtggtacgtggctgacctacaccggtgctatcaagcttgatgacaaggacccgaactttaaagaccaggttattctgcttaacaaacatattgatgcctataaaactttcccgccgaccgaacccaaaaaggacaaaaagaaaaaagctgatgaaacccaggctctaccgcagcgtcagaaaaaacagcaaactgtgactctgctgccagctgcggacctggatgatttttccaagcagctgcaacagtctatgagctctgcggactctacgcaggctggtggttctggtcaccatcatcaccatcattaa

SEQ ID NO: 2995 - DNA, 2421 bp, Artificial Sequence
  Description of Artificial Sequence: Synthetic polynucleotide
atgaaaatcgaagaaggtaaactggtaatctggattaacggcgataaaggctataacggtctcgctgaagtcggtaagaaattcgagaaagataccggaattaaagtcaccgttgagcatccggataaactggaagagaaattcccacaggttgcggcaactggcgatggccctgacattatcttctgggcacacgaccgctttggtggctacgctcaatctggcctgttggctgaaatcaccccggacaaagcgttccaggacaagctgtatccgtttacctgggatgccgtacgttacaacggcaagctgattgcttacccgatcgctgttgaagcgttatcgctgatttataacaaagatctgctgccgaacccgccaaaaacctgggaagagatcccggcgctggataaagaactgaaagcgaaaggtaagagcgcgctgatgttcaacctgcaagaaccgtacttcacctggccgctgattgctgctgacgggggttatgcgttcaagtatgaaaacggcaagtacgacattaaagacgtgggcgtggataacgctggcgcgaaagcgggtctgaccttcctggttgacctgattaaaaacaaacacatgaatgcagacaccgattactccatcgcagaagctgcctttaataaaggcgaaacagcgatgaccatcaacggcccgtgggcatggtccaacatcgacaccagcaaagtgaattatggtgtaacggtactgccgaccttcaagggtcaaccatccaaaccgttcgttggcgtgctgagcgcaggtattaacgccgccagtccgaacaaagagctggcgaaagagttcctcgaaaactatctgctgactgatgaaggtctggaagcggttaataaagacaaaccgctgggtgccgtagcgctgaagtcttacgaggaagagttggcgaaagatccacgtattgccgccaccatggaaaacgcccagaaaggtgaaatcatgccgaacatcccgcagatgtccgctttctggtatgccgtgcgtactgcggtgatcaacgccgccagcggtcgtcagactgtcgatgaagccctgaaagacgcgcagactggtggttctggtgagaacctgtactttcaaagctcagataatgggcctcaaaaccagcgcaacgctccacgtataaccttcggtggcccgtctgactccacaggcagcaaccagaatggtgagcgtagtggagccaggtctaagcagcgccgtccccagggtctgccgaacaacacggcgagctggtttactgcgcttacccaacacggtaaagaagacttatcgttcccgcgtggccagggcgtcccgatcaacactaactcttccccggatgatcagattggttattaccgcagagcaactcgtcggattcgcggcggcgacggtaaaatgaaagatttgtctccgcgttggtacttttactatctcggcaccggtccggaagctggactgccctacggggcaaacaaggacgggatcatttgggtggctaccgaaggtgccctgaatactccaaaagatcatatcggcacccgtaaccctgctaataacgctgcgatcgttctgcaactgcctcagggtacaactctgccaaaaggcttctatgcagaagggtcgcgtggtggcagccaggcgagtagccgtagcagctcccgctctcgcaactcgtcccgtaactccactccgggctcttctcgcggcacgtccccggctcgtatggcaggtaacggtggtgacgctgctctggcgctgctactgctggacaggctgaaccagctggagtcgaagatgagtggtaaaggccaacagcagcagggccagaccgttaccaaaaagagcgcagctgaagcatctaaaaaaccgcgacagaaacgtaccgcgactaaagcgtacaatgtaacacaggccttcggtcgtcgaggtccggagcaaactcaaggaaactttggcgatcaggaattaatccgccaggggaccgactacaaacactggccgcaaattgcccagttcgccccatccgctagtgcattcttcggtatgagccgcatcggcatggaagtaacgccaagtggtacgtggctgacctacaccggtgctatcaagcttgatgacaaggacccgaactttaaagaccaggttattctgcttaacaaacatattgatgcctataaaactttcccgccgaccgaacccaaaaaggacaaaaagaaaaaagctgatgaaacccaggctctaccgcagcgtcagaaaaaacagcaaactgtgactctgctgccagctgcggacctggatgatttttccaagcagctgcaacagtctatgagctctgcggactctacgcaggctggtggttctggtcaccatcatcaccatcattaa

SEQ ID NO: 2996 - DNA, 2421 bp, Artificial Sequence
  Description of Artificial Sequence: Synthetic polynucleotide
atgaaaatcgaagaaggtaaactggtaatctggattaacggcgataaaggctataacggtctcgctgaagtcggtaagaaattcgagaaagataccggaattaaagtcaccgttgagcatccggataaactggaagagaaattcccacaggttgcggcaactggcgatggccctgacattatcttctgggcacacgaccgctttggtggctacgctcaatctggcctgttggctgaaatcaccccggacaaagcgttccaggacaagctgtatccgtttacctgggatgccgtacgttacaacggcaagctgattgcttacccgatcgctgttgaagcgttatcgctgatttataacaaagatctgctgccgaacccgccaaaaacctgggaagagatcccggcgctggataaagaactgaaagcgaaaggtaagagcgcgctgatgttcaacctgcaagaaccgtacttcacctggccgctgattgctgctgacgggggttatgcgttcaagtatgaaaacggcaagtacgacattaaagacgtgggcgtggataacgctggcgcgaaagcgggtctgaccttcctggttgacctgattaaaaacaaacacatgaatgcagacaccgattactccatcgcagaagctgcctttaataaaggcgaaacagcgatgaccatcaacggcccgtgggcatggtccaacatcgacaccagcaaagtgaattatggtgtaacggtactgccgaccttcaagggtcaaccatccaaaccgttcgttggcgtgctgagcgcaggtattaacgccgccagtccgaacaaagagctggcgaaagagttcctcgaaaactatctgctgactgatgaaggtctggaagcggttaataaagacaaaccgctgggtgccgtagcgctgaagtcttacgaggaagagttggcgaaagatccacgtattgccgccaccatggaaaacgcccagaaaggtgaaatcatgccgaacatcccgcagatgtccgctttctggtatgccgtgcgtactgcggtgatcaacgccgccagcggtcgtcagactgtcgatgaagccctgaaagacgcgcagactggtggttctggtgagaacctgtactttcaaagctcagataatgggcctcaaaaccagcgcaacgctccacgtataaccttcggtggcccgtctgactccacaggcagcaaccagaatggtgagcgtagtggagccaggtctaagcagcgccgtccccagggtctgccgaacaacacggcgagctggtttactgcgcttacccaacacggtaaagaagacttaaaattcccgcgtggccagggcgtcccgatcaacactaactcttccccggatgatcagattggttattaccgcagagcaactcgtcggattcgcggcggcgacggtaaaatgaaagatttgtctccgcgttggtacttttactatctcggcaccggtccggaagctggactgccctacggggcaaacaaggacgggatcatttgggtggctaccgaaggtgccctgaatactccaaaagatcatatcggcacccgtaaccctgctaataacgctgcgatcgttctgcaactgcctcagggtacaactctgccaaaaggcttctatgcagaagggtcgcgtggtggcagccaggcgagtagccgtagcagctcccgctctcgcaactcgtcccgtaactccactccgggctctgagcgcggcacggaaccggctcgtatggcaggtaacggtggtgacgctgctctggcgctgctactgctggacaggctgaaccagctggagtcgaagatgagtggtaaaggccaacagcagcagggccagaccgttaccaaaaagagcgcagctgaagcatctaaaaaaccgcgacagaaacgtaccgcgactaaagcgtacaatgtaacacaggccttcggtcgtcgaggtccggagcaaactcaaggaaactttggcgatcaggaattaatccgccaggggaccgactacaaacactggccgcaaattgcccagttcgccccatccgctagtgcattcttcggtatgagccgcatcggcatggaagtaacgccaagtggtacgtggctgacctacaccggtgctatcaagcttgatgacaaggacccgaactttaaagaccaggttattctgcttaacaaacatattgatgcctataaaactttcccgccgaccgaacccaaaaaggacaaaaagaaaaaagctgatgaaacccaggctctaccgcagcgtcagaaaaaacagcaaactgtgactctgctgccagctgcggacctggatgatttttccaagcagctgcaacagtctatgagctctgcggactctacgcaggctggtggttctggtcaccatcatcaccatcattaa

SEQ ID NO: 2997 - DNA, 2421 bp, Artificial Sequence
  Description of Artificial Sequence: Synthetic polynucleotide
atgaaaatcgaagaaggtaaactggtaatctggattaacggcgataaaggctataacggtctcgctgaagtcggtaagaaattcgagaaagataccggaattaaagtcaccgttgagcatccggataaactggaagagaaattcccacaggttgcggcaactggcgatggccctgacattatcttctgggcacacgaccgctttggtggctacgctcaatctggcctgttggctgaaatcaccccggacaaagcgttccaggacaagctgtatccgtttacctgggatgccgtacgttacaacggcaagctgattgcttacccgatcgctgttgaagcgttatcgctgatttataacaaagatctgctgccgaacccgccaaaaacctgggaagagatcccggcgctggataaagaactgaaagcgaaaggtaagagcgcgctgatgttcaacctgcaagaaccgtacttcacctggccgctgattgctgctgacgggggttatgcgttcaagtatgaaaacggcaagtacgacattaaagacgtgggcgtggataacgctggcgcgaaagcgggtctgaccttcctggttgacctgattaaaaacaaacacatgaatgcagacaccgattactccatcgcagaagctgcctttaataaaggcgaaacagcgatgaccatcaacggcccgtgggcatggtccaacatcgacaccagcaaagtgaattatggtgtaacggtactgccgaccttcaagggtcaaccatccaaaccgttcgttggcgtgctgagcgcaggtattaacgccgccagtccgaacaaagagctggcgaaagagttcctcgaaaactatctgctgactgatgaaggtctggaagcggttaataaagacaaaccgctgggtgccgtagcgctgaagtcttacgaggaagagttggcgaaagatccacgtattgccgccaccatggaaaacgcccagaaaggtgaaatcatgccgaacatcccgcagatgtccgctttctggtatgccgtgcgtactgcggtgatcaacgccgccagcggtcgtcagactgtcgatgaagccctgaaagacgcgcagactggtggttctggtgagaacctgtactttcaaagctcagataatgggcctcaaaaccagcgcaacgctccacgtataaccttcggtggcccgtctgactccacaggcagcaaccagaatggtgagcgtagtggagccaggtctaagcagcgccgtccccagggtctgccgaacaacacggcgagctggtttactgcgcttacccaacacggtaaagaagacttaaaattcccgcgtggccagggcgtcccgatcaacactaactcttccccggatgatcagattggttattaccgcagagcaactcgtcggattcgcggcggcgacggtaaaatgaaagatttgtctccgcgttggtacttttactatctcggcaccggtccggaagctggactgccctacggggcaaacaaggacgggatcatttgggtggctaccgaaggtgccctgacgactccaaaagatcatatcggcacccgtaaccctgctaataacgctgcgatcgttctgcaactgcctcagggtacaactctgccaaaaggcttctatgcagaagggtcgcgtggtggcagccaggcgagtagccgtagcagctcccgctctcgcaactcgtcccgtaactccactccgggctcttctcgcggcacgtccccggctcgtatggcaggtaacggtggtgacgctgctctggcgctgctactgctggacaggctgaaccagctggagtcgaagatgagtggtaaaggccaacagcagcagggccagaccgttaccaaaaagagcgcagctgaagcatctaaaaaaccgcgacagaaacgtaccgcgactaaagcgtacaatgtaacacaggccttcggtcgtcgaggtccggagcaaactcaaggaaactttggcgatcaggaattaatccgccaggggaccgactacaaacactggccgcaaattgcccagttcgccccatccgctagtgcattcttcggtatgagccgcatcggcatggaagtaacgccaagtggtacgtggctgacctacaccggtgctatcaagcttgatgacaaggacccgaactttaaagaccaggttattctgcttaacaaacatattgatgcctataaaactttcccgccgaccgaacccaaaaaggacaaaaagaaaaaagctgatgaaacccaggctctaccgcagcgtcagaaaaaacagcaaactgtgactctgctgccagctgcggacctggatgatttttccaagcagctgcaacagtctatgagctctgcggactctacgcaggctggtggttctggtcaccatcatcaccatcattaa

SEQ ID NO: 2998 - DNA, 2421 bp, Artificial Sequence
  Description of Artificial Sequence: Synthetic polynucleotide
atgaaaatcgaagaaggtaaactggtaatctggattaacggcgataaaggctataacggtctcgctgaagtcggtaagaaattcgagaaagataccggaattaaagtcaccgttgagcatccggataaactggaagagaaattcccacaggttgcggcaactggcgatggccctgacattatcttctgggcacacgaccgctttggtggctacgctcaatctggcctgttggctgaaatcaccccggacaaagcgttccaggacaagctgtatccgtttacctgggatgccgtacgttacaacggcaagctgattgcttacccgatcgctgttgaagcgttatcgctgatttataacaaagatctgctgccgaacccgccaaaaacctgggaagagatcccggcgctggataaagaactgaaagcgaaaggtaagagcgcgctgatgttcaacctgcaagaaccgtacttcacctggccgctgattgctgctgacgggggttatgcgttcaagtatgaaaacggcaagtacgacattaaagacgtgggcgtggataacgctggcgcgaaagcgggtctgaccttcctggttgacctgattaaaaacaaacacatgaatgcagacaccgattactccatcgcagaagctgcctttaataaaggcgaaacagcgatgaccatcaacggcccgtgggcatggtccaacatcgacaccagcaaagtgaattatggtgtaacggtactgccgaccttcaagggtcaaccatccaaaccgttcgttggcgtgctgagcgcaggtattaacgccgccagtccgaacaaagagctggcgaaagagttcctcgaaaactatctgctgactgatgaaggtctggaagcggttaataaagacaaaccgctgggtgccgtagcgctgaagtcttacgaggaagagttggcgaaagatccacgtattgccgccaccatggaaaacgcccagaaaggtgaaatcatgccgaacatcccgcagatgtccgctttctggtatgccgtgcgtactgcggtgatcaacgccgccagcggtcgtcagactgtcgatgaagccctgaaagacgcgcagactggtggttctggtgagaacctgtactttcaaagctcagataatgggcctcaaaaccagcgcaacgctccacgtataaccttcggtggcccgtctgactccacaggcagcaaccagaatggtgagcgtagtggagccaggtctaagcagcgccgtccccagggtctgccgaacaacacggcgagctggtttactgcgcttacccaacacggtaaagaagacttaaaattcccgcgtggccagggcgtcccgatcaacactaactcttccccggatgatcagattggttattaccgcagagcaactcgtcggattcgcggcggcgacggtaaaatgaaagatttgtctccgcgttggtacttttactatctcggcaccggtccggaagctggactgccctacggggcaaacaaggacgggatcatttgggtggctaccgaaggtgccctgaatactccaaaagatcatatcggcacccgtaaccctgctaataacgctgcgatcgttctgcaactgcctcagggtacaactctgccaaaaggcttctatgcagaagggtcgcgtggtggcagccaggcgagtagccgtagcagctcccgctctcgcaactcgtcccgtaactccactccgggctcttctcgcggcacgtccccggctcgtatggcaggtaacggtggtgacgctgctctggcgctgctactgctggacaggctgaaccagctggagtcgaagatgagtggtaaaggccaacagcagcagggccagaccgttaccaaaaagagcgcagctgaagcatctaaaaaaccgcgacagaaacgtaccgcgactaaagcgtacaatgtaacacaggccttcggtcgtcgaggtccggagcaaactcaaggaaactttggcgatcaggaattaatccgccaggggaccgactacaaacactggccgcaaattgcccagttcgccccatccgctagtgcattcttcggtatgagccgcatcggcatggaatggacgccaagtggtacgtggctgacctacaccggtgctatcaagcttgatgacaaggacccgaactttaaagaccaggttattctgcttaacaaacatattgatgcctataaaactttcccgccgaccgaacccaaaaaggacaaaaagaaaaaagctgatgaaacccaggctctaccgcagcgtcagaaaaaacagcaaactgtgactctgctgccagctgcggacctggatgatttttccaagcagctgcaacagtctatgagctctgcggactctacgcaggctggtggttctggtcaccatcatcaccatcattaa

SEQ ID NO: 2999 - DNA, 2421 bp, Artificial Sequence
  Description of Artificial Sequence: Synthetic polynucleotide
atgaaaatcgaagaaggtaaactggtaatctggattaacggcgataaaggctataacggtctcgctgaagtcggtaagaaattcgagaaagataccggaattaaagtcaccgttgagcatccggataaactggaagagaaattcccacaggttgcggcaactggcgatggccctgacattatcttctgggcacacgaccgctttggtggctacgctcaatctggcctgttggctgaaatcaccccggacaaagcgttccaggacaagctgtatccgtttacctgggatgccgtacgttacaacggcaagctgattgcttacccgatcgctgttgaagcgttatcgctgatttataacaaagatctgctgccgaacccgccaaaaacctgggaagagatcccggcgctggataaagaactgaaagcgaaaggtaagagcgcgctgatgttcaacctgcaagaaccgtacttcacctggccgctgattgctgctgacgggggttatgcgttcaagtatgaaaacggcaagtacgacattaaagacgtgggcgtggataacgctggcgcgaaagcgggtctgaccttcctggttgacctgattaaaaacaaacacatgaatgcagacaccgattactccatcgcagaagctgcctttaataaaggcgaaacagcgatgaccatcaacggcccgtgggcatggtccaacatcgacaccagcaaagtgaattatggtgtaacggtactgccgaccttcaagggtcaaccatccaaaccgttcgttggcgtgctgagcgcaggtattaacgccgccagtccgaacaaagagctggcgaaagagttcctcgaaaactatctgctgactgatgaaggtctggaagcggttaataaagacaaaccgctgggtgccgtagcgctgaagtcttacgaggaagagttggcgaaagatccacgtattgccgccaccatggaaaacgcccagaaaggtgaaatcatgccgaacatcccgcagatgtccgctttctggtatgccgtgcgtactgcggtgatcaacgccgccagcggtcgtcagactgtcgatgaagccctgaaagacgcgcagactggtggttctggtgagaacctgtactttcaaagctcagataatgggcctcaaaaccagcgcaacgctccacgtataaccttcggtggcccgtctgactccacaggcagcaaccagaatggtgagcgtagtggagccaggtctaagcagcgccgtccccagggtctgccgaacaacacggcgagctggtttactgcgcttacccaacacggtaaagaagacttaaaattcccgcgtggccagggcgtcccgatcaacactaactcttccccggatgatcagattggttattaccgcagagcaactcgtcggattcgcggcggcgacggtaaaatgaaagatttgtctccgcgttggtacttttactatctcggcaccggtccggaagctggactgccctacggggcaaacaaggacgggatcatttgggtggctaccgaaggtgccctgaatactccaaaagatcatatcggcacccgtaaccctgctaataacgctgcgatcgttctgcaactgcctcagggtacaactctgccaaaaggcttctatgcagaagggtcgcgtggtggcagccaggcgagtagccgtagcagctcccgctctcgcaactcgtcccgtaactccactccgggctcttctcgcggcacgtccccggctcgtatggcaggtaacggtggtgacgctgctctggcgctgctactgctggacaggctgaaccagctggagtcgaagatgagtggtaaaggccaacagcagcagggccagaccgttaccaaaaagagcgcagctgaagcatctaaaaaaccgcgacagaaacgtaccgcgactaaagcgtacaatgtaacacaggccttcggtcgtcgaggtccggagcaaactcaaggaaactttggcgatcaggaattaatccgccaggggaccgactacaaacactggccgcaaattgcccagttcgccccatccgctagtgcattcttcggtatgagccgcatcggcatggaagtaacgccaagtggtacgtggctgacctacaccggtgctatcaagcttgatgacaatgacccgaactttaaagaccaggttattctgcttaacaaacatattgatgcctataaaactttcccgccgaccgaacccaaaaaggacaaaaagaaaaaagctgatgaaacccaggctctaccgcagcgtcagaaaaaacagcaaactgtgactctgctgccagctgcggacctggatgatttttccaagcagctgcaacagtctatgagctctgcggactctacgcaggctggtggttctggtcaccatcatcaccatcattaa

SEQ ID NO: 3000 - DNA, 2421 bp, Artificial Sequence
  Description of Artificial Sequence: Synthetic polynucleotide
atgaaaatcgaagaaggtaaactggtaatctggattaacggcgataaaggctataacggtctcgctgaagtcggtaagaaattcgagaaagataccggaattaaagtcaccgttgagcatccggataaactggaagagaaattcccacaggttgcggcaactggcgatggccctgacattatcttctgggcacacgaccgctttggtggctacgctcaatctggcctgttggctgaaatcaccccggacaaagcgttccaggacaagctgtatccgtttacctgggatgccgtacgttacaacggcaagctgattgcttacccgatcgctgttgaagcgttatcgctgatttataacaaagatctgctgccgaacccgccaaaaacctgggaagagatcccggcgctggataaagaactgaaagcgaaaggtaagagcgcgctgatgttcaacctgcaagaaccgtacttcacctggccgctgattgctgctgacgggggttatgcgttcaagtatgaaaacggcaagtacgacattaaagacgtgggcgtggataacgctggcgcgaaagcgggtctgaccttcctggttgacctgattaaaaacaaacacatgaatgcagacaccgattactccatcgcagaagctgcctttaataaaggcgaaacagcgatgaccatcaacggcccgtgggcatggtccaacatcgacaccagcaaagtgaattatggtgtaacggtactgccgaccttcaagggtcaaccatccaaaccgttcgttggcgtgctgagcgcaggtattaacgccgccagtccgaacaaagagctggcgaaagagttcctcgaaaactatctgctgactgatgaaggtctggaagcggttaataaagacaaaccgctgggtgccgtagcgctgaagtcttacgaggaagagttggcgaaagatccacgtattgccgccaccatggaaaacgcccagaaaggtgaaatcatgccgaacatcccgcagatgtccgctttctggtatgccgtgcgtactgcggtgatcaacgccgccagcggtcgtcagactgtcgatgaagccctgaaagacgcgcagactggtggttctggtgagaacctgtactttcaaagctcagataatgggcctcaaaaccagcgcaacgctccacgtataaccttcggtggcccgtctgactccacaggcagcaaccagaatggtgagcgtagtggagccaggtctaagcagcgccgtccccagggtctgccgaacaacacggcgagctggtttactgcgcttacccaacacggtaaagaagacttaaaattcccgcgtggccagggcgtcccgatcaacactaactcttccccggatgatcagattggttattaccgcagagcaactcgtcggattcgcggcggcgacggtaaaatgaaagatttgtctccgcgttggtacttttactatctcggcaccggtccggaagctggactgccctacggggcaaaccatgacgggatcatttgggtggctaccgaaggtgccctgaatactccaaaagatcatatcggcacccgtaaccctgctaataacgctgcgatcgttctgcaactgcctcagggtacaactctgccaaaaggcttctatgcagaagggtcgcgtggtggcagccaggcgagtagccgtagcagctcccgctctcgcaactcgtcccgtaactccactccgggctcttctcgcggcacgtccccggctcgtatggcaggtaacggtggtgacgctgctctggcgctgctactgctggacaggctgaaccagctggagtcgaagatgagtggtaaaggccaacagcagcagggccagaccgttaccaaaaagagcgcagctgaagcatctaaaaaaccgcgacagaaacgtaccgcgactaaagcgtacaatgtaacacaggccttcggtcgtcgaggtccggagcaaactcaaggaaactttggcgatcaggaattaatccgccaggggaccgactacaaacactggccgcaaattgcccagttcgccccatccgctagtgcattcttcggtatgagccgcatcggcatggaagtaacgccaagtggtacgtggctgacctacaccggtgctatcaagcttgatgacaaggacccgaactttaaagaccaggttattctgcttaacaaacatattgatgcctataaaactttcccgccgaccgaacccaaaaaggacaaaaagaaaaaagctgatgaaacccaggctctaccgcagcgtcagaaaaaacagcaaactgtgactctgctgccagctgcggacctggatgatttttccaagcagctgcaacagtctatgagctctgcggactctacgcaggctggtggttctggtcaccatcatcaccatcattaa

SEQ ID NO: 3001 - DNA, 2421 bp, Artificial Sequence
  Description of Artificial Sequence: Synthetic polynucleotide
atgaaaatcgaagaaggtaaactggtaatctggattaacggcgataaaggctataacggtctcgctgaagtcggtaagaaattcgagaaagataccggaattaaagtcaccgttgagcatccggataaactggaagagaaattcccacaggttgcggcaactggcgatggccctgacattatcttctgggcacacgaccgctttggtggctacgctcaatctggcctgttggctgaaatcaccccggacaaagcgttccaggacaagctgtatccgtttacctgggatgccgtacgttacaacggcaagctgattgcttacccgatcgctgttgaagcgttatcgctgatttataacaaagatctgctgccgaacccgccaaaaacctgggaagagatcccggcgctggataaagaactgaaagcgaaaggtaagagcgcgctgatgttcaacctgcaagaaccgtacttcacctggccgctgattgctgctgacgggggttatgcgttcaagtatgaaaacggcaagtacgacattaaagacgtgggcgtggataacgctggcgcgaaagcgggtctgaccttcctggttgacctgattaaaaacaaacacatgaatgcagacaccgattactccatcgcagaagctgcctttaataaaggcgaaacagcgatgaccatcaacggcccgtgggcatggtccaacatcgacaccagcaaagtgaattatggtgtaacggtactgccgaccttcaagggtcaaccatccaaaccgttcgttggcgtgctgagcgcaggtattaacgccgccagtccgaacaaagagctggcgaaagagttcctcgaaaactatctgctgactgatgaaggtctggaagcggttaataaagacaaaccgctgggtgccgtagcgctgaagtcttacgaggaagagttggcgaaagatccacgtattgccgccaccatggaaaacgcccagaaaggtgaaatcatgccgaacatcccgcagatgtccgctttctggtatgccgtgcgtactgcggtgatcaacgccgccagcggtcgtcagactgtcgatgaagccctgaaagacgcgcagactggtggttctggtgagaacctgtactttcaaagctcagataatgggcctcaaaaccagcgcaacgctccacgtataaccttcggtggcccgtctgactccacaggcagcaaccagaatggtgagcgtagtggagccaggtctaagcagcgccgtccccagggtctgccgaacaacacggcgagctggtttactgcgcttacccaacacggtaaagaagacttaaaattcccgcgtggccagggcgtcccgatcaacccaaactcttccccggatgatcagattggttattaccgcagagcaactcgtcggattcgcggcggcgacggtaaaatgaaagatttgtctccgcgttggtacttttactatctcggcaccggtccggaagctggactgccctacggggcaaacaaggacgggatcatttgggtggctaccgaaggtgccctgaatactccaaaagatcatatcggcacccgtaaccctgctaataacgctgcgatcgttctgcaactgcctcagggtacaactctgccaaaaggcttctatgcagaagggtcgcgtggtggcagccaggcgagtagccgtagcagctcccgctctcgcaactcgtcccgtaactccactccgggctcttctcgcggcacgtccccggctcgtatggcaggtaacggtggtgacgctgctctggcgctgctactgctggacaggctgaaccagctggagtcgaagatgagtggtaaaggccaacagcagcagggccagaccgttaccaaaaagagcgcagctgaagcatctaaaaaaccgcgacagaaacgtaccgcgactaaagcgtacaatgtaacacaggccttcggtcgtcgaggtccggagcaaactcaaggaaactttggcgatcaggaattaatccgccaggggaccgactacaaacactggccgcaaattgcccagttcgccccatccgctagtgcattcttcggtatgagccgcatcggcatggaagtaacgccaagtggtacgtggctgacctacaccggtgctatcaagcttgatgacaaggacccgaactttaaagaccaggttattctgcttaacaaacatattgatgcctataaaactttcccgccgaccgaacccaaaaaggacaaaaagaaaaaagctgatgaaacccaggctctaccgcagcgtcagaaaaaacagcaaactgtgactctgctgccagctgcggacctggatgatttttccaagcagctgcaacagtctatgagctctgcggactctacgcaggctggtggttctggtcaccatcatcaccatcattaa

SEQ ID NO: 3002 - DNA, 2421 bp, Artificial Sequence
  Description of Artificial Sequence: Synthetic polynucleotide
atgaaaatcgaagaaggtaaactggtaatctggattaacggcgataaaggctataacggtctcgctgaagtcggtaagaaattcgagaaagataccggaattaaagtcaccgttgagcatccggataaactggaagagaaattcccacaggttgcggcaactggcgatggccctgacattatcttctgggcacacgaccgctttggtggctacgctcaatctggcctgttggctgaaatcaccccggacaaagcgttccaggacaagctgtatccgtttacctgggatgccgtacgttacaacggcaagctgattgcttacccgatcgctgttgaagcgttatcgctgatttataacaaagatctgctgccgaacccgccaaaaacctgggaagagatcccggcgctggataaagaactgaaagcgaaaggtaagagcgcgctgatgttcaacctgcaagaaccgtacttcacctggccgctgattgctgctgacgggggttatgcgttcaagtatgaaaacggcaagtacgacattaaagacgtgggcgtggataacgctggcgcgaaagcgggtctgaccttcctggttgacctgattaaaaacaaacacatgaatgcagacaccgattactccatcgcagaagctgcctttaataaaggcgaaacagcgatgaccatcaacggcccgtgggcatggtccaacatcgacaccagcaaagtgaattatggtgtaacggtactgccgaccttcaagggtcaaccatccaaaccgttcgttggcgtgctgagcgcaggtattaacgccgccagtccgaacaaagagctggcgaaagagttcctcgaaaactatctgctgactgatgaaggtctggaagcggttaataaagacaaaccgctgggtgccgtagcgctgaagtcttacgaggaagagttggcgaaagatccacgtattgccgccaccatggaaaacgcccagaaaggtgaaatcatgccgaacatcccgcagatgtccgctttctggtatgccgtgcgtactgcggtgatcaacgccgccagcggtcgtcagactgtcgatgaagccctgaaagacgcgcagactggtggttctggtgagaacctgtactttcaaagctcagataatgggcctcaaaaccagcgcaacgctccacgtataaccttcggtggcccgtctgactccacaggcagcaaccagaatggtgagcgtagtggagccaggtctaagcagcgccgtccccagggtctgccgaacaacacggcgagctggtttactgcgcttacccaacacggtaaagaagacttaaaattcccgcgtggccagggcgtcccgatcaacactaactcttccccggatgatcagattggttattaccgcagagcaactcgtcggattcgcggcggcgacggtaaaatgaaagatttgtctccgcgttggtacttttactatctcggcaccggtccggaagctggactgccctacggggcaaacaaggacgggatcatttgggtggctaccgaaggtgccctgaatactccaaaagatcatatcggcacccgtaaccctgctaataacgctgcgatcgttctgcaactgcctcagggtacaactctgccaaaaggcttctatgcagaagggtcgcgtggtggcagccaggcgagtagccgtagcagctcccgctctcgcaactcgtcccgtaactccactccgggctcttctcgcggcacgtccccggctcgtatggcaggtaacggtggtgacgctgctctggcgctgctactgctggacaggctgaaccagctggagtcgaagatgagtggtaaaggccaacagcagcagggccagaccgttaccaaaaagagcgcagctgaagcatctaaaaaaccgcgacagaaacgtaccgcgactaaagcgtacaatgtaacacaggccttcggtcgtcgaggtccggagcaacttcaaggaaactttggcgatcaggaattaatccgccaggggaccgactacaaacactggccgcaaattgcccagttcgccccatccgctagtgcattcttcggtatgagccgcatcggcatggaagtaacgccaagtggtacgtggctgacctacaccggtgctatcaagcttgatgacaaggacccgaactttaaagaccaggttattctgcttaacaaacatattgatgcctataaaactttcccgccgaccgaacccaaaaaggacaaaaagaaaaaagctgatgaaacccaggctctaccgcagcgtcagaaaaaacagcaaactgtgactctgctgccagctgcggacctggatgatttttccaagcagctgcaacagtctatgagctctgcggactctacgcaggctggtggttctggtcaccatcatcaccatcattaa

SEQ ID NO: 3003 - DNA, 2421 bp, Artificial Sequence
  Description of Artificial Sequence: Synthetic polynucleotide
atgaaaatcgaagaaggtaaactggtaatctggattaacggcgataaaggctataacggtctcgctgaagtcggtaagaaattcgagaaagataccggaattaaagtcaccgttgagcatccggataaactggaagagaaattcccacaggttgcggcaactggcgatggccctgacattatcttctgggcacacgaccgctttggtggctacgctcaatctggcctgttggctgaaatcaccccggacaaagcgttccaggacaagctgtatccgtttacctgggatgccgtacgttacaacggcaagctgattgcttacccgatcgctgttgaagcgttatcgctgatttataacaaagatctgctgccgaacccgccaaaaacctgggaagagatcccggcgctggataaagaactgaaagcgaaaggtaagagcgcgctgatgttcaacctgcaagaaccgtacttcacctggccgctgattgctgctgacgggggttatgcgttcaagtatgaaaacggcaagtacgacattaaagacgtgggcgtggataacgctggcgcgaaagcgggtctgaccttcctggttgacctgattaaaaacaaacacatgaatgcagacaccgattactccatcgcagaagctgcctttaataaaggcgaaacagcgatgaccatcaacggcccgtgggcatggtccaacatcgacaccagcaaagtgaattatggtgtaacggtactgccgaccttcaagggtcaaccatccaaaccgttcgttggcgtgctgagcgcaggtattaacgccgccagtccgaacaaagagctggcgaaagagttcctcgaaaactatctgctgactgatgaaggtctggaagcggttaataaagacaaaccgctgggtgccgtagcgctgaagtcttacgaggaagagttggcgaaagatccacgtattgccgccaccatggaaaacgcccagaaaggtgaaatcatgccgaacatcccgcagatgtccgctttctggtatgccgtgcgtactgcggtgatcaacgccgccagcggtcgtcagactgtcgatgaagccctgaaagacgcgcagactggtggttctggtgagaacctgtactttcaaagctcagataatgggcctcaaaaccagcgcaacgctccacgtataaccttcggtggcccgtctgactccacaggcagcaaccagaatggtgagcgtagtggagccaggtctaagcagcgccgtccccagggtctgccgaacaacacggcgagctggtttactgcgcttacccaacacggtaaagaagacttaaaattcccgcgtggccagggcgtcccgatcaacactaactcttccccggatgatcagattggttattaccgcagagcaactcgtcggattcgcggcggcgacggtaaaatgaaagatttgtctccgcgttggtacttttactatctcggcaccggtccggaagctggactgccctacggggcaaacaagaatgggatcatttgggtggctaccgaaggtgccctgaatactccaaaagatcatatcggcacccgtaaccctgctaataacgctgcgatcgttctgcaactgcctcagggtacaactctgccaaaaggcttctatgcagaagggtcgcgtggtggcagccaggcgagtagccgtagcagctcccgctctcgcaactcgtcccgtaactccactccgggctcttctcgcggcacgtccccggctcgtatggcaggtaacggtggtgacgctgctctggcgctgctactgctggacaggctgaaccagctggagtcgaagatgagtggtaaaggccaacagcagcagggccagaccgttaccaaaaagagcgcagctgaagcatctaaaaaaccgcgacagaaacgtaccgcgactaaagcgtacaatgtaacacaggccttcggtcgtcgaggtccggagcaaactcaaggaaactttggcgatcaggaattaatccgccaggggaccgactacaaacactggccgcaaattgcccagttcgccccatccgctagtgcattcttcggtatgagccgcatcggcatggaagtaacgccaagtggtacgtggctgacctacaccggtgctatcaagcttgatgacaaggacccgaactttaaagaccaggttattctgcttaacaaacatattgatgcctataaaactttcccgccgaccgaacccaaaaaggacaaaaagaaaaaagctgatgaaacccaggctctaccgcagcgtcagaaaaaacagcaaactgtgactctgctgccagctgcggacctggatgatttttccaagcagctgcaacagtctatgagctctgcggactctacgcaggctggtggttctggtcaccatcatcaccatcattaa

SEQ ID NO: 3004 - DNA, 2421 bp, Artificial Sequence
  Description of Artificial Sequence: Synthetic polynucleotide
atgaaaatcgaagaaggtaaactggtaatctggattaacggcgataaaggctataacggtctcgctgaagtcggtaagaaattcgagaaagataccggaattaaagtcaccgttgagcatccggataaactggaagagaaattcccacaggttgcggcaactggcgatggccctgacattatcttctgggcacacgaccgctttggtggctacgctcaatctggcctgttggctgaaatcaccccggacaaagcgttccaggacaagctgtatccgtttacctgggatgccgtacgttacaacggcaagctgattgcttacccgatcgctgttgaagcgttatcgctgatttataacaaagatctgctgccgaacccgccaaaaacctgggaagagatcccggcgctggataaagaactgaaagcgaaaggtaagagcgcgctgatgttcaacctgcaagaaccgtacttcacctggccgctgattgctgctgacgggggttatgcgttcaagtatgaaaacggcaagtacgacattaaagacgtgggcgtggataacgctggcgcgaaagcgggtctgaccttcctggttgacctgattaaaaacaaacacatgaatgcagacaccgattactccatcgcagaagctgcctttaataaaggcgaaacagcgatgaccatcaacggcccgtgggcatggtccaacatcgacaccagcaaagtgaattatggtgtaacggtactgccgaccttcaagggtcaaccatccaaaccgttcgttggcgtgctgagcgcaggtattaacgccgccagtccgaacaaagagctggcgaaagagttcctcgaaaactatctgctgactgatgaaggtctggaagcggttaataaagacaaaccgctgggtgccgtagcgctgaagtcttacgaggaagagttggcgaaagatccacgtattgccgccaccatggaaaacgcccagaaaggtgaaatcatgccgaacatcccgcagatgtccgctttctggtatgccgtgcgtactgcggtgatcaacgccgccagcggtcgtcagactgtcgatgaagccctgaaagacgcgcagactggtggttctggtgagaacctgtactttcaaagctcagataatgggcctcaaaaccagcgcaacgctccacgtataaccttcggtggcccgtctgactccacaggcagcaaccagaatggtgagcgtagtggagccaggtctaagcagcgccgtccccagggtctgccgaacaacacggcgagctggtttactgcgcttacccaacacggtaaagaagacttaaaattcccgcgtggccagggcgtcccgatcaacactaactcttccccggatgatcagattggttattaccgcagagcaactcgtcggattcgcggcggcgacggtaaaatgaaagatttgtctccgcgttggtacttttactatctcggcaccggtccggaagctggactgccctacggggcaaacaaggacgggatcatttgggtggctaccgaaggtgccctgaatactccaaaagatcatatcggcacccgtaaccctgctaataacgctgcgatcgttctgcaactgcctcagggtacaactctgccaaaaggcttctatgcagaagggtcgcgtggtggcagccaggcgagtagccgtagcagctcccgctctcgcaactcgtcccgtaactccactccgggctcttctcgcggcacgtccccggctcgtatggcaggtaacggtggtgacgctgctctggcgctgctactgctggacaggctgaaccagctggagtcgaagatgagtggtaaaggccaacagcagcagggccagaccgttaccaaaaagagcgcagctgaagcatctaaaaaaccgcgacagaaacgtaccgcgactaaagcgtacaatgtaacacaggccttcggtcgtcgaggtccggagcaaactcaaggaaactttggcgatcaggaattaatccgccaggggaccgactacaaacactggccgcaaattgcccagttcgccccatccgctagtgcattcttcggtatgagccgcatcggcatggaagaaacgccaagtggtacgtggctgacctacaccggtgctatcaagcttgatgacaaggacccgaactttaaagaccaggttattctgcttaacaaacatattgatgcctataaaactttcccgccgaccgaacccaaaaaggacaaaaagaaaaaagctgatgaaacccaggctctaccgcagcgtcagaaaaaacagcaaactgtgactctgctgccagctgcggacctggatgatttttccaagcagctgcaacagtctatgagctctgcggactctacgcaggctggtggttctggtcaccatcatcaccatcattaa

SEQ ID NO: 3005 - DNA, 2421 bp, Artificial Sequence
  Description of Artificial Sequence: Synthetic polynucleotide
atgaaaatcgaagaaggtaaactggtaatctggattaacggcgataaaggctataacggtctcgctgaagtcggtaagaaattcgagaaagataccggaattaaagtcaccgttgagcatccggataaactggaagagaaattcccacaggttgcggcaactggcgatggccctgacattatcttctgggcacacgaccgctttggtggctacgctcaatctggcctgttggctgaaatcaccccggacaaagcgttccaggacaagctgtatccgtttacctgggatgccgtacgttacaacggcaagctgattgcttacccgatcgctgttgaagcgttatcgctgatttataacaaagatctgctgccgaacccgccaaaaacctgggaagagatcccggcgctggataaagaactgaaagcgaaaggtaagagcgcgctgatgttcaacctgcaagaaccgtacttcacctggccgctgattgctgctgacgggggttatgcgttcaagtatgaaaacggcaagtacgacattaaagacgtgggcgtggataacgctggcgcgaaagcgggtctgaccttcctggttgacctgattaaaaacaaacacatgaatgcagacaccgattactccatcgcagaagctgcctttaataaaggcgaaacagcgatgaccatcaacggcccgtgggcatggtccaacatcgacaccagcaaagtgaattatggtgtaacggtactgccgaccttcaagggtcaaccatccaaaccgttcgttggcgtgctgagcgcaggtattaacgccgccagtccgaacaaagagctggcgaaagagttcctcgaaaactatctgctgactgatgaaggtctggaagcggttaataaagacaaaccgctgggtgccgtagcgctgaagtcttacgaggaagagttggcgaaagatccacgtattgccgccaccatggaaaacgcccagaaaggtgaaatcatgccgaacatcccgcagatgtccgctttctggtatgccgtgcgtactgcggtgatcaacgccgccagcggtcgtcagactgtcgatgaagccctgaaagacgcgcagactggtggttctggtgagaacctgtactttcaaagctcagataatgggcctcaaaaccagcgcaacgctccacgtataaccttcggtggcccgtctgactccacaggcagcaaccagaatggtgagcgtagtggagccaggtctaagcagcgccgtccccagggtctgccgaacaacacggcgagctggtttactgcgcttacccaacacggtaaagaagacttaaaattcccgcgtggccagggcgtcccgatcaacactaactcttccccggatgatcagattggttattaccgcagagcaactcgtcggattcgcggcggcgacggtaaaatgaaagatttgtctccgcgttggtacttttactatctcggcaccggtccggaagctggactgccctacggggcaaacaaggacgggatcatttgggtggctaccgaaggtgccctgaatactccaaaagatcatatcggcacccgtaaccctgctaataacgctgcgatcgttctgcaactgcctcagggtacaactctgccaaaaggcttctatgcagaagggtcgcgtggtggcagccaggcgagtagccgtagcagctcccgctctcgcaactcgtcccgtaactccactccgggctcttctcgcggcacgtccccggctcgtatggcaggtaacggtggtgacgctgctctggcgctgctactgctggacaggctgaaccagctggagtcgaagatgagtggtaaaggccaacagcagcagggccagaccgttaccaaaaagagcgcagctgaagcatctaaaaaaccgcgacagaaacgtaccgcgactaaaggatacaatgtaacacaggccttcggtcgtcgaggtccggagcaaactcaaggaaactttggcgatcaggatttaatcaaagaagggaccgactacaaacactggccgcaaattgcccagttcgccccatccgctagtgcattcttcggtatgagccgcatctcgaccgaagaaacgccaagtggtacgtggctgacctacaccggtgctatcaagcttgataaaaaggacccgaactttaaagaccaggttattctgcttaacaaacatattgatgcctataaaactttcccgccgaccgaacccaaaaaggacaaaaagaaaaaagctgatgaaacccaggctctaccgcagcgtcagaaaaaacagcaaactgtgactctgctgccagctgcggacctggatgatttttccaagcagctgcaacagtctatgagctctgcggactctacgcaggctggtggttctggtcaccatcatcaccatcattaa

SEQ ID NO: 3006 - DNA, 2421 bp, Artificial Sequence
  Description of Artificial Sequence: Synthetic polynucleotide
atgaaaatcgaagaaggtaaactggtaatctggattaacggcgataaaggctataacggtctcgctgaagtcggtaagaaattcgagaaagataccggaattaaagtcaccgttgagcatccggataaactggaagagaaattcccacaggttgcggcaactggcgatggccctgacattatcttctgggcacacgaccgctttggtggctacgctcaatctggcctgttggctgaaatcaccccggacaaagcgttccaggacaagctgtatccgtttacctgggatgccgtacgttacaacggcaagctgattgcttacccgatcgctgttgaagcgttatcgctgatttataacaaagatctgctgccgaacccgccaaaaacctgggaagagatcccggcgctggataaagaactgaaagcgaaaggtaagagcgcgctgatgttcaacctgcaagaaccgtacttcacctggccgctgattgctgctgacgggggttatgcgttcaagtatgaaaacggcaagtacgacattaaagacgtgggcgtggataacgctggcgcgaaagcgggtctgaccttcctggttgacctgattaaaaacaaacacatgaatgcagacaccgattactccatcgcagaagctgcctttaataaaggcgaaacagcgatgaccatcaacggcccgtgggcatggtccaacatcgacaccagcaaagtgaattatggtgtaacggtactgccgaccttcaagggtcaaccatccaaaccgttcgttggcgtgctgagcgcaggtattaacgccgccagtccgaacaaagagctggcgaaagagttcctcgaaaactatctgctgactgatgaaggtctggaagcggttaataaagacaaaccgctgggtgccgtagcgctgaagtcttacgaggaagagttggcgaaagatccacgtattgccgccaccatggaaaacgcccagaaaggtgaaatcatgccgaacatcccgcagatgtccgctttctggtatgccgtgcgtactgcggtgatcaacgccgccagcggtcgtcagactgtcgatgaagccctgaaagacgcgcagactggtggttctggtgagaacctgtactttcaaagctcagataatgggcctcaaaaccagcgcaacgctccacgtataaccttcggtggcccgtctgactccacaggcagcaaccagaatggtgagcgtagtggagccaggtctaagcagcgccgtccccagggtctgccgaacaacacggcgagctggtttactgcgcttacccaacacggtaaagaagacttaaaattcccgcgtggccagggcgtcccgatcaacactaactcttccccggatgatcagattggttattaccgcagagcaactcgtcggattcgcggcggcgacggtaaaatgaaagatttgtctccgcgttggtacttttactatctcggcaccggtccggaagctggactgccctacggggcaaacaaggacgggatcatttgggtggctaccgaaggtgccctgaatactccaaaagatcatatcggcacccgtaaccctgctaataacgctgcgatcgttctgcaactgcctcagggtacaactctgccaaaaggcttctatgcagaagggtcgcgtggtggcagccaggcgagtagccgtagcagctcccgctctcgcaactcgtcccgtaactccactccgggctcttctcgcggcacgtccccggctcgtatggcaggtaacggtggtgacgctgctctggcgctgctactgctggacaggctgaaccagctggagtcgaagatgagtggtaaaggccaacagcagcagggccagaccgttaccaaaaagagcgcagctgaagcatctaaaaaaccgcgacagaaacgtaccgcgactaaagcgtacaatgtaacacaggccttcggtcgtcgaggtccggagcaaactcaaggaaactttggcgatcaggaattaatccgccaggggaccgactacaaacactggccgcaaattgcccagttcgccccatccgctagtgcattcttcggtatgagccgcatcggcatggaattgacgccaagtggtacgtggctgacctacaccggtgctatcaagcttgatgacaaggacccgaactttaaagaccaggttattctgcttaacaaacatattgatgcctataaaactttcccgccgaccgaacccaaaaaggacaaaaagaaaaaagctgatgaaacccaggctctaccgcagcgtcagaaaaaacagcaaactgtgactctgctgccagctgcggacctggatgatttttccaagcagctgcaacagtctatgagctctgcggactctacgcaggctggtggttctggtcaccatcatcaccatcattaa

SEQ ID NO: 3007 - DNA, 2421 bp, Artificial Sequence
  Description of Artificial Sequence: Synthetic polynucleotide
atgaaaatcgaagaaggtaaactggtaatctggattaacggcgataaaggctataacggtctcgctgaagtcggtaagaaattcgagaaagataccggaattaaagtcaccgttgagcatccggataaactggaagagaaattcccacaggttgcggcaactggcgatggccctgacattatcttctgggcacacgaccgctttggtggctacgctcaatctggcctgttggctgaaatcaccccggacaaagcgttccaggacaagctgtatccgtttacctgggatgccgtacgttacaacggcaagctgattgcttacccgatcgctgttgaagcgttatcgctgatttataacaaagatctgctgccgaacccgccaaaaacctgggaagagatcccggcgctggataaagaactgaaagcgaaaggtaagagcgcgctgatgttcaacctgcaagaaccgtacttcacctggccgctgattgctgctgacgggggttatgcgttcaagtatgaaaacggcaagtacgacattaaagacgtgggcgtggataacgctggcgcgaaagcgggtctgaccttcctggttgacctgattaaaaacaaacacatgaatgcagacaccgattactccatcgcagaagctgcctttaataaaggcgaaacagcgatgaccatcaacggcccgtgggcatggtccaacatcgacaccagcaaagtgaattatggtgtaacggtactgccgaccttcaagggtcaaccatccaaaccgttcgttggcgtgctgagcgcaggtattaacgccgccagtccgaacaaagagctggcgaaagagttcctcgaaaactatctgctgactgatgaaggtctggaagcggttaataaagacaaaccgctgggtgccgtagcgctgaagtcttacgaggaagagttggcgaaagatccacgtattgccgccaccatggaaaacgcccagaaaggtgaaatcatgccgaacatcccgcagatgtccgctttctggtatgccgtgcgtactgcggtgatcaacgccgccagcggtcgtcagactgtcgatgaagccctgaaagacgcgcagactggtggttctggtgagaacctgtactttcaaagctcagataatgggcctcaaaaccagcgcaacgctccacgtataaccttcggtggcccgtctgactccacaggcagcaaccagaatggtgagcgtagtggagccaggtctaagcagcgccgtccccagggtctgccgaacaacacggcgagctggtttactggccttacccaacacggtaaagaagacttaaaattcccgccaggccagggcgtcccgatcaacactaactcttccccggatgatcagattggttattaccgcagagcaactcgtcggattcgcggcggcgacggtaaaatgaaagatttgccaccgcgttggtacttttactatctcggcaccggtccggaagctgatctgccctacgggcaagttaagcctgggatcgtgtgggtggctgaggaaggtgccctgaatactccaaaagatcatatcggcacccgtaaccctgctaataacgctgcgatcccgctgcaactgcctccgggtacaactctgccaaaaggcttctatgcagaagggtcgcgtggtggcagccaggcgagtagccgtagcagctcccgctctcgcaactcgtcccgtaactccactccgggctcttctcgcggcacgtccccggctcgtatggcaggtaacggtggtgacgctgctctggcgctgctactgctggacaggctgaaccagctggagtcgaagatgagtggtaaaggccaacagcagcagggccagaccgttaccaaaaagagcgcagctgaagcatctaaaaaaccgcgacagaaacgtaccgcgactaaagcgtacaatgtaacacaggccttcggtcgtcgaggtccggagcaaactcaaggaaactttggcgatcaggaattaatccgccaggggaccgactacaaacactggccgcaaattgcccagttcgccccatccgctagtgcattcttcggtatgagccgcatcggcatggaagtaacgccaagtggtacgtggctgacctacaccggtgctatcaagcttgatgacaaggacccgaactttaaagaccaggttattctgcttaacaaacatattgatgcctataaaactttcccgccgaccgaacccaaaaaggacaaaaagaaaaaagctgatgaaacccaggctctaccgcagcgtcagaaaaaacagcaaactgtgactctgctgccagctgcggacctggatgatttttccaagcagctgcaacagtctatgagctctgcggactctacgcaggctggtggttctggtcaccatcatcaccatcattaa

SEQ ID NO: 3008 - DNA, 2421 bp, Artificial Sequence
  Description of Artificial Sequence: Synthetic polynucleotide
atgaaaatcgaagaaggtaaactggtaatctggattaacggcgataaaggctataacggtctcgctgaagtcggtaagaaattcgagaaagataccggaattaaagtcaccgttgagcatccggataaactggaagagaaattcccacaggttgcggcaactggcgatggccctgacattatcttctgggcacacgaccgctttggtggctacgctcaatctggcctgttggctgaaatcaccccggacaaagcgttccaggacaagctgtatccgtttacctgggatgccgtacgttacaacggcaagctgattgcttacccgatcgctgttgaagcgttatcgctgatttataacaaagatctgctgccgaacccgccaaaaacctgggaagagatcccggcgctggataaagaactgaaagcgaaaggtaagagcgcgctgatgttcaacctgcaagaaccgtacttcacctggccgctgattgctgctgacgggggttatgcgttcaagtatgaaaacggcaagtacgacattaaagacgtgggcgtggataacgctggcgcgaaagcgggtctgaccttcctggttgacctgattaaaaacaaacacatgaatgcagacaccgattactccatcgcagaagctgcctttaataaaggcgaaacagcgatgaccatcaacggcccgtgggcatggtccaacatcgacaccagcaaagtgaattatggtgtaacggtactgccgaccttcaagggtcaaccatccaaaccgttcgttggcgtgctgagcgcaggtattaacgccgccagtccgaacaaagagctggcgaaagagttcctcgaaaactatctgctgactgatgaaggtctggaagcggttaataaagacaaaccgctgggtgccgtagcgctgaagtcttacgaggaagagttggcgaaagatccacgtattgccgccaccatggaaaacgcccagaaaggtgaaatcatgccgaacatcccgcagatgtccgctttctggtatgccgtgcgtactgcggtgatcaacgccgccagcggtcgtcagactgtcgatgaagccctgaaagacgcgcagactggtggttctggtgagaacctgtactttcaaagctcagataatgggcctcaaaaccagcgcaacgctccacgtataaccttcggtggcccgtctgactccacaggcagcaaccagaatggtgagcgtagtggagccaggtctaagcagcgccgtccccagggtctgccgaacaacacggcgagctggtttactgcgcttacccaacacggtaaagaagacttaaaattcccgcgtggccagggcgtcccgatcaacactaactctaaaccggatgatcagattggttattaccgcagagcaactcgtcggattcgcggcggcgacggtaaaatgaaagatttgtctccgcgttggtacttttactatctcggcaccggtccggaagctggactgccctacggggcaaacaaggacgggatcatttgggtggctaccgaaggtgccctgaatactccaaaagatcatatcggcacccgtaaccctgctaataacgctgcgatcgttctgcaactgcctcagggtacaactctgccaaaaggcttctatgcagaagggtcgcgtggtggcagccaggcgagtagccgtagcagctcccgctctcgcaactcgtcccgtaactccactccgggctcttctcgcggcacgtccccggctcgtatggcaggtaacggtggtgacgctgctctggcgctgctactgctggacaggctgaaccagctggagtcgaagatgagtggtaaaggccaacagcagcagggccagaccgttaccaaaaagagcgcagctgaagcatctaaaaaaccgcgacagaaacgtaccgcgactaaagcgtacaatgtaacacaggccttcggtcgtcgaggtccggagcaaactcaaggaaactttggcgatcaggaattaatccgccaggggaccgactacaaacactggccgcaaattgcccagttcgccccatccgctagtgcattcttcggtatgagccgcatcggcatggaagtaacgccaagtggtacgtggctgacctacaccggtgctatcaagcttgatgacaaggacccgaactttaaagaccaggttattctgcttaacaaacatattgatgcctataaaactttcccgccgaccgaacccaaaaaggacaaaaagaaaaaagctgatgaaacccaggctctaccgcagcgtcagaaaaaacagcaaactgtgactctgctgccagctgcggacctggatgatttttccaagcagctgcaacagtctatgagctctgcggactctacgcaggctggtggttctggtcaccatcatcaccatcattaa

SEQ ID NO: 3009 - DNA, 2421 bp, Artificial Sequence
  Description of Artificial Sequence: Synthetic polynucleotide
atgaaaatcgaagaaggtaaactggtaatctggattaacggcgataaaggctataacggtctcgctgaagtcggtaagaaattcgagaaagataccggaattaaagtcaccgttgagcatccggataaactggaagagaaattcccacaggttgcggcaactggcgatggccctgacattatcttctgggcacacgaccgctttggtggctacgctcaatctggcctgttggctgaaatcaccccggacaaagcgttccaggacaagctgtatccgtttacctgggatgccgtacgttacaacggcaagctgattgcttacccgatcgctgttgaagcgttatcgctgatttataacaaagatctgctgccgaacccgccaaaaacctgggaagagatcccggcgctggataaagaactgaaagcgaaaggtaagagcgcgctgatgttcaacctgcaagaaccgtacttcacctggccgctgattgctgctgacgggggttatgcgttcaagtatgaaaacggcaagtacgacattaaagacgtgggcgtggataacgctggcgcgaaagcgggtctgaccttcctggttgacctgattaaaaacaaacacatgaatgcagacaccgattactccatcgcagaagctgcctttaataaaggcgaaacagcgatgaccatcaacggcccgtgggcatggtccaacatcgacaccagcaaagtgaattatggtgtaacggtactgccgaccttcaagggtcaaccatccaaaccgttcgttggcgtgctgagcgcaggtattaacgccgccagtccgaacaaagagctggcgaaagagttcctcgaaaactatctgctgactgatgaaggtctggaagcggttaataaagacaaaccgctgggtgccgtagcgctgaagtcttacgaggaagagttggcgaaagatccacgtattgccgccaccatggaaaacgcccagaaaggtgaaatcatgccgaacatcccgcagatgtccgctttctggtatgccgtgcgtactgcggtgatcaacgccgccagcggtcgtcagactgtcgatgaagccctgaaagacgcgcagactggtggttctggtgagaacctgtactttcaaagctcagataatgggcctcaaaaccagcgcaacgctccacgtataaccttcggtggcccgtctgactccacaggcagcaaccagaatggtgagcgtagtggagccaggtctaagcagcgccgtccccagggtctgccgaacaacacggcgagctggtttactgcgcttacccaacacggtaaagaagacttaaaattcccgcgtggccagggcgtcccgatcaacactaactcttccccggatgatcagattggttattaccgcagagcaactcgtcggattcgcggcggcgacggtaaaatgaaagatttgtctccgcgttggtacttttactatctcggcaccggtccggaagctggactgccctacggggcaaacaaggacgggatcatttgggtggctaccgaaggtgccctgaatactccaaaagatcatatcggcacccgtaaccctgctaataacgctgcgatcgttctgcaactgcctcagggtacaactctgccaaaaggcttctatgcagaagggtcgcgtggtggcagccaggcgagtagccgtagcagctcccgctctcgcaactcgtcccgtaactccactccgggctcttctcgcggcacgtccccggctcgtatggcaggtaacggtggtgacgctgctctggcgctgctactgctggacaggctgaaccagctggagtcgaagatgagtggtaaaggccaacagcagcagggccagaccgttaccaaaaagagcgcagctgaagcatctaaaaaaccgcgacagaaacgtaccgcgactaaagcgtacaatgtaacacaggccttcggtcgtcgaggtccggagcaaactcaaggaaactttggcgatcaggaattaatccgccaggggaccgactacaaacactggccgcaaattgcccagttcgccccatccgctagtgcattcttcggtatgagccgcatcgagatggaagtaacgccaagtggtacgtggctgacctacaccggtgctatcaagcttgatgacaaggacccgaactttaaagaccaggttattctgcttaacaaacatattgatgcctataaaactttcccgccgaccgaacccaaaaaggacaaaaagaaaaaagctgatgaaacccaggctctaccgcagcgtcagaaaaaacagcaaactgtgactctgctgccagctgcggacctggatgatttttccaagcagctgcaacagtctatgagctctgcggactctacgcaggctggtggttctggtcaccatcatcaccatcattaa

SEQ ID NO: 3010 - DNA, 2421 bp, Artificial Sequence
  Description of Artificial Sequence: Synthetic polynucleotide
atgaaaatcgaagaaggtaaactggtaatctggattaacggcgataaaggctataacggtctcgctgaagtcggtaagaaattcgagaaagataccggaattaaagtcaccgttgagcatccggataaactggaagagaaattcccacaggttgcggcaactggcgatggccctgacattatcttctgggcacacgaccgctttggtggctacgctcaatctggcctgttggctgaaatcaccccggacaaagcgttccaggacaagctgtatccgtttacctgggatgccgtacgttacaacggcaagctgattgcttacccgatcgctgttgaagcgttatcgctgatttataacaaagatctgctgccgaacccgccaaaaacctgggaagagatcccggcgctggataaagaactgaaagcgaaaggtaagagcgcgctgatgttcaacctgcaagaaccgtacttcacctggccgctgattgctgctgacgggggttatgcgttcaagtatgaaaacggcaagtacgacattaaagacgtgggcgtggataacgctggcgcgaaagcgggtctgaccttcctggttgacctgattaaaaacaaacacatgaatgcagacaccgattactccatcgcagaagctgcctttaataaaggcgaaacagcgatgaccatcaacggcccgtgggcatggtccaacatcgacaccagcaaagtgaattatggtgtaacggtactgccgaccttcaagggtcaaccatccaaaccgttcgttggcgtgctgagcgcaggtattaacgccgccagtccgaacaaagagctggcgaaagagttcctcgaaaactatctgctgactgatgaaggtctggaagcggttaataaagacaaaccgctgggtgccgtagcgctgaagtcttacgaggaagagttggcgaaagatccacgtattgccgccaccatggaaaacgcccagaaaggtgaaatcatgccgaacatcccgcagatgtccgctttctggtatgccgtgcgtactgcggtgatcaacgccgccagcggtcgtcagactgtcgatgaagccctgaaagacgcgcagactggtggttctggtgagaacctgtactttcaaagctcagataatgggcctcaaaaccagcgcaacgctccacgtataaccttcggtggcccgtctgactccacaggcagcaaccagaatggtgagcgtagtggagccaggtctaagcagcgccgtccccagggtctgccgaacaacacggcgagctggtttactgcgcttacccaacacggtaaagaagacttaaaattcccgcgtggccagggcgtcccgctgaacactaactcttccccggatgatcagattggttattaccgcagagcaactcgtcggattcgcggcggcgacggtaaaatgaaagatttgtctccgcgttggtacttttactatctcggcaccggtccggaagctggactgccctacggggcaaacaaggacgggatcatttgggtggctaccgaaggtgccctgaatactccaaaagatcatatcggcacccgtaaccctgctaataacgctgcgatcgttctgcaactgcctcagggtacaactctgccaaaaggcttctatgcagaagggtcgcgtggtggcagccaggcgagtagccgtagcagctcccgctctcgcaactcgtcccgtaactccactccgggctcttctcgcggcacgtccccggctcgtatggcaggtaacggtggtgacgctgctctggcgctgctactgctggacaggctgaaccagctggagtcgaagatgagtggtaaaggccaacagcagcagggccagaccgttaccaaaaagagcgcagctgaagcatctaaaaaaccgcgacagaaacgtaccgcgactaaagcgtacaatgtaacacaggccttcggtcgtcgaggtccggagcaaactcaaggaaactttggcgatcaggaattaatccgccaggggaccgactacaaacactggccgcaaattgcccagttcgccccatccgctagtgcattcttcggtatgagccgcatcggcatggaagtaacgccaagtggtacgtggctgacctacaccggtgctatcaagcttgatgacaaggacccgaactttaaagaccaggttattctgcttaacaaacatattgatgcctataaaactttcccgccgaccgaacccaaaaaggacaaaaagaaaaaagctgatgaaacccaggctctaccgcagcgtcagaaaaaacagcaaactgtgactctgctgccagctgcggacctggatgatttttccaagcagctgcaacagtctatgagctctgcggactctacgcaggctggtggttctggtcaccatcatcaccatcattaa

SEQ ID NO: 3011 - DNA, 2421 bp, Artificial Sequence
  Description of Artificial Sequence: Synthetic polynucleotide
atgaaaatcgaagaaggtaaactggtaatctggattaacggcgataaaggctataacggtctcgctgaagtcggtaagaaattcgagaaagataccggaattaaagtcaccgttgagcatccggataaactggaagagaaattcccacaggttgcggcaactggcgatggccctgacattatcttctgggcacacgaccgctttggtggctacgctcaatctggcctgttggctgaaatcaccccggacaaagcgttccaggacaagctgtatccgtttacctgggatgccgtacgttacaacggcaagctgattgcttacccgatcgctgttgaagcgttatcgctgatttataacaaagatctgctgccgaacccgccaaaaacctgggaagagatcccggcgctggataaagaactgaaagcgaaaggtaagagcgcgctgatgttcaacctgcaagaaccgtacttcacctggccgctgattgctgctgacgggggttatgcgttcaagtatgaaaacggcaagtacgacattaaagacgtgggcgtggataacgctggcgcgaaagcgggtctgaccttcctggttgacctgattaaaaacaaacacatgaatgcagacaccgattactccatcgcagaagctgcctttaataaaggcgaaacagcgatgaccatcaacggcccgtgggcatggtccaacatcgacaccagcaaagtgaattatggtgtaacggtactgccgaccttcaagggtcaaccatccaaaccgttcgttggcgtgctgagcgcaggtattaacgccgccagtccgaacaaagagctggcgaaagagttcctcgaaaactatctgctgactgatgaaggtctggaagcggttaataaagacaaaccgctgggtgccgtagcgctgaagtcttacgaggaagagttggcgaaagatccacgtattgccgccaccatggaaaacgcccagaaaggtgaaatcatgccgaacatcccgcagatgtccgctttctggtatgccgtgcgtactgcggtgatcaacgccgccagcggtcgtcagactgtcgatgaagccctgaaagacgcgcagactggtggttctggtgagaacctgtactttcaaagctcagataatgggcctcaaaaccagcgcaacgctccacgtataaccttcggtggcccgtctgactccacaggcagcaaccagaatggtgagcgtagtggagccaggtctaagcagcgccgtccccagggtctgccgaacaacacggcgagctggtttactgcgcttacccaacacggtaaagaagacttaaaattcccgcgtggccagggcgtcccgatcaacactaactcttccccggatgatcagattggttattaccgcagagcaactcgtcggattcgcggcggcgacggtaaaatgaaagatttgtctccgcgttggtacttttactatctcggcaccggtccggaagctggactgccctacggggcaaacaaggacgggatcatttgggtggctaccgaaggtgccctgaatactccaaaagatcatatcggcacccgtaaccctgctaataacgctgcgatcgttctgcaactgcctcagggtacaactctgccaaaaggcttctatgcagaagggtcgcgtggtggcagccaggcgagtagccgtagcagctcccgctctcgcaactcgtcccgtaactccactccgggctcttctcgcggcacgtccccggctcgtatggcaggtaacggtggtgacgctgctctggcgctgctactgctggacaggctgaaccagctggagtcgaagatgagtggtaaaggccaacagcagcagggccagaccgttaccaaaaagagcgcagctgaaatgtctaaaaaaccgcgacagaaacgtaccgcgactaaagggtgtaatgtaacacagtgcttcggtcctcgaggtccggagcaaactcaaggaaactttggcgatgccgaattagtgaaaaaagggaccgactacaaacactggccgcaaattgcccagttcgccccatccgctagtgcattcttcggtatgagccgcatctcgtcgaaggagcagccaagtggtacgtggctgacctacaccggtgctatcaagcttgataaagatgacccgaactttaaagaccaggttattctgcttaacaaacatattgatgcctataaaactttcccgccgaccgaacccaaaaaggacaaaaagaaaaaagctgatgaaacccaggctctaccgcagcgtcagaaaaaacagcaaactgtgactctgctgccagctgcggacctggatgatttttccaagcagctgcaacagtctatgagctctgcggactctacgcaggctggtggttctggtcaccatcatcaccatcattaa

SEQ ID NO: 3012 - DNA, 2421 bp, Artificial Sequence
  Description of Artificial Sequence: Synthetic polynucleotide
atgaaaatcgaagaaggtaaactggtaatctggattaacggcgataaaggctataacggtctcgctgaagtcggtaagaaattcgagaaagataccggaattaaagtcaccgttgagcatccggataaactggaagagaaattcccacaggttgcggcaactggcgatggccctgacattatcttctgggcacacgaccgctttggtggctacgctcaatctggcctgttggctgaaatcaccccggacaaagcgttccaggacaagctgtatccgtttacctgggatgccgtacgttacaacggcaagctgattgcttacccgatcgctgttgaagcgttatcgctgatttataacaaagatctgctgccgaacccgccaaaaacctgggaagagatcccggcgctggataaagaactgaaagcgaaaggtaagagcgcgctgatgttcaacctgcaagaaccgtacttcacctggccgctgattgctgctgacgggggttatgcgttcaagtatgaaaacggcaagtacgacattaaagacgtgggcgtggataacgctggcgcgaaagcgggtctgaccttcctggttgacctgattaaaaacaaacacatgaatgcagacaccgattactccatcgcagaagctgcctttaataaaggcgaaacagcgatgaccatcaacggcccgtgggcatggtccaacatcgacaccagcaaagtgaattatggtgtaacggtactgccgaccttcaagggtcaaccatccaaaccgttcgttggcgtgctgagcgcaggtattaacgccgccagtccgaacaaagagctggcgaaagagttcctcgaaaactatctgctgactgatgaaggtctggaagcggttaataaagacaaaccgctgggtgccgtagcgctgaagtcttacgaggaagagttggcgaaagatccacgtattgccgccaccatggaaaacgcccagaaaggtgaaatcatgccgaacatcccgcagatgtccgctttctggtatgccgtgcgtactgcggtgatcaacgccgccagcggtcgtcagactgtcgatgaagccctgaaagacgcgcagactggtggttctggtgagaacctgtactttcaaagctcagataatgggcctcaaaaccagcgcaacgctccacgtataaccttcggtggcccgtctgactccacaggcagcaaccagaatggtgagcgtagtggagccaggtctaagcagcgccgtccccagggtctgccgaacaacacggcgagctggtttactgcgcttacccaacacggtaaagaagacttaaaattcccgcgtggccagggcgtcccgatcaacactaactcttccccggatgatcagattggttattaccgcagagcaactcgtcggattcgcggcggcgacggtaaaatgaaagatttgtctccgcgttggtacttttactatctcggcaccggtccggaagctggactgccctacggggcaaacaaggacgggatcatttgggtggctaccgaaggtgccctgaatactccaaaagatcatatcggcacccgtaaccctgctaataacgctgcgatcgttctgcaactgcctcagggtacaactctgccaaaaggcttctatgcagaagggtcgcgtggtggcagccaggcgagtagccgtagcagctcccgctctcgcaactcgtcccgtaactccactccgggctcttctcgcggcacgtccccggctcgtatggcaggtaacggtggtgacgctgctctggcgctgctactgctggacaggctgaaccagctggagtcgaagatgagtggtaaaggccaacagcagcagggccagaccgttaccaaaaagagcgcagctgaagcatctaaaaaaccgcgacagaaacgtaccgcgactaaagcgtacaatgtaacacaggccttcggtcgtcgaggtccggagcaaactcaaggaaactttggcgatcaggaattaatccgccaggggaccgactacaaacactggccgcaaattgcccagttcgccccatccgctagtgcattcttcggtatgagccgcatcggcatggaagtagcgccaagtggtacgtggctgacctacaccggtgctatcaagcttgatgacaaggacccgaactttaaagaccaggttattctgcttaacaaacatattgatgcctataaaactttcccgccgaccgaacccaaaaaggacaaaaagaaaaaagctgatgaaacccaggctctaccgcagcgtcagaaaaaacagcaaactgtgactctgctgccagctgcggacctggatgatttttccaagcagctgcaacagtctatgagctctgcggactctacgcaggctggtggttctggtcaccatcatcaccatcattaa

SEQ ID NO: 3013 - DNA, 2421 bp, Artificial Sequence
  Description of Artificial Sequence: Synthetic polynucleotide
atgaaaatcgaagaaggtaaactggtaatctggattaacggcgataaaggctataacggtctcgctgaagtcggtaagaaattcgagaaagataccggaattaaagtcaccgttgagcatccggataaactggaagagaaattcccacaggttgcggcaactggcgatggccctgacattatcttctgggcacacgaccgctttggtggctacgctcaatctggcctgttggctgaaatcaccccggacaaagcgttccaggacaagctgtatccgtttacctgggatgccgtacgttacaacggcaagctgattgcttacccgatcgctgttgaagcgttatcgctgatttataacaaagatctgctgccgaacccgccaaaaacctgggaagagatcccggcgctggataaagaactgaaagcgaaaggtaagagcgcgctgatgttcaacctgcaagaaccgtacttcacctggccgctgattgctgctgacgggggttatgcgttcaagtatgaaaacggcaagtacgacattaaagacgtgggcgtggataacgctggcgcgaaagcgggtctgaccttcctggttgacctgattaaaaacaaacacatgaatgcagacaccgattactccatcgcagaagctgcctttaataaaggcgaaacagcgatgaccatcaacggcccgtgggcatggtccaacatcgacaccagcaaagtgaattatggtgtaacggtactgccgaccttcaagggtcaaccatccaaaccgttcgttggcgtgctgagcgcaggtattaacgccgccagtccgaacaaagagctggcgaaagagttcctcgaaaactatctgctgactgatgaaggtctggaagcggttaataaagacaaaccgctgggtgccgtagcgctgaagtcttacgaggaagagttggcgaaagatccacgtattgccgccaccatggaaaacgcccagaaaggtgaaatcatgccgaacatcccgcagatgtccgctttctggtatgccgtgcgtactgcggtgatcaacgccgccagcggtcgtcagactgtcgatgaagccctgaaagacgcgcagactggtggttctggtgagaacctgtactttcaaagctcagataatgggcctcaaaaccagcgcaacgctccacgtataaccttcggtggcccgtctgactccacaggcagcaaccagaatggtgagcgtagtggagccaggtctaagcagcgccgtccccagggtctgccgaacaacacggcgagctggtttactgcgcttacccaacacggtaaagaagacttaaaattcccgcgtggccagggcgtcccgatcaacactaactcttccccggatgatcagattggttattaccgcagagcaactcgtcggattcgcggcggcgacggtaaaatgaaagatttgtctccgcgttggtacttttactatctcggcaccggtccggaagctggactgccctacggggcaaacaaggacgggatcatttgggtggctaccgaaggtgccctgaatactccaaaagatcatatcggcacccgtaaccctgctaataacgctgcgatcgttctgcaactgcctcagggtacaactctgccaaaaggcttctatgcagaagggtcgcgtggtggcagccaggcgagtagccgtagcagctcccgctctcgcaactcgtcccgtaactccactccgggctcttctcgcggcacgtccccggctcgtatggcaggtaacggtggtgacgctgctctggcgctgctactgctggacaggctgaaccagctggagtcgaagatgagtggtaaaggccaacagcagcagggccagaccgttaccaaaaagagcgcagctgaagcatctaaaaaaccgcgacagaaacgtaccgcgactaaagcgtacaatgtaacacaggccttcggtcgtcgaggtccgaatcaaactcaaggaaactttggcgatcaggaattaatccgccaggggaccgactacaaacactggccgcaaattgcccagttcgccccatccgctagtgcattcttcggtatgagccgcatcggcatggaagtaacgccaagtggtacgtggctgacctacaccggtgctatcaagcttgatgacaaggacccgaactttaaagaccaggttattctgcttaacaaacatattgatgcctataaaactttcccgccgaccgaacccaaaaaggacaaaaagaaaaaagctgatgaaacccaggctctaccgcagcgtcagaaaaaacagcaaactgtgactctgctgccagctgcggacctggatgatttttccaagcagctgcaacagtctatgagctctgcggactctacgcaggctggtggttctggtcaccatcatcaccatcattaa

SEQ ID NO: 3014 - DNA, 2421 bp, Artificial Sequence
  Description of Artificial Sequence: Synthetic polynucleotide
atgaaaatcgaagaaggtaaactggtaatctggattaacggcgataaaggctataacggtctcgctgaagtcggtaagaaattcgagaaagataccggaattaaagtcaccgttgagcatccggataaactggaagagaaattcccacaggttgcggcaactggcgatggccctgacattatcttctgggcacacgaccgctttggtggctacgctcaatctggcctgttggctgaaatcaccccggacaaagcgttccaggacaagctgtatccgtttacctgggatgccgtacgttacaacggcaagctgattgcttacccgatcgctgttgaagcgttatcgctgatttataacaaagatctgctgccgaacccgccaaaaacctgggaagagatcccggcgctggataaagaactgaaagcgaaaggtaagagcgcgctgatgttcaacctgcaagaaccgtacttcacctggccgctgattgctgctgacgggggttatgcgttcaagtatgaaaacggcaagtacgacattaaagacgtgggcgtggataacgctggcgcgaaagcgggtctgaccttcctggttgacctgattaaaaacaaacacatgaatgcagacaccgattactccatcgcagaagctgcctttaataaaggcgaaacagcgatgaccatcaacggcccgtgggcatggtccaacatcgacaccagcaaagtgaattatggtgtaacggtactgccgaccttcaagggtcaaccatccaaaccgttcgttggcgtgctgagcgcaggtattaacgccgccagtccgaacaaagagctggcgaaagagttcctcgaaaactatctgctgactgatgaaggtctggaagcggttaataaagacaaaccgctgggtgccgtagcgctgaagtcttacgaggaagagttggcgaaagatccacgtattgccgccaccatggaaaacgcccagaaaggtgaaatcatgccgaacatcccgcagatgtccgctttctggtatgccgtgcgtactgcggtgatcaacgccgccagcggtcgtcagactgtcgatgaagccctgaaagacgcgcagactggtggttctggtgagaacctgtactttcaaagctcagataatgggcctcaaaaccagcgcaacgctccacgtataaccttcggtggcccgtctgactccacaggcagcaaccagaatggtgagcgtagtggagccaggtctaagcagcgccgtccccagggtctgccgaacaacacggcgagctggtttactgcgcttacccaacacggtaaagaagacttaaaattcccgcgtggccagggcgtcccgatcaacactaactcttccccggatgatcagattggttattaccgcagagcaactcgtcggattcgcggcggcgacggtaaaatgaaagatttgtctccgcgttggtacttttactatctcggcaccggtccggaagctggactgccctacggggcaaacaaggacgggatcatttgggtggctaccgaaggtgccctgaatactccaaaagatcatatcggcacccgtaaccctgctaataacgctgcgatcgttctgcaactgcctcagggtacaactctgccaaaaggcttctatgcagaagggtcgcgtggtggcagccaggcgagtagccgtagcagctcccgctctcgcaactcgtcccgtaactccactccgggctcttctcgcggcacgtccccggctcgtatggcaggtaacggtggtgacgctgctctggcgctgctactgctggacaggctgaaccagctggagtcgaagatgagtggtaaaggccaacagcagcagggccagaccgttaccaaaaagagcgcagctgaagcatctaaaaaaccgcgacagaaacgtaccgcgactaaagggtacaatgtaacacaggccttcggtcgtcgaggtccggagcaaactcaaggaaactttggcgatcaggatttaaataaacttgggaccgactacaaacactggccgcaaattgcccagttcgccccatccgctagtgcattcttcggtatgagccgcatcggcatggaagaaacgccaagtggtacgtggctgacctacaccggtgctatcaagcttgataaaaaggacccgaactttaaagaccaggttattctgcttaacaaacatattgatgcctataaaactttcccgccgaccgaacccaaaaaggacaaaaagaaaaaagctgatgaaacccaggctctaccgcagcgtcagaaaaaacagcaaactgtgactctgctgccagctgcggacctggatgatttttccaagcagctgcaacagtctatgagctctgcggactctacgcaggctggtggttctggtcaccatcatcaccatcattaa

SEQ ID NO: 3015 - DNA, 2421 bp, Artificial Sequence
  Description of Artificial Sequence: Synthetic polynucleotide
atgaaaatcgaagaaggtaaactggtaatctggattaacggcgataaaggctataacggtctcgctgaagtcggtaagaaattcgagaaagataccggaattaaagtcaccgttgagcatccggataaactggaagagaaattcccacaggttgcggcaactggcgatggccctgacattatcttctgggcacacgaccgctttggtggctacgctcaatctggcctgttggctgaaatcaccccggacaaagcgttccaggacaagctgtatccgtttacctgggatgccgtacgttacaacggcaagctgattgcttacccgatcgctgttgaagcgttatcgctgatttataacaaagatctgctgccgaacccgccaaaaacctgggaagagatcccggcgctggataaagaactgaaagcgaaaggtaagagcgcgctgatgttcaacctgcaagaaccgtacttcacctggccgctgattgctgctgacgggggttatgcgttcaagtatgaaaacggcaagtacgacattaaagacgtgggcgtggataacgctggcgcgaaagcgggtctgaccttcctggttgacctgattaaaaacaaacacatgaatgcagacaccgattactccatcgcagaagctgcctttaataaaggcgaaacagcgatgaccatcaacggcccgtgggcatggtccaacatcgacaccagcaaagtgaattatggtgtaacggtactgccgaccttcaagggtcaaccatccaaaccgttcgttggcgtgctgagcgcaggtattaacgccgccagtccgaacaaagagctggcgaaagagttcctcgaaaactatctgctgactgatgaaggtctggaagcggttaataaagacaaaccgctgggtgccgtagcgctgaagtcttacgaggaagagttggcgaaagatccacgtattgccgccaccatggaaaacgcccagaaaggtgaaatcatgccgaacatcccgcagatgtccgctttctggtatgccgtgcgtactgcggtgatcaacgccgccagcggtcgtcagactgtcgatgaagccctgaaagacgcgcagactggtggttctggtgagaacctgtactttcaaagctcagataatgggcctcaaaaccagcgcaacgctccacgtataaccttcggtggcccgtctgactccacaggcagcaaccagaatggtgagcgtagtggagccaggtctaagcagcgccgtccccagggtctgccgaacaacacggcgagctggtttactgcgcttacccaacacggtaaagaagacttaaaattcccgcgtggccagggcgtcccgatcaacactaactcttccccggatgatcagattggttattaccgcagagcaactcgtcggattcgcggcggcgacggtaaaatgaaagatttgtctccgcgttggtacttttactatctcggcaccggtccggaagctggactgccctacggggcaaacaaggacgggatcatttgggtggctaccgaaggtgccctgaatactccaaaagatcatatcggcacccgtaaccctgctaataacgctgcgatcgttctgcaactgcctcagggtacaactctgccaaaaggcttctatgcagaagggtcgcgtggtggcagccaggcgagtagccgtagcagctcccgctctcgcaactcgtcccgtaactccactccgggctcttctcgcggcacgtccccggctcgtatggcaggtaacggtggtgacgctgctctggcgctgctactgctggacaggctgaaccagctggagtcgaagatgagtggtaaaggccaacagcagcagggccagaccgttaccaaaaagagcgcagctgaagcatctaaaaaaccgcgacagaaacgtaccgcgactaaagcgtacaatgtaacacaggccttcggtcgtcgaggtccggagcaaactcaaggaaactttggcgatcaggaattaatccgccaggggaccgactacaaacactggccgcaaattgcccagttcgccccatccgctagtgcattcttcggtatgagccgcatcggcatggaagtaacgccagatggtacgtggctgacctacaccggtgctatcaagcttgatgacaaggacccgaactttaaagaccaggttattctgcttaacaaacatattgatgcctataaaactttcccgccgaccgaacccaaaaaggacaaaaagaaaaaagctgatgaaacccaggctctaccgcagcgtcagaaaaaacagcaaactgtgactctgctgccagctgcggacctggatgatttttccaagcagctgcaacagtctatgagctctgcggactctacgcaggctggtggttctggtcaccatcatcaccatcattaa

SEQ ID NO: 3016 - DNA, 2421 bp, Artificial Sequence
  Description of Artificial Sequence: Synthetic polynucleotide
atgaaaatcgaagaaggtaaactggtaatctggattaacggcgataaaggctataacggtctcgctgaagtcggtaagaaattcgagaaagataccggaattaaagtcaccgttgagcatccggataaactggaagagaaattcccacaggttgcggcaactggcgatggccctgacattatcttctgggcacacgaccgctttggtggctacgctcaatctggcctgttggctgaaatcaccccggacaaagcgttccaggacaagctgtatccgtttacctgggatgccgtacgttacaacggcaagctgattgcttacccgatcgctgttgaagcgttatcgctgatttataacaaagatctgctgccgaacccgccaaaaacctgggaagagatcccggcgctggataaagaactgaaagcgaaaggtaagagcgcgctgatgttcaacctgcaagaaccgtacttcacctggccgctgattgctgctgacgggggttatgcgttcaagtatgaaaacggcaagtacgacattaaagacgtgggcgtggataacgctggcgcgaaagcgggtctgaccttcctggttgacctgattaaaaacaaacacatgaatgcagacaccgattactccatcgcagaagctgcctttaataaaggcgaaacagcgatgaccatcaacggcccgtgggcatggtccaacatcgacaccagcaaagtgaattatggtgtaacggtactgccgaccttcaagggtcaaccatccaaaccgttcgttggcgtgctgagcgcaggtattaacgccgccagtccgaacaaagagctggcgaaagagttcctcgaaaactatctgctgactgatgaaggtctggaagcggttaataaagacaaaccgctgggtgccgtagcgctgaagtcttacgaggaagagttggcgaaagatccacgtattgccgccaccatggaaaacgcccagaaaggtgaaatcatgccgaacatcccgcagatgtccgctttctggtatgccgtgcgtactgcggtgatcaacgccgccagcggtcgtcagactgtcgatgaagccctgaaagacgcgcagactggtggttctggtgagaacctgtactttcaaagctcagataatgggcctcaaaaccagcgcaacgctccacgtataaccttcggtggcccgtctgactccacaggcagcaaccagaatggtgagcgtagtggagccaggtctaagcagcgccgtccccagggtctgccgaacaacacggcgagctggtttactgcgcttacccaacacggtaaagaagacttaaaattcccgcgtggccagggcgtcccgatcaacactaactcttccccggatgatcagattggttattaccgcagagcaactcgtcggattcgcggcggcgacggtaaaatgaaagatttgtctccgcgttggtacttttactatctcggcaccggtccggaagctcaactgccctacggggcaaacaaggacgggatcatttgggtggctaccgaaggtgccctgaatactccaaaagatcatatcggcacccgtaaccctgctaataacgctgcgatcgttctgcaactgcctcagggtacaactctgccaaaaggcttctatgcagaagggtcgcgtggtggcagccaggcgagtagccgtagcagctcccgctctcgcaactcgtcccgtaactccactccgggctcttctcgcggcacgtccccggctcgtatggcaggtaacggtggtgacgctgctctggcgctgctactgctggacaggctgaaccagctggagtcgaagatgagtggtaaaggccaacagcagcagggccagaccgttaccaaaaagagcgcagctgaagcatctaaaaaaccgcgacagaaacgtaccgcgactaaagcgtacaatgtaacacaggccttcggtcgtcgaggtccggagcaaactcaaggaaactttggcgatcaggaattaatccgccaggggaccgactacaaacactggccgcaaattgcccagttcgccccatccgctagtgcattcttcggtatgagccgcatcggcatggaagtaacgccaagtggtacgtggctgacctacaccggtgctatcaagcttgatgacaaggacccgaactttaaagaccaggttattctgcttaacaaacatattgatgcctataaaactttcccgccgaccgaacccaaaaaggacaaaaagaaaaaagctgatgaaacccaggctctaccgcagcgtcagaaaaaacagcaaactgtgactctgctgccagctgcggacctggatgatttttccaagcagctgcaacagtctatgagctctgcggactctacgcaggctggtggttctggtcaccatcatcaccatcattaa

SEQ ID NO: 3017 - DNA, 2421 bp, Artificial Sequence
  Description of Artificial Sequence: Synthetic polynucleotide
atgaaaatcgaagaaggtaaactggtaatctggattaacggcgataaaggctataacggtctcgctgaagtcggtaagaaattcgagaaagataccggaattaaagtcaccgttgagcatccggataaactggaagagaaattcccacaggttgcggcaactggcgatggccctgacattatcttctgggcacacgaccgctttggtggctacgctcaatctggcctgttggctgaaatcaccccggacaaagcgttccaggacaagctgtatccgtttacctgggatgccgtacgttacaacggcaagctgattgcttacccgatcgctgttgaagcgttatcgctgatttataacaaagatctgctgccgaacccgccaaaaacctgggaagagatcccggcgctggataaagaactgaaagcgaaaggtaagagcgcgctgatgttcaacctgcaagaaccgtacttcacctggccgctgattgctgctgacgggggttatgcgttcaagtatgaaaacggcaagtacgacattaaagacgtgggcgtggataacgctggcgcgaaagcgggtctgaccttcctggttgacctgattaaaaacaaacacatgaatgcagacaccgattactccatcgcagaagctgcctttaataaaggcgaaacagcgatgaccatcaacggcccgtgggcatggtccaacatcgacaccagcaaagtgaattatggtgtaacggtactgccgaccttcaagggtcaaccatccaaaccgttcgttggcgtgctgagcgcaggtattaacgccgccagtccgaacaaagagctggcgaaagagttcctcgaaaactatctgctgactgatgaaggtctggaagcggttaataaagacaaaccgctgggtgccgtagcgctgaagtcttacgaggaagagttggcgaaagatccacgtattgccgccaccatggaaaacgcccagaaaggtgaaatcatgccgaacatcccgcagatgtccgctttctggtatgccgtgcgtactgcggtgatcaacgccgccagcggtcgtcagactgtcgatgaagccctgaaagacgcgcagactggtggttctggtgagaacctgtactttcaaagctcagataatgggcctcaaaaccagcgcaacgctccacgtataaccttcggtggcccgtctgactccacaggcagcaaccagaatggtgagcgtagtggagccaggtctaagcagcgccgtccccagggtctgccgaacaacacggcgagctggtttactgcgcttacccaacacggtaaagaagacttaaaattcccgcgtggccagggcgtcccgatcaacactaactcttccccggatgatcagattggttattaccgcagagcaactcgtcggattcgcggcggcgacggtaaaatgaaagatttgtctccgcgttggtacttttactatctcggcaccggtccggaagctggactgccctacggggcaaacaaggacgggatcatttgggtggctaccaatggtgccctgaatactccaaaagatcatatcggcacccgtaaccctgctaataacgctgcgatcgttctgcaactgcctcagggtacaactctgccaaaaggcttctatgcagaagggtcgcgtggtggcagccaggcgagtagccgtagcagctcccgctctcgcaactcgtcccgtaactccactccgggctcttctcgcggcacgtccccggctcgtatggcaggtaacggtggtgacgctgctctggcgctgctactgctggacaggctgaaccagctggagtcgaagatgagtggtaaaggccaacagcagcagggccagaccgttaccaaaaagagcgcagctgaagcatctaaaaaaccgcgacagaaacgtaccgcgactaaagcgtacaatgtaacacaggccttcggtcgtcgaggtccggagcaaactcaaggaaactttggcgatcaggaattaatccgccaggggaccgactacaaacactggccgcaaattgcccagttcgccccatccgctagtgcattcttcggtatgagccgcatcggcatggaagtaacgccaagtggtacgtggctgacctacaccggtgctatcaagcttgatgacaaggacccgaactttaaagaccaggttattctgcttaacaaacatattgatgcctataaaactttcccgccgaccgaacccaaaaaggacaaaaagaaaaaagctgatgaaacccaggctctaccgcagcgtcagaaaaaacagcaaactgtgactctgctgccagctgcggacctggatgatttttccaagcagctgcaacagtctatgagctctgcggactctacgcaggctggtggttctggtcaccatcatcaccatcattaa

SEQ ID NO: 3018 - DNA, 2421 bp, Artificial Sequence
  Description of Artificial Sequence: Synthetic polynucleotide
atgaaaatcgaagaaggtaaactggtaatctggattaacggcgataaaggctataacggtctcgctgaagtcggtaagaaattcgagaaagataccggaattaaagtcaccgttgagcatccggataaactggaagagaaattcccacaggttgcggcaactggcgatggccctgacattatcttctgggcacacgaccgctttggtggctacgctcaatctggcctgttggctgaaatcaccccggacaaagcgttccaggacaagctgtatccgtttacctgggatgccgtacgttacaacggcaagctgattgcttacccgatcgctgttgaagcgttatcgctgatttataacaaagatctgctgccgaacccgccaaaaacctgggaagagatcccggcgctggataaagaactgaaagcgaaaggtaagagcgcgctgatgttcaacctgcaagaaccgtacttcacctggccgctgattgctgctgacgggggttatgcgttcaagtatgaaaacggcaagtacgacattaaagacgtgggcgtggataacgctggcgcgaaagcgggtctgaccttcctggttgacctgattaaaaacaaacacatgaatgcagacaccgattactccatcgcagaagctgcctttaataaaggcgaaacagcgatgaccatcaacggcccgtgggcatggtccaacatcgacaccagcaaagtgaattatggtgtaacggtactgccgaccttcaagggtcaaccatccaaaccgttcgttggcgtgctgagcgcaggtattaacgccgccagtccgaacaaagagctggcgaaagagttcctcgaaaactatctgctgactgatgaaggtctggaagcggttaataaagacaaaccgctgggtgccgtagcgctgaagtcttacgaggaagagttggcgaaagatccacgtattgccgccaccatggaaaacgcccagaaaggtgaaatcatgccgaacatcccgcagatgtccgctttctggtatgccgtgcgtactgcggtgatcaacgccgccagcggtcgtcagactgtcgatgaagccctgaaagacgcgcagactggtggttctggtgagaacctgtactttcaaagctcagataatgggcctcaaaaccagcgcaacgctccacgtataaccttcggtggcccgtctgactccacaggcagcaaccagaatggtgagcgtagtggagccaggtctaagcagcgccgtccccagggtctgccgaacaacacggcgagctggtttactgcgcttacccaacacggtaaagaagacttaaaattcccgcgtggccagggcgtcccgatcaacactaactcttccccggatgatcagattggttattaccgcagagcaactcgtcggattcgcggcggcgacggtaaaatgaaagatttgtctccgcgttggtacttttactatctcggcaccggtccggaagctggactgccctacggggcaaacaaggacgggatcatttgggtggctaccgaaggtgccctgaatactccaaaagatcatatcggcacccgtaaccctgctaataacgctgcgatcgttctgcaactgcctcagggtacaactctgccaaaaggcttctatgcagaagggtcgcgtggtggcagccaggcgagtagccgtagcagctcccgctctcgcaactcgtcccgtaactccactccgggctcttctcgcggcacgtccccggctcgtatggcaggtaacggtggtgacgctgctctggcgctgctactgctggacaggctgaaccagctggagtcgaagatgagtggtaaaggccaacagcagcagggccagaccgttaccaaaaagagcgcagctgaagcatctaaaaaaccgcgatggaaacgtaccgcgactaaagcgtacaatgtaacacaggccttcggtcgtcgaggtccggagcaaactcaaggaaactttggcgatcaggaattaatccgccaggggaccgactacaaacactggccgcaaattgcccagttcgccccatccgctagtgcattcttcggtatgagccgcatcggcatggaagtaacgccaagtggtacgtggctgacctacaccggtgctatcaagcttgatgacaaggacccgaactttaaagaccaggttattctgcttaacaaacatattgatgcctataaaactttcccgccgaccgaacccaaaaaggacaaaaagaaaaaagctgatgaaacccaggctctaccgcagcgtcagaaaaaacagcaaactgtgactctgctgccagctgcggacctggatgatttttccaagcagctgcaacagtctatgagctctgcggactctacgcaggctggtggttctggtcaccatcatcaccatcattaa

SEQ ID NO: 3019 - DNA, 2421 bp, Artificial Sequence
  Description of Artificial Sequence: Synthetic polynucleotide
atgaaaatcgaagaaggtaaactggtaatctggattaacggcgataaaggctataacggtctcgctgaagtcggtaagaaattcgagaaagataccggaattaaagtcaccgttgagcatccggataaactggaagagaaattcccacaggttgcggcaactggcgatggccctgacattatcttctgggcacacgaccgctttggtggctacgctcaatctggcctgttggctgaaatcaccccggacaaagcgttccaggacaagctgtatccgtttacctgggatgccgtacgttacaacggcaagctgattgcttacccgatcgctgttgaagcgttatcgctgatttataacaaagatctgctgccgaacccgccaaaaacctgggaagagatcccggcgctggataaagaactgaaagcgaaaggtaagagcgcgctgatgttcaacctgcaagaaccgtacttcacctggccgctgattgctgctgacgggggttatgcgttcaagtatgaaaacggcaagtacgacattaaagacgtgggcgtggataacgctggcgcgaaagcgggtctgaccttcctggttgacctgattaaaaacaaacacatgaatgcagacaccgattactccatcgcagaagctgcctttaataaaggcgaaacagcgatgaccatcaacggcccgtgggcatggtccaacatcgacaccagcaaagtgaattatggtgtaacggtactgccgaccttcaagggtcaaccatccaaaccgttcgttggcgtgctgagcgcaggtattaacgccgccagtccgaacaaagagctggcgaaagagttcctcgaaaactatctgctgactgatgaaggtctggaagcggttaataaagacaaaccgctgggtgccgtagcgctgaagtcttacgaggaagagttggcgaaagatccacgtattgccgccaccatggaaaacgcccagaaaggtgaaatcatgccgaacatcccgcagatgtccgctttctggtatgccgtgcgtactgcggtgatcaacgccgccagcggtcgtcagactgtcgatgaagccctgaaagacgcgcagactggtggttctggtgagaacctgtactttcaaagctcagataatgggcctcaaaaccagcgcaacgctccacgtataaccttcggtggcccgtctgactccacaggcagcaaccagaatggtgagcgtagtggagccaggtctaagcagcgccgtccccagggtctgccgaacaacacggcgagctggtttactgcgcttacccaacacggtaaagaagacttaaaattcccgcgtggccagggcgcaccgatcaacactaactcttccccggatgatcagattggttattaccgcagagcaactcgtcggattcgcggcggcgacggtaaaatgaaagatttgtctccgcgttggtacttttactatctcggcaccggtccggaagctggactgccctacggggcaaacaaggacgggatcatttgggtggctaccgaaggtgccctgaatactccaaaagatcatatcggcacccgtaaccctgctaataacgctgcgatcgttctgcaactgcctcagggtacaactctgccaaaaggcttctatgcagaagggtcgcgtggtggcagccaggcgagtagccgtagcagctcccgctctcgcaactcgtcccgtaactccactccgggctcttctcgcggcacgtccccggctcgtatggcaggtaacggtggtgacgctgctctggcgctgctactgctggacaggctgaaccagctggagtcgaagatgagtggtaaaggccaacagcagcagggccagaccgttaccaaaaagagcgcagctgaagcatctaaaaaaccgcgacagaaacgtaccgcgactaaagcgtacaatgtaacacaggccttcggtcgtcgaggtccggagcaaactcaaggaaactttggcgatcaggaattaatccgccaggggaccgactacaaacactggccgcaaattgcccagttcgccccatccgctagtgcattcttcggtatgagccgcatcggcatggaagtaacgccaagtggtacgtggctgacctacaccggtgctatcaagcttgatgacaaggacccgaactttaaagaccaggttattctgcttaacaaacatattgatgcctataaaactttcccgccgaccgaacccaaaaaggacaaaaagaaaaaagctgatgaaacccaggctctaccgcagcgtcagaaaaaacagcaaactgtgactctgctgccagctgcggacctggatgatttttccaagcagctgcaacagtctatgagctctgcggactctacgcaggctggtggttctggtcaccatcatcaccatcattaa

SEQ ID NO: 3020 - DNA, 2421 bp, Artificial Sequence
  Description of Artificial Sequence: Synthetic polynucleotide
atgaaaatcgaagaaggtaaactggtaatctggattaacggcgataaaggctataacggtctcgctgaagtcggtaagaaattcgagaaagataccggaattaaagtcaccgttgagcatccggataaactggaagagaaattcccacaggttgcggcaactggcgatggccctgacattatcttctgggcacacgaccgctttggtggctacgctcaatctggcctgttggctgaaatcaccccggacaaagcgttccaggacaagctgtatccgtttacctgggatgccgtacgttacaacggcaagctgattgcttacccgatcgctgttgaagcgttatcgctgatttataacaaagatctgctgccgaacccgccaaaaacctgggaagagatcccggcgctggataaagaactgaaagcgaaaggtaagagcgcgctgatgttcaacctgcaagaaccgtacttcacctggccgctgattgctgctgacgggggttatgcgttcaagtatgaaaacggcaagtacgacattaaagacgtgggcgtggataacgctggcgcgaaagcgggtctgaccttcctggttgacctgattaaaaacaaacacatgaatgcagacaccgattactccatcgcagaagctgcctttaataaaggcgaaacagcgatgaccatcaacggcccgtgggcatggtccaacatcgacaccagcaaagtgaattatggtgtaacggtactgccgaccttcaagggtcaaccatccaaaccgttcgttggcgtgctgagcgcaggtattaacgccgccagtccgaacaaagagctggcgaaagagttcctcgaaaactatctgctgactgatgaaggtctggaagcggttaataaagacaaaccgctgggtgccgtagcgctgaagtcttacgaggaagagttggcgaaagatccacgtattgccgccaccatggaaaacgcccagaaaggtgaaatcatgccgaacatcccgcagatgtccgctttctggtatgccgtgcgtactgcggtgatcaacgccgccagcggtcgtcagactgtcgatgaagccctgaaagacgcgcagactggtggttctggtgagaacctgtactttcaaagctcagataatgggcctcaaaaccagcgcaacgctccacgtataaccttcggtggcccgtctgactccacaggcagcaaccagaatggtgagcgtagtggagccaggtctaagcagcgccgtccccagggtctgccgaacaacacggcgagctggtttactgcgcttacccaaaatggtaaagaagacttaaaattcccgccaggccagggcgtcccgatcaacactaactcttccccggatgatcagattggttattaccgcagagcaactcgtcggattcgcggcggcgacggtaaaatgaaagatttgcctccgcgttggtacttttactatctcggcaccggtccgcatgctgatctgccctacgggcaaaagcaagacggggtgttttgggtggctcgcccaggtgccctgaatactccaaaagatcatatcggcacccgtaaccctgctaataacgctgcgatcccgctgcaactgcctccgggtacaaaactgccaaaaggcttctatgcagaagggtcgcgtggtggcagccaggcgagtagccgtagcagctcccgctctcgcaactcgtcccgtaactccactccgggctcttctcgcggcacgtccccggctcgtatggcaggtaacggtggtgacgctgctctggcgctgctactgctggacaggctgaaccagctggagtcgaagatgagtggtaaaggccaacagcagcagggccagaccgttaccaaaaagagcgcagctgaagcatctaaaaaaccgcgacagaaacgtaccgcgactaaagcgtacaatgtaacacaggccttcggtcgtcgaggtccggagcaaactcaaggaaactttggcgatcaggaattaatccgccaggggaccgactacaaacactggccgcaaattgcccagttcgccccatccgctagtgcattcttcggtatgagccgcatcggcatggaagtaacgccaagtggtacgtggctgacctacaccggtgctatcaagcttgatgacaaggacccgaactttaaagaccaggttattctgcttaacaaacatattgatgcctataaaactttcccgccgaccgaacccaaaaaggacaaaaagaaaaaagctgatgaaacccaggctctaccgcagcgtcagaaaaaacagcaaactgtgactctgctgccagctgcggacctggatgatttttccaagcagctgcaacagtctatgagctctgcggactctacgcaggctggtggttctggtcaccatcatcaccatcattaa

SEQ ID NO: 3021 - DNA, 2421 bp, Artificial Sequence
  Description of Artificial Sequence: Synthetic polynucleotide
atgaaaatcgaagaaggtaaactggtaatctggattaacggcgataaaggctataacggtctcgctgaagtcggtaagaaattcgagaaagataccggaattaaagtcaccgttgagcatccggataaactggaagagaaattcccacaggttgcggcaactggcgatggccctgacattatcttctgggcacacgaccgctttggtggctacgctcaatctggcctgttggctgaaatcaccccggacaaagcgttccaggacaagctgtatccgtttacctgggatgccgtacgttacaacggcaagctgattgcttacccgatcgctgttgaagcgttatcgctgatttataacaaagatctgctgccgaacccgccaaaaacctgggaagagatcccggcgctggataaagaactgaaagcgaaaggtaagagcgcgctgatgttcaacctgcaagaaccgtacttcacctggccgctgattgctgctgacgggggttatgcgttcaagtatgaaaacggcaagtacgacattaaagacgtgggcgtggataacgctggcgcgaaagcgggtctgaccttcctggttgacctgattaaaaacaaacacatgaatgcagacaccgattactccatcgcagaagctgcctttaataaaggcgaaacagcgatgaccatcaacggcccgtgggcatggtccaacatcgacaccagcaaagtgaattatggtgtaacggtactgccgaccttcaagggtcaaccatccaaaccgttcgttggcgtgctgagcgcaggtattaacgccgccagtccgaacaaagagctggcgaaagagttcctcgaaaactatctgctgactgatgaaggtctggaagcggttaataaagacaaaccgctgggtgccgtagcgctgaagtcttacgaggaagagttggcgaaagatccacgtattgccgccaccatggaaaacgcccagaaaggtgaaatcatgccgaacatcccgcagatgtccgctttctggtatgccgtgcgtactgcggtgatcaacgccgccagcggtcgtcagactgtcgatgaagccctgaaagacgcgcagactggtggttctggtgagaacctgtactttcaaagctcagataatgggcctcaaaaccagcgcaacgctccacgtataaccttcggtggcccgtctgactccacaggcagcaaccagaatggtgagcgtagtggagccaggtctaagcagcgccgtccccagggtctgccgaacaacacggcgagctggtttactgcgcttacccaacacggtaaagaagacttaaaattcccgcgtggccagggcgtcccgatcaacactaactcttccccggatgatcagattggttattaccgcagagcaactcgtcggattcgcggcggcgacggtaaaatgaaagatttgtctccgcgttggtacttttactatctcggcaccggtccggaagctggactgccctacggggcaaacaaggacgggatcatttgggtggctaccgaaggtgccctgaatactccaaaagatcatatcggcacccgtaaccctgctaataacgctgcgatcgttctgcaactgcctcagggtacaactctgccaaaaggcttctatgcagaagggtcgcgtggtggcagccaggcgagtagccgtagcagctcccgctctcgcaactcgtcccgtaactccactccgggctcttctcgcggcacgtccccggctcgtatggcaggtaacggtggtgacgctgctctggcgctgctactgctggacaggctgaaccagctggagtcgaagatgagtggtaaaggccaacagcagcagggccagaccgttaccaaaaagagcgcagctgaaatgtctaaaaaaccgcgacagaaacgtaccgcgactaaagagtgtaatgtaacacagtgcttcggtccacgaggtccggagcaaactcaaggaaactttggcgatgatgaattagtgaaaaaagggaccgactacaaacactggccgcaaattgcccagttcgccccatccgctagtgcattcttcggtatgagccgcatctcaagcaaggaacagccaagtggtacgtggctgacctacaccggtgctatcaagcttgataaagatgacccgaactttaaagaccaggttattctgcttaacaaacatattgatgcctataaaactttcccgccgaccgaacccaaaaaggacaaaaagaaaaaagctgatgaaacccaggctctaccgcagcgtcagaaaaaacagcaaactgtgactctgctgccagctgcggacctggatgatttttccaagcagctgcaacagtctatgagctctgcggactctacgcaggctggtggttctggtcaccatcatcaccatcattaa

SEQ ID NO: 3022 - DNA, 2421 bp, Artificial Sequence
  Description of Artificial Sequence: Synthetic polynucleotide
atgaaaatcgaagaaggtaaactggtaatctggattaacggcgataaaggctataacggtctcgctgaagtcggtaagaaattcgagaaagataccggaattaaagtcaccgttgagcatccggataaactggaagagaaattcccacaggttgcggcaactggcgatggccctgacattatcttctgggcacacgaccgctttggtggctacgctcaatctggcctgttggctgaaatcaccccggacaaagcgttccaggacaagctgtatccgtttacctgggatgccgtacgttacaacggcaagctgattgcttacccgatcgctgttgaagcgttatcgctgatttataacaaagatctgctgccgaacccgccaaaaacctgggaagagatcccggcgctggataaagaactgaaagcgaaaggtaagagcgcgctgatgttcaacctgcaagaaccgtacttcacctggccgctgattgctgctgacgggggttatgcgttcaagtatgaaaacggcaagtacgacattaaagacgtgggcgtggataacgctggcgcgaaagcgggtctgaccttcctggttgacctgattaaaaacaaacacatgaatgcagacaccgattactccatcgcagaagctgcctttaataaaggcgaaacagcgatgaccatcaacggcccgtgggcatggtccaacatcgacaccagcaaagtgaattatggtgtaacggtactgccgaccttcaagggtcaaccatccaaaccgttcgttggcgtgctgagcgcaggtattaacgccgccagtccgaacaaagagctggcgaaagagttcctcgaaaactatctgctgactgatgaaggtctggaagcggttaataaagacaaaccgctgggtgccgtagcgctgaagtcttacgaggaagagttggcgaaagatccacgtattgccgccaccatggaaaacgcccagaaaggtgaaatcatgccgaacatcccgcagatgtccgctttctggtatgccgtgcgtactgcggtgatcaacgccgccagcggtcgtcagactgtcgatgaagccctgaaagacgcgcagactggtggttctggtgagaacctgtactttcaaagctcagataatgggcctcaaaaccagcgcaacgctccacgtataaccttcggtggcccgtctgactccacaggcagcaaccagaatggtgagcgtagtggagccaggtctaagcagcgccgtccccagggtctgccgaacaacacggcgagctggtttactgcgcttacccaacacggtaaagaagacttaaaattcccgcgtggccagggcgtcccgatcaacactaactcttccccggatgatcagattggttattaccgcagagcaactcgtcggattcgcggcggcgacggtaaaatgaaagatttgtctccgcgttggtacttttactatctcggcaccggtccggaagctggactgccctacggggcaaacaaggacgggatcatttgggtggctaccgaaggtgccctgaatactccaaaagatcatatcggcacccgtaaccctgctaataacgctgcgatcgttctgcaactgcctcagggtacaactctgccaaaaggcttctatgcagaagggtcgcgtggtggcagccaggcgagtagccgtagcagctcccgctctcgcaactcgtcccgtaactccactccgggctcttctcgcggcacgtccccggctcgtatggcaggtaacggtggtgacgctgctctggcgctgctactgctggacaggctgaaccagctggagtcgaagatgagtggtaaaggccaacagcagcagggccagaccgttaccaaaaagagcgcagctgaagcatctaaaaaaccgcgacagaaacgtaccgcgactaaagcgtacaatgtaacacaggccttcggtcgtcgaggtccggagcaaactcaaggaaactttggcgatcaggaattaatccgccaggggaccgactacaaatattggccgcaaattgcccagttcgccccatccgctagtgcattcttcggtatgagccgcatcggcatggaagtaacgccaagtggtacgtggctgacctacaccggtgctatcaagcttgatgacaaggacccgaactttaaagaccaggttattctgcttaacaaacatattgatgcctataaaactttcccgccgaccgaacccaaaaaggacaaaaagaaaaaagctgatgaaacccaggctctaccgcagcgtcagaaaaaacagcaaactgtgactctgctgccagctgcggacctggatgatttttccaagcagctgcaacagtctatgagctctgcggactctacgcaggctggtggttctggtcaccatcatcaccatcattaa

SEQ ID NO: 3023 - DNA, 2421 bp, Artificial Sequence
  Description of Artificial Sequence: Synthetic polynucleotide
atgaaaatcgaagaaggtaaactggtaatctggattaacggcgataaaggctataacggtctcgctgaagtcggtaagaaattcgagaaagataccggaattaaagtcaccgttgagcatccggataaactggaagagaaattcccacaggttgcggcaactggcgatggccctgacattatcttctgggcacacgaccgctttggtggctacgctcaatctggcctgttggctgaaatcaccccggacaaagcgttccaggacaagctgtatccgtttacctgggatgccgtacgttacaacggcaagctgattgcttacccgatcgctgttgaagcgttatcgctgatttataacaaagatctgctgccgaacccgccaaaaacctgggaagagatcccggcgctggataaagaactgaaagcgaaaggtaagagcgcgctgatgttcaacctgcaagaaccgtacttcacctggccgctgattgctgctgacgggggttatgcgttcaagtatgaaaacggcaagtacgacattaaagacgtgggcgtggataacgctggcgcgaaagcgggtctgaccttcctggttgacctgattaaaaacaaacacatgaatgcagacaccgattactccatcgcagaagctgcctttaataaaggcgaaacagcgatgaccatcaacggcccgtgggcatggtccaacatcgacaccagcaaagtgaattatggtgtaacggtactgccgaccttcaagggtcaaccatccaaaccgttcgttggcgtgctgagcgcaggtattaacgccgccagtccgaacaaagagctggcgaaagagttcctcgaaaactatctgctgactgatgaaggtctggaagcggttaataaagacaaaccgctgggtgccgtagcgctgaagtcttacgaggaagagttggcgaaagatccacgtattgccgccaccatggaaaacgcccagaaaggtgaaatcatgccgaacatcccgcagatgtccgctttctggtatgccgtgcgtactgcggtgatcaacgccgccagcggtcgtcagactgtcgatgaagccctgaaagacgcgcagactggtggttctggtgagaacctgtactttcaaagctcagataatgggcctcaaaaccagcgcaacgctccacgtataaccttcggtggcccgtctgactccacaggcagcaaccagaatggtgagcgtagtggagccaggtctaagcagcgccgtccccagggtctgccgaacaacacggcgagctggtttactgcgcttacccaacacggtaaagaagacttaaaattcccgcgtggccagggcgtcccgatcaacactaactcttccccggatgatcagattggttattaccgcagagcaactcgtcggattcgcggcggcgacggtaaaatgaaagatttgtctccgcgttggtacttttactatctcggcaccggtccggaagctggactgccctacggggcaaacaaggacgggatcatttgggtggctaccgaaggtgccctgaatactccaaaagatcatatcggcacccgtaaccctgctaataacgctgcgatcgttctgcaactgcctcagggtacaactctgccaaaaggcttctatgcagaagggtcgcgtggtggcagccaggcgagtagccgtagcagctcccgctctcgcaactcgtcccgtaactccactccgggctcttctcgcggcacgtccccggctcgtatggcaggtaacggtggtgacgctgctctggcgctgctactgctggacaggctgaaccagctggagtcgaagatgagtggtaaaggccaacagcagcagggccagaccgttaccaaaaagagcgcagctgaagcatctaaaaaaccgcgacagaaacgtaccgcgactaaagcgtacaatgtaacacaggccttcggtcgtcgaggtccggagcaaactcaaggaaactttggcgatcaggaattaatccgccaggggaccgactacaaacactggccgcaaattgcccagttcgccccatccgctagtgcattcttcggtatgagccgcatcggcatggaagtaacgccaagtggtacgtggctgacctacaccggtgctatcaagcttgatgaaaaggacccgaactttaaagaccaggttattctgcttaacaaacatattgatgcctataaaactttcccgccgaccgaacccaaaaaggacaaaaagaaaaaagctgatgaaacccaggctctaccgcagcgtcagaaaaaacagcaaactgtgactctgctgccagctgcggacctggatgatttttccaagcagctgcaacagtctatgagctctgcggactctacgcaggctggtggttctggtcaccatcatcaccatcattaa

SEQ ID NO: 3024 - DNA, 2421 bp, Artificial Sequence
  Description of Artificial Sequence: Synthetic polynucleotide
atgaaaatcgaagaaggtaaactggtaatctggattaacggcgataaaggctataacggtctcgctgaagtcggtaagaaattcgagaaagataccggaattaaagtcaccgttgagcatccggataaactggaagagaaattcccacaggttgcggcaactggcgatggccctgacattatcttctgggcacacgaccgctttggtggctacgctcaatctggcctgttggctgaaatcaccccggacaaagcgttccaggacaagctgtatccgtttacctgggatgccgtacgttacaacggcaagctgattgcttacccgatcgctgttgaagcgttatcgctgatttataacaaagatctgctgccgaacccgccaaaaacctgggaagagatcccggcgctggataaagaactgaaagcgaaaggtaagagcgcgctgatgttcaacctgcaagaaccgtacttcacctggccgctgattgctgctgacgggggttatgcgttcaagtatgaaaacggcaagtacgacattaaagacgtgggcgtggataacgctggcgcgaaagcgggtctgaccttcctggttgacctgattaaaaacaaacacatgaatgcagacaccgattactccatcgcagaagctgcctttaataaaggcgaaacagcgatgaccatcaacggcccgtgggcatggtccaacatcgacaccagcaaagtgaattatggtgtaacggtactgccgaccttcaagggtcaaccatccaaaccgttcgttggcgtgctgagcgcaggtattaacgccgccagtccgaacaaagagctggcgaaagagttcctcgaaaactatctgctgactgatgaaggtctggaagcggttaataaagacaaaccgctgggtgccgtagcgctgaagtcttacgaggaagagttggcgaaagatccacgtattgccgccaccatggaaaacgcccagaaaggtgaaatcatgccgaacatcccgcagatgtccgctttctggtatgccgtgcgtactgcggtgatcaacgccgccagcggtcgtcagactgtcgatgaagccctgaaagacgcgcagactggtggttctggtgagaacctgtactttcaaagctcagataatgggcctcaaaaccagcgcaacgctccacgtataaccttcggtggcccgtctgactccacaggcagcaaccagaatggtgagcgtagtggagccaggtctaagcagcgccgtccccagggtctgccgaacaacacggcgagctggtttactgcgcttacccaacacggtaaagaagacttaaaattcccgcgtggccagggcgtcccgatcaacaaaaactcttccccggatgatcagattggttattaccgcagagcaactcgtcggattcgcggcggcgacggtaaaatgaaagatttgtctccgcgttggtacttttactatctcggcaccggtccggaagctggactgccctacggggcaaacaaggacgggatcatttgggtggctaccgaaggtgccctgaatactccaaaagatcatatcggcacccgtaaccctgctaataacgctgcgatcgttctgcaactgcctcagggtacaactctgccaaaaggcttctatgcagaagggtcgcgtggtggcagccaggcgagtagccgtagcagctcccgctctcgcaactcgtcccgtaactccactccgggctcttctcgcggcacgtccccggctcgtatggcaggtaacggtggtgacgctgctctggcgctgctactgctggacaggctgaaccagctggagtcgaagatgagtggtaaaggccaacagcagcagggccagaccgttaccaaaaagagcgcagctgaagcatctaaaaaaccgcgacagaaacgtaccgcgactaaagcgtacaatgtaacacaggccttcggtcgtcgaggtccggagcaaactcaaggaaactttggcgatcaggaattaatccgccaggggaccgactacaaacactggccgcaaattgcccagttcgccccatccgctagtgcattcttcggtatgagccgcatcggcatggaagtaacgccaagtggtacgtggctgacctacaccggtgctatcaagcttgatgacaaggacccgaactttaaagaccaggttattctgcttaacaaacatattgatgcctataaaactttcccgccgaccgaacccaaaaaggacaaaaagaaaaaagctgatgaaacccaggctctaccgcagcgtcagaaaaaacagcaaactgtgactctgctgccagctgcggacctggatgatttttccaagcagctgcaacagtctatgagctctgcggactctacgcaggctggtggttctggtcaccatcatcaccatcattaa

SEQ ID NO: 3025 - DNA, 2421 bp, Artificial Sequence
  Description of Artificial Sequence: Synthetic polynucleotide
atgaaaatcgaagaaggtaaactggtaatctggattaacggcgataaaggctataacggtctcgctgaagtcggtaagaaattcgagaaagataccggaattaaagtcaccgttgagcatccggataaactggaagagaaattcccacaggttgcggcaactggcgatggccctgacattatcttctgggcacacgaccgctttggtggctacgctcaatctggcctgttggctgaaatcaccccggacaaagcgttccaggacaagctgtatccgtttacctgggatgccgtacgttacaacggcaagctgattgcttacccgatcgctgttgaagcgttatcgctgatttataacaaagatctgctgccgaacccgccaaaaacctgggaagagatcccggcgctggataaagaactgaaagcgaaaggtaagagcgcgctgatgttcaacctgcaagaaccgtacttcacctggccgctgattgctgctgacgggggttatgcgttcaagtatgaaaacggcaagtacgacattaaagacgtgggcgtggataacgctggcgcgaaagcgggtctgaccttcctggttgacctgattaaaaacaaacacatgaatgcagacaccgattactccatcgcagaagctgcctttaataaaggcgaaacagcgatgaccatcaacggcccgtgggcatggtccaacatcgacaccagcaaagtgaattatggtgtaacggtactgccgaccttcaagggtcaaccatccaaaccgttcgttggcgtgctgagcgcaggtattaacgccgccagtccgaacaaagagctggcgaaagagttcctcgaaaactatctgctgactgatgaaggtctggaagcggttaataaagacaaaccgctgggtgccgtagcgctgaagtcttacgaggaagagttggcgaaagatccacgtattgccgccaccatggaaaacgcccagaaaggtgaaatcatgccgaacatcccgcagatgtccgctttctggtatgccgtgcgtactgcggtgatcaacgccgccagcggtcgtcagactgtcgatgaagccctgaaagacgcgcagactggtggttctggtgagaacctgtactttcaaagctcagataatgggcctcaaaaccagcgcaacgctccacgtataaccttcggtggcccgtctgactccacaggcagcaaccagaatggtgagcgtagtggagccaggtctaagcagcgccgtccccagggtctgccgaacaacacggcgagctggtttactgcgcttacccaacacggtaaagaagacttaaaattcccgcgtggccagggcgtcccgatcaacactaactcttccccggatgatcagattggttattaccgcagagcaactcgtcggattcgcggcggcgacggtaaaatgaaagatttgtctccgcgttggtacttttactatctcggcaccggtccggaagctggactgccctacggggcaaacaaggacgggatcatttgggtggctaccgaaggtgccctgaatactccaaaagatcatatcggcacccgtaaccctgctaataacgctgcgatcgtttgtcaactgcctcagggtacaactctgccaaaaggcttctatgcagaagggtcgcgtggtggcagccaggcgagtagccgtagcagctcccgctctcgcaactcgtcccgtaactccactccgggctcttctcgcggcacgtccccggctcgtatggcaggtaacggtggtgacgctgctctggcgctgctactgctggacaggctgaaccagctggagtcgaagatgagtggtaaaggccaacagcagcagggccagaccgttaccaaaaagagcgcagctgaagcatctaaaaaaccgcgacagaaacgtaccgcgactaaagcgtacaatgtaacacaggccttcggtcgtcgaggtccggagcaaactcaaggaaactttggcgatcaggaattaatccgccaggggaccgactacaaacactggccgcaaattgcccagttcgccccatccgctagtgcattcttcggtatgagccgcatcggcatggaagtaacgccaagtggtacgtggctgacctacaccggtgctatcaagcttgatgacaaggacccgaactttaaagaccaggttattctgcttaacaaacatattgatgcctataaaactttcccgccgaccgaacccaaaaaggacaaaaagaaaaaagctgatgaaacccaggctctaccgcagcgtcagaaaaaacagcaaactgtgactctgctgccagctgcggacctggatgatttttccaagcagctgcaacagtctatgagctctgcggactctacgcaggctggtggttctggtcaccatcatcaccatcattaa

SEQ ID NO: 3026 - DNA, 2421 bp, Artificial Sequence
  Description of Artificial Sequence: Synthetic polynucleotide
atgaaaatcgaagaaggtaaactggtaatctggattaacggcgataaaggctataacggtctcgctgaagtcggtaagaaattcgagaaagataccggaattaaagtcaccgttgagcatccggataaactggaagagaaattcccacaggttgcggcaactggcgatggccctgacattatcttctgggcacacgaccgctttggtggctacgctcaatctggcctgttggctgaaatcaccccggacaaagcgttccaggacaagctgtatccgtttacctgggatgccgtacgttacaacggcaagctgattgcttacccgatcgctgttgaagcgttatcgctgatttataacaaagatctgctgccgaacccgccaaaaacctgggaagagatcccggcgctggataaagaactgaaagcgaaaggtaagagcgcgctgatgttcaacctgcaagaaccgtacttcacctggccgctgattgctgctgacgggggttatgcgttcaagtatgaaaacggcaagtacgacattaaagacgtgggcgtggataacgctggcgcgaaagcgggtctgaccttcctggttgacctgattaaaaacaaacacatgaatgcagacaccgattactccatcgcagaagctgcctttaataaaggcgaaacagcgatgaccatcaacggcccgtgggcatggtccaacatcgacaccagcaaagtgaattatggtgtaacggtactgccgaccttcaagggtcaaccatccaaaccgttcgttggcgtgctgagcgcaggtattaacgccgccagtccgaacaaagagctggcgaaagagttcctcgaaaactatctgctgactgatgaaggtctggaagcggttaataaagacaaaccgctgggtgccgtagcgctgaagtcttacgaggaagagttggcgaaagatccacgtattgccgccaccatggaaaacgcccagaaaggtgaaatcatgccgaacatcccgcagatgtccgctttctggtatgccgtgcgtactgcggtgatcaacgccgccagcggtcgtcagactgtcgatgaagccctgaaagacgcgcagactggtggttctggtgagaacctgtactttcaaagctcagataatgggcctcaaaaccagcgcaacgctccacgtataaccttcggtggcccgtctgactccacaggcagcaaccagaatggtgagcgtagtggagccaggtctaagcagcgccgtccccagggtctgccgaacaacacggcgagctggtttactgcgcttacccaacacggtaaagaagacttaaaattcccgcgtggccagggcgtcccgatcaacactaactcttccccggatgatcagattggttattaccgcagagcaactcgtcggattcgcggcggcgacggtaaaatgaaagatttgtctccgcgttggtacttttactatctcggcaccggtccggaagctggactgccctacggggcaaacaaggacgggatcatttgggtggctaccgaaggtgccctgaatactccaaaagatcatatcggcacccgtaaccctgctaataacgctgcgatcgttctgcaactgcctcagggtacaactctgccaaaaggcttctatgcagaagggtcgcgtggtggcagccaggcgagtagccgtagcagctcccgctctcgcaactcgtcccgtaactccactccgggctcttctcgcggcacgtccccggctcgtatggcaggtaacggtggtgacgctgctctggcgctgctactgctggacaggctgaaccagctggagtcgaagatgagtggtaaaggccaacagcagcagggccagaccgttaccaaaaagagcgcagctgaagcatctaaaaaaccgcgacagaaacgtaccgcgactaaagcgtacaatgtaacacaggccttcggtcgtcgaggtccggagcaaactcaaggaaactttggcgatgatgaattaatccgccaggggaccgactacaaacactggccgcaaattgcccagttcgccccatccgctagtgcattcttcggtatgagccgcatcggcatggaagtaacgccaagtggtacgtggctgacctacaccggtgctatcaagcttgatgacaaggacccgaactttaaagaccaggttattctgcttaacaaacatattgatgcctataaaactttcccgccgaccgaacccaaaaaggacaaaaagaaaaaagctgatgaaacccaggctctaccgcagcgtcagaaaaaacagcaaactgtgactctgctgccagctgcggacctggatgatttttccaagcagctgcaacagtctatgagctctgcggactctacgcaggctggtggttctggtcaccatcatcaccatcattaa

SEQ ID NO: 3027 - DNA, 2421 bp, Artificial Sequence
  Description of Artificial Sequence: Synthetic polynucleotide
atgaaaatcgaagaaggtaaactggtaatctggattaacggcgataaaggctataacggtctcgctgaagtcggtaagaaattcgagaaagataccggaattaaagtcaccgttgagcatccggataaactggaagagaaattcccacaggttgcggcaactggcgatggccctgacattatcttctgggcacacgaccgctttggtggctacgctcaatctggcctgttggctgaaatcaccccggacaaagcgttccaggacaagctgtatccgtttacctgggatgccgtacgttacaacggcaagctgattgcttacccgatcgctgttgaagcgttatcgctgatttataacaaagatctgctgccgaacccgccaaaaacctgggaagagatcccggcgctggataaagaactgaaagcgaaaggtaagagcgcgctgatgttcaacctgcaagaaccgtacttcacctggccgctgattgctgctgacgggggttatgcgttcaagtatgaaaacggcaagtacgacattaaagacgtgggcgtggataacgctggcgcgaaagcgggtctgaccttcctggttgacctgattaaaaacaaacacatgaatgcagacaccgattactccatcgcagaagctgcctttaataaaggcgaaacagcgatgaccatcaacggcccgtgggcatggtccaacatcgacaccagcaaagtgaattatggtgtaacggtactgccgaccttcaagggtcaaccatccaaaccgttcgttggcgtgctgagcgcaggtattaacgccgccagtccgaacaaagagctggcgaaagagttcctcgaaaactatctgctgactgatgaaggtctggaagcggttaataaagacaaaccgctgggtgccgtagcgctgaagtcttacgaggaagagttggcgaaagatccacgtattgccgccaccatggaaaacgcccagaaaggtgaaatcatgccgaacatcccgcagatgtccgctttctggtatgccgtgcgtactgcggtgatcaacgccgccagcggtcgtcagactgtcgatgaagccctgaaagacgcgcagactggtggttctggtgagaacctgtactttcaaagctcagataatgggcctcaaaaccagcgcaacgctccacgtataaccttcggtggcccgtctgactccacaggcagcaaccagaatggtgagcgtagtggagccaggtctaagcagcgccgtccccagggtctgccgaacaacacggcgagctggtttactgcgcttacccaacacggtaaagaagacttaaaattcccgcgtggccagggcgtcccgatcaacgataactcttccccggatgatcagattggttattaccgcagagcaactcgtcggattcgcggcggcgacggtaaaatgaaagatttgtctccgcgttggtacttttactatctcggcaccggtccggaagctggactgccctacggggcaaacaaggacgggatcatttgggtggctaccgaaggtgccctgaatactccaaaagatcatatcggcacccgtaaccctgctaataacgctgcgatcgttctgcaactgcctcagggtacaactctgccaaaaggcttctatgcagaagggtcgcgtggtggcagccaggcgagtagccgtagcagctcccgctctcgcaactcgtcccgtaactccactccgggctcttctcgcggcacgtccccggctcgtatggcaggtaacggtggtgacgctgctctggcgctgctactgctggacaggctgaaccagctggagtcgaagatgagtggtaaaggccaacagcagcagggccagaccgttaccaaaaagagcgcagctgaagcatctaaaaaaccgcgacagaaacgtaccgcgactaaagcgtacaatgtaacacaggccttcggtcgtcgaggtccggagcaaactcaaggaaactttggcgatcaggaattaatccgccaggggaccgactacaaacactggccgcaaattgcccagttcgccccatccgctagtgcattcttcggtatgagccgcatcggcatggaagtaacgccaagtggtacgtggctgacctacaccggtgctatcaagcttgatgacaaggacccgaactttaaagaccaggttattctgcttaacaaacatattgatgcctataaaactttcccgccgaccgaacccaaaaaggacaaaaagaaaaaagctgatgaaacccaggctctaccgcagcgtcagaaaaaacagcaaactgtgactctgctgccagctgcggacctggatgatttttccaagcagctgcaacagtctatgagctctgcggactctacgcaggctggtggttctggtcaccatcatcaccatcattaa

SEQ ID NO: 3028 - DNA, 2421 bp, Artificial Sequence
  Description of Artificial Sequence: Synthetic polynucleotide
atgaaaatcgaagaaggtaaactggtaatctggattaacggcgataaaggctataacggtctcgctgaagtcggtaagaaattcgagaaagataccggaattaaagtcaccgttgagcatccggataaactggaagagaaattcccacaggttgcggcaactggcgatggccctgacattatcttctgggcacacgaccgctttggtggctacgctcaatctggcctgttggctgaaatcaccccggacaaagcgttccaggacaagctgtatccgtttacctgggatgccgtacgttacaacggcaagctgattgcttacccgatcgctgttgaagcgttatcgctgatttataacaaagatctgctgccgaacccgccaaaaacctgggaagagatcccggcgctggataaagaactgaaagcgaaaggtaagagcgcgctgatgttcaacctgcaagaaccgtacttcacctggccgctgattgctgctgacgggggttatgcgttcaagtatgaaaacggcaagtacgacattaaagacgtgggcgtggataacgctggcgcgaaagcgggtctgaccttcctggttgacctgattaaaaacaaacacatgaatgcagacaccgattactccatcgcagaagctgcctttaataaaggcgaaacagcgatgaccatcaacggcccgtgggcatggtccaacatcgacaccagcaaagtgaattatggtgtaacggtactgccgaccttcaagggtcaaccatccaaaccgttcgttggcgtgctgagcgcaggtattaacgccgccagtccgaacaaagagctggcgaaagagttcctcgaaaactatctgctgactgatgaaggtctggaagcggttaataaagacaaaccgctgggtgccgtagcgctgaagtcttacgaggaagagttggcgaaagatccacgtattgccgccaccatggaaaacgcccagaaaggtgaaatcatgccgaacatcccgcagatgtccgctttctggtatgccgtgcgtactgcggtgatcaacgccgccagcggtcgtcagactgtcgatgaagccctgaaagacgcgcagactggtggttctggtgagaacctgtactttcaaagctcagataatgggcctcaaaaccagcgcaacgctccacgtataaccttcggtggcccgtctgactccacaggcagcaaccagaatggtgagcgtagtggagccaggtctaagcagcgccgtccccagggtctgccgaacaacacggcgagctggtttactgcgcttacccaacacggtaaagaagacttaaaattcccgcgtggccagggcgtcccgatcaacactaactcttccccggatgatcagattggttattaccgcagagcaactcgtcggattcgcggcggcgacggtaaaatgaaagatttgtctccgcgttggtacttttactatctcggcaccggtccggaagctggactgccctacggggcaaacaaggacgggatcatttgggtggctaccgaaggtgccctgaatactccaaaagatcatatcggcacccgtaaccctgctaataacgctgcgatcgttctgcaactgcctcagggtacaactctgccaaaaggcttctatgcagaagggtcgcgtggtggcagccaggcgagtagccgtagcagctcccgctctcgcaactcgtcccgtaactccactccgggctcttctcgcggcacgtccccggctcgtatggcaggtaacggtggtgacgctgctctggcgctgctactgctggacaggctgaaccagctggagtcgaagatgagtggtaaaggccaacagcagcagggccagaccgttaccaaaaagagcgcagctgaaatgtctaaaaaaccgcgacagaaacgtaccgcgactaaagggtgcaatgtaacacagtgtttcggtccacgaggtccggagcaaactcaaggaaactttggcgatgccgaattaaataaaaaaggggtggactacaaacactggccgcaaattgcccagttcgccccatccgctagtgcattcttcggtatgagccgcatctcgagcaaggaacaaccaagtggtacgtggctgacctacaccggtgctatcaagcttgataaggatgacccgaactttaaagaccaggttattctgcttaacaaacatattgatgcctataaaactttcccgccgaccgaacccaaaaaggacaaaaagaaaaaagctgatgaaacccaggctctaccgcagcgtcagaaaaaacagcaaactgtgactctgctgccagctgcggacctggatgatttttccaagcagctgcaacagtctatgagctctgcggactctacgcaggctggtggttctggtcaccatcatcaccatcattaa

SEQ ID NO: 3029 - DNA, 2421 bp, Artificial Sequence
  Description of Artificial Sequence: Synthetic polynucleotide
atgaaaatcgaagaaggtaaactggtaatctggattaacggcgataaaggctataacggtctcgctgaagtcggtaagaaattcgagaaagataccggaattaaagtcaccgttgagcatccggataaactggaagagaaattcccacaggttgcggcaactggcgatggccctgacattatcttctgggcacacgaccgctttggtggctacgctcaatctggcctgttggctgaaatcaccccggacaaagcgttccaggacaagctgtatccgtttacctgggatgccgtacgttacaacggcaagctgattgcttacccgatcgctgttgaagcgttatcgctgatttataacaaagatctgctgccgaacccgccaaaaacctgggaagagatcccggcgctggataaagaactgaaagcgaaaggtaagagcgcgctgatgttcaacctgcaagaaccgtacttcacctggccgctgattgctgctgacgggggttatgcgttcaagtatgaaaacggcaagtacgacattaaagacgtgggcgtggataacgctggcgcgaaagcgggtctgaccttcctggttgacctgattaaaaacaaacacatgaatgcagacaccgattactccatcgcagaagctgcctttaataaaggcgaaacagcgatgaccatcaacggcccgtgggcatggtccaacatcgacaccagcaaagtgaattatggtgtaacggtactgccgaccttcaagggtcaaccatccaaaccgttcgttggcgtgctgagcgcaggtattaacgccgccagtccgaacaaagagctggcgaaagagttcctcgaaaactatctgctgactgatgaaggtctggaagcggttaataaagacaaaccgctgggtgccgtagcgctgaagtcttacgaggaagagttggcgaaagatccacgtattgccgccaccatggaaaacgcccagaaaggtgaaatcatgccgaacatcccgcagatgtccgctttctggtatgccgtgcgtactgcggtgatcaacgccgccagcggtcgtcagactgtcgatgaagccctgaaagacgcgcagactggtggttctggtgagaacctgtactttcaaagctcagataatgggcctcaaaaccagcgcaacgctccacgtataaccttcggtggcccgtctgactccacaggcagcaaccagaatggtgagcgtagtggagccaggtctaagcagcgccgtccccagggtctgccgaacaacacggcgagctggtttactggccttacccaaaatggtaaagaagacttaaaattcccgcccggccagggcgtcccgatcaacactaactcttccccggatgatcagattggttattaccgcagagcaactcgtcggattcgcggcggcgacggtaaaatgaaagatttgccaccgcgttggtacttttactatctcggcaccggtccgcacgctgatctgccctacgggcaaaagcatgacggggtggtttgggtggctaaacctggtgccctgaatactccaaaagatcatatcggcacccgtaaccctgctaataacgctgcgatcccgctgcaactgcctcccggtacaaaactgccaaaaggcttctatgcagaagggtcgcgtggtggcagccaggcgagtagccgtagcagctcccgctctcgcaactcgtcccgtaactccactccgggctcttctcgcggcacgtccccggctcgtatggcaggtaacggtggtgacgctgctctggcgctgctactgctggacaggctgaaccagctggagtcgaagatgagtggtaaaggccaacagcagcagggccagaccgttaccaaaaagagcgcagctgaagcatctaaaaaaccgcgacagaaacgtaccgcgactaaagcgtacaatgtaacacaggccttcggtcgtcgaggtccggagcaaactcaaggaaactttggcgatcaggaattaatccgccaggggaccgactacaaacactggccgcaaattgcccagttcgccccatccgctagtgcattcttcggtatgagccgcatcggcatggaagtaacgccaagtggtacgtggctgacctacaccggtgctatcaagcttgatgacaaggacccgaactttaaagaccaggttattctgcttaacaaacatattgatgcctataaaactttcccgccgaccgaacccaaaaaggacaaaaagaaaaaagctgatgaaacccaggctctaccgcagcgtcagaaaaaacagcaaactgtgactctgctgccagctgcggacctggatgatttttccaagcagctgcaacagtctatgagctctgcggactctacgcaggctggtggttctggtcaccatcatcaccatcattaa

SEQ ID NO: 3030 - DNA, 2421 bp, Artificial Sequence
  Description of Artificial Sequence: Synthetic polynucleotide
atgaaaatcgaagaaggtaaactggtaatctggattaacggcgataaaggctataacggtctcgctgaagtcggtaagaaattcgagaaagataccggaattaaagtcaccgttgagcatccggataaactggaagagaaattcccacaggttgcggcaactggcgatggccctgacattatcttctgggcacacgaccgctttggtggctacgctcaatctggcctgttggctgaaatcaccccggacaaagcgttccaggacaagctgtatccgtttacctgggatgccgtacgttacaacggcaagctgattgcttacccgatcgctgttgaagcgttatcgctgatttataacaaagatctgctgccgaacccgccaaaaacctgggaagagatcccggcgctggataaagaactgaaagcgaaaggtaagagcgcgctgatgttcaacctgcaagaaccgtacttcacctggccgctgattgctgctgacgggggttatgcgttcaagtatgaaaacggcaagtacgacattaaagacgtgggcgtggataacgctggcgcgaaagcgggtctgaccttcctggttgacctgattaaaaacaaacacatgaatgcagacaccgattactccatcgcagaagctgcctttaataaaggcgaaacagcgatgaccatcaacggcccgtgggcatggtccaacatcgacaccagcaaagtgaattatggtgtaacggtactgccgaccttcaagggtcaaccatccaaaccgttcgttggcgtgctgagcgcaggtattaacgccgccagtccgaacaaagagctggcgaaagagttcctcgaaaactatctgctgactgatgaaggtctggaagcggttaataaagacaaaccgctgggtgccgtagcgctgaagtcttacgaggaagagttggcgaaagatccacgtattgccgccaccatggaaaacgcccagaaaggtgaaatcatgccgaacatcccgcagatgtccgctttctggtatgccgtgcgtactgcggtgatcaacgccgccagcggtcgtcagactgtcgatgaagccctgaaagacgcgcagactggtggttctggtgagaacctgtactttcaaagctcagataatgggcctcaaaaccagcgcaacgctccacgtataaccttcggtggcccgtctgactccacaggcagcaaccagaatggtgagcgtagtggagccaggtctaagcagcgccgtccccagggtctgccgaacaacacggcgagctggtttactgcgcttacccaacacggtaaagaagacttaaaattcccgcgtggccagggcgtcccgatcaacactaactcttccccggatgatcagattggttattaccgcagagcaactcgtcggattcgcggcggcgacggtaaaatgaaagatttgtctccgcgttggtacttttactatctcggcaccggtccggaagctggactgccctacggggcaaacaaggacgggatcatttgggtggctaccgaaggtgccctgaatactccaaaagatcatatcggcacccgtaaccctgctaataacgaggcgatcgttctgcaactgcctcagggtacaactctgccaaaaggcttctatgcagaagggtcgcgtggtggcagccaggcgagtagccgtagcagctcccgctctcgcaactcgtcccgtaactccactccgggctcttctcgcggcacgtccccggctcgtatggcaggtaacggtggtgacgctgctctggcgctgctactgctggacaggctgaaccagctggagtcgaagatgagtggtaaaggccaacagcagcagggccagaccgttaccaaaaagagcgcagctgaagcatctaaaaaaccgcgacagaaacgtaccgcgactaaagcgtacaatgtaacacaggccttcggtcgtcgaggtccggagcaaactcaaggaaactttggcgatcaggaattaatccgccaggggaccgactacaaacactggccgcaaattgcccagttcgccccatccgctagtgcattcttcggtatgagccgcatcggcatggaagtaacgccaagtggtacgtggctgacctacaccggtgctatcaagcttgatgacaaggacccgaactttaaagaccaggttattctgcttaacaaacatattgatgcctataaaactttcccgccgaccgaacccaaaaaggacaaaaagaaaaaagctgatgaaacccaggctctaccgcagcgtcagaaaaaacagcaaactgtgactctgctgccagctgcggacctggatgatttttccaagcagctgcaacagtctatgagctctgcggactctacgcaggctggtggttctggtcaccatcatcaccatcattaa

SEQ ID NO: 3031 - DNA, 2421 bp, Artificial Sequence
  Description of Artificial Sequence: Synthetic polynucleotide
atgaaaatcgaagaaggtaaactggtaatctggattaacggcgataaaggctataacggtctcgctgaagtcggtaagaaattcgagaaagataccggaattaaagtcaccgttgagcatccggataaactggaagagaaattcccacaggttgcggcaactggcgatggccctgacattatcttctgggcacacgaccgctttggtggctacgctcaatctggcctgttggctgaaatcaccccggacaaagcgttccaggacaagctgtatccgtttacctgggatgccgtacgttacaacggcaagctgattgcttacccgatcgctgttgaagcgttatcgctgatttataacaaagatctgctgccgaacccgccaaaaacctgggaagagatcccggcgctggataaagaactgaaagcgaaaggtaagagcgcgctgatgttcaacctgcaagaaccgtacttcacctggccgctgattgctgctgacgggggttatgcgttcaagtatgaaaacggcaagtacgacattaaagacgtgggcgtggataacgctggcgcgaaagcgggtctgaccttcctggttgacctgattaaaaacaaacacatgaatgcagacaccgattactccatcgcagaagctgcctttaataaaggcgaaacagcgatgaccatcaacggcccgtgggcatggtccaacatcgacaccagcaaagtgaattatggtgtaacggtactgccgaccttcaagggtcaaccatccaaaccgttcgttggcgtgctgagcgcaggtattaacgccgccagtccgaacaaagagctggcgaaagagttcctcgaaaactatctgctgactgatgaaggtctggaagcggttaataaagacaaaccgctgggtgccgtagcgctgaagtcttacgaggaagagttggcgaaagatccacgtattgccgccaccatggaaaacgcccagaaaggtgaaatcatgccgaacatcccgcagatgtccgctttctggtatgccgtgcgtactgcggtgatcaacgccgccagcggtcgtcagactgtcgatgaagccctgaaagacgcgcagactggtggttctggtgagaacctgtactttcaaagctcagataatgggcctcaaaaccagcgcaacgctccacgtataaccttcggtggcccgtctgactccacaggcagcaaccagaatggtgagcgtagtggagccaggtctaagcagcgccgtccccagggtctgccgaacaacacggcgagctggtttactgcgcttacccaacacggtaaagaagacttaaaattcccgcgtggccagggcgtcccgatcaacactaactcttccccggatgatcagattggttattaccgcagagcaactcgtcggattcgcggcggcgacggtaaaatgaaagatttgtctccgcgttggtacttttactatctcggcaccggtccggaagctggactgccctacggggcaaacaaggacgggatcatttgggtggctaccgaaggtgccctgaatactccaaaagatcatatcggcacccgtaaccctgctaataacgctgcgaatgttctgcaactgcctcagggtacaactctgccaaaaggcttctatgcagaagggtcgcgtggtggcagccaggcgagtagccgtagcagctcccgctctcgcaactcgtcccgtaactccactccgggctcttctcgcggcacgtccccggctcgtatggcaggtaacggtggtgacgctgctctggcgctgctactgctggacaggctgaaccagctggagtcgaagatgagtggtaaaggccaacagcagcagggccagaccgttaccaaaaagagcgcagctgaagcatctaaaaaaccgcgacagaaacgtaccgcgactaaagcgtacaatgtaacacaggccttcggtcgtcgaggtccggagcaaactcaaggaaactttggcgatcaggaattaatccgccaggggaccgactacaaacactggccgcaaattgcccagttcgccccatccgctagtgcattcttcggtatgagccgcatcggcatggaagtaacgccaagtggtacgtggctgacctacaccggtgctatcaagcttgatgacaaggacccgaactttaaagaccaggttattctgcttaacaaacatattgatgcctataaaactttcccgccgaccgaacccaaaaaggacaaaaagaaaaaagctgatgaaacccaggctctaccgcagcgtcagaaaaaacagcaaactgtgactctgctgccagctgcggacctggatgatttttccaagcagctgcaacagtctatgagctctgcggactctacgcaggctggtggttctggtcaccatcatcaccatcattaa

SEQ ID NO: 3032 - DNA, 2421 bp, Artificial Sequence
  Description of Artificial Sequence: Synthetic polynucleotide
atgaaaatcgaagaaggtaaactggtaatctggattaacggcgataaaggctataacggtctcgctgaagtcggtaagaaattcgagaaagataccggaattaaagtcaccgttgagcatccggataaactggaagagaaattcccacaggttgcggcaactggcgatggccctgacattatcttctgggcacacgaccgctttggtggctacgctcaatctggcctgttggctgaaatcaccccggacaaagcgttccaggacaagctgtatccgtttacctgggatgccgtacgttacaacggcaagctgattgcttacccgatcgctgttgaagcgttatcgctgatttataacaaagatctgctgccgaacccgccaaaaacctgggaagagatcccggcgctggataaagaactgaaagcgaaaggtaagagcgcgctgatgttcaacctgcaagaaccgtacttcacctggccgctgattgctgctgacgggggttatgcgttcaagtatgaaaacggcaagtacgacattaaagacgtgggcgtggataacgctggcgcgaaagcgggtctgaccttcctggttgacctgattaaaaacaaacacatgaatgcagacaccgattactccatcgcagaagctgcctttaataaaggcgaaacagcgatgaccatcaacggcccgtgggcatggtccaacatcgacaccagcaaagtgaattatggtgtaacggtactgccgaccttcaagggtcaaccatccaaaccgttcgttggcgtgctgagcgcaggtattaacgccgccagtccgaacaaagagctggcgaaagagttcctcgaaaactatctgctgactgatgaaggtctggaagcggttaataaagacaaaccgctgggtgccgtagcgctgaagtcttacgaggaagagttggcgaaagatccacgtattgccgccaccatggaaaacgcccagaaaggtgaaatcatgccgaacatcccgcagatgtccgctttctggtatgccgtgcgtactgcggtgatcaacgccgccagcggtcgtcagactgtcgatgaagccctgaaagacgcgcagactggtggttctggtgagaacctgtactttcaaagctcagataatgggcctcaaaaccagcgcaacgctccacgtataaccttcggtggcccgtctgactccacaggcagcaaccagaatggtgagcgtagtggagccaggtctaagcagcgccgtccccagggtctgccgaacaacacggcgagctggtttactgcgcttacccaacacggtaaagaagacttaaaattcccgcgtggccagggcgtcccgatcaacactaactcttccccggatgatcagattggtatgtaccgcagagcaactcgtcggattcgcggcggcgacggtaaaatgaaagatttgtctccgcgttggtacttttactatctcggcaccggtccggaagctggactgccctacggggcaaacaaggacgggatcatttgggtggctaccgaaggtgccctgaatactccaaaagatcatatcggcacccgtaaccctgctaataacgctgcgatcgttctgcaactgcctcagggtacaactctgccaaaaggcttctatgcagaagggtcgcgtggtggcagccaggcgagtagccgtagcagctcccgctctcgcaactcgtcccgtaactccactccgggctcttctcgcggcacgtccccggctcgtatggcaggtaacggtggtgacgctgctctggcgctgctactgctggacaggctgaaccagctggagtcgaagatgagtggtaaaggccaacagcagcagggccagaccgttaccaaaaagagcgcagctgaagcatctaaaaaaccgcgacagaaacgtaccgcgactaaagcgtacaatgtaacacaggccttcggtcgtcgaggtccggagcaaactcaaggaaactttggcgatcaggaattaatccgccaggggaccgactacaaacactggccgcaaattgcccagttcgccccatccgctagtgcattcttcggtatgagccgcatcggcatggaagtaacgccaagtggtacgtggctgacctacaccggtgctatcaagcttgatgacaaggacccgaactttaaagaccaggttattctgcttaacaaacatattgatgcctataaaactttcccgccgaccgaacccaaaaaggacaaaaagaaaaaagctgatgaaacccaggctctaccgcagcgtcagaaaaaacagcaaactgtgactctgctgccagctgcggacctggatgatttttccaagcagctgcaacagtctatgagctctgcggactctacgcaggctggtggttctggtcaccatcatcaccatcattaa

SEQ ID NO: 3033 - DNA, 2421 bp, Artificial Sequence
  Description of Artificial Sequence: Synthetic polynucleotide
atgaaaatcgaagaaggtaaactggtaatctggattaacggcgataaaggctataacggtctcgctgaagtcggtaagaaattcgagaaagataccggaattaaagtcaccgttgagcatccggataaactggaagagaaattcccacaggttgcggcaactggcgatggccctgacattatcttctgggcacacgaccgctttggtggctacgctcaatctggcctgttggctgaaatcaccccggacaaagcgttccaggacaagctgtatccgtttacctgggatgccgtacgttacaacggcaagctgattgcttacccgatcgctgttgaagcgttatcgctgatttataacaaagatctgctgccgaacccgccaaaaacctgggaagagatcccggcgctggataaagaactgaaagcgaaaggtaagagcgcgctgatgttcaacctgcaagaaccgtacttcacctggccgctgattgctgctgacgggggttatgcgttcaagtatgaaaacggcaagtacgacattaaagacgtgggcgtggataacgctggcgcgaaagcgggtctgaccttcctggttgacctgattaaaaacaaacacatgaatgcagacaccgattactccatcgcagaagctgcctttaataaaggcgaaacagcgatgaccatcaacggcccgtgggcatggtccaacatcgacaccagcaaagtgaattatggtgtaacggtactgccgaccttcaagggtcaaccatccaaaccgttcgttggcgtgctgagcgcaggtattaacgccgccagtccgaacaaagagctggcgaaagagttcctcgaaaactatctgctgactgatgaaggtctggaagcggttaataaagacaaaccgctgggtgccgtagcgctgaagtcttacgaggaagagttggcgaaagatccacgtattgccgccaccatggaaaacgcccagaaaggtgaaatcatgccgaacatcccgcagatgtccgctttctggtatgccgtgcgtactgcggtgatcaacgccgccagcggtcgtcagactgtcgatgaagccctgaaagacgcgcagactggtggttctggtgagaacctgtactttcaaagctcagataatgggcctcaaaaccagcgcaacgctccacgtataaccttcggtggcccgtctgactccacaggcagcaaccagaatggtgagcgtagtggagccaggtctaagcagcgccgtccccagggtctgccgaacaacacggcgagctggtttactgcgcttacccaacacggtaaagaagacttaaaattcccgcgtggccagggcgtcccgatcaacactaactcttccccggatgatcagattggttattaccgcagagcaactcgtcggattcgcggcggcgacggtaaaatgaaagatttgtctccgcgttggtacttttactatctcggcaccggtccggaagctggactgccctacggggcaaacaaggacgggatcatttgggtggctaccgaaggtgccctgaatactccaaaagatcatatcggcacccgtaaccctgctaataacgctgcgatcgttctgcaactgcctcagggtacaactctgccaaaaggcttctatgcagaagggtcgcgtggtggcagccaggcgagtagccgtagcagctcccgctctcgcaactcgtcccgtaactccactccgggctcttctcgcggcacgtccccggctcgtatggcaggtaacggtggtgacgctgctctggcgctgctactgctggacaggctgaaccagctggagtcgaagatgagtggtaaaggccaacagcagcagggccagaccgttaccaaaaagagcgcagctgaagcatctaaaaaaccgcgacagaaacgtaccgcgactaaagcgtacaatgtaacacaggccttcggtcgtcgaggtccggagcaaactcaaggaaactttggcgatcaggaattaatccgccaggggaccgactacaaacactggccgcaaattgcccagttcgccccatccgctagtgcattcttcggtatgagccgcatcggcatgaaagtaacgccaagtggtacgtggctgacctacaccggtgctatcaagcttgatgacaaggacccgaactttaaagaccaggttattctgcttaacaaacatattgatgcctataaaactttcccgccgaccgaacccaaaaaggacaaaaagaaaaaagctgatgaaacccaggctctaccgcagcgtcagaaaaaacagcaaactgtgactctgctgccagctgcggacctggatgatttttccaagcagctgcaacagtctatgagctctgcggactctacgcaggctggtggttctggtcaccatcatcaccatcattaa

SEQ ID NO: 3034 - DNA, 2421 bp, Artificial Sequence
  Description of Artificial Sequence: Synthetic polynucleotide
atgaaaatcgaagaaggtaaactggtaatctggattaacggcgataaaggctataacggtctcgctgaagtcggtaagaaattcgagaaagataccggaattaaagtcaccgttgagcatccggataaactggaagagaaattcccacaggttgcggcaactggcgatggccctgacattatcttctgggcacacgaccgctttggtggctacgctcaatctggcctgttggctgaaatcaccccggacaaagcgttccaggacaagctgtatccgtttacctgggatgccgtacgttacaacggcaagctgattgcttacccgatcgctgttgaagcgttatcgctgatttataacaaagatctgctgccgaacccgccaaaaacctgggaagagatcccggcgctggataaagaactgaaagcgaaaggtaagagcgcgctgatgttcaacctgcaagaaccgtacttcacctggccgctgattgctgctgacgggggttatgcgttcaagtatgaaaacggcaagtacgacattaaagacgtgggcgtggataacgctggcgcgaaagcgggtctgaccttcctggttgacctgattaaaaacaaacacatgaatgcagacaccgattactccatcgcagaagctgcctttaataaaggcgaaacagcgatgaccatcaacggcccgtgggcatggtccaacatcgacaccagcaaagtgaattatggtgtaacggtactgccgaccttcaagggtcaaccatccaaaccgttcgttggcgtgctgagcgcaggtattaacgccgccagtccgaacaaagagctggcgaaagagttcctcgaaaactatctgctgactgatgaaggtctggaagcggttaataaagacaaaccgctgggtgccgtagcgctgaagtcttacgaggaagagttggcgaaagatccacgtattgccgccaccatggaaaacgcccagaaaggtgaaatcatgccgaacatcccgcagatgtccgctttctggtatgccgtgcgtactgcggtgatcaacgccgccagcggtcgtcagactgtcgatgaagccctgaaagacgcgcagactggtggttctggtgagaacctgtactttcaaagctcagataatgggcctcaaaaccagcgcaacgctccacgtataaccttcggtggcccgtctgactccacaggcagcaaccagaatggtgagcgtagtggagccaggtctaagcagcgccgtccccagggtctgccgaacaacacggcgagctggtttactgcgcttacccaacacggtaaagaagacttaaaattcccgcgtggccagggcgtcccgatcaacactaactcttccccggatgatcagattggttattaccgcagagcaactcgtcggattcgcggcggcgacggtaaaatgaaagatttgtctccgcgttggtacttttactatctccgaaccggtccggaagctggactgccctacggggcaaacaaggacgggatcatttgggtggctaccgaaggtgccctgaatactccaaaagatcatatcggcacccgtaaccctgctaataacgctgcgatcgttctgcaactgcctcagggtacaactctgccaaaaggcttctatgcagaagggtcgcgtggtggcagccaggcgagtagccgtagcagctcccgctctcgcaactcgtcccgtaactccactccgggctcttctcgcggcacgtccccggctcgtatggcaggtaacggtggtgacgctgctctggcgctgctactgctggacaggctgaaccagctggagtcgaagatgagtggtaaaggccaacagcagcagggccagaccgttaccaaaaagagcgcagctgaagcatctaaaaaaccgcgacagaaacgtaccgcgactaaagcgtacaatgtaacacaggccttcggtcgtcgaggtccggagcaaactcaaggaaactttggcgatcaggaattaatccgccaggggaccgactacaaacactggccgcaaattgcccagttcgccccatccgctagtgcattcttcggtatgagccgcatcggcatggaagtaacgccaagtggtacgtggctgacctacaccggtgctatcaagcttgatgacaaggacccgaactttaaagaccaggttattctgcttaacaaacatattgatgcctataaaactttcccgccgaccgaacccaaaaaggacaaaaagaaaaaagctgatgaaacccaggctctaccgcagcgtcagaaaaaacagcaaactgtgactctgctgccagctgcggacctggatgatttttccaagcagctgcaacagtctatgagctctgcggactctacgcaggctggtggttctggtcaccatcatcaccatcattaa

SEQ ID NO: 3035 - DNA, 2421 bp, Artificial Sequence
  Description of Artificial Sequence: Synthetic polynucleotide
atgaaaatcgaagaaggtaaactggtaatctggattaacggcgataaaggctataacggtctcgctgaagtcggtaagaaattcgagaaagataccggaattaaagtcaccgttgagcatccggataaactggaagagaaattcccacaggttgcggcaactggcgatggccctgacattatcttctgggcacacgaccgctttggtggctacgctcaatctggcctgttggctgaaatcaccccggacaaagcgttccaggacaagctgtatccgtttacctgggatgccgtacgttacaacggcaagctgattgcttacccgatcgctgttgaagcgttatcgctgatttataacaaagatctgctgccgaacccgccaaaaacctgggaagagatcccggcgctggataaagaactgaaagcgaaaggtaagagcgcgctgatgttcaacctgcaagaaccgtacttcacctggccgctgattgctgctgacgggggttatgcgttcaagtatgaaaacggcaagtacgacattaaagacgtgggcgtggataacgctggcgcgaaagcgggtctgaccttcctggttgacctgattaaaaacaaacacatgaatgcagacaccgattactccatcgcagaagctgcctttaataaaggcgaaacagcgatgaccatcaacggcccgtgggcatggtccaacatcgacaccagcaaagtgaattatggtgtaacggtactgccgaccttcaagggtcaaccatccaaaccgttcgttggcgtgctgagcgcaggtattaacgccgccagtccgaacaaagagctggcgaaagagttcctcgaaaactatctgctgactgatgaaggtctggaagcggttaataaagacaaaccgctgggtgccgtagcgctgaagtcttacgaggaagagttggcgaaagatccacgtattgccgccaccatggaaaacgcccagaaaggtgaaatcatgccgaacatcccgcagatgtccgctttctggtatgccgtgcgtactgcggtgatcaacgccgccagcggtcgtcagactgtcgatgaagccctgaaagacgcgcagactggtggttctggtgagaacctgtactttcaaagctcagataatgggcctcaaaaccagcgcaacgctccacgtataaccttcggtggcccgtctgactccacaggcagcaaccagaatggtgagcgtagtggagccaggtctaagcagcgccgtccccagggtctgccgaacaacacggcgagctggtttactgcgcttacccaacacggtaaagaagacttaaaattcccgcgtggccagggcgtcccgatcaacactaactcttccccggatgatcagattggttattaccgcagagcaactcgtcggattcgcggcggcgacggtaaaatgaaagatttgtctccgcgttggtacttttactatctcggcaccggtccggaagctggactgccctacggggcaaacaaggacgggatcatttgggtggctaccgaaggtgccctgaatactccaaaagatcatatcggcacccgtaaccctgctaataacgctgcgatcgttctgcaactgcctcagggtacaactctgccaaaaggcttctatgcagaagggtcgcgtggtggcagccaggcgagtagccgtagcagctcccgctctcgcaactcgtcccgtaactccactccgggctcttctcgcggcacgtccccggctcgtatggcaggtaacggtggtgacgctgctctggcgctgctactgctggacaggctgaaccagctggagtcgaagatgagtggtaaaggccaacagcagcagggccagaccgttaccaaaaagagcgcagctgaaatgtctaaaaaaccgcgacagaaacgtaccgcgactaaaggatgtaatgtaacacagtgcttcggtccacgaggtccggagcaaactcaaggaaactttggcgatgccgaattaatcaaaaaaggggtggactacaaacactggccgcaaattgcccagttcgccccatccgctagtgcattcttcggtatgagccgcatctcatccaaagaaacgccaagtggtacgtggctgacctacaccggtgctatcaagcttgataaggatgacccgaactttaaagaccaggttattctgcttaacaaacatattgatgcctataaaactttcccgccgaccgaacccaaaaaggacaaaaagaaaaaagctgatgaaacccaggctctaccgcagcgtcagaaaaaacagcaaactgtgactctgctgccagctgcggacctggatgatttttccaagcagctgcaacagtctatgagctctgcggactctacgcaggctggtggttctggtcaccatcatcaccatcattaa

SEQ ID NO: 3036 - DNA, 2421 bp, Artificial Sequence
  Description of Artificial Sequence: Synthetic polynucleotide
atgaaaatcgaagaaggtaaactggtaatctggattaacggcgataaaggctataacggtctcgctgaagtcggtaagaaattcgagaaagataccggaattaaagtcaccgttgagcatccggataaactggaagagaaattcccacaggttgcggcaactggcgatggccctgacattatcttctgggcacacgaccgctttggtggctacgctcaatctggcctgttggctgaaatcaccccggacaaagcgttccaggacaagctgtatccgtttacctgggatgccgtacgttacaacggcaagctgattgcttacccgatcgctgttgaagcgttatcgctgatttataacaaagatctgctgccgaacccgccaaaaacctgggaagagatcccggcgctggataaagaactgaaagcgaaaggtaagagcgcgctgatgttcaacctgcaagaaccgtacttcacctggccgctgattgctgctgacgggggttatgcgttcaagtatgaaaacggcaagtacgacattaaagacgtgggcgtggataacgctggcgcgaaagcgggtctgaccttcctggttgacctgattaaaaacaaacacatgaatgcagacaccgattactccatcgcagaagctgcctttaataaaggcgaaacagcgatgaccatcaacggcccgtgggcatggtccaacatcgacaccagcaaagtgaattatggtgtaacggtactgccgaccttcaagggtcaaccatccaaaccgttcgttggcgtgctgagcgcaggtattaacgccgccagtccgaacaaagagctggcgaaagagttcctcgaaaactatctgctgactgatgaaggtctggaagcggttaataaagacaaaccgctgggtgccgtagcgctgaagtcttacgaggaagagttggcgaaagatccacgtattgccgccaccatggaaaacgcccagaaaggtgaaatcatgccgaacatcccgcagatgtccgctttctggtatgccgtgcgtactgcggtgatcaacgccgccagcggtcgtcagactgtcgatgaagccctgaaagacgcgcagactggtggttctggtgagaacctgtactttcaaagctcagataatgggcctcaaaaccagcgcaacgctccacgtataaccttcggtggcccgtctgactccacaggcagcaaccagaatggtgagcgtagtggagccaggtctaagcagcgccgtccccagggtctgccgaacaacacggcgagctggtttactgcgcttacccaacacggtaaagaagacttaaaattcccgcgtggccagggcgtcccgatcaacactaactcttccccggatgatcagattggttattaccgcagagcaactcgtcggattcgcggcggcgacggtaaaaggaaagatttgtctccgcgttggtacttttactatctcggcaccggtccggaagctggactgccctacggggcaaacaaggacgggatcatttgggtggctaccgaaggtgccctgaatactccaaaagatcatatcggcacccgtaaccctgctaataacgctgcgatcgttctgcaactgcctcagggtacaactctgccaaaaggcttctatgcagaagggtcgcgtggtggcagccaggcgagtagccgtagcagctcccgctctcgcaactcgtcccgtaactccactccgggctcttctcgcggcacgtccccggctcgtatggcaggtaacggtggtgacgctgctctggcgctgctactgctggacaggctgaaccagctggagtcgaagatgagtggtaaaggccaacagcagcagggccagaccgttaccaaaaagagcgcagctgaagcatctaaaaaaccgcgacagaaacgtaccgcgactaaagcgtacaatgtaacacaggccttcggtcgtcgaggtccggagcaaactcaaggaaactttggcgatcaggaattaatccgccaggggaccgactacaaacactggccgcaaattgcccagttcgccccatccgctagtgcattcttcggtatgagccgcatcggcatggaagtaacgccaagtggtacgtggctgacctacaccggtgctatcaagcttgatgacaaggacccgaactttaaagaccaggttattctgcttaacaaacatattgatgcctataaaactttcccgccgaccgaacccaaaaaggacaaaaagaaaaaagctgatgaaacccaggctctaccgcagcgtcagaaaaaacagcaaactgtgactctgctgccagctgcggacctggatgatttttccaagcagctgcaacagtctatgagctctgcggactctacgcaggctggtggttctggtcaccatcatcaccatcattaa

SEQ ID NO: 3037 - DNA, 2421 bp, Artificial Sequence
  Description of Artificial Sequence: Synthetic polynucleotide
atgaaaatcgaagaaggtaaactggtaatctggattaacggcgataaaggctataacggtctcgctgaagtcggtaagaaattcgagaaagataccggaattaaagtcaccgttgagcatccggataaactggaagagaaattcccacaggttgcggcaactggcgatggccctgacattatcttctgggcacacgaccgctttggtggctacgctcaatctggcctgttggctgaaatcaccccggacaaagcgttccaggacaagctgtatccgtttacctgggatgccgtacgttacaacggcaagctgattgcttacccgatcgctgttgaagcgttatcgctgatttataacaaagatctgctgccgaacccgccaaaaacctgggaagagatcccggcgctggataaagaactgaaagcgaaaggtaagagcgcgctgatgttcaacctgcaagaaccgtacttcacctggccgctgattgctgctgacgggggttatgcgttcaagtatgaaaacggcaagtacgacattaaagacgtgggcgtggataacgctggcgcgaaagcgggtctgaccttcctggttgacctgattaaaaacaaacacatgaatgcagacaccgattactccatcgcagaagctgcctttaataaaggcgaaacagcgatgaccatcaacggcccgtgggcatggtccaacatcgacaccagcaaagtgaattatggtgtaacggtactgccgaccttcaagggtcaaccatccaaaccgttcgttggcgtgctgagcgcaggtattaacgccgccagtccgaacaaagagctggcgaaagagttcctcgaaaactatctgctgactgatgaaggtctggaagcggttaataaagacaaaccgctgggtgccgtagcgctgaagtcttacgaggaagagttggcgaaagatccacgtattgccgccaccatggaaaacgcccagaaaggtgaaatcatgccgaacatcccgcagatgtccgctttctggtatgccgtgcgtactgcggtgatcaacgccgccagcggtcgtcagactgtcgatgaagccctgaaagacgcgcagactggtggttctggtgagaacctgtactttcaaagctcagataatgggcctcaaaaccagcgcaacgctccacgtataaccttcggtggcccgtctgactccacaggcagcaaccagaatggtgagcgtagtggagccaggtctaagcagcgccgtccccagggtctgccgaacaacacggcgagctggtttactgcgcttacccaacacggtaaagaagacttaaaattcccgcgtggccagggcgtcccggataacactaactcttccccggatgatcagattggttattaccgcagagcaactcgtcggattcgcggcggcgacggtaaaatgaaagatttgtctccgcgttggtacttttactatctcggcaccggtccggaagctggactgccctacggggcaaacaaggacgggatcatttgggtggctaccgaaggtgccctgaatactccaaaagatcatatcggcacccgtaaccctgctaataacgctgcgatcgttctgcaactgcctcagggtacaactctgccaaaaggcttctatgcagaagggtcgcgtggtggcagccaggcgagtagccgtagcagctcccgctctcgcaactcgtcccgtaactccactccgggctcttctcgcggcacgtccccggctcgtatggcaggtaacggtggtgacgctgctctggcgctgctactgctggacaggctgaaccagctggagtcgaagatgagtggtaaaggccaacagcagcagggccagaccgttaccaaaaagagcgcagctgaagcatctaaaaaaccgcgacagaaacgtaccgcgactaaagcgtacaatgtaacacaggccttcggtcgtcgaggtccggagcaaactcaaggaaactttggcgatcaggaattaatccgccaggggaccgactacaaacactggccgcaaattgcccagttcgccccatccgctagtgcattcttcggtatgagccgcatcggcatggaagtaacgccaagtggtacgtggctgacctacaccggtgctatcaagcttgatgacaaggacccgaactttaaagaccaggttattctgcttaacaaacatattgatgcctataaaactttcccgccgaccgaacccaaaaaggacaaaaagaaaaaagctgatgaaacccaggctctaccgcagcgtcagaaaaaacagcaaactgtgactctgctgccagctgcggacctggatgatttttccaagcagctgcaacagtctatgagctctgcggactctacgcaggctggtggttctggtcaccatcatcaccatcattaa

SEQ ID NO: 3038 - DNA, 2421 bp, Artificial Sequence
  Description of Artificial Sequence: Synthetic polynucleotide
atgaaaatcgaagaaggtaaactggtaatctggattaacggcgataaaggctataacggtctcgctgaagtcggtaagaaattcgagaaagataccggaattaaagtcaccgttgagcatccggataaactggaagagaaattcccacaggttgcggcaactggcgatggccctgacattatcttctgggcacacgaccgctttggtggctacgctcaatctggcctgttggctgaaatcaccccggacaaagcgttccaggacaagctgtatccgtttacctgggatgccgtacgttacaacggcaagctgattgcttacccgatcgctgttgaagcgttatcgctgatttataacaaagatctgctgccgaacccgccaaaaacctgggaagagatcccggcgctggataaagaactgaaagcgaaaggtaagagcgcgctgatgttcaacctgcaagaaccgtacttcacctggccgctgattgctgctgacgggggttatgcgttcaagtatgaaaacggcaagtacgacattaaagacgtgggcgtggataacgctggcgcgaaagcgggtctgaccttcctggttgacctgattaaaaacaaacacatgaatgcagacaccgattactccatcgcagaagctgcctttaataaaggcgaaacagcgatgaccatcaacggcccgtgggcatggtccaacatcgacaccagcaaagtgaattatggtgtaacggtactgccgaccttcaagggtcaaccatccaaaccgttcgttggcgtgctgagcgcaggtattaacgccgccagtccgaacaaagagctggcgaaagagttcctcgaaaactatctgctgactgatgaaggtctggaagcggttaataaagacaaaccgctgggtgccgtagcgctgaagtcttacgaggaagagttggcgaaagatccacgtattgccgccaccatggaaaacgcccagaaaggtgaaatcatgccgaacatcccgcagatgtccgctttctggtatgccgtgcgtactgcggtgatcaacgccgccagcggtcgtcagactgtcgatgaagccctgaaagacgcgcagactggtggttctggtgagaacctgtactttcaaagctcagataatgggcctcaaaaccagcgcaacgctccacgtataaccttcggtggcccgtctgactccacaggcagcaaccagaatggtgagcgtagtggagccaggtctaagcagcgccgtccccagggtctgccgaacaacacggcgagctggtttactgcgcttacccaacacggtaaagaagacttaaaattcccgcgtggccagggcgtcccgatcaacactaactcttccccggatgatcagattggttattaccgcagagcaactcgtcggattcgcggcggcgacggtaaaatgaaagatttgtctccgcgttggtacttttactatctcggcaccggtccggaagctggactgccctacggggcaaacaaggacgggatcatttgggtggctaccgaaggtgccctgaatactccaaaagatcatatcggcacccgtaaccctgctaataacgctgcgatcgttctgcaactgcctcagggtacaactctgccaaaaggcttctatgcagaagggtcgcgtggtggcagccaggcgagtagccgtagcagctcccgctctcgcaactcgtcccgtaactccactccgggctcttctcgcggcacgtccccggctcgtatggcaggtaacggtggtgacgctgctctggcgctgctactgctggacaggctgaaccagctggagtcgaagatgagtggtaaaggccaacagcagcagggccagaccgttaccaaaaagagcgcagctgaagcatctaaaaaaccgcgacagaaacgtaccgcgactaaagcgtacaatgtaacacaggccttcggtcgtcgaggtccggagcaaactcaaggaaactttggcgatcaggaattaatccgccaggggaccgactacaaacactggccgcaaattgcccagttcgccccatccgctagtgcattcttcggtatgagccgcatcggccttgaagtaacgccaagtggtacgtggctgacctacaccggtgctatcaagcttgatgacaaggacccgaactttaaagaccaggttattctgcttaacaaacatattgatgcctataaaactttcccgccgaccgaacccaaaaaggacaaaaagaaaaaagctgatgaaacccaggctctaccgcagcgtcagaaaaaacagcaaactgtgactctgctgccagctgcggacctggatgatttttccaagcagctgcaacagtctatgagctctgcggactctacgcaggctggtggttctggtcaccatcatcaccatcattaa

SEQ ID NO: 3039 - DNA, 2421 bp, Artificial Sequence
  Description of Artificial Sequence: Synthetic polynucleotide
atgaaaatcgaagaaggtaaactggtaatctggattaacggcgataaaggctataacggtctcgctgaagtcggtaagaaattcgagaaagataccggaattaaagtcaccgttgagcatccggataaactggaagagaaattcccacaggttgcggcaactggcgatggccctgacattatcttctgggcacacgaccgctttggtggctacgctcaatctggcctgttggctgaaatcaccccggacaaagcgttccaggacaagctgtatccgtttacctgggatgccgtacgttacaacggcaagctgattgcttacccgatcgctgttgaagcgttatcgctgatttataacaaagatctgctgccgaacccgccaaaaacctgggaagagatcccggcgctggataaagaactgaaagcgaaaggtaagagcgcgctgatgttcaacctgcaagaaccgtacttcacctggccgctgattgctgctgacgggggttatgcgttcaagtatgaaaacggcaagtacgacattaaagacgtgggcgtggataacgctggcgcgaaagcgggtctgaccttcctggttgacctgattaaaaacaaacacatgaatgcagacaccgattactccatcgcagaagctgcctttaataaaggcgaaacagcgatgaccatcaacggcccgtgggcatggtccaacatcgacaccagcaaagtgaattatggtgtaacggtactgccgaccttcaagggtcaaccatccaaaccgttcgttggcgtgctgagcgcaggtattaacgccgccagtccgaacaaagagctggcgaaagagttcctcgaaaactatctgctgactgatgaaggtctggaagcggttaataaagacaaaccgctgggtgccgtagcgctgaagtcttacgaggaagagttggcgaaagatccacgtattgccgccaccatggaaaacgcccagaaaggtgaaatcatgccgaacatcccgcagatgtccgctttctggtatgccgtgcgtactgcggtgatcaacgccgccagcggtcgtcagactgtcgatgaagccctgaaagacgcgcagactggtggttctggtgagaacctgtactttcaaagctcagataatgggcctcaaaaccagcgcaacgctccacgtataaccttcggtggcccgtctgactccacaggcagcaaccagaatggtgagcgtagtggagccaggtctaagcagcgccgtccccagggtctgccgaacaacacggcgagctggtttactgcgcttacccaacacggtaaagaagacttaaaattcccgcgtggccagggcgtcccgatcaacactaactcttccccggatgatcagattggttattaccgcagagcaactcgtcggattcgcggcggcgacggtaaaatgaaagatttgtctccgcgttggtacttttactatctcggcaccggtccggaagctacgctgccctacggggcaaacaaggacgggatcatttgggtggctaccgaaggtgccctgaatactccaaaagatcatatcggcacccgtaaccctgctaataacgctgcgatcgttctgcaactgcctcagggtacaactctgccaaaaggcttctatgcagaagggtcgcgtggtggcagccaggcgagtagccgtagcagctcccgctctcgcaactcgtcccgtaactccactccgggctcttctcgcggcacgtccccggctcgtatggcaggtaacggtggtgacgctgctctggcgctgctactgctggacaggctgaaccagctggagtcgaagatgagtggtaaaggccaacagcagcagggccagaccgttaccaaaaagagcgcagctgaagcatctaaaaaaccgcgacagaaacgtaccgcgactaaagcgtacaatgtaacacaggccttcggtcgtcgaggtccggagcaaactcaaggaaactttggcgatcaggaattaatccgccaggggaccgactacaaacactggccgcaaattgcccagttcgccccatccgctagtgcattcttcggtatgagccgcatcggcatggaagtaacgccaagtggtacgtggctgacctacaccggtgctatcaagcttgatgacaaggacccgaactttaaagaccaggttattctgcttaacaaacatattgatgcctataaaactttcccgccgaccgaacccaaaaaggacaaaaagaaaaaagctgatgaaacccaggctctaccgcagcgtcagaaaaaacagcaaactgtgactctgctgccagctgcggacctggatgatttttccaagcagctgcaacagtctatgagctctgcggactctacgcaggctggtggttctggtcaccatcatcaccatcattaa

SEQ ID NO: 3040 - DNA, 2421 bp, Artificial Sequence
  Description of Artificial Sequence: Synthetic polynucleotide
atgaaaatcgaagaaggtaaactggtaatctggattaacggcgataaaggctataacggtctcgctgaagtcggtaagaaattcgagaaagataccggaattaaagtcaccgttgagcatccggataaactggaagagaaattcccacaggttgcggcaactggcgatggccctgacattatcttctgggcacacgaccgctttggtggctacgctcaatctggcctgttggctgaaatcaccccggacaaagcgttccaggacaagctgtatccgtttacctgggatgccgtacgttacaacggcaagctgattgcttacccgatcgctgttgaagcgttatcgctgatttataacaaagatctgctgccgaacccgccaaaaacctgggaagagatcccggcgctggataaagaactgaaagcgaaaggtaagagcgcgctgatgttcaacctgcaagaaccgtacttcacctggccgctgattgctgctgacgggggttatgcgttcaagtatgaaaacggcaagtacgacattaaagacgtgggcgtggataacgctggcgcgaaagcgggtctgaccttcctggttgacctgattaaaaacaaacacatgaatgcagacaccgattactccatcgcagaagctgcctttaataaaggcgaaacagcgatgaccatcaacggcccgtgggcatggtccaacatcgacaccagcaaagtgaattatggtgtaacggtactgccgaccttcaagggtcaaccatccaaaccgttcgttggcgtgctgagcgcaggtattaacgccgccagtccgaacaaagagctggcgaaagagttcctcgaaaactatctgctgactgatgaaggtctggaagcggttaataaagacaaaccgctgggtgccgtagcgctgaagtcttacgaggaagagttggcgaaagatccacgtattgccgccaccatggaaaacgcccagaaaggtgaaatcatgccgaacatcccgcagatgtccgctttctggtatgccgtgcgtactgcggtgatcaacgccgccagcggtcgtcagactgtcgatgaagccctgaaagacgcgcagactggtggttctggtgagaacctgtactttcaaagctcagataatgggcctcaaaaccagcgcaacgctccacgtataaccttcggtggcccgtctgactccacaggcagcaaccagaatggtgagcgtagtggagccaggtctaagcagcgccgtccccagggtctgccgaacaacacggcgagctggtttactgcgcttacccaacacggtaaagaagacttaaaattcccgcgtggccagggcgtcccgatcaacactaactcttccccggatgatcagattggttattaccgcagagcaactcgtcggattcgcggcggcgacggtaaaatgaaagatttgtctccgcgttggtacttttactatctcggcaccggtccggaagctggactgccctacggggcaaacaaggacgggatcatttgggtggctaccgaaggtgccctgaatactccaaaagatcatatcggcacccgtaaccctgctaataacgctgcgatcgttctgcaactgcctcagggtacaactctgccaaaaggcttctatgcagaagggtcgcgtggtggcagccaggcgagtagccgtagcagctcccgctctcgcaactcgtcccgtaactccactccgggctcttctcgcggcacgtccccggctcgtatggcaggtaacggtggtgacgctgctctggcgctgctactgctggacaggctgaaccagctggagtcgaagatgagtggtaaaggccaacagcagcagggccagaccgttaccaaaaagagcgcagctgaagcatctaaaaaaccgcgacagaaacgtaccgcgactaaaggatacaatgtaacacaggccttcggtcgtcgaggtccggagcaaactcaaggaaactttggcgatcaggatttaatcaaattggggaccgactacaaacactggccgcaaattgcccagttcgccccatccgctagtgcattcttcggtatgagccgcatcggcatgcgcgaaacgccaagtggtacgtggctgacctacaccggtgctatcaagcttgataaaaaggacccgaactttaaagaccaggttattctgcttaacaaacatattgatgcctataaaactttcccgccgaccgaacccaaaaaggacaaaaagaaaaaagctgatgaaacccaggctctaccgcagcgtcagaaaaaacagcaaactgtgactctgctgccagctgcggacctggatgatttttccaagcagctgcaacagtctatgagctctgcggactctacgcaggctggtggttctggtcaccatcatcaccatcattaa

SEQ ID NO: 3041 - DNA, 2421 bp, Artificial Sequence
  Description of Artificial Sequence: Synthetic polynucleotide
atgaaaatcgaagaaggtaaactggtaatctggattaacggcgataaaggctataacggtctcgctgaagtcggtaagaaattcgagaaagataccggaattaaagtcaccgttgagcatccggataaactggaagagaaattcccacaggttgcggcaactggcgatggccctgacattatcttctgggcacacgaccgctttggtggctacgctcaatctggcctgttggctgaaatcaccccggacaaagcgttccaggacaagctgtatccgtttacctgggatgccgtacgttacaacggcaagctgattgcttacccgatcgctgttgaagcgttatcgctgatttataacaaagatctgctgccgaacccgccaaaaacctgggaagagatcccggcgctggataaagaactgaaagcgaaaggtaagagcgcgctgatgttcaacctgcaagaaccgtacttcacctggccgctgattgctgctgacgggggttatgcgttcaagtatgaaaacggcaagtacgacattaaagacgtgggcgtggataacgctggcgcgaaagcgggtctgaccttcctggttgacctgattaaaaacaaacacatgaatgcagacaccgattactccatcgcagaagctgcctttaataaaggcgaaacagcgatgaccatcaacggcccgtgggcatggtccaacatcgacaccagcaaagtgaattatggtgtaacggtactgccgaccttcaagggtcaaccatccaaaccgttcgttggcgtgctgagcgcaggtattaacgccgccagtccgaacaaagagctggcgaaagagttcctcgaaaactatctgctgactgatgaaggtctggaagcggttaataaagacaaaccgctgggtgccgtagcgctgaagtcttacgaggaagagttggcgaaagatccacgtattgccgccaccatggaaaacgcccagaaaggtgaaatcatgccgaacatcccgcagatgtccgctttctggtatgccgtgcgtactgcggtgatcaacgccgccagcggtcgtcagactgtcgatgaagccctgaaagacgcgcagactggtggttctggtgagaacctgtactttcaaagctcagataatgggcctcaaaaccagcgcaacgctccacgtataaccttcggtggcccgtctgactccacaggcagcaaccagaatggtgagcgtagtggagccaggtctaagcagcgccgtccccagggtctgccgaacaacacggcgagctggtttactgcgcttacccaacacggtaaagaagacttaaaattcccgcgtggccagggcgtcccgatcaacactaactcttccccggatgatcagattggttattaccgcagagcaactcgtcggattcgcggcggcgacggtaaaatgaaagatttgtctccgcgttggtacttttactatctcggcaccggtccggaagctggactgccctacggggcaaacaaggacgggatcatttgggtggctaccgaaggtgccctgaatactccaaaagatcatatcggcacccgtaaccctgctaataacgctgcgatcgttctgcaactgcctcagggtacaactctgccaaaaggcttctatgcagaagggtcgcgtggtggcagccaggcgagtagccgtagcagctcccgctctcgcaactcgtcccgtaactccactccgggctcttctcgcggcacgtccccggctcgtatggcaggtaacggtggtgacgctgctctggcgctgctactgctggacaggctgaaccagctggagtcgaagatgagtggtaaaggccaacagcagcagggccagaccgttaccaaaaagagcgcagctgaagcatctaaaaaaccgcgacagaaacgtaccgcgactaaagcgtacaatgtaacacaggccttcggtcgtcgaggtccggagcaaactcaaggaaactttggcgatcaggaattaatccgccaggggaccgactacaaacactggccgcaaattgcccagttcgtgccatccgctagtgcattcttcggtatgagccgcatcggcatggaagtaacgccaagtggtacgtggctgacctacaccggtgctatcaagcttgatgacaaggacccgaactttaaagaccaggttattctgcttaacaaacatattgatgcctataaaactttcccgccgaccgaacccaaaaaggacaaaaagaaaaaagctgatgaaacccaggctctaccgcagcgtcagaaaaaacagcaaactgtgactctgctgccagctgcggacctggatgatttttccaagcagctgcaacagtctatgagctctgcggactctacgcaggctggtggttctggtcaccatcatcaccatcattaa

SEQ ID NO: 3042 - DNA, 2421 bp, Artificial Sequence
  Description of Artificial Sequence: Synthetic polynucleotide
atgaaaatcgaagaaggtaaactggtaatctggattaacggcgataaaggctataacggtctcgctgaagtcggtaagaaattcgagaaagataccggaattaaagtcaccgttgagcatccggataaactggaagagaaattcccacaggttgcggcaactggcgatggccctgacattatcttctgggcacacgaccgctttggtggctacgctcaatctggcctgttggctgaaatcaccccggacaaagcgttccaggacaagctgtatccgtttacctgggatgccgtacgttacaacggcaagctgattgcttacccgatcgctgttgaagcgttatcgctgatttataacaaagatctgctgccgaacccgccaaaaacctgggaagagatcccggcgctggataaagaactgaaagcgaaaggtaagagcgcgctgatgttcaacctgcaagaaccgtacttcacctggccgctgattgctgctgacgggggttatgcgttcaagtatgaaaacggcaagtacgacattaaagacgtgggcgtggataacgctggcgcgaaagcgggtctgaccttcctggttgacctgattaaaaacaaacacatgaatgcagacaccgattactccatcgcagaagctgcctttaataaaggcgaaacagcgatgaccatcaacggcccgtgggcatggtccaacatcgacaccagcaaagtgaattatggtgtaacggtactgccgaccttcaagggtcaaccatccaaaccgttcgttggcgtgctgagcgcaggtattaacgccgccagtccgaacaaagagctggcgaaagagttcctcgaaaactatctgctgactgatgaaggtctggaagcggttaataaagacaaaccgctgggtgccgtagcgctgaagtcttacgaggaagagttggcgaaagatccacgtattgccgccaccatggaaaacgcccagaaaggtgaaatcatgccgaacatcccgcagatgtccgctttctggtatgccgtgcgtactgcggtgatcaacgccgccagcggtcgtcagactgtcgatgaagccctgaaagacgcgcagactggtggttctggtgagaacctgtactttcaaagctcagataatgggcctcaaaaccagcgcaacgctccacgtataaccttcggtggcccgtctgactccacaggcagcaaccagaatggtgagcgtagtggagccaggtctaagcagcgccgtccccagggtctgccgaacaacacggcgagctggtttactgcgcttacccaacacggtaaagaagacttaaaattcccgcgtggccagggcgtcccgatcaacactaactcttccccggatgatcagattggttattaccgcagagcaactcgtcggattcgcggcggcgacggtaaaatgaaagatttgtctccgcgttggtacttttactatctcggcaccggtccggaagctggactgccctacggggcaaacaaggacgggatcatttgggtggctaccgaaggtgccctgaatactccaaaagatcatatcggcacccgtaaccctgctaataacgctgcgatcgttctgcaactgcctcagggtacaactctgccaaaaggcttctatgcagaagggtcgcgtggtggcagccaggcgagtagccgtagcagctcccgctctcgcaactcgtcccgtaactccactccgggctcttctcgcggcacgtccccggctcgtatggcaggtaacggtggtgacgctgctctggcgctgctactgctggacaggctgaaccagctggagtcgaagatgagtggtaaaggccaacagcagcagggccagaccgttaccaaaaagagcgcagctgaagcatctaaaaaaccgcgacagaaacgtaccgcgactaaaggatacaatgtaacacaggccttcggtcgtcgaggtccggagcaaactcaaggaaactttggcgatcaggatttaaataaattggggaccgactacaaacactggccgcaaattgcccagttcgccccatccgctagtgcattcttcggtatgagccgcatcggcaccgaagaaacgccaagtggtacgtggctgacctacaccggtgctatcaagcttgataagaaggacccgaactttaaagaccaggttattctgcttaacaaacatattgatgcctataaaactttcccgccgaccgaacccaaaaaggacaaaaagaaaaaagctgatgaaacccaggctctaccgcagcgtcagaaaaaacagcaaactgtgactctgctgccagctgcggacctggatgatttttccaagcagctgcaacagtctatgagctctgcggactctacgcaggctggtggttctggtcaccatcatcaccatcattaa

SEQ ID NO: 3043 - DNA, 2421 bp, Artificial Sequence
  Description of Artificial Sequence: Synthetic polynucleotide
atgaaaatcgaagaaggtaaactggtaatctggattaacggcgataaaggctataacggtctcgctgaagtcggtaagaaattcgagaaagataccggaattaaagtcaccgttgagcatccggataaactggaagagaaattcccacaggttgcggcaactggcgatggccctgacattatcttctgggcacacgaccgctttggtggctacgctcaatctggcctgttggctgaaatcaccccggacaaagcgttccaggacaagctgtatccgtttacctgggatgccgtacgttacaacggcaagctgattgcttacccgatcgctgttgaagcgttatcgctgatttataacaaagatctgctgccgaacccgccaaaaacctgggaagagatcccggcgctggataaagaactgaaagcgaaaggtaagagcgcgctgatgttcaacctgcaagaaccgtacttcacctggccgctgattgctgctgacgggggttatgcgttcaagtatgaaaacggcaagtacgacattaaagacgtgggcgtggataacgctggcgcgaaagcgggtctgaccttcctggttgacctgattaaaaacaaacacatgaatgcagacaccgattactccatcgcagaagctgcctttaataaaggcgaaacagcgatgaccatcaacggcccgtgggcatggtccaacatcgacaccagcaaagtgaattatggtgtaacggtactgccgaccttcaagggtcaaccatccaaaccgttcgttggcgtgctgagcgcaggtattaacgccgccagtccgaacaaagagctggcgaaagagttcctcgaaaactatctgctgactgatgaaggtctggaagcggttaataaagacaaaccgctgggtgccgtagcgctgaagtcttacgaggaagagttggcgaaagatccacgtattgccgccaccatggaaaacgcccagaaaggtgaaatcatgccgaacatcccgcagatgtccgctttctggtatgccgtgcgtactgcggtgatcaacgccgccagcggtcgtcagactgtcgatgaagccctgaaagacgcgcagactggtggttctggtgagaacctgtactttcaaagctcagataatgggcctcaaaaccagcgcaacgctccacgtataaccttcggtggcccgtctgactccacaggcagcaaccagaatggtgagcgtagtggagccaggtctaagcagcgccgtccccagggtctgccgaacaacacggcgagctggtttactgcgcttacccaacacggtaaagaagacttaaaattcccgcgtggccagggcacgccgatcaacactaactcttccccggatgatcagattggttattaccgcagagcaactcgtcggattcgcggcggcgacggtaaaatgaaagatttgtctccgcgttggtacttttactatctcggcaccggtccggaagctggactgccctacggggcaaacaaggacgggatcatttgggtggctaccgaaggtgccctgaatactccaaaagatcatatcggcacccgtaaccctgctaataacgctgcgatcgttctgcaactgcctcagggtacaactctgccaaaaggcttctatgcagaagggtcgcgtggtggcagccaggcgagtagccgtagcagctcccgctctcgcaactcgtcccgtaactccactccgggctcttctcgcggcacgtccccggctcgtatggcaggtaacggtggtgacgctgctctggcgctgctactgctggacaggctgaaccagctggagtcgaagatgagtggtaaaggccaacagcagcagggccagaccgttaccaaaaagagcgcagctgaagcatctaaaaaaccgcgacagaaacgtaccgcgactaaagcgtacaatgtaacacaggccttcggtcgtcgaggtccggagcaaactcaaggaaactttggcgatcaggaattaatccgccaggggaccgactacaaacactggccgcaaattgcccagttcgccccatccgctagtgcattcttcggtatgagccgcatcggcatggaagtaacgccaagtggtacgtggctgacctacaccggtgctatcaagcttgatgacaaggacccgaactttaaagaccaggttattctgcttaacaaacatattgatgcctataaaactttcccgccgaccgaacccaaaaaggacaaaaagaaaaaagctgatgaaacccaggctctaccgcagcgtcagaaaaaacagcaaactgtgactctgctgccagctgcggacctggatgatttttccaagcagctgcaacagtctatgagctctgcggactctacgcaggctggtggttctggtcaccatcatcaccatcattaa

SEQ ID NO: 3044 - DNA, 2421 bp, Artificial Sequence
  Description of Artificial Sequence: Synthetic polynucleotide
atgaaaatcgaagaaggtaaactggtaatctggattaacggcgataaaggctataacggtctcgctgaagtcggtaagaaattcgagaaagataccggaattaaagtcaccgttgagcatccggataaactggaagagaaattcccacaggttgcggcaactggcgatggccctgacattatcttctgggcacacgaccgctttggtggctacgctcaatctggcctgttggctgaaatcaccccggacaaagcgttccaggacaagctgtatccgtttacctgggatgccgtacgttacaacggcaagctgattgcttacccgatcgctgttgaagcgttatcgctgatttataacaaagatctgctgccgaacccgccaaaaacctgggaagagatcccggcgctggataaagaactgaaagcgaaaggtaagagcgcgctgatgttcaacctgcaagaaccgtacttcacctggccgctgattgctgctgacgggggttatgcgttcaagtatgaaaacggcaagtacgacattaaagacgtgggcgtggataacgctggcgcgaaagcgggtctgaccttcctggttgacctgattaaaaacaaacacatgaatgcagacaccgattactccatcgcagaagctgcctttaataaaggcgaaacagcgatgaccatcaacggcccgtgggcatggtccaacatcgacaccagcaaagtgaattatggtgtaacggtactgccgaccttcaagggtcaaccatccaaaccgttcgttggcgtgctgagcgcaggtattaacgccgccagtccgaacaaagagctggcgaaagagttcctcgaaaactatctgctgactgatgaaggtctggaagcggttaataaagacaaaccgctgggtgccgtagcgctgaagtcttacgaggaagagttggcgaaagatccacgtattgccgccaccatggaaaacgcccagaaaggtgaaatcatgccgaacatcccgcagatgtccgctttctggtatgccgtgcgtactgcggtgatcaacgccgccagcggtcgtcagactgtcgatgaagccctgaaagacgcgcagactggtggttctggtgagaacctgtactttcaaagctcagataatgggcctcaaaaccagcgcaacgctccacgtataaccttcggtggcccgtctgactccacaggcagcaaccagaatggtgagcgtagtggagccaggtctaagcagcgccgtccccagggtctgccgaacaacacggcgagctggtttactgcgcttacccaacacggtaaagaagacttaaaattcccgcgtggccagggcgtcccgatcaacactaactcttccccggatgatcagattggttattaccgcagagcaactcgtcggattcgcggcggcgacggtaaaatgaaagatttgtctccgcgttggtacttttactatctcggcaccggtccggaagctggactgccctacggggcaaacaaggacgggatcatttgggtggctaccgaaggtgccctgaatactccaaaagatcatatcggcacccgtaaccctgctaataacgctgcgatcgttctgcaactgcctcagggtacaactctgccaaaaggcttctatgcagaagggtcgcgtggtggcagccaggcgagtagccgtagcagctcccgctctcgcaactcgtcccgtaactccactccgggcgaggaacgcggcacggagccggctcgtatggcaggtaacggtggtgacgctgctctggcgctgctactgctggacaggctgaaccagctggagtcgaagatgagtggtaaaggccaacagcagcagggccagaccgttaccaaaaagagcgcagctgaagcatctaaaaaaccgcgacagaaacgtaccgcgactaaagcgtacaatgtaacacaggccttcggtcgtcgaggtccggagcaaactcaaggaaactttggcgatcaggaattaatccgccaggggaccgactacaaacactggccgcaaattgcccagttcgccccatccgctagtgcattcttcggtatgagccgcatcggcatggaagtaacgccaagtggtacgtggctgacctacaccggtgctatcaagcttgatgacaaggacccgaactttaaagaccaggttattctgcttaacaaacatattgatgcctataaaactttcccgccgaccgaacccaaaaaggacaaaaagaaaaaagctgatgaaacccaggctctaccgcagcgtcagaaaaaacagcaaactgtgactctgctgccagctgcggacctggatgatttttccaagcagctgcaacagtctatgagctctgcggactctacgcaggctggtggttctggtcaccatcatcaccatcattaa

SEQ ID NO: 3045 - DNA, 2421 bp, Artificial Sequence
  Description of Artificial Sequence: Synthetic polynucleotide
atgaaaatcgaagaaggtaaactggtaatctggattaacggcgataaaggctataacggtctcgctgaagtcggtaagaaattcgagaaagataccggaattaaagtcaccgttgagcatccggataaactggaagagaaattcccacaggttgcggcaactggcgatggccctgacattatcttctgggcacacgaccgctttggtggctacgctcaatctggcctgttggctgaaatcaccccggacaaagcgttccaggacaagctgtatccgtttacctgggatgccgtacgttacaacggcaagctgattgcttacccgatcgctgttgaagcgttatcgctgatttataacaaagatctgctgccgaacccgccaaaaacctgggaagagatcccggcgctggataaagaactgaaagcgaaaggtaagagcgcgctgatgttcaacctgcaagaaccgtacttcacctggccgctgattgctgctgacgggggttatgcgttcaagtatgaaaacggcaagtacgacattaaagacgtgggcgtggataacgctggcgcgaaagcgggtctgaccttcctggttgacctgattaaaaacaaacacatgaatgcagacaccgattactccatcgcagaagctgcctttaataaaggcgaaacagcgatgaccatcaacggcccgtgggcatggtccaacatcgacaccagcaaagtgaattatggtgtaacggtactgccgaccttcaagggtcaaccatccaaaccgttcgttggcgtgctgagcgcaggtattaacgccgccagtccgaacaaagagctggcgaaagagttcctcgaaaactatctgctgactgatgaaggtctggaagcggttaataaagacaaaccgctgggtgccgtagcgctgaagtcttacgaggaagagttggcgaaagatccacgtattgccgccaccatggaaaacgcccagaaaggtgaaatcatgccgaacatcccgcagatgtccgctttctggtatgccgtgcgtactgcggtgatcaacgccgccagcggtcgtcagactgtcgatgaagccctgaaagacgcgcagactggtggttctggtgagaacctgtactttcaaagctcagataatgggcctcaaaaccagcgcaacgctccacgtataaccttcggtggcccgtctgactccacaggcagcaaccagaatggtgagcgtagtggagccaggtctaagcagcgccgtccccagggtctgccgaacaacacggcgagctggtttactccgcttacccaacacggtaaagaagacttaaaattcccgcctggccagggcgtcccgatcaacactaactcttccccggatgatcagattggttattaccgcagagcaactcgtcggattcgcggcggcgacggtaaaatgaaagatttgcccccgcgttggtacttttactatctcggcaccggtccggaagctgatctgccctacgggcaagttaagccagggatcgtatgggtggctgaagaaggtgccctgaatactccaaaagatcatatcggcacccgtaaccctgctaataacgctgcgatccctctgcaactgcctccgggtacaactctgccaaaaggcttctatgcagaagggtcgcgtggtggcagccaggcgagtagccgtagcagctcccgctctcgcaactcgtcccgtaactccactccgggctcttctcgcggcacgtccccggctcgtatggcaggtaacggtggtgacgctgctctggcgctgctactgctggacaggctgaaccagctggagtcgaagatgagtggtaaaggccaacagcagcagggccagaccgttaccaaaaagagcgcagctgaagcatctaaaaaaccgcgacagaaacgtaccgcgactaaagcgtacaatgtaacacaggccttcggtcgtcgaggtccggagcaaactcaaggaaactttggcgatcaggaattaatccgccaggggaccgactacaaacactggccgcaaattgcccagttcgccccatccgctagtgcattcttcggtatgagccgcatcggcatggaagtaacgccaagtggtacgtggctgacctacaccggtgctatcaagcttgatgacaaggacccgaactttaaagaccaggttattctgcttaacaaacatattgatgcctataaaactttcccgccgaccgaacccaaaaaggacaaaaagaaaaaagctgatgaaacccaggctctaccgcagcgtcagaaaaaacagcaaactgtgactctgctgccagctgcggacctggatgatttttccaagcagctgcaacagtctatgagctctgcggactctacgcaggctggtggttctggtcaccatcatcaccatcattaa

SEQ ID NO: 3046 - DNA, 2421 bp, Artificial Sequence
  Description of Artificial Sequence: Synthetic polynucleotide
atgaaaatcgaagaaggtaaactggtaatctggattaacggcgataaaggctataacggtctcgctgaagtcggtaagaaattcgagaaagataccggaattaaagtcaccgttgagcatccggataaactggaagagaaattcccacaggttgcggcaactggcgatggccctgacattatcttctgggcacacgaccgctttggtggctacgctcaatctggcctgttggctgaaatcaccccggacaaagcgttccaggacaagctgtatccgtttacctgggatgccgtacgttacaacggcaagctgattgcttacccgatcgctgttgaagcgttatcgctgatttataacaaagatctgctgccgaacccgccaaaaacctgggaagagatcccggcgctggataaagaactgaaagcgaaaggtaagagcgcgctgatgttcaacctgcaagaaccgtacttcacctggccgctgattgctgctgacgggggttatgcgttcaagtatgaaaacggcaagtacgacattaaagacgtgggcgtggataacgctggcgcgaaagcgggtctgaccttcctggttgacctgattaaaaacaaacacatgaatgcagacaccgattactccatcgcagaagctgcctttaataaaggcgaaacagcgatgaccatcaacggcccgtgggcatggtccaacatcgacaccagcaaagtgaattatggtgtaacggtactgccgaccttcaagggtcaaccatccaaaccgttcgttggcgtgctgagcgcaggtattaacgccgccagtccgaacaaagagctggcgaaagagttcctcgaaaactatctgctgactgatgaaggtctggaagcggttaataaagacaaaccgctgggtgccgtagcgctgaagtcttacgaggaagagttggcgaaagatccacgtattgccgccaccatggaaaacgcccagaaaggtgaaatcatgccgaacatcccgcagatgtccgctttctggtatgccgtgcgtactgcggtgatcaacgccgccagcggtcgtcagactgtcgatgaagccctgaaagacgcgcagactggtggttctggtgagaacctgtactttcaaagctcagataatgggcctcaaaaccagcgcaacgctccacgtataaccttcggtggcccgtctgactccacaggcagcaaccagaatggtgagcgtagtggagccaggtctaagcagcgccgtccccagggtctgccgaacaacacggcgagctggtttactgcgcttacccaacacggtaaagaagacttaaaattcccgcgtggccagggcgtcccgatcaacactaactcttccccggatgatcagattggttattaccgcagagcaactcgtcggattcgcggcggcgacggtaaaatgaaagatttgtctccgcgttggtacttttactatctcggcaccggtccggaagctggactgccctacggggcagaaaaggacgggatcatttgggtggctaccgaaggtgccctgaatactccaaaagatcatatcggcacccgtaaccctgctaataacgctgcgatcgttctgcaactgcctcagggtacaactctgccaaaaggcttctatgcagaagggtcgcgtggtggcagccaggcgagtagccgtagcagctcccgctctcgcaactcgtcccgtaactccactccgggctcttctcgcggcacgtccccggctcgtatggcaggtaacggtggtgacgctgctctggcgctgctactgctggacaggctgaaccagctggagtcgaagatgagtggtaaaggccaacagcagcagggccagaccgttaccaaaaagagcgcagctgaagcatctaaaaaaccgcgacagaaacgtaccgcgactaaagcgtacaatgtaacacaggccttcggtcgtcgaggtccggagcaaactcaaggaaactttggcgatcaggaattaatccgccaggggaccgactacaaacactggccgcaaattgcccagttcgccccatccgctagtgcattcttcggtatgagccgcatcggcatggaagtaacgccaagtggtacgtggctgacctacaccggtgctatcaagcttgatgacaaggacccgaactttaaagaccaggttattctgcttaacaaacatattgatgcctataaaactttcccgccgaccgaacccaaaaaggacaaaaagaaaaaagctgatgaaacccaggctctaccgcagcgtcagaaaaaacagcaaactgtgactctgctgccagctgcggacctggatgatttttccaagcagctgcaacagtctatgagctctgcggactctacgcaggctggtggttctggtcaccatcatcaccatcattaa

SEQ ID NO: 3047 - DNA, 2421 bp, Artificial Sequence
  Description of Artificial Sequence: Synthetic polynucleotide
atgaaaatcgaagaaggtaaactggtaatctggattaacggcgataaaggctataacggtctcgctgaagtcggtaagaaattcgagaaagataccggaattaaagtcaccgttgagcatccggataaactggaagagaaattcccacaggttgcggcaactggcgatggccctgacattatcttctgggcacacgaccgctttggtggctacgctcaatctggcctgttggctgaaatcaccccggacaaagcgttccaggacaagctgtatccgtttacctgggatgccgtacgttacaacggcaagctgattgcttacccgatcgctgttgaagcgttatcgctgatttataacaaagatctgctgccgaacccgccaaaaacctgggaagagatcccggcgctggataaagaactgaaagcgaaaggtaagagcgcgctgatgttcaacctgcaagaaccgtacttcacctggccgctgattgctgctgacgggggttatgcgttcaagtatgaaaacggcaagtacgacattaaagacgtgggcgtggataacgctggcgcgaaagcgggtctgaccttcctggttgacctgattaaaaacaaacacatgaatgcagacaccgattactccatcgcagaagctgcctttaataaaggcgaaacagcgatgaccatcaacggcccgtgggcatggtccaacatcgacaccagcaaagtgaattatggtgtaacggtactgccgaccttcaagggtcaaccatccaaaccgttcgttggcgtgctgagcgcaggtattaacgccgccagtccgaacaaagagctggcgaaagagttcctcgaaaactatctgctgactgatgaaggtctggaagcggttaataaagacaaaccgctgggtgccgtagcgctgaagtcttacgaggaagagttggcgaaagatccacgtattgccgccaccatggaaaacgcccagaaaggtgaaatcatgccgaacatcccgcagatgtccgctttctggtatgccgtgcgtactgcggtgatcaacgccgccagcggtcgtcagactgtcgatgaagccctgaaagacgcgcagactggtggttctggtgagaacctgtactttcaaagctcagataatgggcctcaaaaccagcgcaacgctccacgtataaccttcggtggcccgtctgactccacaggcagcaaccagaatggtgagcgtagtggagccaggtctaagcagcgccgtccccagggtctgccgaacaacacggcgagctggtttactgcgcttacccaacacggtaaagaagacttaaaattcccgcgtggccagggcgtcccgatcaacactaactcttccccggatgatcagattggttattaccgcagagcaactcgtcggattcgcggcggcgacggtaaaatgaaagatttgtctccgcgttggtacttttactatctcggcaccggtccggaagctgaactgccctacggggcaaacaaggacgggatcatttgggtggctaccgaaggtgccctgaatactccaaaagatcatatcggcacccgtaaccctgctaataacgctgcgatcgttctgcaactgcctcagggtacaactctgccaaaaggcttctatgcagaagggtcgcgtggtggcagccaggcgagtagccgtagcagctcccgctctcgcaactcgtcccgtaactccactccgggctcttctcgcggcacgtccccggctcgtatggcaggtaacggtggtgacgctgctctggcgctgctactgctggacaggctgaaccagctggagtcgaagatgagtggtaaaggccaacagcagcagggccagaccgttaccaaaaagagcgcagctgaagcatctaaaaaaccgcgacagaaacgtaccgcgactaaagcgtacaatgtaacacaggccttcggtcgtcgaggtccggagcaaactcaaggaaactttggcgatcaggaattaatccgccaggggaccgactacaaacactggccgcaaattgcccagttcgccccatccgctagtgcattcttcggtatgagccgcatcggcatggaagtaacgccaagtggtacgtggctgacctacaccggtgctatcaagcttgatgacaaggacccgaactttaaagaccaggttattctgcttaacaaacatattgatgcctataaaactttcccgccgaccgaacccaaaaaggacaaaaagaaaaaagctgatgaaacccaggctctaccgcagcgtcagaaaaaacagcaaactgtgactctgctgccagctgcggacctggatgatttttccaagcagctgcaacagtctatgagctctgcggactctacgcaggctggtggttctggtcaccatcatcaccatcattaa

SEQ ID NO: 3048 - DNA, 2421 bp, Artificial Sequence
  Description of Artificial Sequence: Synthetic polynucleotide
atgaaaatcgaagaaggtaaactggtaatctggattaacggcgataaaggctataacggtctcgctgaagtcggtaagaaattcgagaaagataccggaattaaagtcaccgttgagcatccggataaactggaagagaaattcccacaggttgcggcaactggcgatggccctgacattatcttctgggcacacgaccgctttggtggctacgctcaatctggcctgttggctgaaatcaccccggacaaagcgttccaggacaagctgtatccgtttacctgggatgccgtacgttacaacggcaagctgattgcttacccgatcgctgttgaagcgttatcgctgatttataacaaagatctgctgccgaacccgccaaaaacctgggaagagatcccggcgctggataaagaactgaaagcgaaaggtaagagcgcgctgatgttcaacctgcaagaaccgtacttcacctggccgctgattgctgctgacgggggttatgcgttcaagtatgaaaacggcaagtacgacattaaagacgtgggcgtggataacgctggcgcgaaagcgggtctgaccttcctggttgacctgattaaaaacaaacacatgaatgcagacaccgattactccatcgcagaagctgcctttaataaaggcgaaacagcgatgaccatcaacggcccgtgggcatggtccaacatcgacaccagcaaagtgaattatggtgtaacggtactgccgaccttcaagggtcaaccatccaaaccgttcgttggcgtgctgagcgcaggtattaacgccgccagtccgaacaaagagctggcgaaagagttcctcgaaaactatctgctgactgatgaaggtctggaagcggttaataaagacaaaccgctgggtgccgtagcgctgaagtcttacgaggaagagttggcgaaagatccacgtattgccgccaccatggaaaacgcccagaaaggtgaaatcatgccgaacatcccgcagatgtccgctttctggtatgccgtgcgtactgcggtgatcaacgccgccagcggtcgtcagactgtcgatgaagccctgaaagacgcgcagactggtggttctggtgagaacctgtactttcaaagctcagataatgggcctcaaaaccagcgcaacgctccacgtataaccttcggtggcccgtctgactccacaggcagcaaccagaatggtgagcgtagtggagccaggtctaagcagcgccgtccccagggtctgccgaacaacacggcgagctggtttactgcgcttacccaacacggtaaagaagacttaaaattcccgcgtggccagggcgtcccgatcaacactaactcttccccggatgatcagattggttattaccgcagagcaactcgtcggattcgcggcggcgacggtaaaatgaaagatttgtctccgcgttggtacttttactatctcggcaccggtccggaagctggactgccctacggggcaaacaaggacgggatcatttgggtggctaccgaaggtgccctgaatactccaaaagatcatatcggcacccgtaaccctgctaataacgctgcgatcgttctgcaactgcctcagggtacagtactgccaaaaggcttctatgcagaagggtcgcgtggtggcagccaggcgagtagccgtagcagctcccgctctcgcaactcgtcccgtaactccactccgggctcttctcgcggcacgtccccggctcgtatggcaggtaacggtggtgacgctgctctggcgctgctactgctggacaggctgaaccagctggagtcgaagatgagtggtaaaggccaacagcagcagggccagaccgttaccaaaaagagcgcagctgaagcatctaaaaaaccgcgacagaaacgtaccgcgactaaagcgtacaatgtaacacaggccttcggtcgtcgaggtccggagcaaactcaaggaaactttggcgatcaggaattaatccgccaggggaccgactacaaacactggccgcaaattgcccagttcgccccatccgctagtgcattcttcggtatgagccgcatcggcatggaagtaacgccaagtggtacgtggctgacctacaccggtgctatcaagcttgatgacaaggacccgaactttaaagaccaggttattctgcttaacaaacatattgatgcctataaaactttcccgccgaccgaacccaaaaaggacaaaaagaaaaaagctgatgaaacccaggctctaccgcagcgtcagaaaaaacagcaaactgtgactctgctgccagctgcggacctggatgatttttccaagcagctgcaacagtctatgagctctgcggactctacgcaggctggtggttctggtcaccatcatcaccatcattaa

SEQ ID NO: 3049 - DNA, 2421 bp, Artificial Sequence
  Description of Artificial Sequence: Synthetic polynucleotide
atgaaaatcgaagaaggtaaactggtaatctggattaacggcgataaaggctataacggtctcgctgaagtcggtaagaaattcgagaaagataccggaattaaagtcaccgttgagcatccggataaactggaagagaaattcccacaggttgcggcaactggcgatggccctgacattatcttctgggcacacgaccgctttggtggctacgctcaatctggcctgttggctgaaatcaccccggacaaagcgttccaggacaagctgtatccgtttacctgggatgccgtacgttacaacggcaagctgattgcttacccgatcgctgttgaagcgttatcgctgatttataacaaagatctgctgccgaacccgccaaaaacctgggaagagatcccggcgctggataaagaactgaaagcgaaaggtaagagcgcgctgatgttcaacctgcaagaaccgtacttcacctggccgctgattgctgctgacgggggttatgcgttcaagtatgaaaacggcaagtacgacattaaagacgtgggcgtggataacgctggcgcgaaagcgggtctgaccttcctggttgacctgattaaaaacaaacacatgaatgcagacaccgattactccatcgcagaagctgcctttaataaaggcgaaacagcgatgaccatcaacggcccgtgggcatggtccaacatcgacaccagcaaagtgaattatggtgtaacggtactgccgaccttcaagggtcaaccatccaaaccgttcgttggcgtgctgagcgcaggtattaacgccgccagtccgaacaaagagctggcgaaagagttcctcgaaaactatctgctgactgatgaaggtctggaagcggttaataaagacaaaccgctgggtgccgtagcgctgaagtcttacgaggaagagttggcgaaagatccacgtattgccgccaccatggaaaacgcccagaaaggtgaaatcatgccgaacatcccgcagatgtccgctttctggtatgccgtgcgtactgcggtgatcaacgccgccagcggtcgtcagactgtcgatgaagccctgaaagacgcgcagactggtggttctggtgagaacctgtactttcaaagctcagataatgggcctcaaaaccagcgcaacgctccacgtataaccttcggtggcccgtctgactccacaggcagcaaccagaatggtgagcgtagtggagccaggtctaagcagcgccgtccccagggtctgccgaacaacacggcgagctggtttactgcgcttacccaacacggtaaagaagacttaaaattcccgcgtggccagggcgtcccgatcaacactaactcttccccggatgatcagattggttattaccgcagagcaactcgtcggattcgcggcggcgacggtaaaatgaaagatttgtctccgaattggtacttttactatctcggcaccggtccggaagctggactgccctacggggcaaacaaggacgggatcatttgggtggctaccgaaggtgccctgaatactccaaaagatcatatcggcacccgtaaccctgctaataacgctgcgatcgttctgcaactgcctcagggtacaactctgccaaaaggcttctatgcagaagggtcgcgtggtggcagccaggcgagtagccgtagcagctcccgctctcgcaactcgtcccgtaactccactccgggctcttctcgcggcacgtccccggctcgtatggcaggtaacggtggtgacgctgctctggcgctgctactgctggacaggctgaaccagctggagtcgaagatgagtggtaaaggccaacagcagcagggccagaccgttaccaaaaagagcgcagctgaagcatctaaaaaaccgcgacagaaacgtaccgcgactaaagcgtacaatgtaacacaggccttcggtcgtcgaggtccggagcaaactcaaggaaactttggcgatcaggaattaatccgccaggggaccgactacaaacactggccgcaaattgcccagttcgccccatccgctagtgcattcttcggtatgagccgcatcggcatggaagtaacgccaagtggtacgtggctgacctacaccggtgctatcaagcttgatgacaaggacccgaactttaaagaccaggttattctgcttaacaaacatattgatgcctataaaactttcccgccgaccgaacccaaaaaggacaaaaagaaaaaagctgatgaaacccaggctctaccgcagcgtcagaaaaaacagcaaactgtgactctgctgccagctgcggacctggatgatttttccaagcagctgcaacagtctatgagctctgcggactctacgcaggctggtggttctggtcaccatcatcaccatcattaa

SEQ ID NO: 3050 - DNA, 2421 bp, Artificial Sequence
  Description of Artificial Sequence: Synthetic polynucleotide
atgaaaatcgaagaaggtaaactggtaatctggattaacggcgataaaggctataacggtctcgctgaagtcggtaagaaattcgagaaagataccggaattaaagtcaccgttgagcatccggataaactggaagagaaattcccacaggttgcggcaactggcgatggccctgacattatcttctgggcacacgaccgctttggtggctacgctcaatctggcctgttggctgaaatcaccccggacaaagcgttccaggacaagctgtatccgtttacctgggatgccgtacgttacaacggcaagctgattgcttacccgatcgctgttgaagcgttatcgctgatttataacaaagatctgctgccgaacccgccaaaaacctgggaagagatcccggcgctggataaagaactgaaagcgaaaggtaagagcgcgctgatgttcaacctgcaagaaccgtacttcacctggccgctgattgctgctgacgggggttatgcgttcaagtatgaaaacggcaagtacgacattaaagacgtgggcgtggataacgctggcgcgaaagcgggtctgaccttcctggttgacctgattaaaaacaaacacatgaatgcagacaccgattactccatcgcagaagctgcctttaataaaggcgaaacagcgatgaccatcaacggcccgtgggcatggtccaacatcgacaccagcaaagtgaattatggtgtaacggtactgccgaccttcaagggtcaaccatccaaaccgttcgttggcgtgctgagcgcaggtattaacgccgccagtccgaacaaagagctggcgaaagagttcctcgaaaactatctgctgactgatgaaggtctggaagcggttaataaagacaaaccgctgggtgccgtagcgctgaagtcttacgaggaagagttggcgaaagatccacgtattgccgccaccatggaaaacgcccagaaaggtgaaatcatgccgaacatcccgcagatgtccgctttctggtatgccgtgcgtactgcggtgatcaacgccgccagcggtcgtcagactgtcgatgaagccctgaaagacgcgcagactggtggttctggtgagaacctgtactttcaaagctcagataatgggcctcaaaaccagcgcaacgctccacgtataaccttcggtggcccgtctgactccacaggcagcaaccagaatggtgagcgtagtggagccaggtctaagcagcgccgtccccagggtctgccgaacaacacggcgagctggtttactgcgcttacccaacacggtaaagaagacttaaaattcccgcgtggccagggcgtcccgatcaacactaactcttccccggatgatcagattggttattaccgcagagcaactcgtcggattcgcggcggcgacggtaaaatgaaagatttgtctccgcgttggtacttttactatctcggcaccggtccggaagctggactgccctacggggcaaacaaggacgggatcatttgggtggctaccgaaggtgccctgaatactccaaaagatcatatcggcacccgtaaccctgctaataacgctgcgatcgttctgcaactgcctcagggtacaactctgccaaaaggcttctatgcagaagggtcgcgtggtggcagccaggcgagtagccgtagcagctcccgctctcgcaactcgtcccgtaactccactccgggctcttctcgcggcacgtccccggctcgtatggcaggtaacggtggtgacgctgctctggcgctgctactgctggacaggctgaaccagctggagtcgaagatgagtggtaaaggccaacagcagcagggccagaccgttaccaaaaagagcgcagctgaagcatctaaaaaaccgcgacagaaacgtaccgcgactaaagcgtacaatgtaacacaggccttcggtcgtcgaggtccggaggatactcaaggaaactttggcgatcaggaattaatccgccaggggaccgactacaaacactggccgcaaattgcccagttcgccccatccgctagtgcattcttcggtatgagccgcatcggcatggaagtaacgccaagtggtacgtggctgacctacaccggtgctatcaagcttgatgacaaggacccgaactttaaagaccaggttattctgcttaacaaacatattgatgcctataaaactttcccgccgaccgaacccaaaaaggacaaaaagaaaaaagctgatgaaacccaggctctaccgcagcgtcagaaaaaacagcaaactgtgactctgctgccagctgcggacctggatgatttttccaagcagctgcaacagtctatgagctctgcggactctacgcaggctggtggttctggtcaccatcatcaccatcattaa

SEQ ID NO: 3051 - DNA, 2421 bp, Artificial Sequence
  Description of Artificial Sequence: Synthetic polynucleotide
atgaaaatcgaagaaggtaaactggtaatctggattaacggcgataaaggctataacggtctcgctgaagtcggtaagaaattcgagaaagataccggaattaaagtcaccgttgagcatccggataaactggaagagaaattcccacaggttgcggcaactggcgatggccctgacattatcttctgggcacacgaccgctttggtggctacgctcaatctggcctgttggctgaaatcaccccggacaaagcgttccaggacaagctgtatccgtttacctgggatgccgtacgttacaacggcaagctgattgcttacccgatcgctgttgaagcgttatcgctgatttataacaaagatctgctgccgaacccgccaaaaacctgggaagagatcccggcgctggataaagaactgaaagcgaaaggtaagagcgcgctgatgttcaacctgcaagaaccgtacttcacctggccgctgattgctgctgacgggggttatgcgttcaagtatgaaaacggcaagtacgacattaaagacgtgggcgtggataacgctggcgcgaaagcgggtctgaccttcctggttgacctgattaaaaacaaacacatgaatgcagacaccgattactccatcgcagaagctgcctttaataaaggcgaaacagcgatgaccatcaacggcccgtgggcatggtccaacatcgacaccagcaaagtgaattatggtgtaacggtactgccgaccttcaagggtcaaccatccaaaccgttcgttggcgtgctgagcgcaggtattaacgccgccagtccgaacaaagagctggcgaaagagttcctcgaaaactatctgctgactgatgaaggtctggaagcggttaataaagacaaaccgctgggtgccgtagcgctgaagtcttacgaggaagagttggcgaaagatccacgtattgccgccaccatggaaaacgcccagaaaggtgaaatcatgccgaacatcccgcagatgtccgctttctggtatgccgtgcgtactgcggtgatcaacgccgccagcggtcgtcagactgtcgatgaagccctgaaagacgcgcagactggtggttctggtgagaacctgtactttcaaagctcagataatgggcctcaaaaccagcgcaacgctccacgtataaccttcggtggcccgtctgactccacaggcagcaaccagaatggtgagcgtagtggagccaggtctaagcagcgccgtccccagggtctgccgaacaacacggcgagctggtttactgcgcttacccaacacggtaaagaagacttaaaattcccgcgtggccagggcgtcccgatcaacactaactcttccccggatgatcagattggttattaccgcagagcaactcgtcggattcgcggcggcgacggtaaaatgaaagatttgtctccgcgttggtacttttactatctcggcaccggtccggaagctggactgccctacggggcaaacaaggacgggatcatttgggtggctaccgaaggtgccctgaatactccaaaagatcatatcggcacccgtaaccctgctaataacgctgcgatcgttctgcaactgcctcagggtacaactctgccaaaaggcttctatgcagaagggtcgcgtggtggcagccaggcgagtagccgtagcagctcccgctctcgcaactcgtcccgtaactccactccgggctcttctcgcggcacgtccccggctcgtatggcaggtaacggtggtgacgctgctctggcgctgctactgctggacaggctgaaccagctggagtcgaagatgagtggtaaaggccaacagcagcagggccagaccgttaccaaaaagagcgcagctgaaatgtctaaaaaaccgcgacagaaacgtaccgcgactaaagggtttaatgtaacacagtgcttcggtccccgaggtccggagcaaactcaaggaaactttggcgatgcggatttaatcaaaaaagggaccgactacaaacactggccgcaaattgcccagttcgccccatccgctagtgcattcttcggtatgagccgcatcagttcaaaggaaacgccaagtggtacgtggctgacctacaccggtgctatcaagcttgataaagatgacccgaactttaaagaccaggttattctgcttaacaaacatattgatgcctataaaactttcccgccgaccgaacccaaaaaggacaaaaagaaaaaagctgatgaaacccaggctctaccgcagcgtcagaaaaaacagcaaactgtgactctgctgccagctgcggacctggatgatttttccaagcagctgcaacagtctatgagctctgcggactctacgcaggctggtggttctggtcaccatcatcaccatcattaa

SEQ ID NO: 3052 - DNA, 2421 bp, Artificial Sequence
  Description of Artificial Sequence: Synthetic polynucleotide
atgaaaatcgaagaaggtaaactggtaatctggattaacggcgataaaggctataacggtctcgctgaagtcggtaagaaattcgagaaagataccggaattaaagtcaccgttgagcatccggataaactggaagagaaattcccacaggttgcggcaactggcgatggccctgacattatcttctgggcacacgaccgctttggtggctacgctcaatctggcctgttggctgaaatcaccccggacaaagcgttccaggacaagctgtatccgtttacctgggatgccgtacgttacaacggcaagctgattgcttacccgatcgctgttgaagcgttatcgctgatttataacaaagatctgctgccgaacccgccaaaaacctgggaagagatcccggcgctggataaagaactgaaagcgaaaggtaagagcgcgctgatgttcaacctgcaagaaccgtacttcacctggccgctgattgctgctgacgggggttatgcgttcaagtatgaaaacggcaagtacgacattaaagacgtgggcgtggataacgctggcgcgaaagcgggtctgaccttcctggttgacctgattaaaaacaaacacatgaatgcagacaccgattactccatcgcagaagctgcctttaataaaggcgaaacagcgatgaccatcaacggcccgtgggcatggtccaacatcgacaccagcaaagtgaattatggtgtaacggtactgccgaccttcaagggtcaaccatccaaaccgttcgttggcgtgctgagcgcaggtattaacgccgccagtccgaacaaagagctggcgaaagagttcctcgaaaactatctgctgactgatgaaggtctggaagcggttaataaagacaaaccgctgggtgccgtagcgctgaagtcttacgaggaagagttggcgaaagatccacgtattgccgccaccatggaaaacgcccagaaaggtgaaatcatgccgaacatcccgcagatgtccgctttctggtatgccgtgcgtactgcggtgatcaacgccgccagcggtcgtcagactgtcgatgaagccctgaaagacgcgcagactggtggttctggtgagaacctgtactttcaaagctcagataatgggcctcaaaaccagcgcaacgctccacgtataaccttcggtggcccgtctgactccacaggcagcaaccagaatggtgagcgtagtggagccaggtctaagcagcgccgtccccagggtctgccgaacaacacggcgagctggtttactgcgcttacccaacacggtaaagaagacttaaaattcccgcgtggccagggcgtcccgatcaacactaactcttccccggatgatcagattggttattaccgcagagcaactcgtcggattcgcggcggcgacggtaaaatgaaagatttgtctccgcgttggtacttttactatctcggcaccggtccggaagctggactgccctacggggcaaacaaggacgggatcatttgggtggctaccgaaggtgccctgaatactccaaaagatcatatcggcacccgtaaccctgctaataacgctgcgatcgttctgcaactgcctcagggtacaactctgccaaaaggcttctataatgaagggtcgcgtggtggcagccaggcgagtagccgtagcagctcccgctctcgcaactcgtcccgtaactccactccgggctcttctcgcggcacgtccccggctcgtatggcaggtaacggtggtgacgctgctctggcgctgctactgctggacaggctgaaccagctggagtcgaagatgagtggtaaaggccaacagcagcagggccagaccgttaccaaaaagagcgcagctgaagcatctaaaaaaccgcgacagaaacgtaccgcgactaaagcgtacaatgtaacacaggccttcggtcgtcgaggtccggagcaaactcaaggaaactttggcgatcaggaattaatccgccaggggaccgactacaaacactggccgcaaattgcccagttcgccccatccgctagtgcattcttcggtatgagccgcatcggcatggaagtaacgccaagtggtacgtggctgacctacaccggtgctatcaagcttgatgacaaggacccgaactttaaagaccaggttattctgcttaacaaacatattgatgcctataaaactttcccgccgaccgaacccaaaaaggacaaaaagaaaaaagctgatgaaacccaggctctaccgcagcgtcagaaaaaacagcaaactgtgactctgctgccagctgcggacctggatgatttttccaagcagctgcaacagtctatgagctctgcggactctacgcaggctggtggttctggtcaccatcatcaccatcattaa

SEQ ID NO: 3053 - DNA, 2421 bp, Artificial Sequence
  Description of Artificial Sequence: Synthetic polynucleotide
atgaaaatcgaagaaggtaaactggtaatctggattaacggcgataaaggctataacggtctcgctgaagtcggtaagaaattcgagaaagataccggaattaaagtcaccgttgagcatccggataaactggaagagaaattcccacaggttgcggcaactggcgatggccctgacattatcttctgggcacacgaccgctttggtggctacgctcaatctggcctgttggctgaaatcaccccggacaaagcgttccaggacaagctgtatccgtttacctgggatgccgtacgttacaacggcaagctgattgcttacccgatcgctgttgaagcgttatcgctgatttataacaaagatctgctgccgaacccgccaaaaacctgggaagagatcccggcgctggataaagaactgaaagcgaaaggtaagagcgcgctgatgttcaacctgcaagaaccgtacttcacctggccgctgattgctgctgacgggggttatgcgttcaagtatgaaaacggcaagtacgacattaaagacgtgggcgtggataacgctggcgcgaaagcgggtctgaccttcctggttgacctgattaaaaacaaacacatgaatgcagacaccgattactccatcgcagaagctgcctttaataaaggcgaaacagcgatgaccatcaacggcccgtgggcatggtccaacatcgacaccagcaaagtgaattatggtgtaacggtactgccgaccttcaagggtcaaccatccaaaccgttcgttggcgtgctgagcgcaggtattaacgccgccagtccgaacaaagagctggcgaaagagttcctcgaaaactatctgctgactgatgaaggtctggaagcggttaataaagacaaaccgctgggtgccgtagcgctgaagtcttacgaggaagagttggcgaaagatccacgtattgccgccaccatggaaaacgcccagaaaggtgaaatcatgccgaacatcccgcagatgtccgctttctggtatgccgtgcgtactgcggtgatcaacgccgccagcggtcgtcagactgtcgatgaagccctgaaagacgcgcagactggtggttctggtgagaacctgtactttcaaagctcagataatgggcctcaaaaccagcgcaacgctccacgtataaccttcggtggcccgtctgactccacaggcagcaaccagaatggtgagcgtagtggagccaggtctaagcagcgccgtccccagggtctgccgaacaacacggcgagctggtttactggccttacccaacacggtaaagaagacttaaaattcccgccaggccagggcgtcccgatcaacactaactcttccccggatgatcagattggttattaccgcagagcaactcgtcggattcgcggcggcgacggtaaaatgaaagatttgcctccgcgttggtacttttactatctcggcaccggtccggaagctgatctgccctacgggcaagttaaggacgggatcttttgggtggctgaagaaggtgccctgaatactccaaaagatcatatcggcacccgtaaccctgctaataacgctgcgatcccgctgcaactgcctccgggtacaactctgccaaaaggcttctatgcagaagggtcgcgtggtggcagccaggcgagtagccgtagcagctcccgctctcgcaactcgtcccgtaactccactccgggctcttctcgcggcacgtccccggctcgtatggcaggtaacggtggtgacgctgctctggcgctgctactgctggacaggctgaaccagctggagtcgaagatgagtggtaaaggccaacagcagcagggccagaccgttaccaaaaagagcgcagctgaagcatctaaaaaaccgcgacagaaacgtaccgcgactaaagcgtacaatgtaacacaggccttcggtcgtcgaggtccggagcaaactcaaggaaactttggcgatcaggaattaatccgccaggggaccgactacaaacactggccgcaaattgcccagttcgccccatccgctagtgcattcttcggtatgagccgcatcggcatggaagtaacgccaagtggtacgtggctgacctacaccggtgctatcaagcttgatgacaaggacccgaactttaaagaccaggttattctgcttaacaaacatattgatgcctataaaactttcccgccgaccgaacccaaaaaggacaaaaagaaaaaagctgatgaaacccaggctctaccgcagcgtcagaaaaaacagcaaactgtgactctgctgccagctgcggacctggatgatttttccaagcagctgcaacagtctatgagctctgcggactctacgcaggctggtggttctggtcaccatcatcaccatcattaa

SEQ ID NO: 3054 - DNA, 2421 bp, Artificial Sequence
  Description of Artificial Sequence: Synthetic polynucleotide
atgaaaatcgaagaaggtaaactggtaatctggattaacggcgataaaggctataacggtctcgctgaagtcggtaagaaattcgagaaagataccggaattaaagtcaccgttgagcatccggataaactggaagagaaattcccacaggttgcggcaactggcgatggccctgacattatcttctgggcacacgaccgctttggtggctacgctcaatctggcctgttggctgaaatcaccccggacaaagcgttccaggacaagctgtatccgtttacctgggatgccgtacgttacaacggcaagctgattgcttacccgatcgctgttgaagcgttatcgctgatttataacaaagatctgctgccgaacccgccaaaaacctgggaagagatcccggcgctggataaagaactgaaagcgaaaggtaagagcgcgctgatgttcaacctgcaagaaccgtacttcacctggccgctgattgctgctgacgggggttatgcgttcaagtatgaaaacggcaagtacgacattaaagacgtgggcgtggataacgctggcgcgaaagcgggtctgaccttcctggttgacctgattaaaaacaaacacatgaatgcagacaccgattactccatcgcagaagctgcctttaataaaggcgaaacagcgatgaccatcaacggcccgtgggcatggtccaacatcgacaccagcaaagtgaattatggtgtaacggtactgccgaccttcaagggtcaaccatccaaaccgttcgttggcgtgctgagcgcaggtattaacgccgccagtccgaacaaagagctggcgaaagagttcctcgaaaactatctgctgactgatgaaggtctggaagcggttaataaagacaaaccgctgggtgccgtagcgctgaagtcttacgaggaagagttggcgaaagatccacgtattgccgccaccatggaaaacgcccagaaaggtgaaatcatgccgaacatcccgcagatgtccgctttctggtatgccgtgcgtactgcggtgatcaacgccgccagcggtcgtcagactgtcgatgaagccctgaaagacgcgcagactggtggttctggtgagaacctgtactttcaaagctcagataatgggcctcaaaaccagcgcaacgctccacgtataaccttcggtggcccgtctgactccacaggcagcaaccagaatggtgagcgtagtggagccaggtctaagcagcgccgtccccagggtctgccgaacaacacggcgagctggtttactccgcttacccaacacggtaaagaagacttaaaattcccgccaggccagggcgtcccgatcaacactaactcttccccggatgatcagattggttattaccgcagagcaactcgtcggattcgcggcggcgacggtaaaatgaaagatttgcccccgcgttggtacttttactatctcggcaccggtccggaagctgatctgccctacggggcagtaaaggacgggatcttttgggtggctgccgaaggtgccctgaatactccaaaagatcatatcggcacccgtaaccctgctaataacgctgcgatcccgctgcaactgcctcccggtacaactctgccaaaaggcttctatgcagaagggtcgcgtggtggcagccaggcgagtagccgtagcagctcccgctctcgcaactcgtcccgtaactccactccgggctcttctcgcggcacgtccccggctcgtatggcaggtaacggtggtgacgctgctctggcgctgctactgctggacaggctgaaccagctggagtcgaagatgagtggtaaaggccaacagcagcagggccagaccgttaccaaaaagagcgcagctgaagcatctaaaaaaccgcgacagaaacgtaccgcgactaaagcgtacaatgtaacacaggccttcggtcgtcgaggtccggagcaaactcaaggaaactttggcgatcaggaattaatccgccaggggaccgactacaaacactggccgcaaattgcccagttcgccccatccgctagtgcattcttcggtatgagccgcatcggcatggaagtaacgccaagtggtacgtggctgacctacaccggtgctatcaagcttgatgacaaggacccgaactttaaagaccaggttattctgcttaacaaacatattgatgcctataaaactttcccgccgaccgaacccaaaaaggacaaaaagaaaaaagctgatgaaacccaggctctaccgcagcgtcagaaaaaacagcaaactgtgactctgctgccagctgcggacctggatgatttttccaagcagctgcaacagtctatgagctctgcggactctacgcaggctggtggttctggtcaccatcatcaccatcattaa

SEQ ID NO: 3055 - DNA, 2421 bp, Artificial Sequence
  Description of Artificial Sequence: Synthetic polynucleotide
atgaaaatcgaagaaggtaaactggtaatctggattaacggcgataaaggctataacggtctcgctgaagtcggtaagaaattcgagaaagataccggaattaaagtcaccgttgagcatccggataaactggaagagaaattcccacaggttgcggcaactggcgatggccctgacattatcttctgggcacacgaccgctttggtggctacgctcaatctggcctgttggctgaaatcaccccggacaaagcgttccaggacaagctgtatccgtttacctgggatgccgtacgttacaacggcaagctgattgcttacccgatcgctgttgaagcgttatcgctgatttataacaaagatctgctgccgaacccgccaaaaacctgggaagagatcccggcgctggataaagaactgaaagcgaaaggtaagagcgcgctgatgttcaacctgcaagaaccgtacttcacctggccgctgattgctgctgacgggggttatgcgttcaagtatgaaaacggcaagtacgacattaaagacgtgggcgtggataacgctggcgcgaaagcgggtctgaccttcctggttgacctgattaaaaacaaacacatgaatgcagacaccgattactccatcgcagaagctgcctttaataaaggcgaaacagcgatgaccatcaacggcccgtgggcatggtccaacatcgacaccagcaaagtgaattatggtgtaacggtactgccgaccttcaagggtcaaccatccaaaccgttcgttggcgtgctgagcgcaggtattaacgccgccagtccgaacaaagagctggcgaaagagttcctcgaaaactatctgctgactgatgaaggtctggaagcggttaataaagacaaaccgctgggtgccgtagcgctgaagtcttacgaggaagagttggcgaaagatccacgtattgccgccaccatggaaaacgcccagaaaggtgaaatcatgccgaacatcccgcagatgtccgctttctggtatgccgtgcgtactgcggtgatcaacgccgccagcggtcgtcagactgtcgatgaagccctgaaagacgcgcagactggtggttctggtgagaacctgtactttcaaagctcagataatgggcctcaaaaccagcgcaacgctccacgtataaccttcggtggcccgtctgactccacaggcagcaaccagaatggtgagcgtagtggagccaggtctaagcagcgccgtccccagggtctgccgaacaacacggcgagctggtttactgcgcttacccaacacggtaaagaagacttaaaattcccgcgtggccagggcgtcccgatcaacactaactcttccccggatgatcagattggttattaccgcagagcaactcgtcggattcgcggcggcgacggtaaaatgaaagatttgtctccgcgttggtacttttactatctcggcaccggtccggaagctggactgccctacggggcaaacaaggacgggatcatttgggtggctaccgaaggtgccctgaatactccaaaagatcatatcggcacccgtaaccctgctaataacgctgcgatcgttctgcaactgcctcagggtacaactctgccaaaaggcttctatgcagaagggtcgcgtggtggcagccaggcgagtagccgtagcagctcccgctctcgcaactcgtcccgtaactccactccgggctcttctcgcggcacgtccccggctcgtatggcaggtaacggtggtgacgctgctctggcgctgctactgctggacaggctgaaccagctggagtcgaagatgagtggtaaaggccaacagcagcagggccagaccgttaccaaaaagagcgcagctgaagcatctaaaaaaccgcgacagaaacgtaccgcgactaaagcgtacaatgtaacacaggccttcggtcgtcgaggtccggagcaaactcaaggaaactttggcgatcaggaattaatccgccaggggaccgactacaaacactggccgcaaattgcccagttcgccccatccgctagtgcattcttcggtatgagccgcatcggcatggaagtaacgccaagtggtacgtggctgacctacaccggtgctatcaagcttgatgacaaggacccgaactttaaagaccaggttattctgcttaacgaacatattgatgcctataaaactttcccgccgaccgaacccaaaaaggacaaaaagaaaaaagctgatgaaacccaggctctaccgcagcgtcagaaaaaacagcaaactgtgactctgctgccagctgcggacctggatgatttttccaagcagctgcaacagtctatgagctctgcggactctacgcaggctggtggttctggtcaccatcatcaccatcattaa

SEQ ID NO: 3056 - DNA, 2421 bp, Artificial Sequence
  Description of Artificial Sequence: Synthetic polynucleotide
atgaaaatcgaagaaggtaaactggtaatctggattaacggcgataaaggctataacggtctcgctgaagtcggtaagaaattcgagaaagataccggaattaaagtcaccgttgagcatccggataaactggaagagaaattcccacaggttgcggcaactggcgatggccctgacattatcttctgggcacacgaccgctttggtggctacgctcaatctggcctgttggctgaaatcaccccggacaaagcgttccaggacaagctgtatccgtttacctgggatgccgtacgttacaacggcaagctgattgcttacccgatcgctgttgaagcgttatcgctgatttataacaaagatctgctgccgaacccgccaaaaacctgggaagagatcccggcgctggataaagaactgaaagcgaaaggtaagagcgcgctgatgttcaacctgcaagaaccgtacttcacctggccgctgattgctgctgacgggggttatgcgttcaagtatgaaaacggcaagtacgacattaaagacgtgggcgtggataacgctggcgcgaaagcgggtctgaccttcctggttgacctgattaaaaacaaacacatgaatgcagacaccgattactccatcgcagaagctgcctttaataaaggcgaaacagcgatgaccatcaacggcccgtgggcatggtccaacatcgacaccagcaaagtgaattatggtgtaacggtactgccgaccttcaagggtcaaccatccaaaccgttcgttggcgtgctgagcgcaggtattaacgccgccagtccgaacaaagagctggcgaaagagttcctcgaaaactatctgctgactgatgaaggtctggaagcggttaataaagacaaaccgctgggtgccgtagcgctgaagtcttacgaggaagagttggcgaaagatccacgtattgccgccaccatggaaaacgcccagaaaggtgaaatcatgccgaacatcccgcagatgtccgctttctggtatgccgtgcgtactgcggtgatcaacgccgccagcggtcgtcagactgtcgatgaagccctgaaagacgcgcagactggtggttctggtgagaacctgtactttcaaagctcagataatgggcctcaaaaccagcgcaacgctccacgtataaccttcggtggcccgtctgactccacaggcagcaaccagaatggtgagcgtagtggagccaggtctaagcagcgccgtccccagggtctgccgaacaacacggcgagctggtttactgcgcttacccaacacggtaaagaagacttaaaattcccgcgtggccagggcgtcccgatcaacactaactcttccccggatgatcagattggttattaccgcagagcaactcgtcggattcgcggcggcgacggtaaaatgaaagatttgtctccgcgttggtacttttactatctcggcaccggtccggaagctggactgccctacggggcaaacaaggacgggatcatttgggtggctaccgaaggtgccctgaatactccaaaagatcatatcggcacccgtaaccctgctaataacgctgcgatcgttctgcaactgcctcagggtacaactctgccaaaaggcttctatgcagaagggtcgcgtggtggcagccaggcgagtagccgtagcagctcccgctctcgcaactcgtcccgtaactccactccgggctcttctcgcggcacgtccccggctcgtatggcaggtaacggtggtgacgctgctctggcgctgctactgctggacaggctgaaccagctggagtcgaagatgagtggtaaaggccaacagcagcagggccagaccgttaccaaaaagagcgcagctgaagcatctaaaaaaccgcgacagaaacgtaccgcgactaaagcgtacaatgtaacacaggccttcggtcgtcgaggtccggagcaaactcaaggaaactttggcgatcaggaattaatccgccaggggaccgactacaaacactggccgcaaattgcccagttcgccccatccgctagtgcattcttcggtatgagccgcatcggcatggaagtaacgccaagtggtacgtggctgacctacaccggttccatcaagcttgatgacaaggacccgaactttaaagaccaggttattctgcttaacaaacatattgatgcctataaaactttcccgccgaccgaacccaaaaaggacaaaaagaaaaaagctgatgaaacccaggctctaccgcagcgtcagaaaaaacagcaaactgtgactctgctgccagctgcggacctggatgatttttccaagcagctgcaacagtctatgagctctgcggactctacgcaggctggtggttctggtcaccatcatcaccatcattaa

SEQ ID NO: 3057 - DNA, 2421 bp, Artificial Sequence
  Description of Artificial Sequence: Synthetic polynucleotide
atgaaaatcgaagaaggtaaactggtaatctggattaacggcgataaaggctataacggtctcgctgaagtcggtaagaaattcgagaaagataccggaattaaagtcaccgttgagcatccggataaactggaagagaaattcccacaggttgcggcaactggcgatggccctgacattatcttctgggcacacgaccgctttggtggctacgctcaatctggcctgttggctgaaatcaccccggacaaagcgttccaggacaagctgtatccgtttacctgggatgccgtacgttacaacggcaagctgattgcttacccgatcgctgttgaagcgttatcgctgatttataacaaagatctgctgccgaacccgccaaaaacctgggaagagatcccggcgctggataaagaactgaaagcgaaaggtaagagcgcgctgatgttcaacctgcaagaaccgtacttcacctggccgctgattgctgctgacgggggttatgcgttcaagtatgaaaacggcaagtacgacattaaagacgtgggcgtggataacgctggcgcgaaagcgggtctgaccttcctggttgacctgattaaaaacaaacacatgaatgcagacaccgattactccatcgcagaagctgcctttaataaaggcgaaacagcgatgaccatcaacggcccgtgggcatggtccaacatcgacaccagcaaagtgaattatggtgtaacggtactgccgaccttcaagggtcaaccatccaaaccgttcgttggcgtgctgagcgcaggtattaacgccgccagtccgaacaaagagctggcgaaagagttcctcgaaaactatctgctgactgatgaaggtctggaagcggttaataaagacaaaccgctgggtgccgtagcgctgaagtcttacgaggaagagttggcgaaagatccacgtattgccgccaccatggaaaacgcccagaaaggtgaaatcatgccgaacatcccgcagatgtccgctttctggtatgccgtgcgtactgcggtgatcaacgccgccagcggtcgtcagactgtcgatgaagccctgaaagacgcgcagactggtggttctggtgagaacctgtactttcaaagctcagataatgggcctcaaaaccagcgcaacgctccacgtataaccttcggtggcccgtctgactccacaggcagcaaccagaatggtgagcgtagtggagccaggtctaagcagcgccgtccccagggtctgccgaacaacacggcgagctggtttactgcgcttacccaacacggtaaagaagacttaaaattcccgcgtggccagggcgtcccgatcaacactaactcttccccggatgatcagattggttattaccgcagagcaactcgtcggatgcgcggcggcgacggtaaaatgaaagatttgtctccgcgttggtacttttactatctcggcaccggtccggaagctggactgccctacggggcaaacaaggacgggatcatttgggtggctaccgaaggtgccctgaatactccaaaagatcatatcggcacccgtaaccctgctaataacgctgcgatcgttctgcaactgcctcagggtacaactctgccaaaaggcttctatgcagaagggtcgcgtggtggcagccaggcgagtagccgtagcagctcccgctctcgcaactcgtcccgtaactccactccgggctcttctcgcggcacgtccccggctcgtatggcaggtaacggtggtgacgctgctctggcgctgctactgctggacaggctgaaccagctggagtcgaagatgagtggtaaaggccaacagcagcagggccagaccgttaccaaaaagagcgcagctgaagcatctaaaaaaccgcgacagaaacgtaccgcgactaaagcgtacaatgtaacacaggccttcggtcgtcgaggtccggagcaaactcaaggaaactttggcgatcaggaattaatccgccaggggaccgactacaaacactggccgcaaattgcccagttcgccccatccgctagtgcattcttcggtatgagccgcatcggcatggaagtaacgccaagtggtacgtggctgacctacaccggtgctatcaagcttgatgacaaggacccgaactttaaagaccaggttattctgcttaacaaacatattgatgcctataaaactttcccgccgaccgaacccaaaaaggacaaaaagaaaaaagctgatgaaacccaggctctaccgcagcgtcagaaaaaacagcaaactgtgactctgctgccagctgcggacctggatgatttttccaagcagctgcaacagtctatgagctctgcggactctacgcaggctggtggttctggtcaccatcatcaccatcattaa

SEQ ID NO: 3058 - DNA, 2421 bp, Artificial Sequence
  Description of Artificial Sequence: Synthetic polynucleotide
atgaaaatcgaagaaggtaaactggtaatctggattaacggcgataaaggctataacggtctcgctgaagtcggtaagaaattcgagaaagataccggaattaaagtcaccgttgagcatccggataaactggaagagaaattcccacaggttgcggcaactggcgatggccctgacattatcttctgggcacacgaccgctttggtggctacgctcaatctggcctgttggctgaaatcaccccggacaaagcgttccaggacaagctgtatccgtttacctgggatgccgtacgttacaacggcaagctgattgcttacccgatcgctgttgaagcgttatcgctgatttataacaaagatctgctgccgaacccgccaaaaacctgggaagagatcccggcgctggataaagaactgaaagcgaaaggtaagagcgcgctgatgttcaacctgcaagaaccgtacttcacctggccgctgattgctgctgacgggggttatgcgttcaagtatgaaaacggcaagtacgacattaaagacgtgggcgtggataacgctggcgcgaaagcgggtctgaccttcctggttgacctgattaaaaacaaacacatgaatgcagacaccgattactccatcgcagaagctgcctttaataaaggcgaaacagcgatgaccatcaacggcccgtgggcatggtccaacatcgacaccagcaaagtgaattatggtgtaacggtactgccgaccttcaagggtcaaccatccaaaccgttcgttggcgtgctgagcgcaggtattaacgccgccagtccgaacaaagagctggcgaaagagttcctcgaaaactatctgctgactgatgaaggtctggaagcggttaataaagacaaaccgctgggtgccgtagcgctgaagtcttacgaggaagagttggcgaaagatccacgtattgccgccaccatggaaaacgcccagaaaggtgaaatcatgccgaacatcccgcagatgtccgctttctggtatgccgtgcgtactgcggtgatcaacgccgccagcggtcgtcagactgtcgatgaagccctgaaagacgcgcagactggtggttctggtgagaacctgtactttcaaagctcagataatgggcctcaaaaccagcgcaacgctccacgtataaccttcggtggcccgtctgactccacaggcagcaaccagaatggtgagcgtagtggagccaggtctaagcagcgccgtccccagggtctgccgaacaacacggcgagctggtttactccgcttacccaacacggtaaagaagacttaaaattcccgcctggccagggcgtcccgatcaacactaactcttccccggatgatcagattggttattaccgcagagcaactcgtcggattcgcggcggcgacggtaaaatgaaagatttgccaccgcgttggtacttttactatctcggcaccggtccggaagctgatctgccctacgggcaagtaaaggacgggatcttttgggtggctgccgaaggtgccctgaatactccaaaagatcatatcggcacccgtaaccctgctaataacgctgcgatcccactgcaactgcctccgggtacaactctgccaaaaggcttctatgcagaagggtcgcgtggtggcagccaggcgagtagccgtagcagctcccgctctcgcaactcgtcccgtaactccactccgggctcttctcgcggcacgtccccggctcgtatggcaggtaacggtggtgacgctgctctggcgctgctactgctggacaggctgaaccagctggagtcgaagatgagtggtaaaggccaacagcagcagggccagaccgttaccaaaaagagcgcagctgaagcatctaaaaaaccgcgacagaaacgtaccgcgactaaagcgtacaatgtaacacaggccttcggtcgtcgaggtccggagcaaactcaaggaaactttggcgatcaggaattaatccgccaggggaccgactacaaacactggccgcaaattgcccagttcgccccatccgctagtgcattcttcggtatgagccgcatcggcatggaagtaacgccaagtggtacgtggctgacctacaccggtgctatcaagcttgatgacaaggacccgaactttaaagaccaggttattctgcttaacaaacatattgatgcctataaaactttcccgccgaccgaacccaaaaaggacaaaaagaaaaaagctgatgaaacccaggctctaccgcagcgtcagaaaaaacagcaaactgtgactctgctgccagctgcggacctggatgatttttccaagcagctgcaacagtctatgagctctgcggactctacgcaggctggtggttctggtcaccatcatcaccatcattaa

SEQ ID NO: 3059 - DNA, 2421 bp, Artificial Sequence
  Description of Artificial Sequence: Synthetic polynucleotide
atgaaaatcgaagaaggtaaactggtaatctggattaacggcgataaaggctataacggtctcgctgaagtcggtaagaaattcgagaaagataccggaattaaagtcaccgttgagcatccggataaactggaagagaaattcccacaggttgcggcaactggcgatggccctgacattatcttctgggcacacgaccgctttggtggctacgctcaatctggcctgttggctgaaatcaccccggacaaagcgttccaggacaagctgtatccgtttacctgggatgccgtacgttacaacggcaagctgattgcttacccgatcgctgttgaagcgttatcgctgatttataacaaagatctgctgccgaacccgccaaaaacctgggaagagatcccggcgctggataaagaactgaaagcgaaaggtaagagcgcgctgatgttcaacctgcaagaaccgtacttcacctggccgctgattgctgctgacgggggttatgcgttcaagtatgaaaacggcaagtacgacattaaagacgtgggcgtggataacgctggcgcgaaagcgggtctgaccttcctggttgacctgattaaaaacaaacacatgaatgcagacaccgattactccatcgcagaagctgcctttaataaaggcgaaacagcgatgaccatcaacggcccgtgggcatggtccaacatcgacaccagcaaagtgaattatggtgtaacggtactgccgaccttcaagggtcaaccatccaaaccgttcgttggcgtgctgagcgcaggtattaacgccgccagtccgaacaaagagctggcgaaagagttcctcgaaaactatctgctgactgatgaaggtctggaagcggttaataaagacaaaccgctgggtgccgtagcgctgaagtcttacgaggaagagttggcgaaagatccacgtattgccgccaccatggaaaacgcccagaaaggtgaaatcatgccgaacatcccgcagatgtccgctttctggtatgccgtgcgtactgcggtgatcaacgccgccagcggtcgtcagactgtcgatgaagccctgaaagacgcgcagactggtggttctggtgagaacctgtactttcaaagctcagataatgggcctcaaaaccagcgcaacgctccacgtataaccttcggtggcccgtctgactccacaggcagcaaccagaatggtgagcgtagtggagccaggtctaagcagcgccgtccccagggtctgccgaacaacacggcgagctggtttactgcgcttacccaacacggtaaagaagacttaaaattcccgcgtggccagggcgtcccgatcaacactaactcttccccggatgatcagattggttattaccgcagagcaactcgtcggattcgcggcggcgacggtaaaatgaaagatttgtctccgcgttggtacttttactatctcggcaccggtccggaagctggactgccctacggggcaaacaaggacgggatcatttgggtggctaccgaaggtgccctgaatactccaaaagatcatatcggcacccgtaaccctgctaataacgctgcgatcgttctgcaactgcctcagggtacaactctgccaaaaggcttctatgcagaagggtcgcgtggtggcagccaggcgagtagccgtagcagctcccgctctcgcaactcgtcccgtaactccactccgggctcttctcgcggcacgtccccggctcgtatggcaggtaacggtggtgacgctgctctggcgctgctactgctggacaggctgaaccagctggagtcgaagatgagtggtaaaggccaacagcagcagggccagaccgttaccaaaaagagcgcagctgaagcatctaaaaaaccgcgacagaaacgtaccgcgactaaagcgtacaatgtaacacaggccttcggtcgtcgaggtccggagcaaactcaaggaaactttggcgatcaggaattaatccgccaggggaccgactacaaacactggccgcaaattgcccagttcgccccatccgctagtgcattcttcggtatgagccgcatcggcatggaagtaacgccaagtggtacgtggctgacctacaccggtgctatcacgcttgatgacaaggacccgaactttaaagaccaggttattctgcttaacaaacatattgatgcctataaaactttcccgccgaccgaacccaaaaaggacaaaaagaaaaaagctgatgaaacccaggctctaccgcagcgtcagaaaaaacagcaaactgtgactctgctgccagctgcggacctggatgatttttccaagcagctgcaacagtctatgagctctgcggactctacgcaggctggtggttctggtcaccatcatcaccatcattaa

SEQ ID NO: 3060 - DNA, 2421 bp, Artificial Sequence
  Description of Artificial Sequence: Synthetic polynucleotide
atgaaaatcgaagaaggtaaactggtaatctggattaacggcgataaaggctataacggtctcgctgaagtcggtaagaaattcgagaaagataccggaattaaagtcaccgttgagcatccggataaactggaagagaaattcccacaggttgcggcaactggcgatggccctgacattatcttctgggcacacgaccgctttggtggctacgctcaatctggcctgttggctgaaatcaccccggacaaagcgttccaggacaagctgtatccgtttacctgggatgccgtacgttacaacggcaagctgattgcttacccgatcgctgttgaagcgttatcgctgatttataacaaagatctgctgccgaacccgccaaaaacctgggaagagatcccggcgctggataaagaactgaaagcgaaaggtaagagcgcgctgatgttcaacctgcaagaaccgtacttcacctggccgctgattgctgctgacgggggttatgcgttcaagtatgaaaacggcaagtacgacattaaagacgtgggcgtggataacgctggcgcgaaagcgggtctgaccttcctggttgacctgattaaaaacaaacacatgaatgcagacaccgattactccatcgcagaagctgcctttaataaaggcgaaacagcgatgaccatcaacggcccgtgggcatggtccaacatcgacaccagcaaagtgaattatggtgtaacggtactgccgaccttcaagggtcaaccatccaaaccgttcgttggcgtgctgagcgcaggtattaacgccgccagtccgaacaaagagctggcgaaagagttcctcgaaaactatctgctgactgatgaaggtctggaagcggttaataaagacaaaccgctgggtgccgtagcgctgaagtcttacgaggaagagttggcgaaagatccacgtattgccgccaccatggaaaacgcccagaaaggtgaaatcatgccgaacatcccgcagatgtccgctttctggtatgccgtgcgtactgcggtgatcaacgccgccagcggtcgtcagactgtcgatgaagccctgaaagacgcgcagactggtggttctggtgagaacctgtactttcaaagctcagataatgggcctcaaaaccagcgcaacgctccacgtataaccttcggtggcccgtctgactccacaggcagcaaccagaatggtgagcgtagtggagccaggtctaagcagcgccgtccccagggtctgccgaacaacacggcgagctggtttactggccttacccaatttggtaaagaagacttaaaattcccgccgggccagggcgtcccgatcaacactaactcttccccggatgatcagattggttattaccgcagagcaactcgtcggattcgcggcggcgacggtaaaatgaaagatttgccaccgcgttggtacttttactatctcggcaccggtccgcacgctgatctgccctacgggcaaaagcaacctggggtgttttgggtggctcgccctggtgccctgaatactccaaaagatcatatcggcacccgtaaccctgctaataacgctgcgatcccgctgcaactgcctccgggtacaaaactgccaaaaggcttctatgcagaagggtcgcgtggtggcagccaggcgagtagccgtagcagctcccgctctcgcaactcgtcccgtaactccactccgggctcttctcgcggcacgtccccggctcgtatggcaggtaacggtggtgacgctgctctggcgctgctactgctggacaggctgaaccagctggagtcgaagatgagtggtaaaggccaacagcagcagggccagaccgttaccaaaaagagcgcagctgaagcatctaaaaaaccgcgacagaaacgtaccgcgactaaagcgtacaatgtaacacaggccttcggtcgtcgaggtccggagcaaactcaaggaaactttggcgatcaggaattaatccgccaggggaccgactacaaacactggccgcaaattgcccagttcgccccatccgctagtgcattcttcggtatgagccgcatcggcatggaagtaacgccaagtggtacgtggctgacctacaccggtgctatcaagcttgatgacaaggacccgaactttaaagaccaggttattctgcttaacaaacatattgatgcctataaaactttcccgccgaccgaacccaaaaaggacaaaaagaaaaaagctgatgaaacccaggctctaccgcagcgtcagaaaaaacagcaaactgtgactctgctgccagctgcggacctggatgatttttccaagcagctgcaacagtctatgagctctgcggactctacgcaggctggtggttctggtcaccatcatcaccatcattaa

SEQ ID NO: 3061 - DNA, 2421 bp, Artificial Sequence
  Description of Artificial Sequence: Synthetic polynucleotide
atgaaaatcgaagaaggtaaactggtaatctggattaacggcgataaaggctataacggtctcgctgaagtcggtaagaaattcgagaaagataccggaattaaagtcaccgttgagcatccggataaactggaagagaaattcccacaggttgcggcaactggcgatggccctgacattatcttctgggcacacgaccgctttggtggctacgctcaatctggcctgttggctgaaatcaccccggacaaagcgttccaggacaagctgtatccgtttacctgggatgccgtacgttacaacggcaagctgattgcttacccgatcgctgttgaagcgttatcgctgatttataacaaagatctgctgccgaacccgccaaaaacctgggaagagatcccggcgctggataaagaactgaaagcgaaaggtaagagcgcgctgatgttcaacctgcaagaaccgtacttcacctggccgctgattgctgctgacgggggttatgcgttcaagtatgaaaacggcaagtacgacattaaagacgtgggcgtggataacgctggcgcgaaagcgggtctgaccttcctggttgacctgattaaaaacaaacacatgaatgcagacaccgattactccatcgcagaagctgcctttaataaaggcgaaacagcgatgaccatcaacggcccgtgggcatggtccaacatcgacaccagcaaagtgaattatggtgtaacggtactgccgaccttcaagggtcaaccatccaaaccgttcgttggcgtgctgagcgcaggtattaacgccgccagtccgaacaaagagctggcgaaagagttcctcgaaaactatctgctgactgatgaaggtctggaagcggttaataaagacaaaccgctgggtgccgtagcgctgaagtcttacgaggaagagttggcgaaagatccacgtattgccgccaccatggaaaacgcccagaaaggtgaaatcatgccgaacatcccgcagatgtccgctttctggtatgccgtgcgtactgcggtgatcaacgccgccagcggtcgtcagactgtcgatgaagccctgaaagacgcgcagactggtggttctggtgagaacctgtactttcaaagctcagataatgggcctcaaaaccagcgcaacgctccacgtataaccttcggtggcccgtctgactccacaggcagcaaccagaatggtgagcgtagtggagccaggtctaagcagcgccgtccccagggtctgccgaacaacacggcgagctggtttactgcgcttacccaacacggtaaagaagacttaaaattcccgcgtggccagggcgtcccgatcaacactaactcttccccggatgatcagattggttattaccgcagagcaactcgtcggattcgcggcggcgacggtaaaatgaaagatttgtctccgcgttggtacttttactatctcggcaccggtccggaagctggactgccctacggggcaaacaaggacgggatcatttgggtggctaccgaaggtgccctgaatactccaaaagatcatatcggcacccgtaaccctgctaataacgctgcgatcgttctgcaactgcctcagggtacaactctgccaaaaggcttctatgcagaagggtcgcgtggtggcagccaggcgagtagccgtagcagctcccgctctcgcaactcgtcccgtaactccactccgggctcttctcgcggcacgtccccggctcgtatggcaggtaacggtggtgacgctgctctggcgctgctactgctggacaggctgaaccagctggagtcgaagatgagtggtaaaggccaacagcagcagggccagaccgttaccaaaaagaaagcagctgaagcatctaaaaaaccgcgacagaaacgtaccgcgactaaagcgtacaatgtaacacaggccttcggtcgtcgaggtccggagcaaactcaaggaaactttggcgatcaggaattaatccgccaggggaccgactacaaacactggccgcaaattgcccagttcgccccatccgctagtgcattcttcggtatgagccgcatcggcatggaagtaacgccaagtggtacgtggctgacctacaccggtgctatcaagcttgatgacaaggacccgaactttaaagaccaggttattctgcttaacaaacatattgatgcctataaaactttcccgccgaccgaacccaaaaaggacaaaaagaaaaaagctgatgaaacccaggctctaccgcagcgtcagaaaaaacagcaaactgtgactctgctgccagctgcggacctggatgatttttccaagcagctgcaacagtctatgagctctgcggactctacgcaggctggtggttctggtcaccatcatcaccatcattaa

SEQ ID NO: 3062 - DNA, 2421 bp, Artificial Sequence
  Description of Artificial Sequence: Synthetic polynucleotide
atgaaaatcgaagaaggtaaactggtaatctggattaacggcgataaaggctataacggtctcgctgaagtcggtaagaaattcgagaaagataccggaattaaagtcaccgttgagcatccggataaactggaagagaaattcccacaggttgcggcaactggcgatggccctgacattatcttctgggcacacgaccgctttggtggctacgctcaatctggcctgttggctgaaatcaccccggacaaagcgttccaggacaagctgtatccgtttacctgggatgccgtacgttacaacggcaagctgattgcttacccgatcgctgttgaagcgttatcgctgatttataacaaagatctgctgccgaacccgccaaaaacctgggaagagatcccggcgctggataaagaactgaaagcgaaaggtaagagcgcgctgatgttcaacctgcaagaaccgtacttcacctggccgctgattgctgctgacgggggttatgcgttcaagtatgaaaacggcaagtacgacattaaagacgtgggcgtggataacgctggcgcgaaagcgggtctgaccttcctggttgacctgattaaaaacaaacacatgaatgcagacaccgattactccatcgcagaagctgcctttaataaaggcgaaacagcgatgaccatcaacggcccgtgggcatggtccaacatcgacaccagcaaagtgaattatggtgtaacggtactgccgaccttcaagggtcaaccatccaaaccgttcgttggcgtgctgagcgcaggtattaacgccgccagtccgaacaaagagctggcgaaagagttcctcgaaaactatctgctgactgatgaaggtctggaagcggttaataaagacaaaccgctgggtgccgtagcgctgaagtcttacgaggaagagttggcgaaagatccacgtattgccgccaccatggaaaacgcccagaaaggtgaaatcatgccgaacatcccgcagatgtccgctttctggtatgccgtgcgtactgcggtgatcaacgccgccagcggtcgtcagactgtcgatgaagccctgaaagacgcgcagactggtggttctggtgagaacctgtactttcaaagctcagataatgggcctcaaaaccagcgcaacgctccacgtataaccttcggtggcccgtctgactccacaggcagcaaccagaatggtgagcgtagtggagccaggtctaagcagcgccgtccccagggtctgccgaacaacacggcgagctggtttactgcgcttacccaacacggtaaagaagacttaaaattcccgcgtggccagggcgtcccgatcaacactaactcttccccggatgatcagattggttattaccgcagagcaactcgtcggattcgcggcggcgacggtaaaatgaaagatttgtctccgcgttggtacttttactatctcggcaccggtccggaagctggactgccctacggggcaaacaaggacgggatcatttgggtggctaccgaaggtgccctgaatactccaaaagatcatatcggcacccgtaaccctgctaataacccagcgatcgttctgcaactgcctcagggtacaactctgccaaaaggcttctatgcagaagggtcgcgtggtggcagccaggcgagtagccgtagcagctcccgctctcgcaactcgtcccgtaactccactccgggctcttctcgcggcacgtccccggctcgtatggcaggtaacggtggtgacgctgctctggcgctgctactgctggacaggctgaaccagctggagtcgaagatgagtggtaaaggccaacagcagcagggccagaccgttaccaaaaagagcgcagctgaagcatctaaaaaaccgcgacagaaacgtaccgcgactaaagcgtacaatgtaacacaggccttcggtcgtcgaggtccggagcaaactcaaggaaactttggcgatcaggaattaatccgccaggggaccgactacaaacactggccgcaaattgcccagttcgccccatccgctagtgcattcttcggtatgagccgcatcggcatggaagtaacgccaagtggtacgtggctgacctacaccggtgctatcaagcttgatgacaaggacccgaactttaaagaccaggttattctgcttaacaaacatattgatgcctataaaactttcccgccgaccgaacccaaaaaggacaaaaagaaaaaagctgatgaaacccaggctctaccgcagcgtcagaaaaaacagcaaactgtgactctgctgccagctgcggacctggatgatttttccaagcagctgcaacagtctatgagctctgcggactctacgcaggctggtggttctggtcaccatcatcaccatcattaa

SEQ ID NO: 3063 - DNA, 2421 bp, Artificial Sequence
  Description of Artificial Sequence: Synthetic polynucleotide
atgaaaatcgaagaaggtaaactggtaatctggattaacggcgataaaggctataacggtctcgctgaagtcggtaagaaattcgagaaagataccggaattaaagtcaccgttgagcatccggataaactggaagagaaattcccacaggttgcggcaactggcgatggccctgacattatcttctgggcacacgaccgctttggtggctacgctcaatctggcctgttggctgaaatcaccccggacaaagcgttccaggacaagctgtatccgtttacctgggatgccgtacgttacaacggcaagctgattgcttacccgatcgctgttgaagcgttatcgctgatttataacaaagatctgctgccgaacccgccaaaaacctgggaagagatcccggcgctggataaagaactgaaagcgaaaggtaagagcgcgctgatgttcaacctgcaagaaccgtacttcacctggccgctgattgctgctgacgggggttatgcgttcaagtatgaaaacggcaagtacgacattaaagacgtgggcgtggataacgctggcgcgaaagcgggtctgaccttcctggttgacctgattaaaaacaaacacatgaatgcagacaccgattactccatcgcagaagctgcctttaataaaggcgaaacagcgatgaccatcaacggcccgtgggcatggtccaacatcgacaccagcaaagtgaattatggtgtaacggtactgccgaccttcaagggtcaaccatccaaaccgttcgttggcgtgctgagcgcaggtattaacgccgccagtccgaacaaagagctggcgaaagagttcctcgaaaactatctgctgactgatgaaggtctggaagcggttaataaagacaaaccgctgggtgccgtagcgctgaagtcttacgaggaagagttggcgaaagatccacgtattgccgccaccatggaaaacgcccagaaaggtgaaatcatgccgaacatcccgcagatgtccgctttctggtatgccgtgcgtactgcggtgatcaacgccgccagcggtcgtcagactgtcgatgaagccctgaaagacgcgcagactggtggttctggtgagaacctgtactttcaaagctcagataatgggcctcaaaaccagcgcaacgctccacgtataaccttcggtggcccgtctgactccacaggcagcaaccagaatggtgagcgtagtggagccaggtctaagcagcgccgtccccagggtctgccgaacaacacggcgagctggtttactgcgcttacccaacacggtaaagaagacttaaaattcccgcgtggccagggcgtcccgatcaacactaactcttccccggatgatcagattggttattaccgcagagcaactcgtcggattcgcggcggcgacggtaaaatgaaagatttgtctccgcgttggtacttttactatctcggcaccggtccggaagctggactgccctacggggcaaacaaggacgggatcatttgggtggctaccgaaggtgccctgaatactccaaaagatcatatcggcacccgtaaccctgctaataacgctgcgatcgttaatcaactgcctcagggtacaactctgccaaaaggcttctatgcagaagggtcgcgtggtggcagccaggcgagtagccgtagcagctcccgctctcgcaactcgtcccgtaactccactccgggctcttctcgcggcacgtccccggctcgtatggcaggtaacggtggtgacgctgctctggcgctgctactgctggacaggctgaaccagctggagtcgaagatgagtggtaaaggccaacagcagcagggccagaccgttaccaaaaagagcgcagctgaagcatctaaaaaaccgcgacagaaacgtaccgcgactaaagcgtacaatgtaacacaggccttcggtcgtcgaggtccggagcaaactcaaggaaactttggcgatcaggaattaatccgccaggggaccgactacaaacactggccgcaaattgcccagttcgccccatccgctagtgcattcttcggtatgagccgcatcggcatggaagtaacgccaagtggtacgtggctgacctacaccggtgctatcaagcttgatgacaaggacccgaactttaaagaccaggttattctgcttaacaaacatattgatgcctataaaactttcccgccgaccgaacccaaaaaggacaaaaagaaaaaagctgatgaaacccaggctctaccgcagcgtcagaaaaaacagcaaactgtgactctgctgccagctgcggacctggatgatttttccaagcagctgcaacagtctatgagctctgcggactctacgcaggctggtggttctggtcaccatcatcaccatcattaa

SEQ ID NO: 3064 - DNA, 2421 bp, Artificial Sequence
  Description of Artificial Sequence: Synthetic polynucleotide
atgaaaatcgaagaaggtaaactggtaatctggattaacggcgataaaggctataacggtctcgctgaagtcggtaagaaattcgagaaagataccggaattaaagtcaccgttgagcatccggataaactggaagagaaattcccacaggttgcggcaactggcgatggccctgacattatcttctgggcacacgaccgctttggtggctacgctcaatctggcctgttggctgaaatcaccccggacaaagcgttccaggacaagctgtatccgtttacctgggatgccgtacgttacaacggcaagctgattgcttacccgatcgctgttgaagcgttatcgctgatttataacaaagatctgctgccgaacccgccaaaaacctgggaagagatcccggcgctggataaagaactgaaagcgaaaggtaagagcgcgctgatgttcaacctgcaagaaccgtacttcacctggccgctgattgctgctgacgggggttatgcgttcaagtatgaaaacggcaagtacgacattaaagacgtgggcgtggataacgctggcgcgaaagcgggtctgaccttcctggttgacctgattaaaaacaaacacatgaatgcagacaccgattactccatcgcagaagctgcctttaataaaggcgaaacagcgatgaccatcaacggcccgtgggcatggtccaacatcgacaccagcaaagtgaattatggtgtaacggtactgccgaccttcaagggtcaaccatccaaaccgttcgttggcgtgctgagcgcaggtattaacgccgccagtccgaacaaagagctggcgaaagagttcctcgaaaactatctgctgactgatgaaggtctggaagcggttaataaagacaaaccgctgggtgccgtagcgctgaagtcttacgaggaagagttggcgaaagatccacgtattgccgccaccatggaaaacgcccagaaaggtgaaatcatgccgaacatcccgcagatgtccgctttctggtatgccgtgcgtactgcggtgatcaacgccgccagcggtcgtcagactgtcgatgaagccctgaaagacgcgcagactggtggttctggtgagaacctgtactttcaaagctcagataatgggcctcaaaaccagcgcaacgctccacgtataaccttcggtggcccgtctgactccacaggcagcaaccagaatggtgagcgtagtggagccaggtctaagcagcgccgtccccagggtctgccgaacaacacggcgagctggtttactgcgcttacccaacacggtaaagaagacttaaaattcccgcgtggccagggcgtcccgatcaacactaactcttccccggatgatcagattggttattaccgcagagcaactcgtcggattcgcggcggcgacggtaaaatgaaagatttgtctccgcgttggtacttttactatctcggcaccggtccggaagctggactgccctacggggcaaacaaggacgggatcatttgggtggctaccgaaggtgccctgaatactccaaaagatcatatcggcacccgtaaccctgctaataacgctgcgatcgttctgcaactgcctcagggtacaactctgccaaaaggcttctatgcagaagggtcgcgtggtggcagccaggcgagtagccgtagcagctcccgctctcgcaactcgtcccgtaactccactccgggctcttctcgcggcacgtccccggctcgtatggcaggtaacggtggtgacgctgctctggcgctgctactgctggacaggctgaaccagctggagtcgaagatgagtggtaaaggccaacagcagcagggccagaccgttaccaaaaagagcgcagctgaagcatctaaaaaaccgcgacagaaacgtaccgcgactaaagcgtacaatgtaacacaggccttcggtcgtcgaggtccggagcaaactcaaggaaactttggcgatcaggaattaatccgccaggggaccgactacaaacactggccgcaaattgcccagttcgccccatccgctgcggcattcttcggtatgagccgcatcggcatggaagtaacgccaagtggtacgtggctgacctacaccggtgctatcaagcttgatgacaaggacccgaactttaaagaccaggttattctgcttaacaaacatattgatgcctataaaactttcccgccgaccgaacccaaaaaggacaaaaagaaaaaagctgatgaaacccaggctctaccgcagcgtcagaaaaaacagcaaactgtgactctgctgccagctgcggacctggatgatttttccaagcagctgcaacagtctatgagctctgcggactctacgcaggctggtggttctggtcaccatcatcaccatcattaa

SEQ ID NO: 3065 - DNA, 2421 bp, Artificial Sequence
  Description of Artificial Sequence: Synthetic polynucleotide
atgaaaatcgaagaaggtaaactggtaatctggattaacggcgataaaggctataacggtctcgctgaagtcggtaagaaattcgagaaagataccggaattaaagtcaccgttgagcatccggataaactggaagagaaattcccacaggttgcggcaactggcgatggccctgacattatcttctgggcacacgaccgctttggtggctacgctcaatctggcctgttggctgaaatcaccccggacaaagcgttccaggacaagctgtatccgtttacctgggatgccgtacgttacaacggcaagctgattgcttacccgatcgctgttgaagcgttatcgctgatttataacaaagatctgctgccgaacccgccaaaaacctgggaagagatcccggcgctggataaagaactgaaagcgaaaggtaagagcgcgctgatgttcaacctgcaagaaccgtacttcacctggccgctgattgctgctgacgggggttatgcgttcaagtatgaaaacggcaagtacgacattaaagacgtgggcgtggataacgctggcgcgaaagcgggtctgaccttcctggttgacctgattaaaaacaaacacatgaatgcagacaccgattactccatcgcagaagctgcctttaataaaggcgaaacagcgatgaccatcaacggcccgtgggcatggtccaacatcgacaccagcaaagtgaattatggtgtaacggtactgccgaccttcaagggtcaaccatccaaaccgttcgttggcgtgctgagcgcaggtattaacgccgccagtccgaacaaagagctggcgaaagagttcctcgaaaactatctgctgactgatgaaggtctggaagcggttaataaagacaaaccgctgggtgccgtagcgctgaagtcttacgaggaagagttggcgaaagatccacgtattgccgccaccatggaaaacgcccagaaaggtgaaatcatgccgaacatcccgcagatgtccgctttctggtatgccgtgcgtactgcggtgatcaacgccgccagcggtcgtcagactgtcgatgaagccctgaaagacgcgcagactggtggttctggtgagaacctgtactttcaaagctcagataatgggcctcaaaaccagcgcaacgctccacgtataaccttcggtggcccgtctgactccacaggcagcaaccagaatggtgagcgtagtggagccaggtctaagcagcgccgtccccagggtctgccgaacaacacggcgagctggtttactgcgcttacccaacacggtaaagaagacttaaaattcccgcgtggccagggcgtcccgatcaacactaactcttccccggatgatcagattggttattaccgcagagcaactcgtcggattcgcggcggcgacggtaaaatgaaagatttgtctccgcgttggtacttttactatctcggcaccggtccggaagctggactgccctacggggcaaacaaggacgggatcatttgggtggctaccgaaggtgccctgaatactccaaaagatcatatcggcacccgtaaccctgctaataacgctgcgatcgttctgcaactgcctcagggtacaactctgccaaaaggcttctatgcagaagggtcgcgtggtggcagccaggcgagtagccgtagcagctcccgctctcgcaactcgtcccgtaactccactccgggctcttctcgcggcacgtccccggctcgtatggcaggtaacggtggtgacgctgctctggcgctgctactgctggacaggctgaaccagctggagtcgaagatgagtggtaaaggccaacagcagcagggccagaccgttaccaaaaagagcgcagctgaagcatctaaaaaaccgcgacagaaacgtaccgcgactaaagcgtacaatgtaacacaggccttcggtcgtcgaggtccggagcaaactcaaggaaactttggcgatcaggaattaatccgcaatgggaccgactacaaacactggccgcaaattgcccagttcgccccatccgctagtgcattcttcggtatgagccgcatcggcatggaagtaacgccaagtggtacgtggctgacctacaccggtgctatcaagcttgatgacaaggacccgaactttaaagaccaggttattctgcttaacaaacatattgatgcctataaaactttcccgccgaccgaacccaaaaaggacaaaaagaaaaaagctgatgaaacccaggctctaccgcagcgtcagaaaaaacagcaaactgtgactctgctgccagctgcggacctggatgatttttccaagcagctgcaacagtctatgagctctgcggactctacgcaggctggtggttctggtcaccatcatcaccatcattaa

SEQ ID NO: 3066 - DNA, 2421 bp, Artificial Sequence
  Description of Artificial Sequence: Synthetic polynucleotide
atgaaaatcgaagaaggtaaactggtaatctggattaacggcgataaaggctataacggtctcgctgaagtcggtaagaaattcgagaaagataccggaattaaagtcaccgttgagcatccggataaactggaagagaaattcccacaggttgcggcaactggcgatggccctgacattatcttctgggcacacgaccgctttggtggctacgctcaatctggcctgttggctgaaatcaccccggacaaagcgttccaggacaagctgtatccgtttacctgggatgccgtacgttacaacggcaagctgattgcttacccgatcgctgttgaagcgttatcgctgatttataacaaagatctgctgccgaacccgccaaaaacctgggaagagatcccggcgctggataaagaactgaaagcgaaaggtaagagcgcgctgatgttcaacctgcaagaaccgtacttcacctggccgctgattgctgctgacgggggttatgcgttcaagtatgaaaacggcaagtacgacattaaagacgtgggcgtggataacgctggcgcgaaagcgggtctgaccttcctggttgacctgattaaaaacaaacacatgaatgcagacaccgattactccatcgcagaagctgcctttaataaaggcgaaacagcgatgaccatcaacggcccgtgggcatggtccaacatcgacaccagcaaagtgaattatggtgtaacggtactgccgaccttcaagggtcaaccatccaaaccgttcgttggcgtgctgagcgcaggtattaacgccgccagtccgaacaaagagctggcgaaagagttcctcgaaaactatctgctgactgatgaaggtctggaagcggttaataaagacaaaccgctgggtgccgtagcgctgaagtcttacgaggaagagttggcgaaagatccacgtattgccgccaccatggaaaacgcccagaaaggtgaaatcatgccgaacatcccgcagatgtccgctttctggtatgccgtgcgtactgcggtgatcaacgccgccagcggtcgtcagactgtcgatgaagccctgaaagacgcgcagactggtggttctggtgagaacctgtactttcaaagctcagataatgggcctcaaaaccagcgcaacgctccacgtataaccttcggtggcccgtctgactccacaggcagcaaccagaatggtgagcgtagtggagccaggtctaagcagcgccgtccccagggtctgccgaacaacacggcgagctggtttactccgcttacccaacacggtaaagaagacttaaaattcccgccgggccagggcgtcccgatcaacactaactcttccccggatgatcagattggttattaccgcagagcaactcgtcggattcgcggcggcgacggtaaaatgaaagatttgcctccgcgttggtacttttactatctcggcaccggtccggaagctgatctgccctacggggcagtgaagccagggatcttttgggtggctgaggaaggtgccctgaatactccaaaagatcatatcggcacccgtaaccctgctaataacgctgcgatccccctgcaactgcctccgggtacaactctgccaaaaggcttctatgcagaagggtcgcgtggtggcagccaggcgagtagccgtagcagctcccgctctcgcaactcgtcccgtaactccactccgggctcttctcgcggcacgtccccggctcgtatggcaggtaacggtggtgacgctgctctggcgctgctactgctggacaggctgaaccagctggagtcgaagatgagtggtaaaggccaacagcagcagggccagaccgttaccaaaaagagcgcagctgaagcatctaaaaaaccgcgacagaaacgtaccgcgactaaagcgtacaatgtaacacaggccttcggtcgtcgaggtccggagcaaactcaaggaaactttggcgatcaggaattaatccgccaggggaccgactacaaacactggccgcaaattgcccagttcgccccatccgctagtgcattcttcggtatgagccgcatcggcatggaagtaacgccaagtggtacgtggctgacctacaccggtgctatcaagcttgatgacaaggacccgaactttaaagaccaggttattctgcttaacaaacatattgatgcctataaaactttcccgccgaccgaacccaaaaaggacaaaaagaaaaaagctgatgaaacccaggctctaccgcagcgtcagaaaaaacagcaaactgtgactctgctgccagctgcggacctggatgatttttccaagcagctgcaacagtctatgagctctgcggactctacgcaggctggtggttctggtcaccatcatcaccatcattaa

SEQ ID NO: 3067 - DNA, 2421 bp, Artificial Sequence
  Description of Artificial Sequence: Synthetic polynucleotide
atgaaaatcgaagaaggtaaactggtaatctggattaacggcgataaaggctataacggtctcgctgaagtcggtaagaaattcgagaaagataccggaattaaagtcaccgttgagcatccggataaactggaagagaaattcccacaggttgcggcaactggcgatggccctgacattatcttctgggcacacgaccgctttggtggctacgctcaatctggcctgttggctgaaatcaccccggacaaagcgttccaggacaagctgtatccgtttacctgggatgccgtacgttacaacggcaagctgattgcttacccgatcgctgttgaagcgttatcgctgatttataacaaagatctgctgccgaacccgccaaaaacctgggaagagatcccggcgctggataaagaactgaaagcgaaaggtaagagcgcgctgatgttcaacctgcaagaaccgtacttcacctggccgctgattgctgctgacgggggttatgcgttcaagtatgaaaacggcaagtacgacattaaagacgtgggcgtggataacgctggcgcgaaagcgggtctgaccttcctggttgacctgattaaaaacaaacacatgaatgcagacaccgattactccatcgcagaagctgcctttaataaaggcgaaacagcgatgaccatcaacggcccgtgggcatggtccaacatcgacaccagcaaagtgaattatggtgtaacggtactgccgaccttcaagggtcaaccatccaaaccgttcgttggcgtgctgagcgcaggtattaacgccgccagtccgaacaaagagctggcgaaagagttcctcgaaaactatctgctgactgatgaaggtctggaagcggttaataaagacaaaccgctgggtgccgtagcgctgaagtcttacgaggaagagttggcgaaagatccacgtattgccgccaccatggaaaacgcccagaaaggtgaaatcatgccgaacatcccgcagatgtccgctttctggtatgccgtgcgtactgcggtgatcaacgccgccagcggtcgtcagactgtcgatgaagccctgaaagacgcgcagactggtggttctggtgagaacctgtactttcaaagctcagataatgggcctcaaaaccagcgcaacgctccacgtataaccttcggtggcccgtctgactccacaggcagcaaccagaatggtgagcgtagtggagccaggtctaagcagcgccgtccccagggtctgccgaacaacacggcgagctggtttactgcgcttacccaacacggtaaagaagacttaaaattcccgcgtggccagggcgtcccgatcaacactaactcttccccggatgatcagattggttattaccgcagagcaactcgtcggattcgcggcggcgacggtaaaatgaaagatttgtctccgcgttggtacttttactatctcggcaccggtccggaagctggactgccctacggggcaaacaaggacgggatcatttgggtggctaccgaaggtgcccaaaatactccaaaagatcatatcggcacccgtaaccctgctaataacgctgcgatcgttctgcaactgcctcagggtacaactctgccaaaaggcttctatgcagaagggtcgcgtggtggcagccaggcgagtagccgtagcagctcccgctctcgcaactcgtcccgtaactccactccgggctcttctcgcggcacgtccccggctcgtatggcaggtaacggtggtgacgctgctctggcgctgctactgctggacaggctgaaccagctggagtcgaagatgagtggtaaaggccaacagcagcagggccagaccgttaccaaaaagagcgcagctgaagcatctaaaaaaccgcgacagaaacgtaccgcgactaaagcgtacaatgtaacacaggccttcggtcgtcgaggtccggagcaaactcaaggaaactttggcgatcaggaattaatccgccaggggaccgactacaaacactggccgcaaattgcccagttcgccccatccgctagtgcattcttcggtatgagccgcatcggcatggaagtaacgccaagtggtacgtggctgacctacaccggtgctatcaagcttgatgacaaggacccgaactttaaagaccaggttattctgcttaacaaacatattgatgcctataaaactttcccgccgaccgaacccaaaaaggacaaaaagaaaaaagctgatgaaacccaggctctaccgcagcgtcagaaaaaacagcaaactgtgactctgctgccagctgcggacctggatgatttttccaagcagctgcaacagtctatgagctctgcggactctacgcaggctggtggttctggtcaccatcatcaccatcattaa

SEQ ID NO: 3068 - DNA, 2421 bp, Artificial Sequence
  Description of Artificial Sequence: Synthetic polynucleotide
atgaaaatcgaagaaggtaaactggtaatctggattaacggcgataaaggctataacggtctcgctgaagtcggtaagaaattcgagaaagataccggaattaaagtcaccgttgagcatccggataaactggaagagaaattcccacaggttgcggcaactggcgatggccctgacattatcttctgggcacacgaccgctttggtggctacgctcaatctggcctgttggctgaaatcaccccggacaaagcgttccaggacaagctgtatccgtttacctgggatgccgtacgttacaacggcaagctgattgcttacccgatcgctgttgaagcgttatcgctgatttataacaaagatctgctgccgaacccgccaaaaacctgggaagagatcccggcgctggataaagaactgaaagcgaaaggtaagagcgcgctgatgttcaacctgcaagaaccgtacttcacctggccgctgattgctgctgacgggggttatgcgttcaagtatgaaaacggcaagtacgacattaaagacgtgggcgtggataacgctggcgcgaaagcgggtctgaccttcctggttgacctgattaaaaacaaacacatgaatgcagacaccgattactccatcgcagaagctgcctttaataaaggcgaaacagcgatgaccatcaacggcccgtgggcatggtccaacatcgacaccagcaaagtgaattatggtgtaacggtactgccgaccttcaagggtcaaccatccaaaccgttcgttggcgtgctgagcgcaggtattaacgccgccagtccgaacaaagagctggcgaaagagttcctcgaaaactatctgctgactgatgaaggtctggaagcggttaataaagacaaaccgctgggtgccgtagcgctgaagtcttacgaggaagagttggcgaaagatccacgtattgccgccaccatggaaaacgcccagaaaggtgaaatcatgccgaacatcccgcagatgtccgctttctggtatgccgtgcgtactgcggtgatcaacgccgccagcggtcgtcagactgtcgatgaagccctgaaagacgcgcagactggtggttctggtgagaacctgtactttcaaagctcagataatgggcctcaaaaccagcgcaacgctccacgtataaccttcggtggcccgtctgactccacaggcagcaaccagaatggtgagcgtagtggagccaggtctaagcagcgccgtccccagggtctgccgaacaacacggcgagctggtttactgcgcttacccaacacggtaaagaagacttaaaattcccgcgtggccagggcgtcccgatcaacactaactcttccccggatgatcagattggttattaccgcagagcaactcgtcggattcgcggcggcgacggtaaaatgaaagatttgtctccgcgttggtacttttactatctcggcaccggtccggaagctggactgccctacggggcaaacaaggacgggatcatttgggtggctaccgaaggtgccctgaatactccaaaagatcatatcggcacccgtaaccctgctaataacgctgcgatcgttctgcaactgcctcagggtacaactctgccaaaaggcttctatgcagaagggtcgcgtggtggcagccaggcgagtagccgtagcagctcccgctctcgcaactcgtcccgtaactccactccgggctcttctcgcggcacgtccccggctcgtatggcaggtaacggtggtgacgctgctctggcgctgctactgctggacaggctgaaccagctggagtcgaagatgagtggtaaaggccaacagcagcagggccagaccgttaccaaaaagagcgcagctgaaatgtctaaaaaaccgcgacagaaacgtaccgcgactaaaggatgtaatgtaacacagtgcttcggtccacgaggtccggagcaaactcaaggaaactttggcgatgccgaattaaataagaaagggaccgactacaaacactggccgcaaattgcccagttcgccccatccgctagtgcattcttcggtatgagccgcatcagttcaaaagaaacgccaagtggtacgtggctgacctacaccggtgctatcaagcttgataaagatgacccgaactttaaagaccaggttattctgcttaacaaacatattgatgcctataaaactttcccgccgaccgaacccaaaaaggacaaaaagaaaaaagctgatgaaacccaggctctaccgcagcgtcagaaaaaacagcaaactgtgactctgctgccagctgcggacctggatgatttttccaagcagctgcaacagtctatgagctctgcggactctacgcaggctggtggttctggtcaccatcatcaccatcattaa

SEQ ID NO: 3069 - DNA, 2421 bp, Artificial Sequence
  Description of Artificial Sequence: Synthetic polynucleotide
atgaaaatcgaagaaggtaaactggtaatctggattaacggcgataaaggctataacggtctcgctgaagtcggtaagaaattcgagaaagataccggaattaaagtcaccgttgagcatccggataaactggaagagaaattcccacaggttgcggcaactggcgatggccctgacattatcttctgggcacacgaccgctttggtggctacgctcaatctggcctgttggctgaaatcaccccggacaaagcgttccaggacaagctgtatccgtttacctgggatgccgtacgttacaacggcaagctgattgcttacccgatcgctgttgaagcgttatcgctgatttataacaaagatctgctgccgaacccgccaaaaacctgggaagagatcccggcgctggataaagaactgaaagcgaaaggtaagagcgcgctgatgttcaacctgcaagaaccgtacttcacctggccgctgattgctgctgacgggggttatgcgttcaagtatgaaaacggcaagtacgacattaaagacgtgggcgtggataacgctggcgcgaaagcgggtctgaccttcctggttgacctgattaaaaacaaacacatgaatgcagacaccgattactccatcgcagaagctgcctttaataaaggcgaaacagcgatgaccatcaacggcccgtgggcatggtccaacatcgacaccagcaaagtgaattatggtgtaacggtactgccgaccttcaagggtcaaccatccaaaccgttcgttggcgtgctgagcgcaggtattaacgccgccagtccgaacaaagagctggcgaaagagttcctcgaaaactatctgctgactgatgaaggtctggaagcggttaataaagacaaaccgctgggtgccgtagcgctgaagtcttacgaggaagagttggcgaaagatccacgtattgccgccaccatggaaaacgcccagaaaggtgaaatcatgccgaacatcccgcagatgtccgctttctggtatgccgtgcgtactgcggtgatcaacgccgccagcggtcgtcagactgtcgatgaagccctgaaagacgcgcagactggtggttctggtgagaacctgtactttcaaagctcagataatgggcctcaaaaccagcgcaacgctccacgtataaccttcggtggcccgtctgactccacaggcagcaaccagaatggtgagcgtagtggagccaggtctaagcagcgccgtccccagggtctgccgaacaacacggcgagctggtttactgcgcttacccaacacggtaaagaagacttaaaattcccgcgtggccagggcgtcccgatcaacactaactcttccccggatgatcagattggttattaccgcagagcaactcgtcggattcgcggcggcgacggtaaaatgaaagatttgtctccgcgttggtacttttactatctcggcaccggtccggaagctggactgccctacggggcaaacaaggacgggatcatttgggtggctaccgaaggtgccctgaatactccaaaagatcatatcggcacccgtaaccctgctaattatgctgcgatcgttctgcaactgcctcagggtacaactctgccaaaaggcttctatgcagaagggtcgcgtggtggcagccaggcgagtagccgtagcagctcccgctctcgcaactcgtcccgtaactccactccgggctcttctcgcggcacgtccccggctcgtatggcaggtaacggtggtgacgctgctctggcgctgctactgctggacaggctgaaccagctggagtcgaagatgagtggtaaaggccaacagcagcagggccagaccgttaccaaaaagagcgcagctgaagcatctaaaaaaccgcgacagaaacgtaccgcgactaaagcgtacaatgtaacacaggccttcggtcgtcgaggtccggagcaaactcaaggaaactttggcgatcaggaattaatccgccaggggaccgactacaaacactggccgcaaattgcccagttcgccccatccgctagtgcattcttcggtatgagccgcatcggcatggaagtaacgccaagtggtacgtggctgacctacaccggtgctatcaagcttgatgacaaggacccgaactttaaagaccaggttattctgcttaacaaacatattgatgcctataaaactttcccgccgaccgaacccaaaaaggacaaaaagaaaaaagctgatgaaacccaggctctaccgcagcgtcagaaaaaacagcaaactgtgactctgctgccagctgcggacctggatgatttttccaagcagctgcaacagtctatgagctctgcggactctacgcaggctggtggttctggtcaccatcatcaccatcattaa

SEQ ID NO: 3070 - DNA, 2421 bp, Artificial Sequence
  Description of Artificial Sequence: Synthetic polynucleotide
atgaaaatcgaagaaggtaaactggtaatctggattaacggcgataaaggctataacggtctcgctgaagtcggtaagaaattcgagaaagataccggaattaaagtcaccgttgagcatccggataaactggaagagaaattcccacaggttgcggcaactggcgatggccctgacattatcttctgggcacacgaccgctttggtggctacgctcaatctggcctgttggctgaaatcaccccggacaaagcgttccaggacaagctgtatccgtttacctgggatgccgtacgttacaacggcaagctgattgcttacccgatcgctgttgaagcgttatcgctgatttataacaaagatctgctgccgaacccgccaaaaacctgggaagagatcccggcgctggataaagaactgaaagcgaaaggtaagagcgcgctgatgttcaacctgcaagaaccgtacttcacctggccgctgattgctgctgacgggggttatgcgttcaagtatgaaaacggcaagtacgacattaaagacgtgggcgtggataacgctggcgcgaaagcgggtctgaccttcctggttgacctgattaaaaacaaacacatgaatgcagacaccgattactccatcgcagaagctgcctttaataaaggcgaaacagcgatgaccatcaacggcccgtgggcatggtccaacatcgacaccagcaaagtgaattatggtgtaacggtactgccgaccttcaagggtcaaccatccaaaccgttcgttggcgtgctgagcgcaggtattaacgccgccagtccgaacaaagagctggcgaaagagttcctcgaaaactatctgctgactgatgaaggtctggaagcggttaataaagacaaaccgctgggtgccgtagcgctgaagtcttacgaggaagagttggcgaaagatccacgtattgccgccaccatggaaaacgcccagaaaggtgaaatcatgccgaacatcccgcagatgtccgctttctggtatgccgtgcgtactgcggtgatcaacgccgccagcggtcgtcagactgtcgatgaagccctgaaagacgcgcagactggtggttctggtgagaacctgtactttcaaagctcagataatgggcctcaaaaccagcgcaacgctccacgtataaccttcggtggcccgtctgactccacaggcagcaaccagaatggtgagcgtagtggagccaggtctaagcagcgccgtccccagggtctgccgaacaacacggcgagctggtttactgcgcttacccaacacggtaaagaagacttaaaattcccgcgtggccagggcgtcccgatcaacactaactcttccccggatgatcagattggttattaccgcagagcaactcgtcggattcgcggcggcgacggtaaaatgaaagatttgtctccgcgttggtacttttactatctcggcaccggtccggaagctggactgccctacggggcaaacaaggacgggatcatttgggtggctaccgaaggtgccctgaatactccaaaagatcatatcggcacccgtaaccctgctaataacgctgcgatcgttctgcaactgcctcagggtacaactctgccaaaaggcttctatgcagaagggtcgcgtggtggcagccaggcgagtagccgtagcagctcccgctctcgcaactcgtcccgtaactccactccgggctcttctcgcggcacgtccccggctcgtatggcaggtaacggtggtgacgctgctctggcgctgctactgctggacaggctgaaccagctggagtcgaagatgagtggtaaaggccaacagcagcagggccagaccgttaccaaaaagagcgcagctgaagcatctaaaaaaccgcgacagaaacgtaccgcgactaaagcgtacaatgtaacacaggccttcggtcgtcgaggtccggagcaaactcaaggaaactttggcgatcaggaattaatccgccaggggaccgactacaaacactggccgcaaattgcccagttcgccccatccgctagtgcattcttcggtatgagccgcatcggcatggaagtaacgccaaatggtacgtggctgacctacaccggtgctatcaagcttgatgacaaggacccgaactttaaagaccaggttattctgcttaacaaacatattgatgcctataaaactttcccgccgaccgaacccaaaaaggacaaaaagaaaaaagctgatgaaacccaggctctaccgcagcgtcagaaaaaacagcaaactgtgactctgctgccagctgcggacctggatgatttttccaagcagctgcaacagtctatgagctctgcggactctacgcaggctggtggttctggtcaccatcatcaccatcattaa

SEQ ID NO: 3071 - DNA, 2421 bp, Artificial Sequence
  Description of Artificial Sequence: Synthetic polynucleotide
atgaaaatcgaagaaggtaaactggtaatctggattaacggcgataaaggctataacggtctcgctgaagtcggtaagaaattcgagaaagataccggaattaaagtcaccgttgagcatccggataaactggaagagaaattcccacaggttgcggcaactggcgatggccctgacattatcttctgggcacacgaccgctttggtggctacgctcaatctggcctgttggctgaaatcaccccggacaaagcgttccaggacaagctgtatccgtttacctgggatgccgtacgttacaacggcaagctgattgcttacccgatcgctgttgaagcgttatcgctgatttataacaaagatctgctgccgaacccgccaaaaacctgggaagagatcccggcgctggataaagaactgaaagcgaaaggtaagagcgcgctgatgttcaacctgcaagaaccgtacttcacctggccgctgattgctgctgacgggggttatgcgttcaagtatgaaaacggcaagtacgacattaaagacgtgggcgtggataacgctggcgcgaaagcgggtctgaccttcctggttgacctgattaaaaacaaacacatgaatgcagacaccgattactccatcgcagaagctgcctttaataaaggcgaaacagcgatgaccatcaacggcccgtgggcatggtccaacatcgacaccagcaaagtgaattatggtgtaacggtactgccgaccttcaagggtcaaccatccaaaccgttcgttggcgtgctgagcgcaggtattaacgccgccagtccgaacaaagagctggcgaaagagttcctcgaaaactatctgctgactgatgaaggtctggaagcggttaataaagacaaaccgctgggtgccgtagcgctgaagtcttacgaggaagagttggcgaaagatccacgtattgccgccaccatggaaaacgcccagaaaggtgaaatcatgccgaacatcccgcagatgtccgctttctggtatgccgtgcgtactgcggtgatcaacgccgccagcggtcgtcagactgtcgatgaagccctgaaagacgcgcagactggtggttctggtgagaacctgtactttcaaagctcagataatgggcctcaaaaccagcgcaacgctccacgtataaccttcggtggcccgtctgactccacaggcagcaaccagaatggtgagcgtagtggagccaggtctaagcagcgccgtccccagggtctgccgaacaacacggcgagctggtttactgcgcttacccaacacggtaaagaagacttaaaattcccgcgtggccagggcgtcccgatcaacactaactcttccccggatgatcagattggttattaccgcagagcaactcgtcggattcgcggcggcgacggtaaaatgaaagatttgtctccgcgttggtacttttactatctcggcaccggtccggaagctggactgccctacggggcaaacaaggacgggatcatttgggtggctaccgaaggtgccctgaatactccaaaagatcatatcggcacccgtaaccctgctaattttgctgcgatcgttctgcaactgcctcagggtacaactctgccaaaaggcttctatgcagaagggtcgcgtggtggcagccaggcgagtagccgtagcagctcccgctctcgcaactcgtcccgtaactccactccgggctcttctcgcggcacgtccccggctcgtatggcaggtaacggtggtgacgctgctctggcgctgctactgctggacaggctgaaccagctggagtcgaagatgagtggtaaaggccaacagcagcagggccagaccgttaccaaaaagagcgcagctgaagcatctaaaaaaccgcgacagaaacgtaccgcgactaaagcgtacaatgtaacacaggccttcggtcgtcgaggtccggagcaaactcaaggaaactttggcgatcaggaattaatccgccaggggaccgactacaaacactggccgcaaattgcccagttcgccccatccgctagtgcattcttcggtatgagccgcatcggcatggaagtaacgccaagtggtacgtggctgacctacaccggtgctatcaagcttgatgacaaggacccgaactttaaagaccaggttattctgcttaacaaacatattgatgcctataaaactttcccgccgaccgaacccaaaaaggacaaaaagaaaaaagctgatgaaacccaggctctaccgcagcgtcagaaaaaacagcaaactgtgactctgctgccagctgcggacctggatgatttttccaagcagctgcaacagtctatgagctctgcggactctacgcaggctggtggttctggtcaccatcatcaccatcattaa

SEQ ID NO: 3072 - DNA, 2421 bp, Artificial Sequence
  Description of Artificial Sequence: Synthetic polynucleotide
atgaaaatcgaagaaggtaaactggtaatctggattaacggcgataaaggctataacggtctcgctgaagtcggtaagaaattcgagaaagataccggaattaaagtcaccgttgagcatccggataaactggaagagaaattcccacaggttgcggcaactggcgatggccctgacattatcttctgggcacacgaccgctttggtggctacgctcaatctggcctgttggctgaaatcaccccggacaaagcgttccaggacaagctgtatccgtttacctgggatgccgtacgttacaacggcaagctgattgcttacccgatcgctgttgaagcgttatcgctgatttataacaaagatctgctgccgaacccgccaaaaacctgggaagagatcccggcgctggataaagaactgaaagcgaaaggtaagagcgcgctgatgttcaacctgcaagaaccgtacttcacctggccgctgattgctgctgacgggggttatgcgttcaagtatgaaaacggcaagtacgacattaaagacgtgggcgtggataacgctggcgcgaaagcgggtctgaccttcctggttgacctgattaaaaacaaacacatgaatgcagacaccgattactccatcgcagaagctgcctttaataaaggcgaaacagcgatgaccatcaacggcccgtgggcatggtccaacatcgacaccagcaaagtgaattatggtgtaacggtactgccgaccttcaagggtcaaccatccaaaccgttcgttggcgtgctgagcgcaggtattaacgccgccagtccgaacaaagagctggcgaaagagttcctcgaaaactatctgctgactgatgaaggtctggaagcggttaataaagacaaaccgctgggtgccgtagcgctgaagtcttacgaggaagagttggcgaaagatccacgtattgccgccaccatggaaaacgcccagaaaggtgaaatcatgccgaacatcccgcagatgtccgctttctggtatgccgtgcgtactgcggtgatcaacgccgccagcggtcgtcagactgtcgatgaagccctgaaagacgcgcagactggtggttctggtgagaacctgtactttcaaagctcagataatgggcctcaaaaccagcgcaacgctccacgtataaccttcggtggcccgtctgactccacaggcagcaaccagaatggtgagcgtagtggagccaggtctaagcagcgccgtccccagggtctgccgaacaacacggcgagctggtttactggccttacccaaaatggtaaagaagacttaaaattcccgcccggccagggcgtcccgatcaacactaactcttccccggatgatcagattggttattaccgcagagcaactcgtcggattcgcggcggcgacggtaaaatgaaagatttgccaccgcgttggtacttttactatctcggcaccggtccgcatgctgatctgccctacgggcaaaaacaggacggggtgttttgggtggctcgacctggtgccctgaatactccaaaagatcatatcggcacccgtaaccctgctaataacgctgcgatcccgctgcaactgcctccgggtacaaagctgccaaaaggcttctatgcagaagggtcgcgtggtggcagccaggcgagtagccgtagcagctcccgctctcgcaactcgtcccgtaactccactccgggctcttctcgcggcacgtccccggctcgtatggcaggtaacggtggtgacgctgctctggcgctgctactgctggacaggctgaaccagctggagtcgaagatgagtggtaaaggccaacagcagcagggccagaccgttaccaaaaagagcgcagctgaagcatctaaaaaaccgcgacagaaacgtaccgcgactaaagcgtacaatgtaacacaggccttcggtcgtcgaggtccggagcaaactcaaggaaactttggcgatcaggaattaatccgccaggggaccgactacaaacactggccgcaaattgcccagttcgccccatccgctagtgcattcttcggtatgagccgcatcggcatggaagtaacgccaagtggtacgtggctgacctacaccggtgctatcaagcttgatgacaaggacccgaactttaaagaccaggttattctgcttaacaaacatattgatgcctataaaactttcccgccgaccgaacccaaaaaggacaaaaagaaaaaagctgatgaaacccaggctctaccgcagcgtcagaaaaaacagcaaactgtgactctgctgccagctgcggacctggatgatttttccaagcagctgcaacagtctatgagctctgcggactctacgcaggctggtggttctggtcaccatcatcaccatcattaa

SEQ ID NO: 3073 - DNA, 2421 bp, Artificial Sequence
  Description of Artificial Sequence: Synthetic polynucleotide
atgaaaatcgaagaaggtaaactggtaatctggattaacggcgataaaggctataacggtctcgctgaagtcggtaagaaattcgagaaagataccggaattaaagtcaccgttgagcatccggataaactggaagagaaattcccacaggttgcggcaactggcgatggccctgacattatcttctgggcacacgaccgctttggtggctacgctcaatctggcctgttggctgaaatcaccccggacaaagcgttccaggacaagctgtatccgtttacctgggatgccgtacgttacaacggcaagctgattgcttacccgatcgctgttgaagcgttatcgctgatttataacaaagatctgctgccgaacccgccaaaaacctgggaagagatcccggcgctggataaagaactgaaagcgaaaggtaagagcgcgctgatgttcaacctgcaagaaccgtacttcacctggccgctgattgctgctgacgggggttatgcgttcaagtatgaaaacggcaagtacgacattaaagacgtgggcgtggataacgctggcgcgaaagcgggtctgaccttcctggttgacctgattaaaaacaaacacatgaatgcagacaccgattactccatcgcagaagctgcctttaataaaggcgaaacagcgatgaccatcaacggcccgtgggcatggtccaacatcgacaccagcaaagtgaattatggtgtaacggtactgccgaccttcaagggtcaaccatccaaaccgttcgttggcgtgctgagcgcaggtattaacgccgccagtccgaacaaagagctggcgaaagagttcctcgaaaactatctgctgactgatgaaggtctggaagcggttaataaagacaaaccgctgggtgccgtagcgctgaagtcttacgaggaagagttggcgaaagatccacgtattgccgccaccatggaaaacgcccagaaaggtgaaatcatgccgaacatcccgcagatgtccgctttctggtatgccgtgcgtactgcggtgatcaacgccgccagcggtcgtcagactgtcgatgaagccctgaaagacgcgcagactggtggttctggtgagaacctgtactttcaaagctcagataatgggcctcaaaaccagcgcaacgctccacgtataaccttcggtggcccgtctgactccacaggcagcaaccagaatggtgagcgtagtggagccaggtctaagcagcgccgtccccagggtctgccgaacaacacggcgagctggtttactgcgcttacccaacacggtaaagaagacttaaaattcccgcgtggccagggcgtcccgatcaacactaactcttccccggatgatcagattggttattaccgcagagcaactcgtcggattcgcggcggcgacggtaaaatgaaagatttgtctccgcgttggtacttttactatctcggcaccggtccggaagctggactgccctacggggcaaacaaggacgggatcatttgggtggctaccgaaggtgccctgaatactccaaaagatcatatcggcacccgtaaccctgctaataacgctgcgatcgttacgcaactgcctcagggtacaactctgccaaaaggcttctatgcagaagggtcgcgtggtggcagccaggcgagtagccgtagcagctcccgctctcgcaactcgtcccgtaactccactccgggctcttctcgcggcacgtccccggctcgtatggcaggtaacggtggtgacgctgctctggcgctgctactgctggacaggctgaaccagctggagtcgaagatgagtggtaaaggccaacagcagcagggccagaccgttaccaaaaagagcgcagctgaagcatctaaaaaaccgcgacagaaacgtaccgcgactaaagcgtacaatgtaacacaggccttcggtcgtcgaggtccggagcaaactcaaggaaactttggcgatcaggaattaatccgccaggggaccgactacaaacactggccgcaaattgcccagttcgccccatccgctagtgcattcttcggtatgagccgcatcggcatggaagtaacgccaagtggtacgtggctgacctacaccggtgctatcaagcttgatgacaaggacccgaactttaaagaccaggttattctgcttaacaaacatattgatgcctataaaactttcccgccgaccgaacccaaaaaggacaaaaagaaaaaagctgatgaaacccaggctctaccgcagcgtcagaaaaaacagcaaactgtgactctgctgccagctgcggacctggatgatttttccaagcagctgcaacagtctatgagctctgcggactctacgcaggctggtggttctggtcaccatcatcaccatcattaa

SEQ ID NO: 3074 - DNA, 2421 bp, Artificial Sequence
  Description of Artificial Sequence: Synthetic polynucleotide
atgaaaatcgaagaaggtaaactggtaatctggattaacggcgataaaggctataacggtctcgctgaagtcggtaagaaattcgagaaagataccggaattaaagtcaccgttgagcatccggataaactggaagagaaattcccacaggttgcggcaactggcgatggccctgacattatcttctgggcacacgaccgctttggtggctacgctcaatctggcctgttggctgaaatcaccccggacaaagcgttccaggacaagctgtatccgtttacctgggatgccgtacgttacaacggcaagctgattgcttacccgatcgctgttgaagcgttatcgctgatttataacaaagatctgctgccgaacccgccaaaaacctgggaagagatcccggcgctggataaagaactgaaagcgaaaggtaagagcgcgctgatgttcaacctgcaagaaccgtacttcacctggccgctgattgctgctgacgggggttatgcgttcaagtatgaaaacggcaagtacgacattaaagacgtgggcgtggataacgctggcgcgaaagcgggtctgaccttcctggttgacctgattaaaaacaaacacatgaatgcagacaccgattactccatcgcagaagctgcctttaataaaggcgaaacagcgatgaccatcaacggcccgtgggcatggtccaacatcgacaccagcaaagtgaattatggtgtaacggtactgccgaccttcaagggtcaaccatccaaaccgttcgttggcgtgctgagcgcaggtattaacgccgccagtccgaacaaagagctggcgaaagagttcctcgaaaactatctgctgactgatgaaggtctggaagcggttaataaagacaaaccgctgggtgccgtagcgctgaagtcttacgaggaagagttggcgaaagatccacgtattgccgccaccatggaaaacgcccagaaaggtgaaatcatgccgaacatcccgcagatgtccgctttctggtatgccgtgcgtactgcggtgatcaacgccgccagcggtcgtcagactgtcgatgaagccctgaaagacgcgcagactggtggttctggtgagaacctgtactttcaaagctcagataatgggcctcaaaaccagcgcaacgctccacgtataaccttcggtggcccgtctgactccacaggcagcaaccagaatggtgagcgtagtggagccaggtctaagcagcgccgtccccagggtctgccgaacaacacggcgagctggtttactgcgcttacccaacacggtaaagaagacttaaaattcccgcgtggccagggcgtcccgatcaacactaactcttccccggatgatcagattggtgaataccgcagagcaactcgtcggattcgcggcggcgacggtaaaatgaaagatttgtctccgcgttggtacttttactatctcggcaccggtccggaagctggactgccctacggggcaaacaaggacgggatcatttgggtggctaccgaaggtgccctgaatactccaaaagatcatatcggcacccgtaaccctgctaataacgctgcgatcgttctgcaactgcctcagggtacaactctgccaaaaggcttctatgcagaagggtcgcgtggtggcagccaggcgagtagccgtagcagctcccgctctcgcaactcgtcccgtaactccactccgggctcttctcgcggcacgtccccggctcgtatggcaggtaacggtggtgacgctgctctggcgctgctactgctggacaggctgaaccagctggagtcgaagatgagtggtaaaggccaacagcagcagggccagaccgttaccaaaaagagcgcagctgaagcatctaaaaaaccgcgacagaaacgtaccgcgactaaagcgtacaatgtaacacaggccttcggtcgtcgaggtccggagcaaactcaaggaaactttggcgatcaggaattaatccgccaggggaccgactacaaacactggccgcaaattgcccagttcgccccatccgctagtgcattcttcggtatgagccgcatcggcatggaagtaacgccaagtggtacgtggctgacctacaccggtgctatcaagcttgatgacaaggacccgaactttaaagaccaggttattctgcttaacaaacatattgatgcctataaaactttcccgccgaccgaacccaaaaaggacaaaaagaaaaaagctgatgaaacccaggctctaccgcagcgtcagaaaaaacagcaaactgtgactctgctgccagctgcggacctggatgatttttccaagcagctgcaacagtctatgagctctgcggactctacgcaggctggtggttctggtcaccatcatcaccatcattaa

SEQ ID NO: 3075 - DNA, 2421 bp, Artificial Sequence
  Description of Artificial Sequence: Synthetic polynucleotide
atgaaaatcgaagaaggtaaactggtaatctggattaacggcgataaaggctataacggtctcgctgaagtcggtaagaaattcgagaaagataccggaattaaagtcaccgttgagcatccggataaactggaagagaaattcccacaggttgcggcaactggcgatggccctgacattatcttctgggcacacgaccgctttggtggctacgctcaatctggcctgttggctgaaatcaccccggacaaagcgttccaggacaagctgtatccgtttacctgggatgccgtacgttacaacggcaagctgattgcttacccgatcgctgttgaagcgttatcgctgatttataacaaagatctgctgccgaacccgccaaaaacctgggaagagatcccggcgctggataaagaactgaaagcgaaaggtaagagcgcgctgatgttcaacctgcaagaaccgtacttcacctggccgctgattgctgctgacgggggttatgcgttcaagtatgaaaacggcaagtacgacattaaagacgtgggcgtggataacgctggcgcgaaagcgggtctgaccttcctggttgacctgattaaaaacaaacacatgaatgcagacaccgattactccatcgcagaagctgcctttaataaaggcgaaacagcgatgaccatcaacggcccgtgggcatggtccaacatcgacaccagcaaagtgaattatggtgtaacggtactgccgaccttcaagggtcaaccatccaaaccgttcgttggcgtgctgagcgcaggtattaacgccgccagtccgaacaaagagctggcgaaagagttcctcgaaaactatctgctgactgatgaaggtctggaagcggttaataaagacaaaccgctgggtgccgtagcgctgaagtcttacgaggaagagttggcgaaagatccacgtattgccgccaccatggaaaacgcccagaaaggtgaaatcatgccgaacatcccgcagatgtccgctttctggtatgccgtgcgtactgcggtgatcaacgccgccagcggtcgtcagactgtcgatgaagccctgaaagacgcgcagactggtggttctggtgagaacctgtactttcaaagctcagataatgggcctcaaaaccagcgcaacgctccacgtataaccttcggtggcccgtctgactccacaggcagcaaccagaatggtgagcgtagtggagccaggtctaagcagcgccgtccccagggtctgccgaacaacacggcgagctggtttactgcgcttacccaacacggtaaagaagacttaaaattcccgcgtggccagggcgtcccgatcaacactaactcttccccggatgatcagattggttattaccgcagagcaactcgtcggattcgcggcggcgacggtaaaatgaaagatttgtctccgcgttggtacttttactatctcggcaccggtccggaagctggactgccctacggggcaagcaaggacgggatcatttgggtggctaccgaaggtgccctgaatactccaaaagatcatatcggcacccgtaaccctgctaataacgctgcgatcgttctgcaactgcctcagggtacaactctgccaaaaggcttctatgcagaagggtcgcgtggtggcagccaggcgagtagccgtagcagctcccgctctcgcaactcgtcccgtaactccactccgggctcttctcgcggcacgtccccggctcgtatggcaggtaacggtggtgacgctgctctggcgctgctactgctggacaggctgaaccagctggagtcgaagatgagtggtaaaggccaacagcagcagggccagaccgttaccaaaaagagcgcagctgaagcatctaaaaaaccgcgacagaaacgtaccgcgactaaagcgtacaatgtaacacaggccttcggtcgtcgaggtccggagcaaactcaaggaaactttggcgatcaggaattaatccgccaggggaccgactacaaacactggccgcaaattgcccagttcgccccatccgctagtgcattcttcggtatgagccgcatcggcatggaagtaacgccaagtggtacgtggctgacctacaccggtgctatcaagcttgatgacaaggacccgaactttaaagaccaggttattctgcttaacaaacatattgatgcctataaaactttcccgccgaccgaacccaaaaaggacaaaaagaaaaaagctgatgaaacccaggctctaccgcagcgtcagaaaaaacagcaaactgtgactctgctgccagctgcggacctggatgatttttccaagcagctgcaacagtctatgagctctgcggactctacgcaggctggtggttctggtcaccatcatcaccatcattaa

SEQ ID NO: 3076 - DNA, 2421 bp, Artificial Sequence
  Description of Artificial Sequence: Synthetic polynucleotide
atgaaaatcgaagaaggtaaactggtaatctggattaacggcgataaaggctataacggtctcgctgaagtcggtaagaaattcgagaaagataccggaattaaagtcaccgttgagcatccggataaactggaagagaaattcccacaggttgcggcaactggcgatggccctgacattatcttctgggcacacgaccgctttggtggctacgctcaatctggcctgttggctgaaatcaccccggacaaagcgttccaggacaagctgtatccgtttacctgggatgccgtacgttacaacggcaagctgattgcttacccgatcgctgttgaagcgttatcgctgatttataacaaagatctgctgccgaacccgccaaaaacctgggaagagatcccggcgctggataaagaactgaaagcgaaaggtaagagcgcgctgatgttcaacctgcaagaaccgtacttcacctggccgctgattgctgctgacgggggttatgcgttcaagtatgaaaacggcaagtacgacattaaagacgtgggcgtggataacgctggcgcgaaagcgggtctgaccttcctggttgacctgattaaaaacaaacacatgaatgcagacaccgattactccatcgcagaagctgcctttaataaaggcgaaacagcgatgaccatcaacggcccgtgggcatggtccaacatcgacaccagcaaagtgaattatggtgtaacggtactgccgaccttcaagggtcaaccatccaaaccgttcgttggcgtgctgagcgcaggtattaacgccgccagtccgaacaaagagctggcgaaagagttcctcgaaaactatctgctgactgatgaaggtctggaagcggttaataaagacaaaccgctgggtgccgtagcgctgaagtcttacgaggaagagttggcgaaagatccacgtattgccgccaccatggaaaacgcccagaaaggtgaaatcatgccgaacatcccgcagatgtccgctttctggtatgccgtgcgtactgcggtgatcaacgccgccagcggtcgtcagactgtcgatgaagccctgaaagacgcgcagactggtggttctggtgagaacctgtactttcaaagctcagataatgggcctcaaaaccagcgcaacgctccacgtataaccttcggtggcccgtctgactccacaggcagcaaccagaatggtgagcgtagtggagccaggtctaagcagcgccgtccccagggtctgccgaacaacacggcgagctggtttactgcgcttacccaacacggtaaagaagacttaaaattcccgcgtggccagggcgtcccgatcaacactaactcttccccggatgatcagattggttattaccgcagagcaactcgtcggattcgcggcggcgacggtaaaatgaaagatttgtctccgcgttggtacttttactatctcggcaccggtccggaagctggactgccctacggggcaaacaaggacgggatcatttgggtggctaccgaaggtgccctgaatactccaaaagatcatatcggcacccgtaaccctgctaataacgctgcgatccatctgcaactgcctcagggtacaactctgccaaaaggcttctatgcagaagggtcgcgtggtggcagccaggcgagtagccgtagcagctcccgctctcgcaactcgtcccgtaactccactccgggctcttctcgcggcacgtccccggctcgtatggcaggtaacggtggtgacgctgctctggcgctgctactgctggacaggctgaaccagctggagtcgaagatgagtggtaaaggccaacagcagcagggccagaccgttaccaaaaagagcgcagctgaagcatctaaaaaaccgcgacagaaacgtaccgcgactaaagcgtacaatgtaacacaggccttcggtcgtcgaggtccggagcaaactcaaggaaactttggcgatcaggaattaatccgccaggggaccgactacaaacactggccgcaaattgcccagttcgccccatccgctagtgcattcttcggtatgagccgcatcggcatggaagtaacgccaagtggtacgtggctgacctacaccggtgctatcaagcttgatgacaaggacccgaactttaaagaccaggttattctgcttaacaaacatattgatgcctataaaactttcccgccgaccgaacccaaaaaggacaaaaagaaaaaagctgatgaaacccaggctctaccgcagcgtcagaaaaaacagcaaactgtgactctgctgccagctgcggacctggatgatttttccaagcagctgcaacagtctatgagctctgcggactctacgcaggctggtggttctggtcaccatcatcaccatcattaa

SEQ ID NO: 3077 - DNA, 2421 bp, Artificial Sequence
  Description of Artificial Sequence: Synthetic polynucleotide
atgaaaatcgaagaaggtaaactggtaatctggattaacggcgataaaggctataacggtctcgctgaagtcggtaagaaattcgagaaagataccggaattaaagtcaccgttgagcatccggataaactggaagagaaattcccacaggttgcggcaactggcgatggccctgacattatcttctgggcacacgaccgctttggtggctacgctcaatctggcctgttggctgaaatcaccccggacaaagcgttccaggacaagctgtatccgtttacctgggatgccgtacgttacaacggcaagctgattgcttacccgatcgctgttgaagcgttatcgctgatttataacaaagatctgctgccgaacccgccaaaaacctgggaagagatcccggcgctggataaagaactgaaagcgaaaggtaagagcgcgctgatgttcaacctgcaagaaccgtacttcacctggccgctgattgctgctgacgggggttatgcgttcaagtatgaaaacggcaagtacgacattaaagacgtgggcgtggataacgctggcgcgaaagcgggtctgaccttcctggttgacctgattaaaaacaaacacatgaatgcagacaccgattactccatcgcagaagctgcctttaataaaggcgaaacagcgatgaccatcaacggcccgtgggcatggtccaacatcgacaccagcaaagtgaattatggtgtaacggtactgccgaccttcaagggtcaaccatccaaaccgttcgttggcgtgctgagcgcaggtattaacgccgccagtccgaacaaagagctggcgaaagagttcctcgaaaactatctgctgactgatgaaggtctggaagcggttaataaagacaaaccgctgggtgccgtagcgctgaagtcttacgaggaagagttggcgaaagatccacgtattgccgccaccatggaaaacgcccagaaaggtgaaatcatgccgaacatcccgcagatgtccgctttctggtatgccgtgcgtactgcggtgatcaacgccgccagcggtcgtcagactgtcgatgaagccctgaaagacgcgcagactggtggttctggtgagaacctgtactttcaaagctcagataatgggcctcaaaaccagcgcaacgctccacgtataaccttcggtggcccgtctgactccacaggcagcaaccagaatggtgagcgtagtggagccaggtctaagcagcgccgtccccagggtctgccgaacaacacggcgagctggtttactgcgcttacccaacacggtaaagaagacttaaaattcccgcgtggccagggcgtcccgatcaacactaactcttccccggatgatcagattggttattaccgcagagcaactcgtcggattcgcggcggcgacggtaaaatgaaagatttgtctccgcgttggtacttttactatctcggcaccggtccggaagctggactgccctacggggcaaacaaggacgggatcatttgggtggctaccgaaggtgccctgaatactccaaaagatcatatcggcacccgtaaccctgctaataacgctgcgatcatgctgcaactgcctcagggtacaactctgccaaaaggcttctatgcagaagggtcgcgtggtggcagccaggcgagtagccgtagcagctcccgctctcgcaactcgtcccgtaactccactccgggctcttctcgcggcacgtccccggctcgtatggcaggtaacggtggtgacgctgctctggcgctgctactgctggacaggctgaaccagctggagtcgaagatgagtggtaaaggccaacagcagcagggccagaccgttaccaaaaagagcgcagctgaagcatctaaaaaaccgcgacagaaacgtaccgcgactaaagcgtacaatgtaacacaggccttcggtcgtcgaggtccggagcaaactcaaggaaactttggcgatcaggaattaatccgccaggggaccgactacaaacactggccgcaaattgcccagttcgccccatccgctagtgcattcttcggtatgagccgcatcggcatggaagtaacgccaagtggtacgtggctgacctacaccggtgctatcaagcttgatgacaaggacccgaactttaaagaccaggttattctgcttaacaaacatattgatgcctataaaactttcccgccgaccgaacccaaaaaggacaaaaagaaaaaagctgatgaaacccaggctctaccgcagcgtcagaaaaaacagcaaactgtgactctgctgccagctgcggacctggatgatttttccaagcagctgcaacagtctatgagctctgcggactctacgcaggctggtggttctggtcaccatcatcaccatcattaa

SEQ ID NO: 3078 - DNA, 2421 bp, Artificial Sequence
  Description of Artificial Sequence: Synthetic polynucleotide
atgaaaatcgaagaaggtaaactggtaatctggattaacggcgataaaggctataacggtctcgctgaagtcggtaagaaattcgagaaagataccggaattaaagtcaccgttgagcatccggataaactggaagagaaattcccacaggttgcggcaactggcgatggccctgacattatcttctgggcacacgaccgctttggtggctacgctcaatctggcctgttggctgaaatcaccccggacaaagcgttccaggacaagctgtatccgtttacctgggatgccgtacgttacaacggcaagctgattgcttacccgatcgctgttgaagcgttatcgctgatttataacaaagatctgctgccgaacccgccaaaaacctgggaagagatcccggcgctggataaagaactgaaagcgaaaggtaagagcgcgctgatgttcaacctgcaagaaccgtacttcacctggccgctgattgctgctgacgggggttatgcgttcaagtatgaaaacggcaagtacgacattaaagacgtgggcgtggataacgctggcgcgaaagcgggtctgaccttcctggttgacctgattaaaaacaaacacatgaatgcagacaccgattactccatcgcagaagctgcctttaataaaggcgaaacagcgatgaccatcaacggcccgtgggcatggtccaacatcgacaccagcaaagtgaattatggtgtaacggtactgccgaccttcaagggtcaaccatccaaaccgttcgttggcgtgctgagcgcaggtattaacgccgccagtccgaacaaagagctggcgaaagagttcctcgaaaactatctgctgactgatgaaggtctggaagcggttaataaagacaaaccgctgggtgccgtagcgctgaagtcttacgaggaagagttggcgaaagatccacgtattgccgccaccatggaaaacgcccagaaaggtgaaatcatgccgaacatcccgcagatgtccgctttctggtatgccgtgcgtactgcggtgatcaacgccgccagcggtcgtcagactgtcgatgaagccctgaaagacgcgcagactggtggttctggtgagaacctgtactttcaaagctcagataatgggcctcaaaaccagcgcaacgctccacgtataaccttcggtggcccgtctgactccacaggcagcaaccagaatggtgagcgtagtggagccaggtctaagcagcgccgtccccagggtctgccgaacaacacggcgagctggtttactggccttacccaacacggtaaagaagacttaaaattcccgcccggccagggcgtcccgatcaacactaactcttccccggatgatcagattggttattaccgcagagcaactcgtcggattcgcggcggcgacggtaaaatgaaagatttgcctccgcgttggtacttttactatctcggcaccggtccggaagctgatctgccctacgggcaagtgaaggacgggatcttttgggtggctgccgaaggtgccctgaatactccaaaagatcatatcggcacccgtaaccctgctaataacgctgcgatcccgctgcaactgcctccaggtacaactctgccaaaaggcttctatgcagaagggtcgcgtggtggcagccaggcgagtagccgtagcagctcccgctctcgcaactcgtcccgtaactccactccgggctcttctcgcggcacgtccccggctcgtatggcaggtaacggtggtgacgctgctctggcgctgctactgctggacaggctgaaccagctggagtcgaagatgagtggtaaaggccaacagcagcagggccagaccgttaccaaaaagagcgcagctgaagcatctaaaaaaccgcgacagaaacgtaccgcgactaaagcgtacaatgtaacacaggccttcggtcgtcgaggtccggagcaaactcaaggaaactttggcgatcaggaattaatccgccaggggaccgactacaaacactggccgcaaattgcccagttcgccccatccgctagtgcattcttcggtatgagccgcatcggcatggaagtaacgccaagtggtacgtggctgacctacaccggtgctatcaagcttgatgacaaggacccgaactttaaagaccaggttattctgcttaacaaacatattgatgcctataaaactttcccgccgaccgaacccaaaaaggacaaaaagaaaaaagctgatgaaacccaggctctaccgcagcgtcagaaaaaacagcaaactgtgactctgctgccagctgcggacctggatgatttttccaagcagctgcaacagtctatgagctctgcggactctacgcaggctggtggttctggtcaccatcatcaccatcattaa

SEQ ID NO: 3079 - DNA, 2421 bp, Artificial Sequence
  Description of Artificial Sequence: Synthetic polynucleotide
atgaaaatcgaagaaggtaaactggtaatctggattaacggcgataaaggctataacggtctcgctgaagtcggtaagaaattcgagaaagataccggaattaaagtcaccgttgagcatccggataaactggaagagaaattcccacaggttgcggcaactggcgatggccctgacattatcttctgggcacacgaccgctttggtggctacgctcaatctggcctgttggctgaaatcaccccggacaaagcgttccaggacaagctgtatccgtttacctgggatgccgtacgttacaacggcaagctgattgcttacccgatcgctgttgaagcgttatcgctgatttataacaaagatctgctgccgaacccgccaaaaacctgggaagagatcccggcgctggataaagaactgaaagcgaaaggtaagagcgcgctgatgttcaacctgcaagaaccgtacttcacctggccgctgattgctgctgacgggggttatgcgttcaagtatgaaaacggcaagtacgacattaaagacgtgggcgtggataacgctggcgcgaaagcgggtctgaccttcctggttgacctgattaaaaacaaacacatgaatgcagacaccgattactccatcgcagaagctgcctttaataaaggcgaaacagcgatgaccatcaacggcccgtgggcatggtccaacatcgacaccagcaaagtgaattatggtgtaacggtactgccgaccttcaagggtcaaccatccaaaccgttcgttggcgtgctgagcgcaggtattaacgccgccagtccgaacaaagagctggcgaaagagttcctcgaaaactatctgctgactgatgaaggtctggaagcggttaataaagacaaaccgctgggtgccgtagcgctgaagtcttacgaggaagagttggcgaaagatccacgtattgccgccaccatggaaaacgcccagaaaggtgaaatcatgccgaacatcccgcagatgtccgctttctggtatgccgtgcgtactgcggtgatcaacgccgccagcggtcgtcagactgtcgatgaagccctgaaagacgcgcagactggtggttctggtgagaacctgtactttcaaagctcagataatgggcctcaaaaccagcgcaacgctccacgtataaccttcggtggcccgtctgactccacaggcagcaaccagaatggtgagcgtagtggagccaggtctaagcagcgccgtccccagggtctgccgaacaacacggcgagctggtttactgcgcttacccaacacggtaaagaagacttaaaattcccgcgtggccagggcgtcccgatcaacactaactcttccccggatgatcagattggtcattaccgcagagcaactcgtcggattcgcggcggcgacggtaaaatgaaagatttgtctccgcgttggtacttttactatctcggcaccggtccggaagctggactgccctacggggcaaacaaggacgggatcatttgggtggctaccgaaggtgccctgaatactccaaaagatcatatcggcacccgtaaccctgctaataacgctgcgatcgttctgcaactgcctcagggtacaactctgccaaaaggcttctatgcagaagggtcgcgtggtggcagccaggcgagtagccgtagcagctcccgctctcgcaactcgtcccgtaactccactccgggctcttctcgcggcacgtccccggctcgtatggcaggtaacggtggtgacgctgctctggcgctgctactgctggacaggctgaaccagctggagtcgaagatgagtggtaaaggccaacagcagcagggccagaccgttaccaaaaagagcgcagctgaagcatctaaaaaaccgcgacagaaacgtaccgcgactaaagcgtacaatgtaacacaggccttcggtcgtcgaggtccggagcaaactcaaggaaactttggcgatcaggaattaatccgccaggggaccgactacaaacactggccgcaaattgcccagttcgccccatccgctagtgcattcttcggtatgagccgcatcggcatggaagtaacgccaagtggtacgtggctgacctacaccggtgctatcaagcttgatgacaaggacccgaactttaaagaccaggttattctgcttaacaaacatattgatgcctataaaactttcccgccgaccgaacccaaaaaggacaaaaagaaaaaagctgatgaaacccaggctctaccgcagcgtcagaaaaaacagcaaactgtgactctgctgccagctgcggacctggatgatttttccaagcagctgcaacagtctatgagctctgcggactctacgcaggctggtggttctggtcaccatcatcaccatcattaa

SEQ ID NO: 3080 - DNA, 2421 bp, Artificial Sequence
  Description of Artificial Sequence: Synthetic polynucleotide
atgaaaatcgaagaaggtaaactggtaatctggattaacggcgataaaggctataacggtctcgctgaagtcggtaagaaattcgagaaagataccggaattaaagtcaccgttgagcatccggataaactggaagagaaattcccacaggttgcggcaactggcgatggccctgacattatcttctgggcacacgaccgctttggtggctacgctcaatctggcctgttggctgaaatcaccccggacaaagcgttccaggacaagctgtatccgtttacctgggatgccgtacgttacaacggcaagctgattgcttacccgatcgctgttgaagcgttatcgctgatttataacaaagatctgctgccgaacccgccaaaaacctgggaagagatcccggcgctggataaagaactgaaagcgaaaggtaagagcgcgctgatgttcaacctgcaagaaccgtacttcacctggccgctgattgctgctgacgggggttatgcgttcaagtatgaaaacggcaagtacgacattaaagacgtgggcgtggataacgctggcgcgaaagcgggtctgaccttcctggttgacctgattaaaaacaaacacatgaatgcagacaccgattactccatcgcagaagctgcctttaataaaggcgaaacagcgatgaccatcaacggcccgtgggcatggtccaacatcgacaccagcaaagtgaattatggtgtaacggtactgccgaccttcaagggtcaaccatccaaaccgttcgttggcgtgctgagcgcaggtattaacgccgccagtccgaacaaagagctggcgaaagagttcctcgaaaactatctgctgactgatgaaggtctggaagcggttaataaagacaaaccgctgggtgccgtagcgctgaagtcttacgaggaagagttggcgaaagatccacgtattgccgccaccatggaaaacgcccagaaaggtgaaatcatgccgaacatcccgcagatgtccgctttctggtatgccgtgcgtactgcggtgatcaacgccgccagcggtcgtcagactgtcgatgaagccctgaaagacgcgcagactggtggttctggtgagaacctgtactttcaaagctcagataatgggcctcaaaaccagcgcaacgctccacgtataaccttcggtggcccgtctgactccacaggcagcaaccagaatggtgagcgtagtggagccaggtctaagcagcgccgtccccagggtctgccgaacaacacggcgagctggtttactgcgcttacccaacacggtaaagaagacttaaaattcccgcgtggccagggcgtcccgatcaacactaactcttccccggatgatcagattggttattaccgcagagcaactcgtcggattcgcggcggcgacggtaaaatgaaagatttgtctccgcgttggtacttttactatctcggcaccggtccggaagctggactgccctacggggcaaacaaggacgggatcatttgggtggctaccgaaggtgccctgaatactccaaaagatcatatcggcacccgtaaccctgctaataacgctgcgatcgttctgcaactgcctcagggtacaactctgccaaaaggcttctatgcagaagggtcgcgtggtggcagccaggcgagtagccgtagcagctcccgctctcgcaactcgtcccgtaactccactccgggctcttctcgcggcacggagccggctcgtatggcaggtaacggtggtgacgctgctctggcgctgctactgctggacaggctgaaccagctggagtcgaagatgagtggtaaaggccaacagcagcagggccagaccgttaccaaaaagagcgcagctgaagcatctaaaaaaccgcgacagaaacgtaccgcgactaaagcgtacaatgtaacacaggccttcggtcgtcgaggtccggagcaaactcaaggaaactttggcgatcaggaattaatccgccaggggaccgactacaaacactggccgcaaattgcccagttcgccccatccgctagtgcattcttcggtatgagccgcatcggcatggaagtaacgccaagtggtacgtggctgacctacaccggtgctatcaagcttgatgacaaggacccgaactttaaagaccaggttattctgcttaacaaacatattgatgcctataaaactttcccgccgaccgaacccaaaaaggacaaaaagaaaaaagctgatgaaacccaggctctaccgcagcgtcagaaaaaacagcaaactgtgactctgctgccagctgcggacctggatgatttttccaagcagctgcaacagtctatgagctctgcggactctacgcaggctggtggttctggtcaccatcatcaccatcattaa

SEQ ID NO: 3081 - DNA, 2421 bp, Artificial Sequence
  Description of Artificial Sequence: Synthetic polynucleotide
atgaaaatcgaagaaggtaaactggtaatctggattaacggcgataaaggctataacggtctcgctgaagtcggtaagaaattcgagaaagataccggaattaaagtcaccgttgagcatccggataaactggaagagaaattcccacaggttgcggcaactggcgatggccctgacattatcttctgggcacacgaccgctttggtggctacgctcaatctggcctgttggctgaaatcaccccggacaaagcgttccaggacaagctgtatccgtttacctgggatgccgtacgttacaacggcaagctgattgcttacccgatcgctgttgaagcgttatcgctgatttataacaaagatctgctgccgaacccgccaaaaacctgggaagagatcccggcgctggataaagaactgaaagcgaaaggtaagagcgcgctgatgttcaacctgcaagaaccgtacttcacctggccgctgattgctgctgacgggggttatgcgttcaagtatgaaaacggcaagtacgacattaaagacgtgggcgtggataacgctggcgcgaaagcgggtctgaccttcctggttgacctgattaaaaacaaacacatgaatgcagacaccgattactccatcgcagaagctgcctttaataaaggcgaaacagcgatgaccatcaacggcccgtgggcatggtccaacatcgacaccagcaaagtgaattatggtgtaacggtactgccgaccttcaagggtcaaccatccaaaccgttcgttggcgtgctgagcgcaggtattaacgccgccagtccgaacaaagagctggcgaaagagttcctcgaaaactatctgctgactgatgaaggtctggaagcggttaataaagacaaaccgctgggtgccgtagcgctgaagtcttacgaggaagagttggcgaaagatccacgtattgccgccaccatggaaaacgcccagaaaggtgaaatcatgccgaacatcccgcagatgtccgctttctggtatgccgtgcgtactgcggtgatcaacgccgccagcggtcgtcagactgtcgatgaagccctgaaagacgcgcagactggtggttctggtgagaacctgtactttcaaagctcagataatgggcctcaaaaccagcgcaacgctccacgtataaccttcggtggcccgtctgactccacaggcagcaaccagaatggtgagcgtagtggagccaggtctaagcagcgccgtccccagggtctgccgaacaacacggcgagctggtttactgcgcttacccaacacggtaaagaagacttaaaattcccgcgtggccagggcgtcccgatcaacactaactcttccccggatgatcagattggttattaccgcagagcaactcgtcggattcgcggcggcgacggtaaaatgaaagatttgtctccgcgttggtacttttactatctcggcaccggtccggaagctggactgccctacggggcaaacaaggacgggatcatttgggtggctaccgaaggtgccctgaatactccaaaagatcatatcggcacccgtaaccctgctaataacgctgcgatcgttctgcaactgcctcagggtacaactctgccaaaaggcttctatgcagaagggtcgcgtggtggcagccaggcgagtagccgtagcagctcccgctctcgcaactcgtcccgtaactccactccgggctcttctcgcggcacgtccccggctcgtatggcaggtaacggtggtgacgctgctctggcgctgctactgctggacaggctgaaccagctggagtcgaagatgagtggtaaaggccaacagcagcagggccagaccgttaccaaaaagagcgcagctgaaatgtctaaaaaaccgcgacagaaacgtaccgcgactaaagcgtacaatgtaacacaggccttcggtcgtcgaggtccggagcaaactcaaggaaactttggcgatcaggaattaatccgccaggggaccgactacaaacactggccgcaaattgcccagttcgccccatccgctagtgcattcttcggtatgagccgcatcggcatggaagtaacgccaagtggtacgtggctgacctacaccggtgctatcaagcttgatgacaaggacccgaactttaaagaccaggttattctgcttaacaaacatattgatgcctataaaactttcccgccgaccgaacccaaaaaggacaaaaagaaaaaagctgatgaaacccaggctctaccgcagcgtcagaaaaaacagcaaactgtgactctgctgccagctgcggacctggatgatttttccaagcagctgcaacagtctatgagctctgcggactctacgcaggctggtggttctggtcaccatcatcaccatcattaa

SEQ ID NO: 3082 - DNA, 2421 bp, Artificial Sequence
  Description of Artificial Sequence: Synthetic polynucleotide
atgaaaatcgaagaaggtaaactggtaatctggattaacggcgataaaggctataacggtctcgctgaagtcggtaagaaattcgagaaagataccggaattaaagtcaccgttgagcatccggataaactggaagagaaattcccacaggttgcggcaactggcgatggccctgacattatcttctgggcacacgaccgctttggtggctacgctcaatctggcctgttggctgaaatcaccccggacaaagcgttccaggacaagctgtatccgtttacctgggatgccgtacgttacaacggcaagctgattgcttacccgatcgctgttgaagcgttatcgctgatttataacaaagatctgctgccgaacccgccaaaaacctgggaagagatcccggcgctggataaagaactgaaagcgaaaggtaagagcgcgctgatgttcaacctgcaagaaccgtacttcacctggccgctgattgctgctgacgggggttatgcgttcaagtatgaaaacggcaagtacgacattaaagacgtgggcgtggataacgctggcgcgaaagcgggtctgaccttcctggttgacctgattaaaaacaaacacatgaatgcagacaccgattactccatcgcagaagctgcctttaataaaggcgaaacagcgatgaccatcaacggcccgtgggcatggtccaacatcgacaccagcaaagtgaattatggtgtaacggtactgccgaccttcaagggtcaaccatccaaaccgttcgttggcgtgctgagcgcaggtattaacgccgccagtccgaacaaagagctggcgaaagagttcctcgaaaactatctgctgactgatgaaggtctggaagcggttaataaagacaaaccgctgggtgccgtagcgctgaagtcttacgaggaagagttggcgaaagatccacgtattgccgccaccatggaaaacgcccagaaaggtgaaatcatgccgaacatcccgcagatgtccgctttctggtatgccgtgcgtactgcggtgatcaacgccgccagcggtcgtcagactgtcgatgaagccctgaaagacgcgcagactggtggttctggtgagaacctgtactttcaaagctcagataatgggcctcaaaaccagcgcaacgctccacgtataaccttcggtggcccgtctgactccacaggcagcaaccagaatggtgagcgtagtggagccaggtctaagcagcgccgtccccagggtctgccgaacaacacggcgagctggtttactgcgcttacccaacacggtaaagaagacttaaaattcccgcgtggccagggcgtcccgatcaacactaactcttccccggatgatcagattggttattaccgcagagcaactcgtcggattcgcggcggcgacggtaaaatgaaagatttgtctccgcgttggtacttttactatctcggcaccggtccggaagctggactgccctacggggcaaacaaggacgggatcatttgggtggctaccgaaggtgccctgaatactccaaaagatcatatcggcacccgtaaccctgctaataacgctgcgatcgttctgcaactgcctcagggtacaactctgccaaaaggcttctatgcagaagggtcgcgtggtggcagccaggcgagtagccgtagcagctcccgctctcgcaactcgtcccgtaactccactccgggctcttctcgcggcacgtccccggctcgtatggcaggtaacggtggtgacgctgctctggcgctgctactgctggacaggctgaaccagctggagtcgaagatgagtggtaaaggccaacagcagcagggccagaccgttaccaaaaagagcgcagctgaagcatctaaaaaaccgcgacagaaacgtaccgcgactaaagcgtacaatgtaacacaggccttcggtcgtcgaggtccggagcaaactcaaggaaactttggcgatcaggaattaatccgccaggggaccgactacaaacactggccgcaaattgcccagttcgccccatccgctagtgcattcttcggtatgagccgcatcggcatggaaaatacgccaagtggtacgtggctgacctacaccggtgctatcaagcttgatgacaaggacccgaactttaaagaccaggttattctgcttaacaaacatattgatgcctataaaactttcccgccgaccgaacccaaaaaggacaaaaagaaaaaagctgatgaaacccaggctctaccgcagcgtcagaaaaaacagcaaactgtgactctgctgccagctgcggacctggatgatttttccaagcagctgcaacagtctatgagctctgcggactctacgcaggctggtggttctggtcaccatcatcaccatcattaa

SEQ ID NO: 3083 - DNA, 2421 bp, Artificial Sequence
  Description of Artificial Sequence: Synthetic polynucleotide
atgaaaatcgaagaaggtaaactggtaatctggattaacggcgataaaggctataacggtctcgctgaagtcggtaagaaattcgagaaagataccggaattaaagtcaccgttgagcatccggataaactggaagagaaattcccacaggttgcggcaactggcgatggccctgacattatcttctgggcacacgaccgctttggtggctacgctcaatctggcctgttggctgaaatcaccccggacaaagcgttccaggacaagctgtatccgtttacctgggatgccgtacgttacaacggcaagctgattgcttacccgatcgctgttgaagcgttatcgctgatttataacaaagatctgctgccgaacccgccaaaaacctgggaagagatcccggcgctggataaagaactgaaagcgaaaggtaagagcgcgctgatgttcaacctgcaagaaccgtacttcacctggccgctgattgctgctgacgggggttatgcgttcaagtatgaaaacggcaagtacgacattaaagacgtgggcgtggataacgctggcgcgaaagcgggtctgaccttcctggttgacctgattaaaaacaaacacatgaatgcagacaccgattactccatcgcagaagctgcctttaataaaggcgaaacagcgatgaccatcaacggcccgtgggcatggtccaacatcgacaccagcaaagtgaattatggtgtaacggtactgccgaccttcaagggtcaaccatccaaaccgttcgttggcgtgctgagcgcaggtattaacgccgccagtccgaacaaagagctggcgaaagagttcctcgaaaactatctgctgactgatgaaggtctggaagcggttaataaagacaaaccgctgggtgccgtagcgctgaagtcttacgaggaagagttggcgaaagatccacgtattgccgccaccatggaaaacgcccagaaaggtgaaatcatgccgaacatcccgcagatgtccgctttctggtatgccgtgcgtactgcggtgatcaacgccgccagcggtcgtcagactgtcgatgaagccctgaaagacgcgcagactggtggttctggtgagaacctgtactttcaaagctcagataatgggcctcaaaaccagcgcaacgctccacgtataaccttcggtggcccgtctgactccacaggcagcaaccagaatggtgagcgtagtggagccaggtctaagcagcgccgtccccagggtctgccgaacaacacggcgagctggtttactgcgcttacccaacacggtaaagaagacttaaaattcccgcgtggccagggcgtcccgatcaacactaactcttccccggatgatcagattggttattaccgcagagcaactcgtcggattcgcggcggcgacggtaaaatgaaagatttgtctccgcgttggtacttttactatctcggcaccggtccggaagctggactgccctacggggcaaacaaggacgggatcatttgggtggctcatgaaggtgccctgaatactccaaaagatcatatcggcacccgtaaccctgctaataacgctgcgatcgttctgcaactgcctcagggtacaactctgccaaaaggcttctatgcagaagggtcgcgtggtggcagccaggcgagtagccgtagcagctcccgctctcgcaactcgtcccgtaactccactccgggctcttctcgcggcacgtccccggctcgtatggcaggtaacggtggtgacgctgctctggcgctgctactgctggacaggctgaaccagctggagtcgaagatgagtggtaaaggccaacagcagcagggccagaccgttaccaaaaagagcgcagctgaagcatctaaaaaaccgcgacagaaacgtaccgcgactaaagcgtacaatgtaacacaggccttcggtcgtcgaggtccggagcaaactcaaggaaactttggcgatcaggaattaatccgccaggggaccgactacaaacactggccgcaaattgcccagttcgccccatccgctagtgcattcttcggtatgagccgcatcggcatggaagtaacgccaagtggtacgtggctgacctacaccggtgctatcaagcttgatgacaaggacccgaactttaaagaccaggttattctgcttaacaaacatattgatgcctataaaactttcccgccgaccgaacccaaaaaggacaaaaagaaaaaagctgatgaaacccaggctctaccgcagcgtcagaaaaaacagcaaactgtgactctgctgccagctgcggacctggatgatttttccaagcagctgcaacagtctatgagctctgcggactctacgcaggctggtggttctggtcaccatcatcaccatcattaa

SEQ ID NO: 3084 - DNA, 2421 bp, Artificial Sequence
  Description of Artificial Sequence: Synthetic polynucleotide
atgaaaatcgaagaaggtaaactggtaatctggattaacggcgataaaggctataacggtctcgctgaagtcggtaagaaattcgagaaagataccggaattaaagtcaccgttgagcatccggataaactggaagagaaattcccacaggttgcggcaactggcgatggccctgacattatcttctgggcacacgaccgctttggtggctacgctcaatctggcctgttggctgaaatcaccccggacaaagcgttccaggacaagctgtatccgtttacctgggatgccgtacgttacaacggcaagctgattgcttacccgatcgctgttgaagcgttatcgctgatttataacaaagatctgctgccgaacccgccaaaaacctgggaagagatcccggcgctggataaagaactgaaagcgaaaggtaagagcgcgctgatgttcaacctgcaagaaccgtacttcacctggccgctgattgctgctgacgggggttatgcgttcaagtatgaaaacggcaagtacgacattaaagacgtgggcgtggataacgctggcgcgaaagcgggtctgaccttcctggttgacctgattaaaaacaaacacatgaatgcagacaccgattactccatcgcagaagctgcctttaataaaggcgaaacagcgatgaccatcaacggcccgtgggcatggtccaacatcgacaccagcaaagtgaattatggtgtaacggtactgccgaccttcaagggtcaaccatccaaaccgttcgttggcgtgctgagcgcaggtattaacgccgccagtccgaacaaagagctggcgaaagagttcctcgaaaactatctgctgactgatgaaggtctggaagcggttaataaagacaaaccgctgggtgccgtagcgctgaagtcttacgaggaagagttggcgaaagatccacgtattgccgccaccatggaaaacgcccagaaaggtgaaatcatgccgaacatcccgcagatgtccgctttctggtatgccgtgcgtactgcggtgatcaacgccgccagcggtcgtcagactgtcgatgaagccctgaaagacgcgcagactggtggttctggtgagaacctgtactttcaaagctcagataatgggcctcaaaaccagcgcaacgctccacgtataaccttcggtggcccgtctgactccacaggcagcaaccagaatggtgagcgtagtggagccaggtctaagcagcgccgtccccagggtctgccgaacaacacggcgagctggtttactgcgcttacccaacacggtaaagaagacttaaaattcccgcgtggccagggcgtcccgatcaacactaactcttccccggatgatcagattggttattaccgcagagcaactcgtcggattcgcggcggcgacggtaaaatgaaagatttgtctccgcgttggtacttttactatctcggcaccggtccggaagctggactgccctacggggcaaacaaggacgggatcatttgggtggctcaagaaggtgccctgaatactccaaaagatcatatcggcacccgtaaccctgctaataacgctgcgatcgttctgcaactgcctcagggtacaactctgccaaaaggcttctatgcagaagggtcgcgtggtggcagccaggcgagtagccgtagcagctcccgctctcgcaactcgtcccgtaactccactccgggctcttctcgcggcacgtccccggctcgtatggcaggtaacggtggtgacgctgctctggcgctgctactgctggacaggctgaaccagctggagtcgaagatgagtggtaaaggccaacagcagcagggccagaccgttaccaaaaagagcgcagctgaagcatctaaaaaaccgcgacagaaacgtaccgcgactaaagcgtacaatgtaacacaggccttcggtcgtcgaggtccggagcaaactcaaggaaactttggcgatcaggaattaatccgccaggggaccgactacaaacactggccgcaaattgcccagttcgccccatccgctagtgcattcttcggtatgagccgcatcggcatggaagtaacgccaagtggtacgtggctgacctacaccggtgctatcaagcttgatgacaaggacccgaactttaaagaccaggttattctgcttaacaaacatattgatgcctataaaactttcccgccgaccgaacccaaaaaggacaaaaagaaaaaagctgatgaaacccaggctctaccgcagcgtcagaaaaaacagcaaactgtgactctgctgccagctgcggacctggatgatttttccaagcagctgcaacagtctatgagctctgcggactctacgcaggctggtggttctggtcaccatcatcaccatcattaa

SEQ ID NO: 3085 - DNA, 2421 bp, Artificial Sequence
  Description of Artificial Sequence: Synthetic polynucleotide
atgaaaatcgaagaaggtaaactggtaatctggattaacggcgataaaggctataacggtctcgctgaagtcggtaagaaattcgagaaagataccggaattaaagtcaccgttgagcatccggataaactggaagagaaattcccacaggttgcggcaactggcgatggccctgacattatcttctgggcacacgaccgctttggtggctacgctcaatctggcctgttggctgaaatcaccccggacaaagcgttccaggacaagctgtatccgtttacctgggatgccgtacgttacaacggcaagctgattgcttacccgatcgctgttgaagcgttatcgctgatttataacaaagatctgctgccgaacccgccaaaaacctgggaagagatcccggcgctggataaagaactgaaagcgaaaggtaagagcgcgctgatgttcaacctgcaagaaccgtacttcacctggccgctgattgctgctgacgggggttatgcgttcaagtatgaaaacggcaagtacgacattaaagacgtgggcgtggataacgctggcgcgaaagcgggtctgaccttcctggttgacctgattaaaaacaaacacatgaatgcagacaccgattactccatcgcagaagctgcctttaataaaggcgaaacagcgatgaccatcaacggcccgtgggcatggtccaacatcgacaccagcaaagtgaattatggtgtaacggtactgccgaccttcaagggtcaaccatccaaaccgttcgttggcgtgctgagcgcaggtattaacgccgccagtccgaacaaagagctggcgaaagagttcctcgaaaactatctgctgactgatgaaggtctggaagcggttaataaagacaaaccgctgggtgccgtagcgctgaagtcttacgaggaagagttggcgaaagatccacgtattgccgccaccatggaaaacgcccagaaaggtgaaatcatgccgaacatcccgcagatgtccgctttctggtatgccgtgcgtactgcggtgatcaacgccgccagcggtcgtcagactgtcgatgaagccctgaaagacgcgcagactggtggttctggtgagaacctgtactttcaaagctcagataatgggcctcaaaaccagcgcaacgctccacgtataaccttcggtggcccgtctgactccacaggcagcaaccagaatggtgagcgtagtggagccaggtctaagcagcgccgtccccagggtctgccgaacaacacggcgagctggtttactgcgcttacccaacacggtaaagaagacttaaaattcccgcgtggccagggcgtcccgatcaacactaactcttccccggatgatcagattggttattaccgcagagcagtacgtcggattcgcggcggcgacggtaaaatgaaagatttgtctccgcgttggtacttttactatctcggcaccggtccggaagctggactgccctacggggcaaacaaggacgggatcatttgggtggctaccgaaggtgccctgaatactccaaaagatcatatcggcacccgtaaccctgctaataacgctgcgatcgttctgcaactgcctcagggtacaactctgccaaaaggcttctatgcagaagggtcgcgtggtggcagccaggcgagtagccgtagcagctcccgctctcgcaactcgtcccgtaactccactccgggctcttctcgcggcacgtccccggctcgtatggcaggtaacggtggtgacgctgctctggcgctgctactgctggacaggctgaaccagctggagtcgaagatgagtggtaaaggccaacagcagcagggccagaccgttaccaaaaagagcgcagctgaagcatctaaaaaaccgcgacagaaacgtaccgcgactaaagcgtacaatgtaacacaggccttcggtcgtcgaggtccggagcaaactcaaggaaactttggcgatcaggaattaatccgccaggggaccgactacaaacactggccgcaaattgcccagttcgccccatccgctagtgcattcttcggtatgagccgcatcggcatggaagtaacgccaagtggtacgtggctgacctacaccggtgctatcaagcttgatgacaaggacccgaactttaaagaccaggttattctgcttaacaaacatattgatgcctataaaactttcccgccgaccgaacccaaaaaggacaaaaagaaaaaagctgatgaaacccaggctctaccgcagcgtcagaaaaaacagcaaactgtgactctgctgccagctgcggacctggatgatttttccaagcagctgcaacagtctatgagctctgcggactctacgcaggctggtggttctggtcaccatcatcaccatcattaa

SEQ ID NO: 3086 - DNA, 2421 bp, Artificial Sequence
  Description of Artificial Sequence: Synthetic polynucleotide
atgaaaatcgaagaaggtaaactggtaatctggattaacggcgataaaggctataacggtctcgctgaagtcggtaagaaattcgagaaagataccggaattaaagtcaccgttgagcatccggataaactggaagagaaattcccacaggttgcggcaactggcgatggccctgacattatcttctgggcacacgaccgctttggtggctacgctcaatctggcctgttggctgaaatcaccccggacaaagcgttccaggacaagctgtatccgtttacctgggatgccgtacgttacaacggcaagctgattgcttacccgatcgctgttgaagcgttatcgctgatttataacaaagatctgctgccgaacccgccaaaaacctgggaagagatcccggcgctggataaagaactgaaagcgaaaggtaagagcgcgctgatgttcaacctgcaagaaccgtacttcacctggccgctgattgctgctgacgggggttatgcgttcaagtatgaaaacggcaagtacgacattaaagacgtgggcgtggataacgctggcgcgaaagcgggtctgaccttcctggttgacctgattaaaaacaaacacatgaatgcagacaccgattactccatcgcagaagctgcctttaataaaggcgaaacagcgatgaccatcaacggcccgtgggcatggtccaacatcgacaccagcaaagtgaattatggtgtaacggtactgccgaccttcaagggtcaaccatccaaaccgttcgttggcgtgctgagcgcaggtattaacgccgccagtccgaacaaagagctggcgaaagagttcctcgaaaactatctgctgactgatgaaggtctggaagcggttaataaagacaaaccgctgggtgccgtagcgctgaagtcttacgaggaagagttggcgaaagatccacgtattgccgccaccatggaaaacgcccagaaaggtgaaatcatgccgaacatcccgcagatgtccgctttctggtatgccgtgcgtactgcggtgatcaacgccgccagcggtcgtcagactgtcgatgaagccctgaaagacgcgcagactggtggttctggtgagaacctgtactttcaaagctcagataatgggcctcaaaaccagcgcaacgctccacgtataaccttcggtggcccgtctgactccacaggcagcaaccagaatggtgagcgtagtggagccaggtctaagcagcgccgtccccagggtctgccgaacaacacggcgagctggtttactgcgcttacccaacacggtaaagaagacttaaaattcccgcgtggccagggcgtcccgatcaacactaactcttccccggatgatcagattggttattaccgcagagcaactcgtcggattcgcggcggcgacggtaaaatgaaagatttgtctccgcgttggtacttttactatctcggcaccggtccggaagctggactgccctacggggcaaacaaggacgggatcatttgggtggctaccgaaggtgccctgaatactccaaaagatcatatcggcacccgtaaccctgctaataacgctgcgatcgttctgcaactgcctcagggtacaactctgccaaaaggcttctatgcagaagggtcgcgtggtggcagccaggcgagtagccgtagcagctcccgctctcgcaactcgtcccgtaactccactccgggctcttctcgcggcacgtccccggctcgtatggcaggtaacggtggtgacgctgctctggcgctgctactgctggacaggctgaaccagctggagtcgaagatgagtggtaaaggccaacagcagcagggccagaccgttaccaaaaagagcgcagctgaagcatctaaaaaaccgcgacagaaacgtaccgcgactaaagcgtacaatgtaacacaggccttcggtcgtcgaggtccggagcaaactcaaggaaactttggcgattcggaattaatccgccaggggaccgactacaaacactggccgcaaattgcccagttcgccccatccgctagtgcattcttcggtatgagccgcatcggcatggaagtaacgccaagtggtacgtggctgacctacaccggtgctatcaagcttgatgacaaggacccgaactttaaagaccaggttattctgcttaacaaacatattgatgcctataaaactttcccgccgaccgaacccaaaaaggacaaaaagaaaaaagctgatgaaacccaggctctaccgcagcgtcagaaaaaacagcaaactgtgactctgctgccagctgcggacctggatgatttttccaagcagctgcaacagtctatgagctctgcggactctacgcaggctggtggttctggtcaccatcatcaccatcattaa

SEQ ID NO: 3087 - DNA, 2421 bp, Artificial Sequence
  Description of Artificial Sequence: Synthetic polynucleotide
atgaaaatcgaagaaggtaaactggtaatctggattaacggcgataaaggctataacggtctcgctgaagtcggtaagaaattcgagaaagataccggaattaaagtcaccgttgagcatccggataaactggaagagaaattcccacaggttgcggcaactggcgatggccctgacattatcttctgggcacacgaccgctttggtggctacgctcaatctggcctgttggctgaaatcaccccggacaaagcgttccaggacaagctgtatccgtttacctgggatgccgtacgttacaacggcaagctgattgcttacccgatcgctgttgaagcgttatcgctgatttataacaaagatctgctgccgaacccgccaaaaacctgggaagagatcccggcgctggataaagaactgaaagcgaaaggtaagagcgcgctgatgttcaacctgcaagaaccgtacttcacctggccgctgattgctgctgacgggggttatgcgttcaagtatgaaaacggcaagtacgacattaaagacgtgggcgtggataacgctggcgcgaaagcgggtctgaccttcctggttgacctgattaaaaacaaacacatgaatgcagacaccgattactccatcgcagaagctgcctttaataaaggcgaaacagcgatgaccatcaacggcccgtgggcatggtccaacatcgacaccagcaaagtgaattatggtgtaacggtactgccgaccttcaagggtcaaccatccaaaccgttcgttggcgtgctgagcgcaggtattaacgccgccagtccgaacaaagagctggcgaaagagttcctcgaaaactatctgctgactgatgaaggtctggaagcggttaataaagacaaaccgctgggtgccgtagcgctgaagtcttacgaggaagagttggcgaaagatccacgtattgccgccaccatggaaaacgcccagaaaggtgaaatcatgccgaacatcccgcagatgtccgctttctggtatgccgtgcgtactgcggtgatcaacgccgccagcggtcgtcagactgtcgatgaagccctgaaagacgcgcagactggtggttctggtgagaacctgtactttcaaagctcagataatgggcctcaaaaccagcgcaacgctccacgtataaccttcggtggcccgtctgactccacaggcagcaaccagaatggtgagcgtagtggagccaggtctaagcagcgccgtccccagggtctgccgaacaacacggcgagctggtttactgcgcttacccaacacggtaaagaagacttaaaattcccgcgtggccagggcgtcccgatcaacactaactcttccccggatgatcagattggttattaccgcagagcaactcgtcggattcgcggcggcgacggtaaaatgaaagatttgtctccgcgttggtacttttactatctcggcaccggtccggaagctggactgccctacggggcaatcaaggacgggatcatttgggtggctaccgaaggtgccctgaatactccaaaagatcatatcggcacccgtaaccctgctaataacgctgcgatcgttctgcaactgcctcagggtacaactctgccaaaaggcttctatgcagaagggtcgcgtggtggcagccaggcgagtagccgtagcagctcccgctctcgcaactcgtcccgtaactccactccgggctcttctcgcggcacgtccccggctcgtatggcaggtaacggtggtgacgctgctctggcgctgctactgctggacaggctgaaccagctggagtcgaagatgagtggtaaaggccaacagcagcagggccagaccgttaccaaaaagagcgcagctgaagcatctaaaaaaccgcgacagaaacgtaccgcgactaaagcgtacaatgtaacacaggccttcggtcgtcgaggtccggagcaaactcaaggaaactttggcgatcaggaattaatccgccaggggaccgactacaaacactggccgcaaattgcccagttcgccccatccgctagtgcattcttcggtatgagccgcatcggcatggaagtaacgccaagtggtacgtggctgacctacaccggtgctatcaagcttgatgacaaggacccgaactttaaagaccaggttattctgcttaacaaacatattgatgcctataaaactttcccgccgaccgaacccaaaaaggacaaaaagaaaaaagctgatgaaacccaggctctaccgcagcgtcagaaaaaacagcaaactgtgactctgctgccagctgcggacctggatgatttttccaagcagctgcaacagtctatgagctctgcggactctacgcaggctggtggttctggtcaccatcatcaccatcattaa

SEQ ID NO: 3088 - DNA, 2421 bp, Artificial Sequence
  Description of Artificial Sequence: Synthetic polynucleotide
atgaaaatcgaagaaggtaaactggtaatctggattaacggcgataaaggctataacggtctcgctgaagtcggtaagaaattcgagaaagataccggaattaaagtcaccgttgagcatccggataaactggaagagaaattcccacaggttgcggcaactggcgatggccctgacattatcttctgggcacacgaccgctttggtggctacgctcaatctggcctgttggctgaaatcaccccggacaaagcgttccaggacaagctgtatccgtttacctgggatgccgtacgttacaacggcaagctgattgcttacccgatcgctgttgaagcgttatcgctgatttataacaaagatctgctgccgaacccgccaaaaacctgggaagagatcccggcgctggataaagaactgaaagcgaaaggtaagagcgcgctgatgttcaacctgcaagaaccgtacttcacctggccgctgattgctgctgacgggggttatgcgttcaagtatgaaaacggcaagtacgacattaaagacgtgggcgtggataacgctggcgcgaaagcgggtctgaccttcctggttgacctgattaaaaacaaacacatgaatgcagacaccgattactccatcgcagaagctgcctttaataaaggcgaaacagcgatgaccatcaacggcccgtgggcatggtccaacatcgacaccagcaaagtgaattatggtgtaacggtactgccgaccttcaagggtcaaccatccaaaccgttcgttggcgtgctgagcgcaggtattaacgccgccagtccgaacaaagagctggcgaaagagttcctcgaaaactatctgctgactgatgaaggtctggaagcggttaataaagacaaaccgctgggtgccgtagcgctgaagtcttacgaggaagagttggcgaaagatccacgtattgccgccaccatggaaaacgcccagaaaggtgaaatcatgccgaacatcccgcagatgtccgctttctggtatgccgtgcgtactgcggtgatcaacgccgccagcggtcgtcagactgtcgatgaagccctgaaagacgcgcagactggtggttctggtgagaacctgtactttcaaagctcagataatgggcctcaaaaccagcgcaacgctccacgtataaccttcggtggcccgtctgactccacaggcagcaaccagaatggtgagcgtagtggagccaggtctaagcagcgccgtccccagggtctgccgaacaacacggcgagctggtttactgcgcttacccaacacggtaaagaagacttaaaattcccgcgtggccagggcgtcccgatcaacactaactcttccccggatgatcagattggttattaccgcagagcaactcgtcggattcgcggcggcgacggtaaaatgaaagatttgtctccgcgttggtacttttactatctcggcaccggtccggaagctggactgccctacggggcaaacaaggacgggatctattgggtggctaccgaaggtgccctgaatactccaaaagatcatatcggcacccgtaaccctgctaataacgctgcgatcgttctgcaactgcctcagggtacaactctgccaaaaggcttctatgcagaagggtcgcgtggtggcagccaggcgagtagccgtagcagctcccgctctcgcaactcgtcccgtaactccactccgggctcttctcgcggcacgtccccggctcgtatggcaggtaacggtggtgacgctgctctggcgctgctactgctggacaggctgaaccagctggagtcgaagatgagtggtaaaggccaacagcagcagggccagaccgttaccaaaaagagcgcagctgaagcatctaaaaaaccgcgacagaaacgtaccgcgactaaagcgtacaatgtaacacaggccttcggtcgtcgaggtccggagcaaactcaaggaaactttggcgatcaggaattaatccgccaggggaccgactacaaacactggccgcaaattgcccagttcgccccatccgctagtgcattcttcggtatgagccgcatcggcatggaagtaacgccaagtggtacgtggctgacctacaccggtgctatcaagcttgatgacaaggacccgaactttaaagaccaggttattctgcttaacaaacatattgatgcctataaaactttcccgccgaccgaacccaaaaaggacaaaaagaaaaaagctgatgaaacccaggctctaccgcagcgtcagaaaaaacagcaaactgtgactctgctgccagctgcggacctggatgatttttccaagcagctgcaacagtctatgagctctgcggactctacgcaggctggtggttctggtcaccatcatcaccatcattaa

SEQ ID NO: 3089 - DNA, 2421 bp, Artificial Sequence
  Description of Artificial Sequence: Synthetic polynucleotide
atgaaaatcgaagaaggtaaactggtaatctggattaacggcgataaaggctataacggtctcgctgaagtcggtaagaaattcgagaaagataccggaattaaagtcaccgttgagcatccggataaactggaagagaaattcccacaggttgcggcaactggcgatggccctgacattatcttctgggcacacgaccgctttggtggctacgctcaatctggcctgttggctgaaatcaccccggacaaagcgttccaggacaagctgtatccgtttacctgggatgccgtacgttacaacggcaagctgattgcttacccgatcgctgttgaagcgttatcgctgatttataacaaagatctgctgccgaacccgccaaaaacctgggaagagatcccggcgctggataaagaactgaaagcgaaaggtaagagcgcgctgatgttcaacctgcaagaaccgtacttcacctggccgctgattgctgctgacgggggttatgcgttcaagtatgaaaacggcaagtacgacattaaagacgtgggcgtggataacgctggcgcgaaagcgggtctgaccttcctggttgacctgattaaaaacaaacacatgaatgcagacaccgattactccatcgcagaagctgcctttaataaaggcgaaacagcgatgaccatcaacggcccgtgggcatggtccaacatcgacaccagcaaagtgaattatggtgtaacggtactgccgaccttcaagggtcaaccatccaaaccgttcgttggcgtgctgagcgcaggtattaacgccgccagtccgaacaaagagctggcgaaagagttcctcgaaaactatctgctgactgatgaaggtctggaagcggttaataaagacaaaccgctgggtgccgtagcgctgaagtcttacgaggaagagttggcgaaagatccacgtattgccgccaccatggaaaacgcccagaaaggtgaaatcatgccgaacatcccgcagatgtccgctttctggtatgccgtgcgtactgcggtgatcaacgccgccagcggtcgtcagactgtcgatgaagccctgaaagacgcgcagactggtggttctggtgagaacctgtactttcaaagctcagataatgggcctcaaaaccagcgcaacgctccacgtataaccttcggtggcccgtctgactccacaggcagcaaccagaatggtgagcgtagtggagccaggtctaagcagcgccgtccccagggtctgccgaacaacacggcgagctggtttactggccttacccaatttggtaaagaagacttaaaattcccgcccggccagggcgtcccgatcaacactaactcttccccggatgatcagattggttattaccgcagagcaactcgtcggattcgcggcggcgacggtaaaatgaaagatttgccaccgaaatggtacttttactatctcggcaccggtccgcatgctgatctgccctacgggcaaaagcacgacggggtgttttgggtggctcgaccgggtgccctgaatactccaaaagatcatatcggcacccgtaaccctgctaataacgctgcgatcccgctgcaactgcctccaggtacaaaactgccaaaaggcttctatgcagaagggtcgcgtggtggcagccaggcgagtagccgtagcagctcccgctctcgcaactcgtcccgtaactccactccgggctcttctcgcggcacgtccccggctcgtatggcaggtaacggtggtgacgctgctctggcgctgctactgctggacaggctgaaccagctggagtcgaagatgagtggtaaaggccaacagcagcagggccagaccgttaccaaaaagagcgcagctgaagcatctaaaaaaccgcgacagaaacgtaccgcgactaaagcgtacaatgtaacacaggccttcggtcgtcgaggtccggagcaaactcaaggaaactttggcgatcaggaattaatccgccaggggaccgactacaaacactggccgcaaattgcccagttcgccccatccgctagtgcattcttcggtatgagccgcatcggcatggaagtaacgccaagtggtacgtggctgacctacaccggtgctatcaagcttgatgacaaggacccgaactttaaagaccaggttattctgcttaacaaacatattgatgcctataaaactttcccgccgaccgaacccaaaaaggacaaaaagaaaaaagctgatgaaacccaggctctaccgcagcgtcagaaaaaacagcaaactgtgactctgctgccagctgcggacctggatgatttttccaagcagctgcaacagtctatgagctctgcggactctacgcaggctggtggttctggtcaccatcatcaccatcattaa

SEQ ID NO: 3090 - DNA, 2421 bp, Artificial Sequence
  Description of Artificial Sequence: Synthetic polynucleotide
atgaaaatcgaagaaggtaaactggtaatctggattaacggcgataaaggctataacggtctcgctgaagtcggtaagaaattcgagaaagataccggaattaaagtcaccgttgagcatccggataaactggaagagaaattcccacaggttgcggcaactggcgatggccctgacattatcttctgggcacacgaccgctttggtggctacgctcaatctggcctgttggctgaaatcaccccggacaaagcgttccaggacaagctgtatccgtttacctgggatgccgtacgttacaacggcaagctgattgcttacccgatcgctgttgaagcgttatcgctgatttataacaaagatctgctgccgaacccgccaaaaacctgggaagagatcccggcgctggataaagaactgaaagcgaaaggtaagagcgcgctgatgttcaacctgcaagaaccgtacttcacctggccgctgattgctgctgacgggggttatgcgttcaagtatgaaaacggcaagtacgacattaaagacgtgggcgtggataacgctggcgcgaaagcgggtctgaccttcctggttgacctgattaaaaacaaacacatgaatgcagacaccgattactccatcgcagaagctgcctttaataaaggcgaaacagcgatgaccatcaacggcccgtgggcatggtccaacatcgacaccagcaaagtgaattatggtgtaacggtactgccgaccttcaagggtcaaccatccaaaccgttcgttggcgtgctgagcgcaggtattaacgccgccagtccgaacaaagagctggcgaaagagttcctcgaaaactatctgctgactgatgaaggtctggaagcggttaataaagacaaaccgctgggtgccgtagcgctgaagtcttacgaggaagagttggcgaaagatccacgtattgccgccaccatggaaaacgcccagaaaggtgaaatcatgccgaacatcccgcagatgtccgctttctggtatgccgtgcgtactgcggtgatcaacgccgccagcggtcgtcagactgtcgatgaagccctgaaagacgcgcagactggtggttctggtgagaacctgtactttcaaagctcagataatgggcctcaaaaccagcgcaacgctccacgtataaccttcggtggcccgtctgactccacaggcagcaaccagaatggtgagcgtagtggagccaggtctaagcagcgccgtccccagggtctgccgaacaacacggcgagctggtttactgcgcttacccaacacggtaaagaagacttaaaattcccgcgtggccagggcgtcccgatcaacactaactcttccccggatgatcagattggttattaccgcagagcaactcgtcggattcgcggcggcgacggtaaaatgaaagatttgtctccgcgttggtacttttactatctcggcaccggtccggaagctggactgccctacggggcaaacaaggacgggatcatttgggtggctaccgaaggtgccctgaatactccaaaagatcatatcggcacccgtaaccctgctaataacgctgcgatcgttctgcaactgcctcagggtacaactctgccaaaaaatttctatgcagaagggtcgcgtggtggcagccaggcgagtagccgtagcagctcccgctctcgcaactcgtcccgtaactccactccgggctcttctcgcggcacgtccccggctcgtatggcaggtaacggtggtgacgctgctctggcgctgctactgctggacaggctgaaccagctggagtcgaagatgagtggtaaaggccaacagcagcagggccagaccgttaccaaaaagagcgcagctgaagcatctaaaaaaccgcgacagaaacgtaccgcgactaaagcgtacaatgtaacacaggccttcggtcgtcgaggtccggagcaaactcaaggaaactttggcgatcaggaattaatccgccaggggaccgactacaaacactggccgcaaattgcccagttcgccccatccgctagtgcattcttcggtatgagccgcatcggcatggaagtaacgccaagtggtacgtggctgacctacaccggtgctatcaagcttgatgacaaggacccgaactttaaagaccaggttattctgcttaacaaacatattgatgcctataaaactttcccgccgaccgaacccaaaaaggacaaaaagaaaaaagctgatgaaacccaggctctaccgcagcgtcagaaaaaacagcaaactgtgactctgctgccagctgcggacctggatgatttttccaagcagctgcaacagtctatgagctctgcggactctacgcaggctggtggttctggtcaccatcatcaccatcattaa

SEQ ID NO: 3091 - DNA, 2421 bp, Artificial Sequence
  Description of Artificial Sequence: Synthetic polynucleotide
atgaaaatcgaagaaggtaaactggtaatctggattaacggcgataaaggctataacggtctcgctgaagtcggtaagaaattcgagaaagataccggaattaaagtcaccgttgagcatccggataaactggaagagaaattcccacaggttgcggcaactggcgatggccctgacattatcttctgggcacacgaccgctttggtggctacgctcaatctggcctgttggctgaaatcaccccggacaaagcgttccaggacaagctgtatccgtttacctgggatgccgtacgttacaacggcaagctgattgcttacccgatcgctgttgaagcgttatcgctgatttataacaaagatctgctgccgaacccgccaaaaacctgggaagagatcccggcgctggataaagaactgaaagcgaaaggtaagagcgcgctgatgttcaacctgcaagaaccgtacttcacctggccgctgattgctgctgacgggggttatgcgttcaagtatgaaaacggcaagtacgacattaaagacgtgggcgtggataacgctggcgcgaaagcgggtctgaccttcctggttgacctgattaaaaacaaacacatgaatgcagacaccgattactccatcgcagaagctgcctttaataaaggcgaaacagcgatgaccatcaacggcccgtgggcatggtccaacatcgacaccagcaaagtgaattatggtgtaacggtactgccgaccttcaagggtcaaccatccaaaccgttcgttggcgtgctgagcgcaggtattaacgccgccagtccgaacaaagagctggcgaaagagttcctcgaaaactatctgctgactgatgaaggtctggaagcggttaataaagacaaaccgctgggtgccgtagcgctgaagtcttacgaggaagagttggcgaaagatccacgtattgccgccaccatggaaaacgcccagaaaggtgaaatcatgccgaacatcccgcagatgtccgctttctggtatgccgtgcgtactgcggtgatcaacgccgccagcggtcgtcagactgtcgatgaagccctgaaagacgcgcagactggtggttctggtgagaacctgtactttcaaagctcagataatgggcctcaaaaccagcgcaacgctccacgtataaccttcggtggcccgtctgactccacaggcagcaaccagaatggtgagcgtagtggagccaggtctaagcagcgccgtccccagggtctgccgaacaacacggcgagctggtttactggccttacccaatttggtaaagaagacttaaaattcccgccgggccagggcgtcccgatcaacactaactcttccccggatgatcagattggttattaccgcagagcaactcgtcggattcgcggcggcgacggtaaaatgaaagatttgcccccgcgttggtacttttactatctcggcaccggtccgcacgctgatctgccctacgggcaaaagcagcctggggtagtgtgggtggctcgaccaggtgccctgaatactccaaaagatcatatcggcacccgtaaccctgctaataacgctgcgatcccgctgcaactgcctcctggtacaaaactgccaaaaggcttctatgcagaagggtcgcgtggtggcagccaggcgagtagccgtagcagctcccgctctcgcaactcgtcccgtaactccactccgggctcttctcgcggcacgtccccggctcgtatggcaggtaacggtggtgacgctgctctggcgctgctactgctggacaggctgaaccagctggagtcgaagatgagtggtaaaggccaacagcagcagggccagaccgttaccaaaaagagcgcagctgaagcatctaaaaaaccgcgacagaaacgtaccgcgactaaagcgtacaatgtaacacaggccttcggtcgtcgaggtccggagcaaactcaaggaaactttggcgatcaggaattaatccgccaggggaccgactacaaacactggccgcaaattgcccagttcgccccatccgctagtgcattcttcggtatgagccgcatcggcatggaagtaacgccaagtggtacgtggctgacctacaccggtgctatcaagcttgatgacaaggacccgaactttaaagaccaggttattctgcttaacaaacatattgatgcctataaaactttcccgccgaccgaacccaaaaaggacaaaaagaaaaaagctgatgaaacccaggctctaccgcagcgtcagaaaaaacagcaaactgtgactctgctgccagctgcggacctggatgatttttccaagcagctgcaacagtctatgagctctgcggactctacgcaggctggtggttctggtcaccatcatcaccatcattaa

SEQ ID NO: 3092 - DNA, 2421 bp, Artificial Sequence
  Description of Artificial Sequence: Synthetic polynucleotide
atgaaaatcgaagaaggtaaactggtaatctggattaacggcgataaaggctataacggtctcgctgaagtcggtaagaaattcgagaaagataccggaattaaagtcaccgttgagcatccggataaactggaagagaaattcccacaggttgcggcaactggcgatggccctgacattatcttctgggcacacgaccgctttggtggctacgctcaatctggcctgttggctgaaatcaccccggacaaagcgttccaggacaagctgtatccgtttacctgggatgccgtacgttacaacggcaagctgattgcttacccgatcgctgttgaagcgttatcgctgatttataacaaagatctgctgccgaacccgccaaaaacctgggaagagatcccggcgctggataaagaactgaaagcgaaaggtaagagcgcgctgatgttcaacctgcaagaaccgtacttcacctggccgctgattgctgctgacgggggttatgcgttcaagtatgaaaacggcaagtacgacattaaagacgtgggcgtggataacgctggcgcgaaagcgggtctgaccttcctggttgacctgattaaaaacaaacacatgaatgcagacaccgattactccatcgcagaagctgcctttaataaaggcgaaacagcgatgaccatcaacggcccgtgggcatggtccaacatcgacaccagcaaagtgaattatggtgtaacggtactgccgaccttcaagggtcaaccatccaaaccgttcgttggcgtgctgagcgcaggtattaacgccgccagtccgaacaaagagctggcgaaagagttcctcgaaaactatctgctgactgatgaaggtctggaagcggttaataaagacaaaccgctgggtgccgtagcgctgaagtcttacgaggaagagttggcgaaagatccacgtattgccgccaccatggaaaacgcccagaaaggtgaaatcatgccgaacatcccgcagatgtccgctttctggtatgccgtgcgtactgcggtgatcaacgccgccagcggtcgtcagactgtcgatgaagccctgaaagacgcgcagactggtggttctggtgagaacctgtactttcaaagctcagataatgggcctcaaaaccagcgcaacgctccacgtataaccttcggtggcccgtctgactccacaggcagcaaccagaatggtgagcgtagtggagccaggtctaagcagcgccgtccccagggtctgccgaacaacacggcgagctggtttactgcgcttacccaacacggtaaagaagacttaaaattcccgcgtggccagggcgtcccgatcaacactaactcttccccggatgatcagattggttattaccgcagagcaactcgtcggattcgcggcggcgacggtaaaatgaaagatttgtctccgcgttggtacttttactatctcggcaccggtccggaagctggactgccctacggggcaaacaaggacgggatcatttgggtggctaccgaaggtgccctgaatactccaaaagatcatatcggcaatcgtaaccctgctaataacgctgcgatcgttctgcaactgcctcagggtacaactctgccaaaaggcttctatgcagaagggtcgcgtggtggcagccaggcgagtagccgtagcagctcccgctctcgcaactcgtcccgtaactccactccgggctcttctcgcggcacgtccccggctcgtatggcaggtaacggtggtgacgctgctctggcgctgctactgctggacaggctgaaccagctggagtcgaagatgagtggtaaaggccaacagcagcagggccagaccgttaccaaaaagagcgcagctgaagcatctaaaaaaccgcgacagaaacgtaccgcgactaaagcgtacaatgtaacacaggccttcggtcgtcgaggtccggagcaaactcaaggaaactttggcgatcaggaattaatccgccaggggaccgactacaaacactggccgcaaattgcccagttcgccccatccgctagtgcattcttcggtatgagccgcatcggcatggaagtaacgccaagtggtacgtggctgacctacaccggtgctatcaagcttgatgacaaggacccgaactttaaagaccaggttattctgcttaacaaacatattgatgcctataaaactttcccgccgaccgaacccaaaaaggacaaaaagaaaaaagctgatgaaacccaggctctaccgcagcgtcagaaaaaacagcaaactgtgactctgctgccagctgcggacctggatgatttttccaagcagctgcaacagtctatgagctctgcggactctacgcaggctggtggttctggtcaccatcatcaccatcattaa

SEQ ID NO: 3093 - DNA, 2421 bp, Artificial Sequence
  Description of Artificial Sequence: Synthetic polynucleotide
atgaaaatcgaagaaggtaaactggtaatctggattaacggcgataaaggctataacggtctcgctgaagtcggtaagaaattcgagaaagataccggaattaaagtcaccgttgagcatccggataaactggaagagaaattcccacaggttgcggcaactggcgatggccctgacattatcttctgggcacacgaccgctttggtggctacgctcaatctggcctgttggctgaaatcaccccggacaaagcgttccaggacaagctgtatccgtttacctgggatgccgtacgttacaacggcaagctgattgcttacccgatcgctgttgaagcgttatcgctgatttataacaaagatctgctgccgaacccgccaaaaacctgggaagagatcccggcgctggataaagaactgaaagcgaaaggtaagagcgcgctgatgttcaacctgcaagaaccgtacttcacctggccgctgattgctgctgacgggggttatgcgttcaagtatgaaaacggcaagtacgacattaaagacgtgggcgtggataacgctggcgcgaaagcgggtctgaccttcctggttgacctgattaaaaacaaacacatgaatgcagacaccgattactccatcgcagaagctgcctttaataaaggcgaaacagcgatgaccatcaacggcccgtgggcatggtccaacatcgacaccagcaaagtgaattatggtgtaacggtactgccgaccttcaagggtcaaccatccaaaccgttcgttggcgtgctgagcgcaggtattaacgccgccagtccgaacaaagagctggcgaaagagttcctcgaaaactatctgctgactgatgaaggtctggaagcggttaataaagacaaaccgctgggtgccgtagcgctgaagtcttacgaggaagagttggcgaaagatccacgtattgccgccaccatggaaaacgcccagaaaggtgaaatcatgccgaacatcccgcagatgtccgctttctggtatgccgtgcgtactgcggtgatcaacgccgccagcggtcgtcagactgtcgatgaagccctgaaagacgcgcagactggtggttctggtgagaacctgtactttcaaagctcagataatgggcctcaaaaccagcgcaacgctccacgtataaccttcggtggcccgtctgactccacaggcagcaaccagaatggtgagcgtagtggagccaggtctaagcagcgccgtccccagggtctgccgaacaacacggcgagctggtttactgcgcttacccaacacggtaaagaagacttaaaattcccgcgtggccagggcgtcccgatcaacactaactcttccccggatgatcagattggttattaccgcagagcaactcgtcggattcgcggcggcgacggtaaaatgaaagatttgtctccgcgttggtacttttactatctcggcaccggtccggaagctggactgccctacggggcaaacaaggacgggatcatttgggtggctaccgaaggtgccctgaatactccaaaagatcatatcggcacccgtaaccctgctaataacgctgcgatcgttctgcaactgcctcagggtacaactctgccaaaaggcttctatgcagaagggtcgcgtggtggcagccaggcgagtagccgtagcagctcccgctctcgcaactcgtcccgtaactccactccgggctcttctcgcggcacgtccccggctcgtatggcaggtaacggtggtgacgctgctctggcgctgctactgctggacaggctgaaccagctggagtcgaagatgagtggtaaaggccaacagcagcagggccagaccgttaccaaaaagagcgcagctgaagcatctaaaaaaccgcgacagaaacgtaccgcgactaaagcgtacaatgtaacacaggcctatggtcgtcgaggtccggagcaaactcaaggaaactttggcgatcaggaattaatccgccaggggaccgactacaaacactggccgcaaattgcccagttcgccccatccgctagtgcattcttcggtatgagccgcatcggcatggaagtaacgccaagtggtacgtggctgacctacaccggtgctatcaagcttgatgacaaggacccgaactttaaagaccaggttattctgcttaacaaacatattgatgcctataaaactttcccgccgaccgaacccaaaaaggacaaaaagaaaaaagctgatgaaacccaggctctaccgcagcgtcagaaaaaacagcaaactgtgactctgctgccagctgcggacctggatgatttttccaagcagctgcaacagtctatgagctctgcggactctacgcaggctggtggttctggtcaccatcatcaccatcattaa

SEQ ID NO: 3094 - DNA, 2421 bp, Artificial Sequence
  Description of Artificial Sequence: Synthetic polynucleotide
atgaaaatcgaagaaggtaaactggtaatctggattaacggcgataaaggctataacggtctcgctgaagtcggtaagaaattcgagaaagataccggaattaaagtcaccgttgagcatccggataaactggaagagaaattcccacaggttgcggcaactggcgatggccctgacattatcttctgggcacacgaccgctttggtggctacgctcaatctggcctgttggctgaaatcaccccggacaaagcgttccaggacaagctgtatccgtttacctgggatgccgtacgttacaacggcaagctgattgcttacccgatcgctgttgaagcgttatcgctgatttataacaaagatctgctgccgaacccgccaaaaacctgggaagagatcccggcgctggataaagaactgaaagcgaaaggtaagagcgcgctgatgttcaacctgcaagaaccgtacttcacctggccgctgattgctgctgacgggggttatgcgttcaagtatgaaaacggcaagtacgacattaaagacgtgggcgtggataacgctggcgcgaaagcgggtctgaccttcctggttgacctgattaaaaacaaacacatgaatgcagacaccgattactccatcgcagaagctgcctttaataaaggcgaaacagcgatgaccatcaacggcccgtgggcatggtccaacatcgacaccagcaaagtgaattatggtgtaacggtactgccgaccttcaagggtcaaccatccaaaccgttcgttggcgtgctgagcgcaggtattaacgccgccagtccgaacaaagagctggcgaaagagttcctcgaaaactatctgctgactgatgaaggtctggaagcggttaataaagacaaaccgctgggtgccgtagcgctgaagtcttacgaggaagagttggcgaaagatccacgtattgccgccaccatggaaaacgcccagaaaggtgaaatcatgccgaacatcccgcagatgtccgctttctggtatgccgtgcgtactgcggtgatcaacgccgccagcggtcgtcagactgtcgatgaagccctgaaagacgcgcagactggtggttctggtgagaacctgtactttcaaagctcagataatgggcctcaaaaccagcgcaacgctccacgtataaccttcggtggcccgtctgactccacaggcagcaaccagaatggtgagcgtagtggagccaggtctaagcagcgccgtccccagggtctgccgaacaacacggcgagctggtttactgcgcttacccaacacggtaaagaagacttaaaattcccgcgtggccagggcgtcccgatcaacactaactcttccccggatgatcagattggtgggtaccgcagagcaactcgtcggattcgcggcggcgacggtaaaatgaaagatttgtctccgcgttggtacttttactatctcggcaccggtccggaagctggactgccctacggggcaaacaaggacgggatcatttgggtggctaccgaaggtgccctgaatactccaaaagatcatatcggcacccgtaaccctgctaataacgctgcgatcgttctgcaactgcctcagggtacaactctgccaaaaggcttctatgcagaagggtcgcgtggtggcagccaggcgagtagccgtagcagctcccgctctcgcaactcgtcccgtaactccactccgggctcttctcgcggcacgtccccggctcgtatggcaggtaacggtggtgacgctgctctggcgctgctactgctggacaggctgaaccagctggagtcgaagatgagtggtaaaggccaacagcagcagggccagaccgttaccaaaaagagcgcagctgaagcatctaaaaaaccgcgacagaaacgtaccgcgactaaagcgtacaatgtaacacaggccttcggtcgtcgaggtccggagcaaactcaaggaaactttggcgatcaggaattaatccgccaggggaccgactacaaacactggccgcaaattgcccagttcgccccatccgctagtgcattcttcggtatgagccgcatcggcatggaagtaacgccaagtggtacgtggctgacctacaccggtgctatcaagcttgatgacaaggacccgaactttaaagaccaggttattctgcttaacaaacatattgatgcctataaaactttcccgccgaccgaacccaaaaaggacaaaaagaaaaaagctgatgaaacccaggctctaccgcagcgtcagaaaaaacagcaaactgtgactctgctgccagctgcggacctggatgatttttccaagcagctgcaacagtctatgagctctgcggactctacgcaggctggtggttctggtcaccatcatcaccatcattaa

SEQ ID NO: 3095 - DNA, 2421 bp, Artificial Sequence
  Description of Artificial Sequence: Synthetic polynucleotide
atgaaaatcgaagaaggtaaactggtaatctggattaacggcgataaaggctataacggtctcgctgaagtcggtaagaaattcgagaaagataccggaattaaagtcaccgttgagcatccggataaactggaagagaaattcccacaggttgcggcaactggcgatggccctgacattatcttctgggcacacgaccgctttggtggctacgctcaatctggcctgttggctgaaatcaccccggacaaagcgttccaggacaagctgtatccgtttacctgggatgccgtacgttacaacggcaagctgattgcttacccgatcgctgttgaagcgttatcgctgatttataacaaagatctgctgccgaacccgccaaaaacctgggaagagatcccggcgctggataaagaactgaaagcgaaaggtaagagcgcgctgatgttcaacctgcaagaaccgtacttcacctggccgctgattgctgctgacgggggttatgcgttcaagtatgaaaacggcaagtacgacattaaagacgtgggcgtggataacgctggcgcgaaagcgggtctgaccttcctggttgacctgattaaaaacaaacacatgaatgcagacaccgattactccatcgcagaagctgcctttaataaaggcgaaacagcgatgaccatcaacggcccgtgggcatggtccaacatcgacaccagcaaagtgaattatggtgtaacggtactgccgaccttcaagggtcaaccatccaaaccgttcgttggcgtgctgagcgcaggtattaacgccgccagtccgaacaaagagctggcgaaagagttcctcgaaaactatctgctgactgatgaaggtctggaagcggttaataaagacaaaccgctgggtgccgtagcgctgaagtcttacgaggaagagttggcgaaagatccacgtattgccgccaccatggaaaacgcccagaaaggtgaaatcatgccgaacatcccgcagatgtccgctttctggtatgccgtgcgtactgcggtgatcaacgccgccagcggtcgtcagactgtcgatgaagccctgaaagacgcgcagactggtggttctggtgagaacctgtactttcaaagctcagataatgggcctcaaaaccagcgcaacgctccacgtataaccttcggtggcccgtctgactccacaggcagcaaccagaatggtgagcgtagtggagccaggtctaagcagcgccgtccccagggtctgccgaacaacacggcgagctggtttactgcgcttacccaacacggtaaagaagacttaaaattcccgcgtggccagggcgtcccgatcaacactaactcttccccggatgatcagattggttattaccgcagagcaactcgtcggattcgcggcggcgacggtaaaatgaaagatttgtctccgcgttggtacttttactatctcggcaccggtccggaagctggactgccctacggggcaaacaaggacgggatcatttgggtggctaccgaaggtgccctgaataaaccaaaagatcatatcggcacccgtaaccctgctaataacgctgcgatcgttctgcaactgcctcagggtacaactctgccaaaaggcttctatgcagaagggtcgcgtggtggcagccaggcgagtagccgtagcagctcccgctctcgcaactcgtcccgtaactccactccgggctcttctcgcggcacgtccccggctcgtatggcaggtaacggtggtgacgctgctctggcgctgctactgctggacaggctgaaccagctggagtcgaagatgagtggtaaaggccaacagcagcagggccagaccgttaccaaaaagagcgcagctgaagcatctaaaaaaccgcgacagaaacgtaccgcgactaaagcgtacaatgtaacacaggccttcggtcgtcgaggtccggagcaaactcaaggaaactttggcgatcaggaattaatccgccaggggaccgactacaaacactggccgcaaattgcccagttcgccccatccgctagtgcattcttcggtatgagccgcatcggcatggaagtaacgccaagtggtacgtggctgacctacaccggtgctatcaagcttgatgacaaggacccgaactttaaagaccaggttattctgcttaacaaacatattgatgcctataaaactttcccgccgaccgaacccaaaaaggacaaaaagaaaaaagctgatgaaacccaggctctaccgcagcgtcagaaaaaacagcaaactgtgactctgctgccagctgcggacctggatgatttttccaagcagctgcaacagtctatgagctctgcggactctacgcaggctggtggttctggtcaccatcatcaccatcattaa

SEQ ID NO: 3096 - DNA, 2421 bp, Artificial Sequence
  Description of Artificial Sequence: Synthetic polynucleotide
atgaaaatcgaagaaggtaaactggtaatctggattaacggcgataaaggctataacggtctcgctgaagtcggtaagaaattcgagaaagataccggaattaaagtcaccgttgagcatccggataaactggaagagaaattcccacaggttgcggcaactggcgatggccctgacattatcttctgggcacacgaccgctttggtggctacgctcaatctggcctgttggctgaaatcaccccggacaaagcgttccaggacaagctgtatccgtttacctgggatgccgtacgttacaacggcaagctgattgcttacccgatcgctgttgaagcgttatcgctgatttataacaaagatctgctgccgaacccgccaaaaacctgggaagagatcccggcgctggataaagaactgaaagcgaaaggtaagagcgcgctgatgttcaacctgcaagaaccgtacttcacctggccgctgattgctgctgacgggggttatgcgttcaagtatgaaaacggcaagtacgacattaaagacgtgggcgtggataacgctggcgcgaaagcgggtctgaccttcctggttgacctgattaaaaacaaacacatgaatgcagacaccgattactccatcgcagaagctgcctttaataaaggcgaaacagcgatgaccatcaacggcccgtgggcatggtccaacatcgacaccagcaaagtgaattatggtgtaacggtactgccgaccttcaagggtcaaccatccaaaccgttcgttggcgtgctgagcgcaggtattaacgccgccagtccgaacaaagagctggcgaaagagttcctcgaaaactatctgctgactgatgaaggtctggaagcggttaataaagacaaaccgctgggtgccgtagcgctgaagtcttacgaggaagagttggcgaaagatccacgtattgccgccaccatggaaaacgcccagaaaggtgaaatcatgccgaacatcccgcagatgtccgctttctggtatgccgtgcgtactgcggtgatcaacgccgccagcggtcgtcagactgtcgatgaagccctgaaagacgcgcagactggtggttctggtgagaacctgtactttcaaagctcagataatgggcctcaaaaccagcgcaacgctccacgtataaccttcggtggcccgtctgactccacaggcagcaaccagaatggtgagcgtagtggagccaggtctaagcagcgccgtccccagggtctgccgaacaacacggcgagctggtttactgcgcttacccaacacggtaaagaagacttaaaattcccgcgtggccagggcgtcccgatcaacactaactcttccccggatgatcagattggttattaccgcagagcaactcgtcggattcgcggcggcgacggtaaaatgaaagatttgtctccgcgttggtacttttactatctcggcaccggtccggaagctggactgccctacggggcaaacaaggacgggatcatttgggtggctaccgaaggtgccctgaatactccaaaagatcatatcggcacccgtaaccctgctaataacgctgcgatcgttctgcaactgcctcagggtacaactctgccaaaaggcttctatgcagaagggtcgcgtggtggcagccaggcgagtagccgtagcagctcccgctctcgcaactcgtcccgtaactccactccgggctcttctcgcggcacgtccccggctcgtatggcaggtaacggtggtgacgctgctctggcgctgctactgctggacaggctgaaccagctggagtcgaagatgagtggtaaaggccaacagcagcagggccagaccgttaccaaaaagagcgcagctgaagcatctaaaaaaccgcgacagaaacgtaccgcgactaaagcgtacaatgtaacacaggccttcggtcgtcgaggtccggagcaaactcaaggaaactttggcgatcaggaattaatccgccaggggaccgactacaaacactggccgcaaattgcccagttcgccccatccgctagtgcattcttcggtatgagccgcatcacgatggaagtaacgccaagtggtacgtggctgacctacaccggtgctatcaagcttgatgacaaggacccgaactttaaagaccaggttattctgcttaacaaacatattgatgcctataaaactttcccgccgaccgaacccaaaaaggacaaaaagaaaaaagctgatgaaacccaggctctaccgcagcgtcagaaaaaacagcaaactgtgactctgctgccagctgcggacctggatgatttttccaagcagctgcaacagtctatgagctctgcggactctacgcaggctggtggttctggtcaccatcatcaccatcattaa

SEQ ID NO: 3097 - DNA, 2421 bp, Artificial Sequence
  Description of Artificial Sequence: Synthetic polynucleotide
atgaaaatcgaagaaggtaaactggtaatctggattaacggcgataaaggctataacggtctcgctgaagtcggtaagaaattcgagaaagataccggaattaaagtcaccgttgagcatccggataaactggaagagaaattcccacaggttgcggcaactggcgatggccctgacattatcttctgggcacacgaccgctttggtggctacgctcaatctggcctgttggctgaaatcaccccggacaaagcgttccaggacaagctgtatccgtttacctgggatgccgtacgttacaacggcaagctgattgcttacccgatcgctgttgaagcgttatcgctgatttataacaaagatctgctgccgaacccgccaaaaacctgggaagagatcccggcgctggataaagaactgaaagcgaaaggtaagagcgcgctgatgttcaacctgcaagaaccgtacttcacctggccgctgattgctgctgacgggggttatgcgttcaagtatgaaaacggcaagtacgacattaaagacgtgggcgtggataacgctggcgcgaaagcgggtctgaccttcctggttgacctgattaaaaacaaacacatgaatgcagacaccgattactccatcgcagaagctgcctttaataaaggcgaaacagcgatgaccatcaacggcccgtgggcatggtccaacatcgacaccagcaaagtgaattatggtgtaacggtactgccgaccttcaagggtcaaccatccaaaccgttcgttggcgtgctgagcgcaggtattaacgccgccagtccgaacaaagagctggcgaaagagttcctcgaaaactatctgctgactgatgaaggtctggaagcggttaataaagacaaaccgctgggtgccgtagcgctgaagtcttacgaggaagagttggcgaaagatccacgtattgccgccaccatggaaaacgcccagaaaggtgaaatcatgccgaacatcccgcagatgtccgctttctggtatgccgtgcgtactgcggtgatcaacgccgccagcggtcgtcagactgtcgatgaagccctgaaagacgcgcagactggtggttctggtgagaacctgtactttcaaagctcagataatgggcctcaaaaccagcgcaacgctccacgtataaccttcggtggcccgtctgactccacaggcagcaaccagaatggtgagcgtagtggagccaggtctaagcagcgccgtccccagggtctgccgaacaacacggcgagctggtttactccgcttacccaacacggtaaagaagacttaaaattcccgccaggccagggcgtcccgatcaacactaactcttccccggatgatcagattggttattaccgcagagcaactcgtcggattcgcggcggcgacggtaaaatgaaagatttgcctccgcgttggtacttttactatctcggcaccggtccggaagctgatctgccctacgggcaagtgaagcctgggatcttttgggtggctgaagaaggtgccctgaatactccaaaagatcatatcggcacccgtaaccctgctaataacgctgcgatcccactgcaactgcctccgggtacaactctgccaaaaggcttctatgcagaagggtcgcgtggtggcagccaggcgagtagccgtagcagctcccgctctcgcaactcgtcccgtaactccactccgggctcttctcgcggcacgtccccggctcgtatggcaggtaacggtggtgacgctgctctggcgctgctactgctggacaggctgaaccagctggagtcgaagatgagtggtaaaggccaacagcagcagggccagaccgttaccaaaaagagcgcagctgaagcatctaaaaaaccgcgacagaaacgtaccgcgactaaagcgtacaatgtaacacaggccttcggtcgtcgaggtccggagcaaactcaaggaaactttggcgatcaggaattaatccgccaggggaccgactacaaacactggccgcaaattgcccagttcgccccatccgctagtgcattcttcggtatgagccgcatcggcatggaagtaacgccaagtggtacgtggctgacctacaccggtgctatcaagcttgatgacaaggacccgaactttaaagaccaggttattctgcttaacaaacatattgatgcctataaaactttcccgccgaccgaacccaaaaaggacaaaaagaaaaaagctgatgaaacccaggctctaccgcagcgtcagaaaaaacagcaaactgtgactctgctgccagctgcggacctggatgatttttccaagcagctgcaacagtctatgagctctgcggactctacgcaggctggtggttctggtcaccatcatcaccatcattaa

SEQ ID NO: 3098 - DNA, 2421 bp, Artificial Sequence
  Description of Artificial Sequence: Synthetic polynucleotide
atgaaaatcgaagaaggtaaactggtaatctggattaacggcgataaaggctataacggtctcgctgaagtcggtaagaaattcgagaaagataccggaattaaagtcaccgttgagcatccggataaactggaagagaaattcccacaggttgcggcaactggcgatggccctgacattatcttctgggcacacgaccgctttggtggctacgctcaatctggcctgttggctgaaatcaccccggacaaagcgttccaggacaagctgtatccgtttacctgggatgccgtacgttacaacggcaagctgattgcttacccgatcgctgttgaagcgttatcgctgatttataacaaagatctgctgccgaacccgccaaaaacctgggaagagatcccggcgctggataaagaactgaaagcgaaaggtaagagcgcgctgatgttcaacctgcaagaaccgtacttcacctggccgctgattgctgctgacgggggttatgcgttcaagtatgaaaacggcaagtacgacattaaagacgtgggcgtggataacgctggcgcgaaagcgggtctgaccttcctggttgacctgattaaaaacaaacacatgaatgcagacaccgattactccatcgcagaagctgcctttaataaaggcgaaacagcgatgaccatcaacggcccgtgggcatggtccaacatcgacaccagcaaagtgaattatggtgtaacggtactgccgaccttcaagggtcaaccatccaaaccgttcgttggcgtgctgagcgcaggtattaacgccgccagtccgaacaaagagctggcgaaagagttcctcgaaaactatctgctgactgatgaaggtctggaagcggttaataaagacaaaccgctgggtgccgtagcgctgaagtcttacgaggaagagttggcgaaagatccacgtattgccgccaccatggaaaacgcccagaaaggtgaaatcatgccgaacatcccgcagatgtccgctttctggtatgccgtgcgtactgcggtgatcaacgccgccagcggtcgtcagactgtcgatgaagccctgaaagacgcgcagactggtggttctggtgagaacctgtactttcaaagctcagataatgggcctcaaaaccagcgcaacgctccacgtataaccttcggtggcccgtctgactccacaggcagcaaccagaatggtgagcgtagtggagccaggtctaagcagcgccgtccccagggtctgccgaacaacacggcgagctggtttactgcgcttacccaacacggtaaagaagacttaaaattcccgcgtggccagggcgtcccgatcaacactaactcttccccggatgatcagattggttattaccgcagagcaactcgtcggattcgcggcggcgacggtaaaatgaaagatttgtctccgcgttggtacttttactatctcggcaccggtccggaagctggactgccctacggggcaaacaaggacgggatcatttgggtggctaccgaaggtgccctgaatactccaaaagatcatatcggcacccgtaaccctgctaataacgctgcgatcgttctgcaactgcctcagggtacaactctgccaaaaggcttctatgcagaagggtcgcgtggtggcagccaggcgagtagccgtagcagctcccgctctcgcaactcgtcccgtaactccactccgggctcttctcgcggcacgtccccggctcgtatggcaggtaacggtggtgacgctgctctggcgctgctactgctggacaggctgaaccagctggagtcgaagatgagtggtaaaggccaacagcagcagggccagaccgttaccaaaaagagcgcagctgaagcatctaaaaaaccgcgacagaaacgtaccgcgactaaagcgtacaatgtaacacaggccttcggtcgtcgaggtccggagcaaactcaaggaaactttggcgatcaggaattaatccgccaggggaccgactacaaacactggccgcaaattgcccagttcgccccatccgctagtgcattcttcggtatgagccgcatcggcatggaatatacgccaagtggtacgtggctgacctacaccggtgctatcaagcttgatgacaaggacccgaactttaaagaccaggttattctgcttaacaaacatattgatgcctataaaactttcccgccgaccgaacccaaaaaggacaaaaagaaaaaagctgatgaaacccaggctctaccgcagcgtcagaaaaaacagcaaactgtgactctgctgccagctgcggacctggatgatttttccaagcagctgcaacagtctatgagctctgcggactctacgcaggctggtggttctggtcaccatcatcaccatcattaa

SEQ ID NO: 3099 - DNA, 2421 bp, Artificial Sequence
  Description of Artificial Sequence: Synthetic polynucleotide
atgaaaatcgaagaaggtaaactggtaatctggattaacggcgataaaggctataacggtctcgctgaagtcggtaagaaattcgagaaagataccggaattaaagtcaccgttgagcatccggataaactggaagagaaattcccacaggttgcggcaactggcgatggccctgacattatcttctgggcacacgaccgctttggtggctacgctcaatctggcctgttggctgaaatcaccccggacaaagcgttccaggacaagctgtatccgtttacctgggatgccgtacgttacaacggcaagctgattgcttacccgatcgctgttgaagcgttatcgctgatttataacaaagatctgctgccgaacccgccaaaaacctgggaagagatcccggcgctggataaagaactgaaagcgaaaggtaagagcgcgctgatgttcaacctgcaagaaccgtacttcacctggccgctgattgctgctgacgggggttatgcgttcaagtatgaaaacggcaagtacgacattaaagacgtgggcgtggataacgctggcgcgaaagcgggtctgaccttcctggttgacctgattaaaaacaaacacatgaatgcagacaccgattactccatcgcagaagctgcctttaataaaggcgaaacagcgatgaccatcaacggcccgtgggcatggtccaacatcgacaccagcaaagtgaattatggtgtaacggtactgccgaccttcaagggtcaaccatccaaaccgttcgttggcgtgctgagcgcaggtattaacgccgccagtccgaacaaagagctggcgaaagagttcctcgaaaactatctgctgactgatgaaggtctggaagcggttaataaagacaaaccgctgggtgccgtagcgctgaagtcttacgaggaagagttggcgaaagatccacgtattgccgccaccatggaaaacgcccagaaaggtgaaatcatgccgaacatcccgcagatgtccgctttctggtatgccgtgcgtactgcggtgatcaacgccgccagcggtcgtcagactgtcgatgaagccctgaaagacgcgcagactggtggttctggtgagaacctgtactttcaaagctcagataatgggcctcaaaaccagcgcaacgctccacgtataaccttcggtggcccgtctgactccacaggcagcaaccagaatggtgagcgtagtggagccaggtctaagcagcgccgtccccagggtctgccgaacaacacggcgagctggtttactggccttacccaaaatggtaaagaagacttaaaattcccgccgggccagggcgtcccgatcaacactaactcttccccggatgatcagattggttattaccgcagagcaactcgtcggattcgcggcggcgacggtaaaatgaaagatttgccaccgaagtggtacttttactatctcggcaccggtccgcacgctgatctgccctacgggcaaaagaaggacggggtgttttgggtggctcgacctggtgccctgaatactccaaaagatcatatcggcacccgtaaccctgctaataacgctgcgatcccactgcaactgcctccgggtacaaaactgccaaaaggcttctatgcagaagggtcgcgtggtggcagccaggcgagtagccgtagcagctcccgctctcgcaactcgtcccgtaactccactccgggctcttctcgcggcacgtccccggctcgtatggcaggtaacggtggtgacgctgctctggcgctgctactgctggacaggctgaaccagctggagtcgaagatgagtggtaaaggccaacagcagcagggccagaccgttaccaaaaagagcgcagctgaagcatctaaaaaaccgcgacagaaacgtaccgcgactaaagcgtacaatgtaacacaggccttcggtcgtcgaggtccggagcaaactcaaggaaactttggcgatcaggaattaatccgccaggggaccgactacaaacactggccgcaaattgcccagttcgccccatccgctagtgcattcttcggtatgagccgcatcggcatggaagtaacgccaagtggtacgtggctgacctacaccggtgctatcaagcttgatgacaaggacccgaactttaaagaccaggttattctgcttaacaaacatattgatgcctataaaactttcccgccgaccgaacccaaaaaggacaaaaagaaaaaagctgatgaaacccaggctctaccgcagcgtcagaaaaaacagcaaactgtgactctgctgccagctgcggacctggatgatttttccaagcagctgcaacagtctatgagctctgcggactctacgcaggctggtggttctggtcaccatcatcaccatcattaa

SEQ ID NO: 3100 - DNA, 2421 bp, Artificial Sequence
  Description of Artificial Sequence: Synthetic polynucleotide
atgaaaatcgaagaaggtaaactggtaatctggattaacggcgataaaggctataacggtctcgctgaagtcggtaagaaattcgagaaagataccggaattaaagtcaccgttgagcatccggataaactggaagagaaattcccacaggttgcggcaactggcgatggccctgacattatcttctgggcacacgaccgctttggtggctacgctcaatctggcctgttggctgaaatcaccccggacaaagcgttccaggacaagctgtatccgtttacctgggatgccgtacgttacaacggcaagctgattgcttacccgatcgctgttgaagcgttatcgctgatttataacaaagatctgctgccgaacccgccaaaaacctgggaagagatcccggcgctggataaagaactgaaagcgaaaggtaagagcgcgctgatgttcaacctgcaagaaccgtacttcacctggccgctgattgctgctgacgggggttatgcgttcaagtatgaaaacggcaagtacgacattaaagacgtgggcgtggataacgctggcgcgaaagcgggtctgaccttcctggttgacctgattaaaaacaaacacatgaatgcagacaccgattactccatcgcagaagctgcctttaataaaggcgaaacagcgatgaccatcaacggcccgtgggcatggtccaacatcgacaccagcaaagtgaattatggtgtaacggtactgccgaccttcaagggtcaaccatccaaaccgttcgttggcgtgctgagcgcaggtattaacgccgccagtccgaacaaagagctggcgaaagagttcctcgaaaactatctgctgactgatgaaggtctggaagcggttaataaagacaaaccgctgggtgccgtagcgctgaagtcttacgaggaagagttggcgaaagatccacgtattgccgccaccatggaaaacgcccagaaaggtgaaatcatgccgaacatcccgcagatgtccgctttctggtatgccgtgcgtactgcggtgatcaacgccgccagcggtcgtcagactgtcgatgaagccctgaaagacgcgcagactggtggttctggtgagaacctgtactttcaaagctcagataatgggcctcaaaaccagcgcaacgctccacgtataaccttcggtggcccgtctgactccacaggcagcaaccagaatggtgagcgtagtggagccaggtctaagcagcgccgtccccagggtctgccgaacaacacggcgagctggtttactgcgcttacccaacacggtaaagaagacttaaaattcccgcgtggccagggcgtcccgatcaacactaactcttccccggatgatcagattggttattaccgcagagcaactcgtcggattcgcggcggcgacggtaaaatgaaagatttgtctccgcgttggtacttttactatctcggcaccggtccggaagctggactgccctacggggcaaacaaggacgggatcatttgggtggctaccgaaggtgccctgaatactccaaaagatcatatcggcacccgtaaccctgctaataacgctgcgatcgttctgcaactgcctcagggtacaactctgccaaaaggcttctatgcagaagggtcgcgtggtggcagccaggcgagtagccgtagcagctcccgctctcgcaactcgtcccgtaactccactccgggctcttctcgcggcacgtccccggctcgtatggcaggtaacggtggtgacgctgctctggcgctgctactgctggacaggctgaaccagctggagtcgaagatgagtggtaaaggccaacagcagcagggccagaccgttaccaaaaagagcgcagctgaagcatctaaaaaaccgcgacagaaacgtaccgcgactaaagcgtacaatgtaacacaggccttcggtcgtcgaggtccggagcaaactcaaggaaactttggcgatcaggaattaatccgccaggggaccgactacaaacactggccgcaaattgcccagttcgccccatccgctagtgcattcttcggtatgagccgcatcggcatggaagtaacgccaagtggtacgtggctgacctacaccggtaagatcaagcttgatgacaaggacccgaactttaaagaccaggttattctgcttaacaaacatattgatgcctataaaactttcccgccgaccgaacccaaaaaggacaaaaagaaaaaagctgatgaaacccaggctctaccgcagcgtcagaaaaaacagcaaactgtgactctgctgccagctgcggacctggatgatttttccaagcagctgcaacagtctatgagctctgcggactctacgcaggctggtggttctggtcaccatcatcaccatcattaa

SEQ ID NO: 3101 - DNA, 2421 bp, Artificial Sequence
  Description of Artificial Sequence: Synthetic polynucleotide
atgaaaatcgaagaaggtaaactggtaatctggattaacggcgataaaggctataacggtctcgctgaagtcggtaagaaattcgagaaagataccggaattaaagtcaccgttgagcatccggataaactggaagagaaattcccacaggttgcggcaactggcgatggccctgacattatcttctgggcacacgaccgctttggtggctacgctcaatctggcctgttggctgaaatcaccccggacaaagcgttccaggacaagctgtatccgtttacctgggatgccgtacgttacaacggcaagctgattgcttacccgatcgctgttgaagcgttatcgctgatttataacaaagatctgctgccgaacccgccaaaaacctgggaagagatcccggcgctggataaagaactgaaagcgaaaggtaagagcgcgctgatgttcaacctgcaagaaccgtacttcacctggccgctgattgctgctgacgggggttatgcgttcaagtatgaaaacggcaagtacgacattaaagacgtgggcgtggataacgctggcgcgaaagcgggtctgaccttcctggttgacctgattaaaaacaaacacatgaatgcagacaccgattactccatcgcagaagctgcctttaataaaggcgaaacagcgatgaccatcaacggcccgtgggcatggtccaacatcgacaccagcaaagtgaattatggtgtaacggtactgccgaccttcaagggtcaaccatccaaaccgttcgttggcgtgctgagcgcaggtattaacgccgccagtccgaacaaagagctggcgaaagagttcctcgaaaactatctgctgactgatgaaggtctggaagcggttaataaagacaaaccgctgggtgccgtagcgctgaagtcttacgaggaagagttggcgaaagatccacgtattgccgccaccatggaaaacgcccagaaaggtgaaatcatgccgaacatcccgcagatgtccgctttctggtatgccgtgcgtactgcggtgatcaacgccgccagcggtcgtcagactgtcgatgaagccctgaaagacgcgcagactggtggttctggtgagaacctgtactttcaaagctcagataatgggcctcaaaaccagcgcaacgctccacgtataaccttcggtggcccgtctgactccacaggcagcaaccagaatggtgagcgtagtggagccaggtctaagcagcgccgtccccagggtctgccgaacaacacggcgagctggtttactccgcttacccaacacggtaaagaagacttaaaattcccgccgggccagggcgtcccgatcaacactaactcttccccggatgatcagattggttattaccgcagagcaactcgtcggattcgcggcggcgacggtaaaatgaaagatttgcctccgcgttggtacttttactatctcggcaccggtccggaagctgatctgccctacgggcaagtaaaggacgggatcgtgtgggtggctgaagaaggtgccctgaatactccaaaagatcatatcggcacccgtaaccctgctaataacgctgcgatcccactgcaactgcctcccggtacaactctgccaaaaggcttctatgcagaagggtcgcgtggtggcagccaggcgagtagccgtagcagctcccgctctcgcaactcgtcccgtaactccactccgggctcttctcgcggcacgtccccggctcgtatggcaggtaacggtggtgacgctgctctggcgctgctactgctggacaggctgaaccagctggagtcgaagatgagtggtaaaggccaacagcagcagggccagaccgttaccaaaaagagcgcagctgaagcatctaaaaaaccgcgacagaaacgtaccgcgactaaagcgtacaatgtaacacaggccttcggtcgtcgaggtccggagcaaactcaaggaaactttggcgatcaggaattaatccgccaggggaccgactacaaacactggccgcaaattgcccagttcgccccatccgctagtgcattcttcggtatgagccgcatcggcatggaagtaacgccaagtggtacgtggctgacctacaccggtgctatcaagcttgatgacaaggacccgaactttaaagaccaggttattctgcttaacaaacatattgatgcctataaaactttcccgccgaccgaacccaaaaaggacaaaaagaaaaaagctgatgaaacccaggctctaccgcagcgtcagaaaaaacagcaaactgtgactctgctgccagctgcggacctggatgatttttccaagcagctgcaacagtctatgagctctgcggactctacgcaggctggtggttctggtcaccatcatcaccatcattaa

SEQ ID NO: 3102 - DNA, 2421 bp, Artificial Sequence
  Description of Artificial Sequence: Synthetic polynucleotide
atgaaaatcgaagaaggtaaactggtaatctggattaacggcgataaaggctataacggtctcgctgaagtcggtaagaaattcgagaaagataccggaattaaagtcaccgttgagcatccggataaactggaagagaaattcccacaggttgcggcaactggcgatggccctgacattatcttctgggcacacgaccgctttggtggctacgctcaatctggcctgttggctgaaatcaccccggacaaagcgttccaggacaagctgtatccgtttacctgggatgccgtacgttacaacggcaagctgattgcttacccgatcgctgttgaagcgttatcgctgatttataacaaagatctgctgccgaacccgccaaaaacctgggaagagatcccggcgctggataaagaactgaaagcgaaaggtaagagcgcgctgatgttcaacctgcaagaaccgtacttcacctggccgctgattgctgctgacgggggttatgcgttcaagtatgaaaacggcaagtacgacattaaagacgtgggcgtggataacgctggcgcgaaagcgggtctgaccttcctggttgacctgattaaaaacaaacacatgaatgcagacaccgattactccatcgcagaagctgcctttaataaaggcgaaacagcgatgaccatcaacggcccgtgggcatggtccaacatcgacaccagcaaagtgaattatggtgtaacggtactgccgaccttcaagggtcaaccatccaaaccgttcgttggcgtgctgagcgcaggtattaacgccgccagtccgaacaaagagctggcgaaagagttcctcgaaaactatctgctgactgatgaaggtctggaagcggttaataaagacaaaccgctgggtgccgtagcgctgaagtcttacgaggaagagttggcgaaagatccacgtattgccgccaccatggaaaacgcccagaaaggtgaaatcatgccgaacatcccgcagatgtccgctttctggtatgccgtgcgtactgcggtgatcaacgccgccagcggtcgtcagactgtcgatgaagccctgaaagacgcgcagactggtggttctggtgagaacctgtactttcaaagctcagataatgggcctcaaaaccagcgcaacgctccacgtataaccttcggtggcccgtctgactccacaggcagcaaccagaatggtgagcgtagtggagccaggtctaagcagcgccgtccccagggtctgccgaacaacacggcgagctggtttactgcgcttacccaacacggtaaagaagacttaaaattcccgcgtggccagggcgtcccgatcaactcgaactcttccccggatgatcagattggttattaccgcagagcaactcgtcggattcgcggcggcgacggtaaaatgaaagatttgtctccgcgttggtacttttactatctcggcaccggtccggaagctggactgccctacggggcaaacaaggacgggatcatttgggtggctaccgaaggtgccctgaatactccaaaagatcatatcggcacccgtaaccctgctaataacgctgcgatcgttctgcaactgcctcagggtacaactctgccaaaaggcttctatgcagaagggtcgcgtggtggcagccaggcgagtagccgtagcagctcccgctctcgcaactcgtcccgtaactccactccgggctcttctcgcggcacgtccccggctcgtatggcaggtaacggtggtgacgctgctctggcgctgctactgctggacaggctgaaccagctggagtcgaagatgagtggtaaaggccaacagcagcagggccagaccgttaccaaaaagagcgcagctgaagcatctaaaaaaccgcgacagaaacgtaccgcgactaaagcgtacaatgtaacacaggccttcggtcgtcgaggtccggagcaaactcaaggaaactttggcgatcaggaattaatccgccaggggaccgactacaaacactggccgcaaattgcccagttcgccccatccgctagtgcattcttcggtatgagccgcatcggcatggaagtaacgccaagtggtacgtggctgacctacaccggtgctatcaagcttgatgacaaggacccgaactttaaagaccaggttattctgcttaacaaacatattgatgcctataaaactttcccgccgaccgaacccaaaaaggacaaaaagaaaaaagctgatgaaacccaggctctaccgcagcgtcagaaaaaacagcaaactgtgactctgctgccagctgcggacctggatgatttttccaagcagctgcaacagtctatgagctctgcggactctacgcaggctggtggttctggtcaccatcatcaccatcattaa

SEQ ID NO: 3103 - DNA, 2421 bp, Artificial Sequence
  Description of Artificial Sequence: Synthetic polynucleotide
atgaaaatcgaagaaggtaaactggtaatctggattaacggcgataaaggctataacggtctcgctgaagtcggtaagaaattcgagaaagataccggaattaaagtcaccgttgagcatccggataaactggaagagaaattcccacaggttgcggcaactggcgatggccctgacattatcttctgggcacacgaccgctttggtggctacgctcaatctggcctgttggctgaaatcaccccggacaaagcgttccaggacaagctgtatccgtttacctgggatgccgtacgttacaacggcaagctgattgcttacccgatcgctgttgaagcgttatcgctgatttataacaaagatctgctgccgaacccgccaaaaacctgggaagagatcccggcgctggataaagaactgaaagcgaaaggtaagagcgcgctgatgttcaacctgcaagaaccgtacttcacctggccgctgattgctgctgacgggggttatgcgttcaagtatgaaaacggcaagtacgacattaaagacgtgggcgtggataacgctggcgcgaaagcgggtctgaccttcctggttgacctgattaaaaacaaacacatgaatgcagacaccgattactccatcgcagaagctgcctttaataaaggcgaaacagcgatgaccatcaacggcccgtgggcatggtccaacatcgacaccagcaaagtgaattatggtgtaacggtactgccgaccttcaagggtcaaccatccaaaccgttcgttggcgtgctgagcgcaggtattaacgccgccagtccgaacaaagagctggcgaaagagttcctcgaaaactatctgctgactgatgaaggtctggaagcggttaataaagacaaaccgctgggtgccgtagcgctgaagtcttacgaggaagagttggcgaaagatccacgtattgccgccaccatggaaaacgcccagaaaggtgaaatcatgccgaacatcccgcagatgtccgctttctggtatgccgtgcgtactgcggtgatcaacgccgccagcggtcgtcagactgtcgatgaagccctgaaagacgcgcagactggtggttctggtgagaacctgtactttcaaagctcagataatgggcctcaaaaccagcgcaacgctccacgtataaccttcggtggcccgtctgactccacaggcagcaaccagaatggtgagcgtagtggagccaggtctaagcagcgccgtccccagggtctgccgaacaacacggcgagctggtttactgcgcttacccaacacggtaaagaagacttaaaattcccgcgtggccagggcgtcccgatcaacactaactcttccccggatgatcagattggttattaccgcagagcaactcgtcggattcgcggcggcgacggtaaaatgaaagatttgtctccgcgttggtacttttactatctcggcaccggtccggaagctggactgccctacggggcaaacaaggacgggatcatttgggtggctaccgaaggtgccctgaatactccaaaagatcatatcggcacccgtaaccctgctaataacgctgcgatcgttctgcaactgcctcagggtacaactctgccaaaaggcttctatgcagaagggtcgcgtggtggcagccaggcgagtagccgtagcagctcccgctctcgcaactcgtcccgtaactccactccgggctcttctcgcggcacgtccccggctcgtatggcaggtaacggtggtgacgctgctctggcgctgctactgctggacaggctgaaccagctggagtcgaagatgagtggtaaaggccaacagcagcagggccagaccgttaccaaaaagagcgcagctgaagcatctaaaaaaccgcgacagaaacgtaccgcgactaaaggatacaatgtaacacaggccttcggtcgtcgaggtccggagcaaactcaaggaaactttggcgatcaggatttaaatcgcgaagggaccgactacaaacactggccgcaaattgcccagttcgccccatccgctagtgcattcttcggtatgagccgcatctcaacggaagaaacgccaagtggtacgtggctgacctacaccggtgctatcaagcttgataagaaggacccgaactttaaagaccaggttattctgcttaacaaacatattgatgcctataaaactttcccgccgaccgaacccaaaaaggacaaaaagaaaaaagctgatgaaacccaggctctaccgcagcgtcagaaaaaacagcaaactgtgactctgctgccagctgcggacctggatgatttttccaagcagctgcaacagtctatgagctctgcggactctacgcaggctggtggttctggtcaccatcatcaccatcattaa

SEQ ID NO: 3104 - DNA, 2421 bp, Artificial Sequence
  Description of Artificial Sequence: Synthetic polynucleotide
atgaaaatcgaagaaggtaaactggtaatctggattaacggcgataaaggctataacggtctcgctgaagtcggtaagaaattcgagaaagataccggaattaaagtcaccgttgagcatccggataaactggaagagaaattcccacaggttgcggcaactggcgatggccctgacattatcttctgggcacacgaccgctttggtggctacgctcaatctggcctgttggctgaaatcaccccggacaaagcgttccaggacaagctgtatccgtttacctgggatgccgtacgttacaacggcaagctgattgcttacccgatcgctgttgaagcgttatcgctgatttataacaaagatctgctgccgaacccgccaaaaacctgggaagagatcccggcgctggataaagaactgaaagcgaaaggtaagagcgcgctgatgttcaacctgcaagaaccgtacttcacctggccgctgattgctgctgacgggggttatgcgttcaagtatgaaaacggcaagtacgacattaaagacgtgggcgtggataacgctggcgcgaaagcgggtctgaccttcctggttgacctgattaaaaacaaacacatgaatgcagacaccgattactccatcgcagaagctgcctttaataaaggcgaaacagcgatgaccatcaacggcccgtgggcatggtccaacatcgacaccagcaaagtgaattatggtgtaacggtactgccgaccttcaagggtcaaccatccaaaccgttcgttggcgtgctgagcgcaggtattaacgccgccagtccgaacaaagagctggcgaaagagttcctcgaaaactatctgctgactgatgaaggtctggaagcggttaataaagacaaaccgctgggtgccgtagcgctgaagtcttacgaggaagagttggcgaaagatccacgtattgccgccaccatggaaaacgcccagaaaggtgaaatcatgccgaacatcccgcagatgtccgctttctggtatgccgtgcgtactgcggtgatcaacgccgccagcggtcgtcagactgtcgatgaagccctgaaagacgcgcagactggtggttctggtgagaacctgtactttcaaagctcagataatgggcctcaaaaccagcgcaacgctccacgtataaccttcggtggcccgtctgactccacaggcagcaaccagaatggtgagcgtagtggagccaggtctaagcagcgccgtccccagggtctgccgaacaacacggcgagctggtttactgcgcttacccaacacggtaaagaagacttaaaattcccgcgtggccagggcgtcccgatcaacactaactcttccccggatgatcagattggttattaccgcagagcaactcgtcggattcgcggcggcgacggtaaaatgaaagatttgtctccgcgttggtacttttactatctcggcaccggtccggaagctggactgccctacggggcaaacaaggacgggatcatttgggtggctaccgaaggtgccctgaatactccaaaagatcatatcggcacccgtaaccctgctaataacgctgcgatcgttctgcaactgcctcagggtacaactctgccaaaaggcttctatgcagaagggtcgcgtggtggcagccaggcgagtagccgtagcagctcccgctctcgcaactcgtcccgtaactccactccgggctcttctcgcggcacgtccccggctcgtatggcaggtaacggtggtgacgctgctctggcgctgctactgctggacaggctgaaccagctggagtcgaagatgagtggtaaaggccaacagcagcagggccagaccgttaccaaaaagagcgcagctgaaatgtctaaaaaaccgcgacagaaacgtaccgcgactaaagggtacaatgtaacacagtgtttcggtccacgaggtccggagcaaactcaaggaaactttggcgatgcggaattaaataaaaaaggggtggactacaaacactggccgcaaattgcccagttcgccccatccgctagtgcattcttcggtatgagccgcatctcgagtaaggaaacgccaagtggtacgtggctgacctacaccggtgctatcaagcttgataaagatgacccgaactttaaagaccaggttattctgcttaacaaacatattgatgcctataaaactttcccgccgaccgaacccaaaaaggacaaaaagaaaaaagctgatgaaacccaggctctaccgcagcgtcagaaaaaacagcaaactgtgactctgctgccagctgcggacctggatgatttttccaagcagctgcaacagtctatgagctctgcggactctacgcaggctggtggttctggtcaccatcatcaccatcattaa

SEQ ID NO: 3105 - DNA, 2421 bp, Artificial Sequence
  Description of Artificial Sequence: Synthetic polynucleotide
atgaaaatcgaagaaggtaaactggtaatctggattaacggcgataaaggctataacggtctcgctgaagtcggtaagaaattcgagaaagataccggaattaaagtcaccgttgagcatccggataaactggaagagaaattcccacaggttgcggcaactggcgatggccctgacattatcttctgggcacacgaccgctttggtggctacgctcaatctggcctgttggctgaaatcaccccggacaaagcgttccaggacaagctgtatccgtttacctgggatgccgtacgttacaacggcaagctgattgcttacccgatcgctgttgaagcgttatcgctgatttataacaaagatctgctgccgaacccgccaaaaacctgggaagagatcccggcgctggataaagaactgaaagcgaaaggtaagagcgcgctgatgttcaacctgcaagaaccgtacttcacctggccgctgattgctgctgacgggggttatgcgttcaagtatgaaaacggcaagtacgacattaaagacgtgggcgtggataacgctggcgcgaaagcgggtctgaccttcctggttgacctgattaaaaacaaacacatgaatgcagacaccgattactccatcgcagaagctgcctttaataaaggcgaaacagcgatgaccatcaacggcccgtgggcatggtccaacatcgacaccagcaaagtgaattatggtgtaacggtactgccgaccttcaagggtcaaccatccaaaccgttcgttggcgtgctgagcgcaggtattaacgccgccagtccgaacaaagagctggcgaaagagttcctcgaaaactatctgctgactgatgaaggtctggaagcggttaataaagacaaaccgctgggtgccgtagcgctgaagtcttacgaggaagagttggcgaaagatccacgtattgccgccaccatggaaaacgcccagaaaggtgaaatcatgccgaacatcccgcagatgtccgctttctggtatgccgtgcgtactgcggtgatcaacgccgccagcggtcgtcagactgtcgatgaagccctgaaagacgcgcagactggtggttctggtgagaacctgtactttcaaagctcagataatgggcctcaaaaccagcgcaacgctccacgtataaccttcggtggcccgtctgactccacaggcagcaaccagaatggtgagcgtagtggagccaggtctaagcagcgccgtccccagggtctgccgaacaacacggcgagctggtttactgcgcttacccaacacggtaaagaagacttaaaattcccgcgtggccagggcgtcccgatcaacactaactcttccccggatgatcagattggttattaccgcagagcaactcgtcggattcgcggcggcgacggtaaaatgaaagatttgtctccgcgttggtacttttactatctcggcaccggtccggaagctggactgccctacggggcaaacaaggacgggatcatttgggtggctaccgaaggtgccctgaatactccaaaagatcatatcggcacccgtaaccctgctaataacgctgcgatcgttctgcaactgcctcagggtacaactctgccaaaaggcttctatgcagaagggtcgcgtggtggcagccaggcgagtagccgtagcagctcccgctctcgcaactcgtcccgtaactccactccgggctcttctcgcggcacgtccccggctcgtatggcaggtaacggtggtgacgctgctctggcgctgctactgctggacaggctgaaccagctggagtcgaagatgagtggtaaaggccaacagcagcagggccagaccgttaccaaaaagagcgcagctgaagcatctaaaaaaccgcgacagaaacgtaccgcgactaaagcgtacaatgtaacacaggccttcggtgagcgaggtccggagcaaactcaaggaaactttggcgatcaggaattaatccgccaggggaccgactacaaacactggccgcaaattgcccagttcgccccatccgctagtgcattcttcggtatgagccgcatcggcatggaagtaacgccaagtggtacgtggctgacctacaccggtgctatcaagcttgatgacaaggacccgaactttaaagaccaggttattctgcttaacaaacatattgatgcctataaaactttcccgccgaccgaacccaaaaaggacaaaaagaaaaaagctgatgaaacccaggctctaccgcagcgtcagaaaaaacagcaaactgtgactctgctgccagctgcggacctggatgatttttccaagcagctgcaacagtctatgagctctgcggactctacgcaggctggtggttctggtcaccatcatcaccatcattaa

SEQ ID NO: 3106 - DNA, 2421 bp, Artificial Sequence
  Description of Artificial Sequence: Synthetic polynucleotide
atgaaaatcgaagaaggtaaactggtaatctggattaacggcgataaaggctataacggtctcgctgaagtcggtaagaaattcgagaaagataccggaattaaagtcaccgttgagcatccggataaactggaagagaaattcccacaggttgcggcaactggcgatggccctgacattatcttctgggcacacgaccgctttggtggctacgctcaatctggcctgttggctgaaatcaccccggacaaagcgttccaggacaagctgtatccgtttacctgggatgccgtacgttacaacggcaagctgattgcttacccgatcgctgttgaagcgttatcgctgatttataacaaagatctgctgccgaacccgccaaaaacctgggaagagatcccggcgctggataaagaactgaaagcgaaaggtaagagcgcgctgatgttcaacctgcaagaaccgtacttcacctggccgctgattgctgctgacgggggttatgcgttcaagtatgaaaacggcaagtacgacattaaagacgtgggcgtggataacgctggcgcgaaagcgggtctgaccttcctggttgacctgattaaaaacaaacacatgaatgcagacaccgattactccatcgcagaagctgcctttaataaaggcgaaacagcgatgaccatcaacggcccgtgggcatggtccaacatcgacaccagcaaagtgaattatggtgtaacggtactgccgaccttcaagggtcaaccatccaaaccgttcgttggcgtgctgagcgcaggtattaacgccgccagtccgaacaaagagctggcgaaagagttcctcgaaaactatctgctgactgatgaaggtctggaagcggttaataaagacaaaccgctgggtgccgtagcgctgaagtcttacgaggaagagttggcgaaagatccacgtattgccgccaccatggaaaacgcccagaaaggtgaaatcatgccgaacatcccgcagatgtccgctttctggtatgccgtgcgtactgcggtgatcaacgccgccagcggtcgtcagactgtcgatgaagccctgaaagacgcgcagactggtggttctggtgagaacctgtactttcaaagctcagataatgggcctcaaaaccagcgcaacgctccacgtataaccttcggtggcccgtctgactccacaggcagcaaccagaatggtgagcgtagtggagccaggtctaagcagcgccgtccccagggtctgccgaacaacacggcgagctggtttactgcgcttacccaacacggtaaagaagacttaaaattcccgcgtggccagggcgtcccgatcaacactaactcttccccggatgatcagattggttattaccgcagagcaactcgtcggattcgcggcggcgacggtaaaatgaaagatttgtctccgcgttggtacttttactatctcggcaccggtccggaagctggactgccctacggggcaaacaaggacgggatcatttgggtggctaccgaaggtgccctgaatactccaaaagatcatatcggcacccgtaaccctgctaataacgctgcgatcgttctgcaactgcctcagggtacaactctgccaaaaggcttctatgcagaagggtcgcgtggtggcagccaggcgagtagccgtagcagctcccgctctcgcaactcgtcccgtaactccactccgggctcttctcgcggcacgtccccggctcgtatggcaggtaacggtggtgacgctgctctggcgctgctactgctggacaggctgaaccagctggagtcgaagatgagtggtaaaggccaacagcagcagggccagaccgttaccaaaaagagcgcagctgaagcatctaaaaaaccgcgacagaaacgtaccgcgactaaagcgtacaatgtaacacaggccttcggtcgtcgaggtccggagcaaactcaaggaaactttggcgatcaggaattaatccgccaggggaccgactacaaacactggccgcaaattgcccagttcgccccatccgctagtgcattcttcggtatgagccgcatcggcatggtggtaacgccaagtggtacgtggctgacctacaccggtgctatcaagcttgatgacaaggacccgaactttaaagaccaggttattctgcttaacaaacatattgatgcctataaaactttcccgccgaccgaacccaaaaaggacaaaaagaaaaaagctgatgaaacccaggctctaccgcagcgtcagaaaaaacagcaaactgtgactctgctgccagctgcggacctggatgatttttccaagcagctgcaacagtctatgagctctgcggactctacgcaggctggtggttctggtcaccatcatcaccatcattaa

SEQ ID NO: 3107 - DNA, 2421 bp, Artificial Sequence
  Description of Artificial Sequence: Synthetic polynucleotide
atgaaaatcgaagaaggtaaactggtaatctggattaacggcgataaaggctataacggtctcgctgaagtcggtaagaaattcgagaaagataccggaattaaagtcaccgttgagcatccggataaactggaagagaaattcccacaggttgcggcaactggcgatggccctgacattatcttctgggcacacgaccgctttggtggctacgctcaatctggcctgttggctgaaatcaccccggacaaagcgttccaggacaagctgtatccgtttacctgggatgccgtacgttacaacggcaagctgattgcttacccgatcgctgttgaagcgttatcgctgatttataacaaagatctgctgccgaacccgccaaaaacctgggaagagatcccggcgctggataaagaactgaaagcgaaaggtaagagcgcgctgatgttcaacctgcaagaaccgtacttcacctggccgctgattgctgctgacgggggttatgcgttcaagtatgaaaacggcaagtacgacattaaagacgtgggcgtggataacgctggcgcgaaagcgggtctgaccttcctggttgacctgattaaaaacaaacacatgaatgcagacaccgattactccatcgcagaagctgcctttaataaaggcgaaacagcgatgaccatcaacggcccgtgggcatggtccaacatcgacaccagcaaagtgaattatggtgtaacggtactgccgaccttcaagggtcaaccatccaaaccgttcgttggcgtgctgagcgcaggtattaacgccgccagtccgaacaaagagctggcgaaagagttcctcgaaaactatctgctgactgatgaaggtctggaagcggttaataaagacaaaccgctgggtgccgtagcgctgaagtcttacgaggaagagttggcgaaagatccacgtattgccgccaccatggaaaacgcccagaaaggtgaaatcatgccgaacatcccgcagatgtccgctttctggtatgccgtgcgtactgcggtgatcaacgccgccagcggtcgtcagactgtcgatgaagccctgaaagacgcgcagactggtggttctggtgagaacctgtactttcaaagctcagataatgggcctcaaaaccagcgcaacgctccacgtataaccttcggtggcccgtctgactccacaggcagcaaccagaatggtgagcgtagtggagccaggtctaagcagcgccgtccccagggtctgccgaacaacacggcgagctggtttactgcgcttacccaacacggtaaagaagacttaaaattcccgcgtggccagggcgtcccgatcaacactaactcttccccggatgatcagattggttattaccgcagagcaactcgtcggattcgcggcggcgacggtaaaatgaaagatttgtctccgcgttggtacttttactatctcggcaccggtccggaagctggactgccctacggggcaaacaaggacgggatcatttgggtggctaccgaaggtgccctgaatactccaaaagatcatatcggcacccgtaaccctgctaataacgctgcgatcgttctgcaactgcctcagggtacaactctgccaaaaggcttctatgcagaagggtcgcgtggtggcagccaggcgagtagccgtagcagctcccgctctcgcaactcgtcccgtaactccactccgggctcttctcgcggcacgtccccggctcgtatggcaggtaacggtggtgacgctgctctggcgctgctactgctggacaggctgaaccagctggagtcgaagatgagtggtaaaggccaacagcagcagggccagaccgttaccaaaaagagcgcagctgaaatgtctaaaaaaccgcgacagaaacgtaccgcgactaaagggtacaatgtaacacagtgtttcggtccacgaggtccggagcaaactcaaggaaactttggcgatgcggaattaaataaaaaagggaccgactacaaacactggccgcaaattgcccagttcgccccatccgctagtgcattcttcggtatgagccgcatctcgagtaaagaaacgccaagtggtacgtggctgacctacaccggtgctatcaagcttgataaggatgacccgaactttaaagaccaggttattctgcttaacaaacatattgatgcctataaaactttcccgccgaccgaacccaaaaaggacaaaaagaaaaaagctgatgaaacccaggctctaccgcagcgtcagaaaaaacagcaaactgtgactctgctgccagctgcggacctggatgatttttccaagcagctgcaacagtctatgagctctgcggactctacgcaggctggtggttctggtcaccatcatcaccatcattaa

SEQ ID NO: 3108 - DNA, 2421 bp, Artificial Sequence
  Description of Artificial Sequence: Synthetic polynucleotide
atgaaaatcgaagaaggtaaactggtaatctggattaacggcgataaaggctataacggtctcgctgaagtcggtaagaaattcgagaaagataccggaattaaagtcaccgttgagcatccggataaactggaagagaaattcccacaggttgcggcaactggcgatggccctgacattatcttctgggcacacgaccgctttggtggctacgctcaatctggcctgttggctgaaatcaccccggacaaagcgttccaggacaagctgtatccgtttacctgggatgccgtacgttacaacggcaagctgattgcttacccgatcgctgttgaagcgttatcgctgatttataacaaagatctgctgccgaacccgccaaaaacctgggaagagatcccggcgctggataaagaactgaaagcgaaaggtaagagcgcgctgatgttcaacctgcaagaaccgtacttcacctggccgctgattgctgctgacgggggttatgcgttcaagtatgaaaacggcaagtacgacattaaagacgtgggcgtggataacgctggcgcgaaagcgggtctgaccttcctggttgacctgattaaaaacaaacacatgaatgcagacaccgattactccatcgcagaagctgcctttaataaaggcgaaacagcgatgaccatcaacggcccgtgggcatggtccaacatcgacaccagcaaagtgaattatggtgtaacggtactgccgaccttcaagggtcaaccatccaaaccgttcgttggcgtgctgagcgcaggtattaacgccgccagtccgaacaaagagctggcgaaagagttcctcgaaaactatctgctgactgatgaaggtctggaagcggttaataaagacaaaccgctgggtgccgtagcgctgaagtcttacgaggaagagttggcgaaagatccacgtattgccgccaccatggaaaacgcccagaaaggtgaaatcatgccgaacatcccgcagatgtccgctttctggtatgccgtgcgtactgcggtgatcaacgccgccagcggtcgtcagactgtcgatgaagccctgaaagacgcgcagactggtggttctggtgagaacctgtactttcaaagctcagataatgggcctcaaaaccagcgcaacgctccacgtataaccttcggtggcccgtctgactccacaggcagcaaccagaatggtgagcgtagtggagccaggtctaagcagcgccgtccccagggtctgccgaacaacacggcgagctggtttactccgcttacccaacacggtaaagaagacttaaaattcccgcctggccagggcgtcccgatcaacactaactcttccccggatgatcagattggttattaccgcagagcaactcgtcggattcgcggcggcgacggtaaaatgaaagatttgcctccgcgttggtacttttactatctcggcaccggtccggaagctgatctgccctacgggcaagtaaaggacgggatcgtgtgggtggctgcggaaggtgccctgaatactccaaaagatcatatcggcacccgtaaccctgctaataacgctgcgatcccactgcaactgcctccgggtacaactctgccaaaaggcttctatgcagaagggtcgcgtggtggcagccaggcgagtagccgtagcagctcccgctctcgcaactcgtcccgtaactccactccgggctcttctcgcggcacgtccccggctcgtatggcaggtaacggtggtgacgctgctctggcgctgctactgctggacaggctgaaccagctggagtcgaagatgagtggtaaaggccaacagcagcagggccagaccgttaccaaaaagagcgcagctgaagcatctaaaaaaccgcgacagaaacgtaccgcgactaaagcgtacaatgtaacacaggccttcggtcgtcgaggtccggagcaaactcaaggaaactttggcgatcaggaattaatccgccaggggaccgactacaaacactggccgcaaattgcccagttcgccccatccgctagtgcattcttcggtatgagccgcatcggcatggaagtaacgccaagtggtacgtggctgacctacaccggtgctatcaagcttgatgacaaggacccgaactttaaagaccaggttattctgcttaacaaacatattgatgcctataaaactttcccgccgaccgaacccaaaaaggacaaaaagaaaaaagctgatgaaacccaggctctaccgcagcgtcagaaaaaacagcaaactgtgactctgctgccagctgcggacctggatgatttttccaagcagctgcaacagtctatgagctctgcggactctacgcaggctggtggttctggtcaccatcatcaccatcattaa

SEQ ID NO: 3109 - DNA, 2421 bp, Artificial Sequence
  Description of Artificial Sequence: Synthetic polynucleotide
atgaaaatcgaagaaggtaaactggtaatctggattaacggcgataaaggctataacggtctcgctgaagtcggtaagaaattcgagaaagataccggaattaaagtcaccgttgagcatccggataaactggaagagaaattcccacaggttgcggcaactggcgatggccctgacattatcttctgggcacacgaccgctttggtggctacgctcaatctggcctgttggctgaaatcaccccggacaaagcgttccaggacaagctgtatccgtttacctgggatgccgtacgttacaacggcaagctgattgcttacccgatcgctgttgaagcgttatcgctgatttataacaaagatctgctgccgaacccgccaaaaacctgggaagagatcccggcgctggataaagaactgaaagcgaaaggtaagagcgcgctgatgttcaacctgcaagaaccgtacttcacctggccgctgattgctgctgacgggggttatgcgttcaagtatgaaaacggcaagtacgacattaaagacgtgggcgtggataacgctggcgcgaaagcgggtctgaccttcctggttgacctgattaaaaacaaacacatgaatgcagacaccgattactccatcgcagaagctgcctttaataaaggcgaaacagcgatgaccatcaacggcccgtgggcatggtccaacatcgacaccagcaaagtgaattatggtgtaacggtactgccgaccttcaagggtcaaccatccaaaccgttcgttggcgtgctgagcgcaggtattaacgccgccagtccgaacaaagagctggcgaaagagttcctcgaaaactatctgctgactgatgaaggtctggaagcggttaataaagacaaaccgctgggtgccgtagcgctgaagtcttacgaggaagagttggcgaaagatccacgtattgccgccaccatggaaaacgcccagaaaggtgaaatcatgccgaacatcccgcagatgtccgctttctggtatgccgtgcgtactgcggtgatcaacgccgccagcggtcgtcagactgtcgatgaagccctgaaagacgcgcagactggtggttctggtgagaacctgtactttcaaagctcagataatgggcctcaaaaccagcgcaacgctccacgtataaccttcggtggcccgtctgactccacaggcagcaaccagaatggtgagcgtagtggagccaggtctaagcagcgccgtccccagggtctgccgaacaacacggcgagctggtttactgcgcttacccaacacggtaaagaagacttaaaattcccgcgtggccagggcgtcccgatcaacactaactcttccccggatgatcagattggttattaccgcagagcaactcgtcggattcgcggcggcgacggtaaaatgaaagatttgtctccgcgttggtacttttactatctcggcaccggtccggaagctggactgccctacggggcaaacaaggacgggatcatttgggtggctaccgaaggtgccctgaatactccaaaagatcatatcggcacccgtaaccctgctaataaagctgcgatcgttctgcaactgcctcagggtacaactctgccaaaaggcttctatgcagaagggtcgcgtggtggcagccaggcgagtagccgtagcagctcccgctctcgcaactcgtcccgtaactccactccgggctcttctcgcggcacgtccccggctcgtatggcaggtaacggtggtgacgctgctctggcgctgctactgctggacaggctgaaccagctggagtcgaagatgagtggtaaaggccaacagcagcagggccagaccgttaccaaaaagagcgcagctgaagcatctaaaaaaccgcgacagaaacgtaccgcgactaaagcgtacaatgtaacacaggccttcggtcgtcgaggtccggagcaaactcaaggaaactttggcgatcaggaattaatccgccaggggaccgactacaaacactggccgcaaattgcccagttcgccccatccgctagtgcattcttcggtatgagccgcatcggcatggaagtaacgccaagtggtacgtggctgacctacaccggtgctatcaagcttgatgacaaggacccgaactttaaagaccaggttattctgcttaacaaacatattgatgcctataaaactttcccgccgaccgaacccaaaaaggacaaaaagaaaaaagctgatgaaacccaggctctaccgcagcgtcagaaaaaacagcaaactgtgactctgctgccagctgcggacctggatgatttttccaagcagctgcaacagtctatgagctctgcggactctacgcaggctggtggttctggtcaccatcatcaccatcattaa

SEQ ID NO: 3110 - DNA, 2421 bp, Artificial Sequence
  Description of Artificial Sequence: Synthetic polynucleotide
atgaaaatcgaagaaggtaaactggtaatctggattaacggcgataaaggctataacggtctcgctgaagtcggtaagaaattcgagaaagataccggaattaaagtcaccgttgagcatccggataaactggaagagaaattcccacaggttgcggcaactggcgatggccctgacattatcttctgggcacacgaccgctttggtggctacgctcaatctggcctgttggctgaaatcaccccggacaaagcgttccaggacaagctgtatccgtttacctgggatgccgtacgttacaacggcaagctgattgcttacccgatcgctgttgaagcgttatcgctgatttataacaaagatctgctgccgaacccgccaaaaacctgggaagagatcccggcgctggataaagaactgaaagcgaaaggtaagagcgcgctgatgttcaacctgcaagaaccgtacttcacctggccgctgattgctgctgacgggggttatgcgttcaagtatgaaaacggcaagtacgacattaaagacgtgggcgtggataacgctggcgcgaaagcgggtctgaccttcctggttgacctgattaaaaacaaacacatgaatgcagacaccgattactccatcgcagaagctgcctttaataaaggcgaaacagcgatgaccatcaacggcccgtgggcatggtccaacatcgacaccagcaaagtgaattatggtgtaacggtactgccgaccttcaagggtcaaccatccaaaccgttcgttggcgtgctgagcgcaggtattaacgccgccagtccgaacaaagagctggcgaaagagttcctcgaaaactatctgctgactgatgaaggtctggaagcggttaataaagacaaaccgctgggtgccgtagcgctgaagtcttacgaggaagagttggcgaaagatccacgtattgccgccaccatggaaaacgcccagaaaggtgaaatcatgccgaacatcccgcagatgtccgctttctggtatgccgtgcgtactgcggtgatcaacgccgccagcggtcgtcagactgtcgatgaagccctgaaagacgcgcagactggtggttctggtgagaacctgtactttcaaagctcagataatgggcctcaaaaccagcgcaacgctccacgtataaccttcggtggcccgtctgactccacaggcagcaaccagaatggtgagcgtagtggagccaggtctaagcagcgccgtccccagggtctgccgaacaacacggcgagctggtttactgcgcttacccaacacggtaaagaagacttaaaattcccgcgtggccagggcgtcccgatcaacactaactcttccccggatgatcagattggttattaccgcagagcaactcgtcggattcgcggcggcgacggtaaaatgaaagatttgtctccgcgttggtacttttactatctcggcaccggtccggaagctgatctgccctacggggcaaacaaggacgggatcatttgggtggctaccgaaggtgccctgaatactccaaaagatcatatcggcacccgtaaccctgctaataacgctgcgatcgttctgcaactgcctcagggtacaactctgccaaaaggcttctatgcagaagggtcgcgtggtggcagccaggcgagtagccgtagcagctcccgctctcgcaactcgtcccgtaactccactccgggctcttctcgcggcacgtccccggctcgtatggcaggtaacggtggtgacgctgctctggcgctgctactgctggacaggctgaaccagctggagtcgaagatgagtggtaaaggccaacagcagcagggccagaccgttaccaaaaagagcgcagctgaagcatctaaaaaaccgcgacagaaacgtaccgcgactaaagcgtacaatgtaacacaggccttcggtcgtcgaggtccggagcaaactcaaggaaactttggcgatcaggaattaatccgccaggggaccgactacaaacactggccgcaaattgcccagttcgccccatccgctagtgcattcttcggtatgagccgcatcggcatggaagtaacgccaagtggtacgtggctgacctacaccggtgctatcaagcttgatgacaaggacccgaactttaaagaccaggttattctgcttaacaaacatattgatgcctataaaactttcccgccgaccgaacccaaaaaggacaaaaagaaaaaagctgatgaaacccaggctctaccgcagcgtcagaaaaaacagcaaactgtgactctgctgccagctgcggacctggatgatttttccaagcagctgcaacagtctatgagctctgcggactctacgcaggctggtggttctggtcaccatcatcaccatcattaa

SEQ ID NO: 3111 - DNA, 2421 bp, Artificial Sequence
  Description of Artificial Sequence: Synthetic polynucleotide
atgaaaatcgaagaaggtaaactggtaatctggattaacggcgataaaggctataacggtctcgctgaagtcggtaagaaattcgagaaagataccggaattaaagtcaccgttgagcatccggataaactggaagagaaattcccacaggttgcggcaactggcgatggccctgacattatcttctgggcacacgaccgctttggtggctacgctcaatctggcctgttggctgaaatcaccccggacaaagcgttccaggacaagctgtatccgtttacctgggatgccgtacgttacaacggcaagctgattgcttacccgatcgctgttgaagcgttatcgctgatttataacaaagatctgctgccgaacccgccaaaaacctgggaagagatcccggcgctggataaagaactgaaagcgaaaggtaagagcgcgctgatgttcaacctgcaagaaccgtacttcacctggccgctgattgctgctgacgggggttatgcgttcaagtatgaaaacggcaagtacgacattaaagacgtgggcgtggataacgctggcgcgaaagcgggtctgaccttcctggttgacctgattaaaaacaaacacatgaatgcagacaccgattactccatcgcagaagctgcctttaataaaggcgaaacagcgatgaccatcaacggcccgtgggcatggtccaacatcgacaccagcaaagtgaattatggtgtaacggtactgccgaccttcaagggtcaaccatccaaaccgttcgttggcgtgctgagcgcaggtattaacgccgccagtccgaacaaagagctggcgaaagagttcctcgaaaactatctgctgactgatgaaggtctggaagcggttaataaagacaaaccgctgggtgccgtagcgctgaagtcttacgaggaagagttggcgaaagatccacgtattgccgccaccatggaaaacgcccagaaaggtgaaatcatgccgaacatcccgcagatgtccgctttctggtatgccgtgcgtactgcggtgatcaacgccgccagcggtcgtcagactgtcgatgaagccctgaaagacgcgcagactggtggttctggtgagaacctgtactttcaaagctcagataatgggcctcaaaaccagcgcaacgctccacgtataaccttcggtggcccgtctgactccacaggcagcaaccagaatggtgagcgtagtggagccaggtctaagcagcgccgtccccagggtctgccgaacaacacggcgagctggtttactgcgcttacccaacacggtaaagaagacttaaaattcccgcgtggccagggcgtcccgatcaacactaactcttccccggatgatcagattggttattaccgcagagcaactcgtcggattcgcggcggcgacggtaaaatgaaagatttgtctccgcgttggtacttttactatctcggcaccggtccggaagctggactgccctacggggcaaacaaggacgggatcatttgggtggctaccgaaggtgccctgaatactccaaaagatcatatcggcacccgtaaccctgctaataacgctgcgatcgttctgcaactgcctcagggtacaactctgccaaaaggcttctatgcagaagggtcgcgtggtggcagccaggcgagtagccgtagcagctcccgctctcgcaactcgtcccgtaactccactccgggctcttctcgcggcacgtccccggctcgtatggcaggtaacggtggtgacgctgctctggcgctgctactgctggacaggctgaaccagctggagtcgaagatgagtggtaaaggccaacagcagcagggccagaccgttaccaaaaagaatgcagctgaagcatctaaaaaaccgcgacagaaacgtaccgcgactaaagcgtacaatgtaacacaggccttcggtcgtcgaggtccggagcaaactcaaggaaactttggcgatcaggaattaatccgccaggggaccgactacaaacactggccgcaaattgcccagttcgccccatccgctagtgcattcttcggtatgagccgcatcggcatggaagtaacgccaagtggtacgtggctgacctacaccggtgctatcaagcttgatgacaaggacccgaactttaaagaccaggttattctgcttaacaaacatattgatgcctataaaactttcccgccgaccgaacccaaaaaggacaaaaagaaaaaagctgatgaaacccaggctctaccgcagcgtcagaaaaaacagcaaactgtgactctgctgccagctgcggacctggatgatttttccaagcagctgcaacagtctatgagctctgcggactctacgcaggctggtggttctggtcaccatcatcaccatcattaa

SEQ ID NO: 3112 - DNA, 2421 bp, Artificial Sequence
  Description of Artificial Sequence: Synthetic polynucleotide
atgaaaatcgaagaaggtaaactggtaatctggattaacggcgataaaggctataacggtctcgctgaagtcggtaagaaattcgagaaagataccggaattaaagtcaccgttgagcatccggataaactggaagagaaattcccacaggttgcggcaactggcgatggccctgacattatcttctgggcacacgaccgctttggtggctacgctcaatctggcctgttggctgaaatcaccccggacaaagcgttccaggacaagctgtatccgtttacctgggatgccgtacgttacaacggcaagctgattgcttacccgatcgctgttgaagcgttatcgctgatttataacaaagatctgctgccgaacccgccaaaaacctgggaagagatcccggcgctggataaagaactgaaagcgaaaggtaagagcgcgctgatgttcaacctgcaagaaccgtacttcacctggccgctgattgctgctgacgggggttatgcgttcaagtatgaaaacggcaagtacgacattaaagacgtgggcgtggataacgctggcgcgaaagcgggtctgaccttcctggttgacctgattaaaaacaaacacatgaatgcagacaccgattactccatcgcagaagctgcctttaataaaggcgaaacagcgatgaccatcaacggcccgtgggcatggtccaacatcgacaccagcaaagtgaattatggtgtaacggtactgccgaccttcaagggtcaaccatccaaaccgttcgttggcgtgctgagcgcaggtattaacgccgccagtccgaacaaagagctggcgaaagagttcctcgaaaactatctgctgactgatgaaggtctggaagcggttaataaagacaaaccgctgggtgccgtagcgctgaagtcttacgaggaagagttggcgaaagatccacgtattgccgccaccatggaaaacgcccagaaaggtgaaatcatgccgaacatcccgcagatgtccgctttctggtatgccgtgcgtactgcggtgatcaacgccgccagcggtcgtcagactgtcgatgaagccctgaaagacgcgcagactggtggttctggtgagaacctgtactttcaaagctcagataatgggcctcaaaaccagcgcaacgctccacgtataaccttcggtggcccgtctgactccacaggcagcaaccagaatggtgagcgtagtggagccaggtctaagcagcgccgtccccagggtctgccgaacaacacggcgagctggtttactgcgcttacccaacacggtaaagaagacttaaaattcccgcgtggccagggcgtcccgatcaacactaactcttccccggatgatcagattggttattaccgcagagcaactcgtcggattcgcggcggcgacggtaaaatgaaagatttgtctccgcgttggtacttttactatctcggcaccggtccggaagctagtctgccctacggggcaaacaaggacgggatcatttgggtggctaccgaaggtgccctgaatactccaaaagatcatatcggcacccgtaaccctgctaataacgctgcgatcgttctgcaactgcctcagggtacaactctgccaaaaggcttctatgcagaagggtcgcgtggtggcagccaggcgagtagccgtagcagctcccgctctcgcaactcgtcccgtaactccactccgggctcttctcgcggcacgtccccggctcgtatggcaggtaacggtggtgacgctgctctggcgctgctactgctggacaggctgaaccagctggagtcgaagatgagtggtaaaggccaacagcagcagggccagaccgttaccaaaaagagcgcagctgaagcatctaaaaaaccgcgacagaaacgtaccgcgactaaagcgtacaatgtaacacaggccttcggtcgtcgaggtccggagcaaactcaaggaaactttggcgatcaggaattaatccgccaggggaccgactacaaacactggccgcaaattgcccagttcgccccatccgctagtgcattcttcggtatgagccgcatcggcatggaagtaacgccaagtggtacgtggctgacctacaccggtgctatcaagcttgatgacaaggacccgaactttaaagaccaggttattctgcttaacaaacatattgatgcctataaaactttcccgccgaccgaacccaaaaaggacaaaaagaaaaaagctgatgaaacccaggctctaccgcagcgtcagaaaaaacagcaaactgtgactctgctgccagctgcggacctggatgatttttccaagcagctgcaacagtctatgagctctgcggactctacgcaggctggtggttctggtcaccatcatcaccatcattaa

SEQ ID NO: 3113 - DNA, 2421 bp, Artificial Sequence
  Description of Artificial Sequence: Synthetic polynucleotide
atgaaaatcgaagaaggtaaactggtaatctggattaacggcgataaaggctataacggtctcgctgaagtcggtaagaaattcgagaaagataccggaattaaagtcaccgttgagcatccggataaactggaagagaaattcccacaggttgcggcaactggcgatggccctgacattatcttctgggcacacgaccgctttggtggctacgctcaatctggcctgttggctgaaatcaccccggacaaagcgttccaggacaagctgtatccgtttacctgggatgccgtacgttacaacggcaagctgattgcttacccgatcgctgttgaagcgttatcgctgatttataacaaagatctgctgccgaacccgccaaaaacctgggaagagatcccggcgctggataaagaactgaaagcgaaaggtaagagcgcgctgatgttcaacctgcaagaaccgtacttcacctggccgctgattgctgctgacgggggttatgcgttcaagtatgaaaacggcaagtacgacattaaagacgtgggcgtggataacgctggcgcgaaagcgggtctgaccttcctggttgacctgattaaaaacaaacacatgaatgcagacaccgattactccatcgcagaagctgcctttaataaaggcgaaacagcgatgaccatcaacggcccgtgggcatggtccaacatcgacaccagcaaagtgaattatggtgtaacggtactgccgaccttcaagggtcaaccatccaaaccgttcgttggcgtgctgagcgcaggtattaacgccgccagtccgaacaaagagctggcgaaagagttcctcgaaaactatctgctgactgatgaaggtctggaagcggttaataaagacaaaccgctgggtgccgtagcgctgaagtcttacgaggaagagttggcgaaagatccacgtattgccgccaccatggaaaacgcccagaaaggtgaaatcatgccgaacatcccgcagatgtccgctttctggtatgccgtgcgtactgcggtgatcaacgccgccagcggtcgtcagactgtcgatgaagccctgaaagacgcgcagactggtggttctggtgagaacctgtactttcaaagctcagataatgggcctcaaaaccagcgcaacgctccacgtataaccttcggtggcccgtctgactccacaggcagcaaccagaatggtgagcgtagtggagccaggtctaagcagcgccgtccccagggtctgccgaacaacacggcgagctggtttactgcgcttacccaacacggtaaagaagacttaaaattcccgcgtggccagggcgtcccgatcaacactaactcttccccggatgatcagattggttattaccgcagagcaactcgtcggattcgcggcggcgacggtaaaatgaaagatttgtctccgcgttggtacttttactatctcggcaccggtccggaagctggactgccctacggggcaaacaaggacgggatcatttgggtggctaccgaaggtgccctgaatactccaaaagatcatatcggcacccgtaaccctgctaataacgctgcgatcgttctgcaactgcctcagggtacaactctgccaaaaggcttctatgcagaagggtcgcgtggtggcagccaggcgagtagccgtagcagctcccgctctcgcaactcgtcccgtaactccactccgggctcttctcgcggcacgtccccggctcgtatggcaggtaacggtggtgacgctgctctggcgctgctactgctggacaggctgaaccagctggagtcgaagatgagtggtaaaggccaacagcagcagggccagaccgttaccaaaaagagcgcagctgaaatgtctaaaaaaccgcgacagaaacgtaccgcgactaaaggctgcaatgtaacacagtgtttcggtcctcgaggtccggagcaaactcaaggaaactttggcgatgccgaattaaataaaaaagggaccgactacaaacactggccgcaaattgcccagttcgccccatccgctagtgcattcttcggtatgagccgcatcagcagtaaggagcaaccaagtggtacgtggctgacctacaccggtgctatcaagcttgataaagatgacccgaactttaaagaccaggttattctgcttaacaaacatattgatgcctataaaactttcccgccgaccgaacccaaaaaggacaaaaagaaaaaagctgatgaaacccaggctctaccgcagcgtcagaaaaaacagcaaactgtgactctgctgccagctgcggacctggatgatttttccaagcagctgcaacagtctatgagctctgcggactctacgcaggctggtggttctggtcaccatcatcaccatcattaa

SEQ ID NO: 3114 - DNA, 2421 bp, Artificial Sequence
  Description of Artificial Sequence: Synthetic polynucleotide
atgaaaatcgaagaaggtaaactggtaatctggattaacggcgataaaggctataacggtctcgctgaagtcggtaagaaattcgagaaagataccggaattaaagtcaccgttgagcatccggataaactggaagagaaattcccacaggttgcggcaactggcgatggccctgacattatcttctgggcacacgaccgctttggtggctacgctcaatctggcctgttggctgaaatcaccccggacaaagcgttccaggacaagctgtatccgtttacctgggatgccgtacgttacaacggcaagctgattgcttacccgatcgctgttgaagcgttatcgctgatttataacaaagatctgctgccgaacccgccaaaaacctgggaagagatcccggcgctggataaagaactgaaagcgaaaggtaagagcgcgctgatgttcaacctgcaagaaccgtacttcacctggccgctgattgctgctgacgggggttatgcgttcaagtatgaaaacggcaagtacgacattaaagacgtgggcgtggataacgctggcgcgaaagcgggtctgaccttcctggttgacctgattaaaaacaaacacatgaatgcagacaccgattactccatcgcagaagctgcctttaataaaggcgaaacagcgatgaccatcaacggcccgtgggcatggtccaacatcgacaccagcaaagtgaattatggtgtaacggtactgccgaccttcaagggtcaaccatccaaaccgttcgttggcgtgctgagcgcaggtattaacgccgccagtccgaacaaagagctggcgaaagagttcctcgaaaactatctgctgactgatgaaggtctggaagcggttaataaagacaaaccgctgggtgccgtagcgctgaagtcttacgaggaagagttggcgaaagatccacgtattgccgccaccatggaaaacgcccagaaaggtgaaatcatgccgaacatcccgcagatgtccgctttctggtatgccgtgcgtactgcggtgatcaacgccgccagcggtcgtcagactgtcgatgaagccctgaaagacgcgcagactggtggttctggtgagaacctgtactttcaaagctcagataatgggcctcaaaaccagcgcaacgctccacgtataaccttcggtggcccgtctgactccacaggcagcaaccagaatggtgagcgtagtggagccaggtctaagcagcgccgtccccagggtctgccgaacaacacggcgagctggtttactgcgcttacccaacacggtaaagaagacttaaaattcccgcgtggccagggcgtcccgatcaacactaactcttccccggatgatcagattggttattaccgcagagcaactcgtcggattcgcggcggcgacggtaaaatgaaagatttgtctccgcgttggtacttttactatctcggcaccggtccggaagctggactgccctacggggcaaacaaggacgggatcatttgggtggctaccgaaggtgccctgaatactccaaaagatcatatcggcacccgtaaccctgctaataacgctgcgatcgttctgcaactgcctcagggtacaactctgccaaaaggcttctatgcagaagggtcgcgtggtggcagccaggcgagtagccgtagcagctcccgctctcgcaactcgtcccgtaactccactccgggctcttctcgcggcacgtccccggctcgtatggcaggtaacggtggtgacgctgctctggcgctgctactgctggacaggctgaaccagctggagtcgaagatgagtggtaaaggccaacagcagcagggccagaccgttaccaaaaagagcgcagctgaaatgtctaaaaaaccgcgacagaaacgtaccgcgactaaagggtacaatgtaacacagtgtttcggtccccgaggtccggagcaaactcaaggaaactttggcgatgccgatttaatcaaaaaagggaccgactacaaacactggccgcaaattgcccagttcgccccatccgctagtgcattcttcggtatgagccgcatctcatcaaaagaacagccaagtggtacgtggctgacctacaccggtgctatcaagcttgataaagatgacccgaactttaaagaccaggttattctgcttaacaaacatattgatgcctataaaactttcccgccgaccgaacccaaaaaggacaaaaagaaaaaagctgatgaaacccaggctctaccgcagcgtcagaaaaaacagcaaactgtgactctgctgccagctgcggacctggatgatttttccaagcagctgcaacagtctatgagctctgcggactctacgcaggctggtggttctggtcaccatcatcaccatcattaa

SEQ ID NO: 3115 - DNA, 2421 bp, Artificial Sequence
  Description of Artificial Sequence: Synthetic polynucleotide
atgaaaatcgaagaaggtaaactggtaatctggattaacggcgataaaggctataacggtctcgctgaagtcggtaagaaattcgagaaagataccggaattaaagtcaccgttgagcatccggataaactggaagagaaattcccacaggttgcggcaactggcgatggccctgacattatcttctgggcacacgaccgctttggtggctacgctcaatctggcctgttggctgaaatcaccccggacaaagcgttccaggacaagctgtatccgtttacctgggatgccgtacgttacaacggcaagctgattgcttacccgatcgctgttgaagcgttatcgctgatttataacaaagatctgctgccgaacccgccaaaaacctgggaagagatcccggcgctggataaagaactgaaagcgaaaggtaagagcgcgctgatgttcaacctgcaagaaccgtacttcacctggccgctgattgctgctgacgggggttatgcgttcaagtatgaaaacggcaagtacgacattaaagacgtgggcgtggataacgctggcgcgaaagcgggtctgaccttcctggttgacctgattaaaaacaaacacatgaatgcagacaccgattactccatcgcagaagctgcctttaataaaggcgaaacagcgatgaccatcaacggcccgtgggcatggtccaacatcgacaccagcaaagtgaattatggtgtaacggtactgccgaccttcaagggtcaaccatccaaaccgttcgttggcgtgctgagcgcaggtattaacgccgccagtccgaacaaagagctggcgaaagagttcctcgaaaactatctgctgactgatgaaggtctggaagcggttaataaagacaaaccgctgggtgccgtagcgctgaagtcttacgaggaagagttggcgaaagatccacgtattgccgccaccatggaaaacgcccagaaaggtgaaatcatgccgaacatcccgcagatgtccgctttctggtatgccgtgcgtactgcggtgatcaacgccgccagcggtcgtcagactgtcgatgaagccctgaaagacgcgcagactggtggttctggtgagaacctgtactttcaaagctcagataatgggcctcaaaaccagcgcaacgctccacgtataaccttcggtggcccgtctgactccacaggcagcaaccagaatggtgagcgtagtggagccaggtctaagcagcgccgtccccagggtctgccgaacaacacggcgagctggtttactgcgcttacccaacacggtaaagaagacttaaaattcccgcgtggccagggcgtcccgatcaacactaactcttccccggatgatcagattggttattaccgcagagcaactcgtcggattcgcggcggcgacggtaaaatgaaagatttgtctccgcgttggtacttttactatctcggcaccggtccggaagctggactgccctacggggcaaacaaggacgggatcatttgggtggctaccgaaggtgccctgaatactccaaaagatcatatcggcacccgtaaccctgctaataacgctgcgatcgttctgcaactgcctcagggtacaactctgccaaaaggcttctatgcagaagggtcgcgtggtggcagccaggcgagtagccgtagcagctcccgctctcgcaactcgtcccgtaactccactccgggctcttctcgcggcacgtccccggctcgtatggcaggtaacggtggtgacgctgctctggcgctgctactgctggacaggctgaaccagctggagtcgaagatgagtggtaaaggccaacagcagcagggccagaccgttaccaaaaagagcgcagctgaagcatctaaaaaaccgcgacagaaacgtaccgcgactaaagcgtacaatgtaacacaggccttcggtcgtcgaggtccgcggcaaactcaaggaaactttggcgatcaggaattaatccgccaggggaccgactacaaacactggccgcaaattgcccagttcgccccatccgctagtgcattcttcggtatgagccgcatcggcatggaagtaacgccaagtggtacgtggctgacctacaccggtgctatcaagcttgatgacaaggacccgaactttaaagaccaggttattctgcttaacaaacatattgatgcctataaaactttcccgccgaccgaacccaaaaaggacaaaaagaaaaaagctgatgaaacccaggctctaccgcagcgtcagaaaaaacagcaaactgtgactctgctgccagctgcggacctggatgatttttccaagcagctgcaacagtctatgagctctgcggactctacgcaggctggtggttctggtcaccatcatcaccatcattaa

SEQ ID NO: 3116 - DNA, 2421 bp, Artificial Sequence
  Description of Artificial Sequence: Synthetic polynucleotide
atgaaaatcgaagaaggtaaactggtaatctggattaacggcgataaaggctataacggtctcgctgaagtcggtaagaaattcgagaaagataccggaattaaagtcaccgttgagcatccggataaactggaagagaaattcccacaggttgcggcaactggcgatggccctgacattatcttctgggcacacgaccgctttggtggctacgctcaatctggcctgttggctgaaatcaccccggacaaagcgttccaggacaagctgtatccgtttacctgggatgccgtacgttacaacggcaagctgattgcttacccgatcgctgttgaagcgttatcgctgatttataacaaagatctgctgccgaacccgccaaaaacctgggaagagatcccggcgctggataaagaactgaaagcgaaaggtaagagcgcgctgatgttcaacctgcaagaaccgtacttcacctggccgctgattgctgctgacgggggttatgcgttcaagtatgaaaacggcaagtacgacattaaagacgtgggcgtggataacgctggcgcgaaagcgggtctgaccttcctggttgacctgattaaaaacaaacacatgaatgcagacaccgattactccatcgcagaagctgcctttaataaaggcgaaacagcgatgaccatcaacggcccgtgggcatggtccaacatcgacaccagcaaagtgaattatggtgtaacggtactgccgaccttcaagggtcaaccatccaaaccgttcgttggcgtgctgagcgcaggtattaacgccgccagtccgaacaaagagctggcgaaagagttcctcgaaaactatctgctgactgatgaaggtctggaagcggttaataaagacaaaccgctgggtgccgtagcgctgaagtcttacgaggaagagttggcgaaagatccacgtattgccgccaccatggaaaacgcccagaaaggtgaaatcatgccgaacatcccgcagatgtccgctttctggtatgccgtgcgtactgcggtgatcaacgccgccagcggtcgtcagactgtcgatgaagccctgaaagacgcgcagactggtggttctggtgagaacctgtactttcaaagctcagataatgggcctcaaaaccagcgcaacgctccacgtataaccttcggtggcccgtctgactccacaggcagcaaccagaatggtgagcgtagtggagccaggtctaagcagcgccgtccccagggtctgccgaacaacacggcgagctggtttactgcgcttacccaacacggtaaagaagacttaaaattcccgcgtggccagggcgtcccgatcaacactaactcttccccggatgatcagattggttattaccgcagagcaactcgtcggattcgcggcggcgacggtaaaatgaaagatttgtctccgcgttggtacttttactatctcggcaccggtccggaagctggactgccctacggggcaaacaaggacgggatcatttgggtggctaccgaaggtgccctgaatactccaaaagatcatatcggcacccgtaaccctgctaataacgctgcgatcgagctgcaactgcctcagggtacaactctgccaaaaggcttctatgcagaagggtcgcgtggtggcagccaggcgagtagccgtagcagctcccgctctcgcaactcgtcccgtaactccactccgggctcttctcgcggcacgtccccggctcgtatggcaggtaacggtggtgacgctgctctggcgctgctactgctggacaggctgaaccagctggagtcgaagatgagtggtaaaggccaacagcagcagggccagaccgttaccaaaaagagcgcagctgaagcatctaaaaaaccgcgacagaaacgtaccgcgactaaagcgtacaatgtaacacaggccttcggtcgtcgaggtccggagcaaactcaaggaaactttggcgatcaggaattaatccgccaggggaccgactacaaacactggccgcaaattgcccagttcgccccatccgctagtgcattcttcggtatgagccgcatcggcatggaagtaacgccaagtggtacgtggctgacctacaccggtgctatcaagcttgatgacaaggacccgaactttaaagaccaggttattctgcttaacaaacatattgatgcctataaaactttcccgccgaccgaacccaaaaaggacaaaaagaaaaaagctgatgaaacccaggctctaccgcagcgtcagaaaaaacagcaaactgtgactctgctgccagctgcggacctggatgatttttccaagcagctgcaacagtctatgagctctgcggactctacgcaggctggtggttctggtcaccatcatcaccatcattaa

SEQ ID NO: 3117 - DNA, 2421 bp, Artificial Sequence
  Description of Artificial Sequence: Synthetic polynucleotide
atgaaaatcgaagaaggtaaactggtaatctggattaacggcgataaaggctataacggtctcgctgaagtcggtaagaaattcgagaaagataccggaattaaagtcaccgttgagcatccggataaactggaagagaaattcccacaggttgcggcaactggcgatggccctgacattatcttctgggcacacgaccgctttggtggctacgctcaatctggcctgttggctgaaatcaccccggacaaagcgttccaggacaagctgtatccgtttacctgggatgccgtacgttacaacggcaagctgattgcttacccgatcgctgttgaagcgttatcgctgatttataacaaagatctgctgccgaacccgccaaaaacctgggaagagatcccggcgctggataaagaactgaaagcgaaaggtaagagcgcgctgatgttcaacctgcaagaaccgtacttcacctggccgctgattgctgctgacgggggttatgcgttcaagtatgaaaacggcaagtacgacattaaagacgtgggcgtggataacgctggcgcgaaagcgggtctgaccttcctggttgacctgattaaaaacaaacacatgaatgcagacaccgattactccatcgcagaagctgcctttaataaaggcgaaacagcgatgaccatcaacggcccgtgggcatggtccaacatcgacaccagcaaagtgaattatggtgtaacggtactgccgaccttcaagggtcaaccatccaaaccgttcgttggcgtgctgagcgcaggtattaacgccgccagtccgaacaaagagctggcgaaagagttcctcgaaaactatctgctgactgatgaaggtctggaagcggttaataaagacaaaccgctgggtgccgtagcgctgaagtcttacgaggaagagttggcgaaagatccacgtattgccgccaccatggaaaacgcccagaaaggtgaaatcatgccgaacatcccgcagatgtccgctttctggtatgccgtgcgtactgcggtgatcaacgccgccagcggtcgtcagactgtcgatgaagccctgaaagacgcgcagactggtggttctggtgagaacctgtactttcaaagctcagataatgggcctcaaaaccagcgcaacgctccacgtataaccttcggtggcccgtctgactccacaggcagcaaccagaatggtgagcgtagtggagccaggtctaagcagcgccgtccccagggtctgccgaacaacacggcgagctggtttactgcgcttacccaacacggtaaagaagacttaaaattcccgcgtggccagggcgtcccgatcaacactaactcttccccggatgatcagattggttattaccgcagagcaactcgtcggattcgcggcggcgacggtaaaatgaaagatttgtctccgcgttggtacttttactatctcggcaccggtccggaagctggactgccctacggggcaaacaaggacgggatcatttgggtggctaccgaaggtgccctgaatactccaaaagatcatatcggcacccgtaaccctgctaataacgctgcgatcgttctgcaactgcctcagggtacaactctgccaaaaggcttctatgcagaagggtcgcgtggtggcagccaggcgagtagccgtagcagctcccgctctcgcaactcgtcccgtaactccactccgggctcttctcgcggcacgtccccggctcgtatggcaggtaacggtggtgacgctgctctggcgctgctactgctggacaggctgaaccagctggagtcgaagatgagtggtaaaggccaacagcagcagggccagaccgttaccaaaaagagcgcagctgaaatgtctaaaaaaccgcgacagaaacgtaccgcgactaaagggtgtaatgtaacacagtgcttcggtccgcgaggtccggagcaaactcaaggaaactttggcgatgcagatttagtgaagaaagggaccgactacaaacactggccgcaaattgcccagttcgccccatccgctagtgcattcttcggtatgagccgcatctcgtcaaaagaaacgccaagtggtacgtggctgacctacaccggtgctatcaagcttgataaagatgacccgaactttaaagaccaggttattctgcttaacaaacatattgatgcctataaaactttcccgccgaccgaacccaaaaaggacaaaaagaaaaaagctgatgaaacccaggctctaccgcagcgtcagaaaaaacagcaaactgtgactctgctgccagctgcggacctggatgatttttccaagcagctgcaacagtctatgagctctgcggactctacgcaggctggtggttctggtcaccatcatcaccatcattaa

SEQ ID NO: 3118 - DNA, 2421 bp, Artificial Sequence
  Description of Artificial Sequence: Synthetic polynucleotide
atgaaaatcgaagaaggtaaactggtaatctggattaacggcgataaaggctataacggtctcgctgaagtcggtaagaaattcgagaaagataccggaattaaagtcaccgttgagcatccggataaactggaagagaaattcccacaggttgcggcaactggcgatggccctgacattatcttctgggcacacgaccgctttggtggctacgctcaatctggcctgttggctgaaatcaccccggacaaagcgttccaggacaagctgtatccgtttacctgggatgccgtacgttacaacggcaagctgattgcttacccgatcgctgttgaagcgttatcgctgatttataacaaagatctgctgccgaacccgccaaaaacctgggaagagatcccggcgctggataaagaactgaaagcgaaaggtaagagcgcgctgatgttcaacctgcaagaaccgtacttcacctggccgctgattgctgctgacgggggttatgcgttcaagtatgaaaacggcaagtacgacattaaagacgtgggcgtggataacgctggcgcgaaagcgggtctgaccttcctggttgacctgattaaaaacaaacacatgaatgcagacaccgattactccatcgcagaagctgcctttaataaaggcgaaacagcgatgaccatcaacggcccgtgggcatggtccaacatcgacaccagcaaagtgaattatggtgtaacggtactgccgaccttcaagggtcaaccatccaaaccgttcgttggcgtgctgagcgcaggtattaacgccgccagtccgaacaaagagctggcgaaagagttcctcgaaaactatctgctgactgatgaaggtctggaagcggttaataaagacaaaccgctgggtgccgtagcgctgaagtcttacgaggaagagttggcgaaagatccacgtattgccgccaccatggaaaacgcccagaaaggtgaaatcatgccgaacatcccgcagatgtccgctttctggtatgccgtgcgtactgcggtgatcaacgccgccagcggtcgtcagactgtcgatgaagccctgaaagacgcgcagactggtggttctggtgagaacctgtactttcaaagctcagataatgggcctcaaaaccagcgcaacgctccacgtataaccttcggtggcccgtctgactccacaggcagcaaccagaatggtgagcgtagtggagccaggtctaagcagcgccgtccccagggtctgccgaacaacacggcgagctggtttactgcgcttacccaacacggtaaagaagacttaaaattcccgcgtggccagggcgtcccgatcaacactaactcttccccggatgatcagattggttattaccgcagagcaactcgtcggattcgcggcggcgacggtaaaatgaaagatttgtctccgcgttggtacttttactatctcggcaccggtccggaagctggactgccctacggggcaaacaaggacgggatcatttgggtggctaccgaaggtgccctgaatactccaaaagatcatatcggcacccgtaaccctgctaataacgctgcgatcgttctgcaactgcctcagggtacaactctgccaaaaggcttctatgcagaagggtcgcgtggtggcagccaggcgagtagccgtagcagctcccgctctcgcaactcgtcccgtaactccactccgggctcttctcgcggcacgtccccggctcgtatggcaggtaacggtggtgacgctgctctggcgctgctactgctggacaggctgaaccagctggagtcgaagatgagtggtaaaggccaacagcagcagggccagaccgttaccaaaaagagcgcagctgaagcatctaaaaaaccgcgacagaaacgtaccgcgactaaagcgtacaatgtaacacaggccttcggtgcccgaggtccggagcaaactcaaggaaactttggcgatcaggaattaatccgccaggggaccgactacaaacactggccgcaaattgcccagttcgccccatccgctagtgcattcttcggtatgagccgcatcggcatggaagtaacgccaagtggtacgtggctgacctacaccggtgctatcaagcttgatgacaaggacccgaactttaaagaccaggttattctgcttaacaaacatattgatgcctataaaactttcccgccgaccgaacccaaaaaggacaaaaagaaaaaagctgatgaaacccaggctctaccgcagcgtcagaaaaaacagcaaactgtgactctgctgccagctgcggacctggatgatttttccaagcagctgcaacagtctatgagctctgcggactctacgcaggctggtggttctggtcaccatcatcaccatcattaa

SEQ ID NO: 3119 - DNA, 2421 bp, Artificial Sequence
  Description of Artificial Sequence: Synthetic polynucleotide
atgaaaatcgaagaaggtaaactggtaatctggattaacggcgataaaggctataacggtctcgctgaagtcggtaagaaattcgagaaagataccggaattaaagtcaccgttgagcatccggataaactggaagagaaattcccacaggttgcggcaactggcgatggccctgacattatcttctgggcacacgaccgctttggtggctacgctcaatctggcctgttggctgaaatcaccccggacaaagcgttccaggacaagctgtatccgtttacctgggatgccgtacgttacaacggcaagctgattgcttacccgatcgctgttgaagcgttatcgctgatttataacaaagatctgctgccgaacccgccaaaaacctgggaagagatcccggcgctggataaagaactgaaagcgaaaggtaagagcgcgctgatgttcaacctgcaagaaccgtacttcacctggccgctgattgctgctgacgggggttatgcgttcaagtatgaaaacggcaagtacgacattaaagacgtgggcgtggataacgctggcgcgaaagcgggtctgaccttcctggttgacctgattaaaaacaaacacatgaatgcagacaccgattactccatcgcagaagctgcctttaataaaggcgaaacagcgatgaccatcaacggcccgtgggcatggtccaacatcgacaccagcaaagtgaattatggtgtaacggtactgccgaccttcaagggtcaaccatccaaaccgttcgttggcgtgctgagcgcaggtattaacgccgccagtccgaacaaagagctggcgaaagagttcctcgaaaactatctgctgactgatgaaggtctggaagcggttaataaagacaaaccgctgggtgccgtagcgctgaagtcttacgaggaagagttggcgaaagatccacgtattgccgccaccatggaaaacgcccagaaaggtgaaatcatgccgaacatcccgcagatgtccgctttctggtatgccgtgcgtactgcggtgatcaacgccgccagcggtcgtcagactgtcgatgaagccctgaaagacgcgcagactggtggttctggtgagaacctgtactttcaaagctcagataatgggcctcaaaaccagcgcaacgctccacgtataaccttcggtggcccgtctgactccacaggcagcaaccagaatggtgagcgtagtggagccaggtctaagcagcgccgtccccagggtctgccgaacaacacggcgagctggtttactgcgcttacccaacacggtaaagaagacttaaaattcccgcgtggccagggcgtcccgatcaacactaactcttccccggatgatcagattggtccataccgcagagcaactcgtcggattcgcggcggcgacggtaaaatgaaagatttgtctccgcgttggtacttttactatctcggcaccggtccggaagctggactgccctacggggcaaacaaggacgggatcatttgggtggctaccgaaggtgccctgaatactccaaaagatcatatcggcacccgtaaccctgctaataacgctgcgatcgttctgcaactgcctcagggtacaactctgccaaaaggcttctatgcagaagggtcgcgtggtggcagccaggcgagtagccgtagcagctcccgctctcgcaactcgtcccgtaactccactccgggctcttctcgcggcacgtccccggctcgtatggcaggtaacggtggtgacgctgctctggcgctgctactgctggacaggctgaaccagctggagtcgaagatgagtggtaaaggccaacagcagcagggccagaccgttaccaaaaagagcgcagctgaagcatctaaaaaaccgcgacagaaacgtaccgcgactaaagcgtacaatgtaacacaggccttcggtcgtcgaggtccggagcaaactcaaggaaactttggcgatcaggaattaatccgccaggggaccgactacaaacactggccgcaaattgcccagttcgccccatccgctagtgcattcttcggtatgagccgcatcggcatggaagtaacgccaagtggtacgtggctgacctacaccggtgctatcaagcttgatgacaaggacccgaactttaaagaccaggttattctgcttaacaaacatattgatgcctataaaactttcccgccgaccgaacccaaaaaggacaaaaagaaaaaagctgatgaaacccaggctctaccgcagcgtcagaaaaaacagcaaactgtgactctgctgccagctgcggacctggatgatttttccaagcagctgcaacagtctatgagctctgcggactctacgcaggctggtggttctggtcaccatcatcaccatcattaa

SEQ ID NO: 3120 - DNA, 2421 bp, Artificial Sequence
  Description of Artificial Sequence: Synthetic polynucleotide
atgaaaatcgaagaaggtaaactggtaatctggattaacggcgataaaggctataacggtctcgctgaagtcggtaagaaattcgagaaagataccggaattaaagtcaccgttgagcatccggataaactggaagagaaattcccacaggttgcggcaactggcgatggccctgacattatcttctgggcacacgaccgctttggtggctacgctcaatctggcctgttggctgaaatcaccccggacaaagcgttccaggacaagctgtatccgtttacctgggatgccgtacgttacaacggcaagctgattgcttacccgatcgctgttgaagcgttatcgctgatttataacaaagatctgctgccgaacccgccaaaaacctgggaagagatcccggcgctggataaagaactgaaagcgaaaggtaagagcgcgctgatgttcaacctgcaagaaccgtacttcacctggccgctgattgctgctgacgggggttatgcgttcaagtatgaaaacggcaagtacgacattaaagacgtgggcgtggataacgctggcgcgaaagcgggtctgaccttcctggttgacctgattaaaaacaaacacatgaatgcagacaccgattactccatcgcagaagctgcctttaataaaggcgaaacagcgatgaccatcaacggcccgtgggcatggtccaacatcgacaccagcaaagtgaattatggtgtaacggtactgccgaccttcaagggtcaaccatccaaaccgttcgttggcgtgctgagcgcaggtattaacgccgccagtccgaacaaagagctggcgaaagagttcctcgaaaactatctgctgactgatgaaggtctggaagcggttaataaagacaaaccgctgggtgccgtagcgctgaagtcttacgaggaagagttggcgaaagatccacgtattgccgccaccatggaaaacgcccagaaaggtgaaatcatgccgaacatcccgcagatgtccgctttctggtatgccgtgcgtactgcggtgatcaacgccgccagcggtcgtcagactgtcgatgaagccctgaaagacgcgcagactggtggttctggtgagaacctgtactttcaaagctcagataatgggcctcaaaaccagcgcaacgctccacgtataaccttcggtggcccgtctgactccacaggcagcaaccagaatggtgagcgtagtggagccaggtctaagcagcgccgtccccagggtctgccgaacaacacggcgagctggtttactgcgcttacccaacacggtaaagaagacttaaaattcccgcgtggccagggcgtcccgatcaacactaactcttccccggatgatcagattggttattaccgcagagcaactcgtcggattcgcggcggcgacggtaaaatgaaagatttgtctccgcgttggtacttttactatctcggcaccggtccggaagctggactgccctacggggcaaacaaggacgggatcatttgggtggctaccgaaggtgccctgaatactccaaaagatcatatcggcacccgtaaccctgctaataacgctgcgatcgttctgcaactgcctcagggtacaactctgccaaaaggcttctatgcagaagggtcgcgtggtggcagccaggcgagtagccgtagcagctcccgctctcgcaactcgtcccgtaactccactccgggctcttctcgcggcacgtccccggctcgtatggcaggtaacggtggtgacgctgctctggcgctgctactgctggacaggctgaaccagctggagtcgaagatgagtggtaaaggccaacagcagcagggccagaccgttaccaaaaagagcgcagctgaaatgtctaaaaaaccgcgacagaaacgtaccgcgactaaaggctgcaatgtaacacagtgtttcggtccacgaggtccggagcaaactcaaggaaactttggcgatgcggatttaaataagaaagggaccgactacaaacactggccgcaaattgcccagttcgccccatccgctagtgcattcttcggtatgagccgcatctcgtcgaaagaaacgccaagtggtacgtggctgacctacaccggtgctatcaagcttgataaagatgacccgaactttaaagaccaggttattctgcttaacaaacatattgatgcctataaaactttcccgccgaccgaacccaaaaaggacaaaaagaaaaaagctgatgaaacccaggctctaccgcagcgtcagaaaaaacagcaaactgtgactctgctgccagctgcggacctggatgatttttccaagcagctgcaacagtctatgagctctgcggactctacgcaggctggtggttctggtcaccatcatcaccatcattaa

SEQ ID NO: 3121 - DNA, 2421 bp, Artificial Sequence
  Description of Artificial Sequence: Synthetic polynucleotide
atgaaaatcgaagaaggtaaactggtaatctggattaacggcgataaaggctataacggtctcgctgaagtcggtaagaaattcgagaaagataccggaattaaagtcaccgttgagcatccggataaactggaagagaaattcccacaggttgcggcaactggcgatggccctgacattatcttctgggcacacgaccgctttggtggctacgctcaatctggcctgttggctgaaatcaccccggacaaagcgttccaggacaagctgtatccgtttacctgggatgccgtacgttacaacggcaagctgattgcttacccgatcgctgttgaagcgttatcgctgatttataacaaagatctgctgccgaacccgccaaaaacctgggaagagatcccggcgctggataaagaactgaaagcgaaaggtaagagcgcgctgatgttcaacctgcaagaaccgtacttcacctggccgctgattgctgctgacgggggttatgcgttcaagtatgaaaacggcaagtacgacattaaagacgtgggcgtggataacgctggcgcgaaagcgggtctgaccttcctggttgacctgattaaaaacaaacacatgaatgcagacaccgattactccatcgcagaagctgcctttaataaaggcgaaacagcgatgaccatcaacggcccgtgggcatggtccaacatcgacaccagcaaagtgaattatggtgtaacggtactgccgaccttcaagggtcaaccatccaaaccgttcgttggcgtgctgagcgcaggtattaacgccgccagtccgaacaaagagctggcgaaagagttcctcgaaaactatctgctgactgatgaaggtctggaagcggttaataaagacaaaccgctgggtgccgtagcgctgaagtcttacgaggaagagttggcgaaagatccacgtattgccgccaccatggaaaacgcccagaaaggtgaaatcatgccgaacatcccgcagatgtccgctttctggtatgccgtgcgtactgcggtgatcaacgccgccagcggtcgtcagactgtcgatgaagccctgaaagacgcgcagactggtggttctggtgagaacctgtactttcaaagctcagataatgggcctcaaaaccagcgcaacgctccacgtataaccttcggtggcccgtctgactccacaggcagcaaccagaatggtgagcgtagtggagccaggtctaagcagcgccgtccccagggtctgccgaacaacacggcgagctggtttactgcgcttacccaacacggtaaagaagacttaaaattcccgcgtggccagggcgtcccgatcaacactaactcttccccggatgatcagattggttattaccgcagagcaactcgtcggattcgcggcggcgacggtaaaatgaaagatttgtctccgcgttggtacttttactatctcggcaccggtccggaagctggactgccctacggggcaaacaaggacgggatcatttgggtggctaccgaaggtgccctgaatactccaaaagatcatatcggcacccgtaaccctgctaataacgctgcgatcgttctgcaactgcctcagggtacaactctgccaaaaggcttctatgcagaagggtcgcgtggtggcagccaggcgagtagccgtagcagctcccgctctcgcaactcgtcccgtaactccactccgggctcttctcgcggcacgtccccggctcgtatggcaggtaacggtggtgacgctgctctggcgctgctactgctggacaggctgaaccagctggagtcgaagatgagtggtaaaggccaacagcagcagggccagaccgttaccaaaaagagcgcagctgaagcatctaaaaaaccgcgacagaaacgtaccgcgactaaagcgtacaatgtaacacaggccttcggtcgtcgaggtccggagcaaactcaaggaaactttggcgatcaggaattaatccgccaggggaccgactacaaacactggccgcaaattgcccagttcgccccatccgctagtgcattcttcggtatgagccgcatcggcatggaaaaaacgccaagtggtacgtggctgacctacaccggtgctatcaagcttgatgacaaggacccgaactttaaagaccaggttattctgcttaacaaacatattgatgcctataaaactttcccgccgaccgaacccaaaaaggacaaaaagaaaaaagctgatgaaacccaggctctaccgcagcgtcagaaaaaacagcaaactgtgactctgctgccagctgcggacctggatgatttttccaagcagctgcaacagtctatgagctctgcggactctacgcaggctggtggttctggtcaccatcatcaccatcattaa

SEQ ID NO: 3122 - DNA, 2421 bp, Artificial Sequence
  Description of Artificial Sequence: Synthetic polynucleotide
atgaaaatcgaagaaggtaaactggtaatctggattaacggcgataaaggctataacggtctcgctgaagtcggtaagaaattcgagaaagataccggaattaaagtcaccgttgagcatccggataaactggaagagaaattcccacaggttgcggcaactggcgatggccctgacattatcttctgggcacacgaccgctttggtggctacgctcaatctggcctgttggctgaaatcaccccggacaaagcgttccaggacaagctgtatccgtttacctgggatgccgtacgttacaacggcaagctgattgcttacccgatcgctgttgaagcgttatcgctgatttataacaaagatctgctgccgaacccgccaaaaacctgggaagagatcccggcgctggataaagaactgaaagcgaaaggtaagagcgcgctgatgttcaacctgcaagaaccgtacttcacctggccgctgattgctgctgacgggggttatgcgttcaagtatgaaaacggcaagtacgacattaaagacgtgggcgtggataacgctggcgcgaaagcgggtctgaccttcctggttgacctgattaaaaacaaacacatgaatgcagacaccgattactccatcgcagaagctgcctttaataaaggcgaaacagcgatgaccatcaacggcccgtgggcatggtccaacatcgacaccagcaaagtgaattatggtgtaacggtactgccgaccttcaagggtcaaccatccaaaccgttcgttggcgtgctgagcgcaggtattaacgccgccagtccgaacaaagagctggcgaaagagttcctcgaaaactatctgctgactgatgaaggtctggaagcggttaataaagacaaaccgctgggtgccgtagcgctgaagtcttacgaggaagagttggcgaaagatccacgtattgccgccaccatggaaaacgcccagaaaggtgaaatcatgccgaacatcccgcagatgtccgctttctggtatgccgtgcgtactgcggtgatcaacgccgccagcggtcgtcagactgtcgatgaagccctgaaagacgcgcagactggtggttctggtgagaacctgtactttcaaagctcagataatgggcctcaaaaccagcgcaacgctccacgtataaccttcggtggcccgtctgactccacaggcagcaaccagaatggtgagcgtagtggagccaggtctaagcagcgccgtccccagggtctgccgaacaacacggcgagctggtttactgcgcttacccaacacggtaaagaagacttaaaattcccgcgtggccagggcgtcccgatcaacactaactcttccccggatgatcagattggttattaccgcagagcaactcgtcggattcgcggcggcgacggtaaaatgaaagatttgtctccgcgttggtacttttactatctcggcaccggtccggaagctggactgccctacggggcaaacaaggacgggatcatttgggtgcataccgaaggtgccctgaatactccaaaagatcatatcggcacccgtaaccctgctaataacgctgcgatcgttctgcaactgcctcagggtacaactctgccaaaaggcttctatgcagaagggtcgcgtggtggcagccaggcgagtagccgtagcagctcccgctctcgcaactcgtcccgtaactccactccgggctcttctcgcggcacgtccccggctcgtatggcaggtaacggtggtgacgctgctctggcgctgctactgctggacaggctgaaccagctggagtcgaagatgagtggtaaaggccaacagcagcagggccagaccgttaccaaaaagagcgcagctgaagcatctaaaaaaccgcgacagaaacgtaccgcgactaaagcgtacaatgtaacacaggccttcggtcgtcgaggtccggagcaaactcaaggaaactttggcgatcaggaattaatccgccaggggaccgactacaaacactggccgcaaattgcccagttcgccccatccgctagtgcattcttcggtatgagccgcatcggcatggaagtaacgccaagtggtacgtggctgacctacaccggtgctatcaagcttgatgacaaggacccgaactttaaagaccaggttattctgcttaacaaacatattgatgcctataaaactttcccgccgaccgaacccaaaaaggacaaaaagaaaaaagctgatgaaacccaggctctaccgcagcgtcagaaaaaacagcaaactgtgactctgctgccagctgcggacctggatgatttttccaagcagctgcaacagtctatgagctctgcggactctacgcaggctggtggttctggtcaccatcatcaccatcattaa

SEQ ID NO: 3123 - DNA, 2421 bp, Artificial Sequence
  Description of Artificial Sequence: Synthetic polynucleotide
atgaaaatcgaagaaggtaaactggtaatctggattaacggcgataaaggctataacggtctcgctgaagtcggtaagaaattcgagaaagataccggaattaaagtcaccgttgagcatccggataaactggaagagaaattcccacaggttgcggcaactggcgatggccctgacattatcttctgggcacacgaccgctttggtggctacgctcaatctggcctgttggctgaaatcaccccggacaaagcgttccaggacaagctgtatccgtttacctgggatgccgtacgttacaacggcaagctgattgcttacccgatcgctgttgaagcgttatcgctgatttataacaaagatctgctgccgaacccgccaaaaacctgggaagagatcccggcgctggataaagaactgaaagcgaaaggtaagagcgcgctgatgttcaacctgcaagaaccgtacttcacctggccgctgattgctgctgacgggggttatgcgttcaagtatgaaaacggcaagtacgacattaaagacgtgggcgtggataacgctggcgcgaaagcgggtctgaccttcctggttgacctgattaaaaacaaacacatgaatgcagacaccgattactccatcgcagaagctgcctttaataaaggcgaaacagcgatgaccatcaacggcccgtgggcatggtccaacatcgacaccagcaaagtgaattatggtgtaacggtactgccgaccttcaagggtcaaccatccaaaccgttcgttggcgtgctgagcgcaggtattaacgccgccagtccgaacaaagagctggcgaaagagttcctcgaaaactatctgctgactgatgaaggtctggaagcggttaataaagacaaaccgctgggtgccgtagcgctgaagtcttacgaggaagagttggcgaaagatccacgtattgccgccaccatggaaaacgcccagaaaggtgaaatcatgccgaacatcccgcagatgtccgctttctggtatgccgtgcgtactgcggtgatcaacgccgccagcggtcgtcagactgtcgatgaagccctgaaagacgcgcagactggtggttctggtgagaacctgtactttcaaagctcagataatgggcctcaaaaccagcgcaacgctccacgtataaccttcggtggcccgtctgactccacaggcagcaaccagaatggtgagcgtagtggagccaggtctaagcagcgccgtccccagggtctgccgaacaacacggcgagctggtttactgcgcttacccaacacggtaaagaagacttaaaattcccgcgtggccagggcgtcccgatcaacactaactcttccccggatgatcagattggttattaccgcagagcaactcgtcggattcgcggcggcgacggtaaaatgaaagatttgtctccgcgttggtacttttactatctcggcaccggtccggaagctggactgccctacggggcaaacaaggacgggatcatttgggtggctaccgaaggtgccctgaatactccaaaagatcatatcggcacccgtaaccctgctaataacgctgcgatcgttctgcaactgcctcagggtacaactctgccaaaaggcttctatgcagaagggtcgcgtggtggcagccaggcgagtagccgtagcagctcccgctctcgcaactcgtcccgtaactccactccgggctcttctcgcggcacgtccccggctcgtatggcaggtaacggtggtgacgctgctctggcgctgctactgctggacaggctgaaccagctggagtcgaagatgagtggtaaaggccaacagcagcagggccagaccgttaccaaaaagagcgcagctgaagcatctaaagtaccgcgacagaaacgtaccgcgactaaagcgtacaatgtaacacaggccttcggtcgtcgaggtccggagcaaactcaaggaaactttggcgatcaggaattaatccgccaggggaccgactacaaacactggccgcaaattgcccagttcgccccatccgctagtgcattcttcggtatgagccgcatcggcatggaagtaacgccaagtggtacgtggctgacctacaccggtgctatcaagcttgatgacaaggacccgaactttaaagaccaggttattctgcttaacaaacatattgatgcctataaaactttcccgccgaccgaacccaaaaaggacaaaaagaaaaaagctgatgaaacccaggctctaccgcagcgtcagaaaaaacagcaaactgtgactctgctgccagctgcggacctggatgatttttccaagcagctgcaacagtctatgagctctgcggactctacgcaggctggtggttctggtcaccatcatcaccatcattaa

SEQ ID NO: 3124 - DNA, 2421 bp, Artificial Sequence
  Description of Artificial Sequence: Synthetic polynucleotide
atgaaaatcgaagaaggtaaactggtaatctggattaacggcgataaaggctataacggtctcgctgaagtcggtaagaaattcgagaaagataccggaattaaagtcaccgttgagcatccggataaactggaagagaaattcccacaggttgcggcaactggcgatggccctgacattatcttctgggcacacgaccgctttggtggctacgctcaatctggcctgttggctgaaatcaccccggacaaagcgttccaggacaagctgtatccgtttacctgggatgccgtacgttacaacggcaagctgattgcttacccgatcgctgttgaagcgttatcgctgatttataacaaagatctgctgccgaacccgccaaaaacctgggaagagatcccggcgctggataaagaactgaaagcgaaaggtaagagcgcgctgatgttcaacctgcaagaaccgtacttcacctggccgctgattgctgctgacgggggttatgcgttcaagtatgaaaacggcaagtacgacattaaagacgtgggcgtggataacgctggcgcgaaagcgggtctgaccttcctggttgacctgattaaaaacaaacacatgaatgcagacaccgattactccatcgcagaagctgcctttaataaaggcgaaacagcgatgaccatcaacggcccgtgggcatggtccaacatcgacaccagcaaagtgaattatggtgtaacggtactgccgaccttcaagggtcaaccatccaaaccgttcgttggcgtgctgagcgcaggtattaacgccgccagtccgaacaaagagctggcgaaagagttcctcgaaaactatctgctgactgatgaaggtctggaagcggttaataaagacaaaccgctgggtgccgtagcgctgaagtcttacgaggaagagttggcgaaagatccacgtattgccgccaccatggaaaacgcccagaaaggtgaaatcatgccgaacatcccgcagatgtccgctttctggtatgccgtgcgtactgcggtgatcaacgccgccagcggtcgtcagactgtcgatgaagccctgaaagacgcgcagactggtggttctggtgagaacctgtactttcaaagctcagataatgggcctcaaaaccagcgcaacgctccacgtataaccttcggtggcccgtctgactccacaggcagcaaccagaatggtgagcgtagtggagccaggtctaagcagcgccgtccccagggtctgccgaacaacacggcgagctggtttactgcgcttacccaacacggtaaagaagacttaaaattcccgaaaggccagggcgtcccgatcaacactaactctaagccggatgatcagattggttattggcgcagacaaactcgtcggtaccgcggcggcgacggtcaaatgaaagatttgaatccgcgttggtacttttactatctcggcaccggtccggaagctggactgccctacggggcaaacaaggacgggatcatttgggtggctaccgaaggtgccctgaatactccaaaagatcatatcggcacccgtaaccctgctaataacgctgcgatcgttctgcaactgcctcagggtacaactctgccaaaaggcttctatgcagaagggtcgcgtggtggcagccaggcgagtagccgtagcagctcccgctctcgcaactcgtcccgtaactccactccgggctcttctcgcggcacgtccccggctcgtatggcaggtaacggtggtgacgctgctctggcgctgctactgctggacaggctgaaccagctggagtcgaagatgagtggtaaaggccaacagcagcagggccagaccgttaccaaaaagagcgcagctgaagcatctaaaaaaccgcgacagaaacgtaccgcgactaaagcgtacaatgtaacacaggccttcggtcgtcgaggtccggagcaaactcaaggaaactttggcgatcaggaattaatccgccaggggaccgactacaaacactggccgcaaattgcccagttcgccccatccgctagtgcattcttcggtatgagccgcatcggcatggaagtaacgccaagtggtacgtggctgacctacaccggtgctatcaagcttgatgacaaggacccgaactttaaagaccaggttattctgcttaacaaacatattgatgcctataaaactttcccgccgaccgaacccaaaaaggacaaaaagaaaaaagctgatgaaacccaggctctaccgcagcgtcagaaaaaacagcaaactgtgactctgctgccagctgcggacctggatgatttttccaagcagctgcaacagtctatgagctctgcggactctacgcaggctggtggttctggtcaccatcatcaccatcattaa

SEQ ID NO: 3125 - DNA, 2421 bp, Artificial Sequence
  Description of Artificial Sequence: Synthetic polynucleotide
atgaaaatcgaagaaggtaaactggtaatctggattaacggcgataaaggctataacggtctcgctgaagtcggtaagaaattcgagaaagataccggaattaaagtcaccgttgagcatccggataaactggaagagaaattcccacaggttgcggcaactggcgatggccctgacattatcttctgggcacacgaccgctttggtggctacgctcaatctggcctgttggctgaaatcaccccggacaaagcgttccaggacaagctgtatccgtttacctgggatgccgtacgttacaacggcaagctgattgcttacccgatcgctgttgaagcgttatcgctgatttataacaaagatctgctgccgaacccgccaaaaacctgggaagagatcccggcgctggataaagaactgaaagcgaaaggtaagagcgcgctgatgttcaacctgcaagaaccgtacttcacctggccgctgattgctgctgacgggggttatgcgttcaagtatgaaaacggcaagtacgacattaaagacgtgggcgtggataacgctggcgcgaaagcgggtctgaccttcctggttgacctgattaaaaacaaacacatgaatgcagacaccgattactccatcgcagaagctgcctttaataaaggcgaaacagcgatgaccatcaacggcccgtgggcatggtccaacatcgacaccagcaaagtgaattatggtgtaacggtactgccgaccttcaagggtcaaccatccaaaccgttcgttggcgtgctgagcgcaggtattaacgccgccagtccgaacaaagagctggcgaaagagttcctcgaaaactatctgctgactgatgaaggtctggaagcggttaataaagacaaaccgctgggtgccgtagcgctgaagtcttacgaggaagagttggcgaaagatccacgtattgccgccaccatggaaaacgcccagaaaggtgaaatcatgccgaacatcccgcagatgtccgctttctggtatgccgtgcgtactgcggtgatcaacgccgccagcggtcgtcagactgtcgatgaagccctgaaagacgcgcagactggtggttctggtgagaacctgtactttcaaagctcagataatgggcctcaaaaccagcgcaacgctccacgtataaccttcggtggcccgtctgactccacaggcagcaaccagaatggtgagcgtagtggagccaggtctaagcagcgccgtccccagggtctgccgaacaacacggcgagctggtttactgcgcttacccaacacggtaaagaagacttaaaattcccgcgtggccagggcgtcccgatcaacactaactcttccccggatgatcagattggttattaccgcagagcaactcgtcggattcgcggcggcgacggtaaaatgaaagatttgtctccgcgttggtacttttactatctcggcaccggtccggaagctggactgccctacggggcaaacaaggacgggatcatttgggtggctaccgaaggtgccctgaatactccaaaagatcatatcggcacccgtaaccctgctaataacgctgcggatgttctgcaactgcctcagggtacaactctgccaaaaggcttctatgcagaagggtcgcgtggtggcagccaggcgagtagccgtagcagctcccgctctcgcaactcgtcccgtaactccactccgggctcttctcgcggcacgtccccggctcgtatggcaggtaacggtggtgacgctgctctggcgctgctactgctggacaggctgaaccagctggagtcgaagatgagtggtaaaggccaacagcagcagggccagaccgttaccaaaaagagcgcagctgaagcatctaaaaaaccgcgacagaaacgtaccgcgactaaagcgtacaatgtaacacaggccttcggtcgtcgaggtccggagcaaactcaaggaaactttggcgatcaggaattaatccgccaggggaccgactacaaacactggccgcaaattgcccagttcgccccatccgctagtgcattcttcggtatgagccgcatcggcatggaagtaacgccaagtggtacgtggctgacctacaccggtgctatcaagcttgatgacaaggacccgaactttaaagaccaggttattctgcttaacaaacatattgatgcctataaaactttcccgccgaccgaacccaaaaaggacaaaaagaaaaaagctgatgaaacccaggctctaccgcagcgtcagaaaaaacagcaaactgtgactctgctgccagctgcggacctggatgatttttccaagcagctgcaacagtctatgagctctgcggactctacgcaggctggtggttctggtcaccatcatcaccatcattaa

SEQ ID NO: 3126 - DNA, 2421 bp, Artificial Sequence
  Description of Artificial Sequence: Synthetic polynucleotide
atgaaaatcgaagaaggtaaactggtaatctggattaacggcgataaaggctataacggtctcgctgaagtcggtaagaaattcgagaaagataccggaattaaagtcaccgttgagcatccggataaactggaagagaaattcccacaggttgcggcaactggcgatggccctgacattatcttctgggcacacgaccgctttggtggctacgctcaatctggcctgttggctgaaatcaccccggacaaagcgttccaggacaagctgtatccgtttacctgggatgccgtacgttacaacggcaagctgattgcttacccgatcgctgttgaagcgttatcgctgatttataacaaagatctgctgccgaacccgccaaaaacctgggaagagatcccggcgctggataaagaactgaaagcgaaaggtaagagcgcgctgatgttcaacctgcaagaaccgtacttcacctggccgctgattgctgctgacgggggttatgcgttcaagtatgaaaacggcaagtacgacattaaagacgtgggcgtggataacgctggcgcgaaagcgggtctgaccttcctggttgacctgattaaaaacaaacacatgaatgcagacaccgattactccatcgcagaagctgcctttaataaaggcgaaacagcgatgaccatcaacggcccgtgggcatggtccaacatcgacaccagcaaagtgaattatggtgtaacggtactgccgaccttcaagggtcaaccatccaaaccgttcgttggcgtgctgagcgcaggtattaacgccgccagtccgaacaaagagctggcgaaagagttcctcgaaaactatctgctgactgatgaaggtctggaagcggttaataaagacaaaccgctgggtgccgtagcgctgaagtcttacgaggaagagttggcgaaagatccacgtattgccgccaccatggaaaacgcccagaaaggtgaaatcatgccgaacatcccgcagatgtccgctttctggtatgccgtgcgtactgcggtgatcaacgccgccagcggtcgtcagactgtcgatgaagccctgaaagacgcgcagactggtggttctggtgagaacctgtactttcaaagctcagataatgggcctcaaaaccagcgcaacgctccacgtataaccttcggtggcccgtctgactccacaggcagcaaccagaatggtgagcgtagtggagccaggtctaagcagcgccgtccccagggtctgccgaacaacacggcgagctggtttactgcgcttacccaacacggtaaagaagacttaaaattcccgcgtggccagggcgtcccgatcaacactaactcttccccggatgatcagattggttattaccgcagagcaactcgtcggattcgcggcggcgacggtaaaatgaaagatttgtctccgcgttggtacttttactatctcggcaccggtccggaagctggactgccctacggggcaaacaaggacgggatcatttgggtggctaccgaaggtgccctgaatactccaaaagatcatatcggcacccgtaaccctgctaataacgctgcgatcgttctgcaactgcctcagggtacaactctgccaaaaggcttctatgcagaagggtcgcgtggtggcagccaggcgagtagccgtagcagctcccgctctcgcaactcgtcccgtaactccactccgggctcttctcgcggcacgtccccggctcgtatggcaggtaacggtggtgacgctgctctggcgctgctactgctggacaggctgaaccagctggagtcgaagatgagtggtaaaggccaacagcagcagggccagaccgttaccaaaaagagcgcagctgaagcatctaaaaaaccgcgacagaaacgtaccgcgactaaagattacaatgtaacacaggccttcggtcgtcgaggtccggagcaaactcaaggaaactttggcgatcaggatttaatcaagcttgggaccgactacaaacactggccgcaaattgcccagttcgccccatccgctagtgcattcttcggtatgagccgcatctcaacgcgcgaaacgccaagtggtacgtggctgacctacaccggtgctatcaagcttgataaaaaggacccgaactttaaagaccaggttattctgcttaacaaacatattgatgcctataaaactttcccgccgaccgaacccaaaaaggacaaaaagaaaaaagctgatgaaacccaggctctaccgcagcgtcagaaaaaacagcaaactgtgactctgctgccagctgcggacctggatgatttttccaagcagctgcaacagtctatgagctctgcggactctacgcaggctggtggttctggtcaccatcatcaccatcattaa

SEQ ID NO: 3127 - DNA, 2421 bp, Artificial Sequence
  Description of Artificial Sequence: Synthetic polynucleotide
atgaaaatcgaagaaggtaaactggtaatctggattaacggcgataaaggctataacggtctcgctgaagtcggtaagaaattcgagaaagataccggaattaaagtcaccgttgagcatccggataaactggaagagaaattcccacaggttgcggcaactggcgatggccctgacattatcttctgggcacacgaccgctttggtggctacgctcaatctggcctgttggctgaaatcaccccggacaaagcgttccaggacaagctgtatccgtttacctgggatgccgtacgttacaacggcaagctgattgcttacccgatcgctgttgaagcgttatcgctgatttataacaaagatctgctgccgaacccgccaaaaacctgggaagagatcccggcgctggataaagaactgaaagcgaaaggtaagagcgcgctgatgttcaacctgcaagaaccgtacttcacctggccgctgattgctgctgacgggggttatgcgttcaagtatgaaaacggcaagtacgacattaaagacgtgggcgtggataacgctggcgcgaaagcgggtctgaccttcctggttgacctgattaaaaacaaacacatgaatgcagacaccgattactccatcgcagaagctgcctttaataaaggcgaaacagcgatgaccatcaacggcccgtgggcatggtccaacatcgacaccagcaaagtgaattatggtgtaacggtactgccgaccttcaagggtcaaccatccaaaccgttcgttggcgtgctgagcgcaggtattaacgccgccagtccgaacaaagagctggcgaaagagttcctcgaaaactatctgctgactgatgaaggtctggaagcggttaataaagacaaaccgctgggtgccgtagcgctgaagtcttacgaggaagagttggcgaaagatccacgtattgccgccaccatggaaaacgcccagaaaggtgaaatcatgccgaacatcccgcagatgtccgctttctggtatgccgtgcgtactgcggtgatcaacgccgccagcggtcgtcagactgtcgatgaagccctgaaagacgcgcagactggtggttctggtgagaacctgtactttcaaagctcagataatgggcctcaaaaccagcgcaacgctccacgtataaccttcggtggcccgtctgactccacaggcagcaaccagaatggtgagcgtagtggagccaggtctaagcagcgccgtccccagggtctgccgaacaacacggcgagctggtttactgcgcttacccaacacggtaaagaagacttaaaattcccgcgtggccagggcgtcccgatcaacactaactcttccccggatgatcagattggttattaccgcagagcaactcgtcggattcgcggcggcgacggtaaaatgaaagatttgtctccgcgttggtacttttactatctcggcaccggtccggaagctggactgccctacggggcaaacaaggacgggatcatttgggtggctaccgaaggtgccctgaatactccaaaagatcatatcggcacccgtaaccctgctaataacgctgcgatcgttctgcaactgcctcagggtacaactctgccaaaaggcttctatgcagaagggtcgcgtggtggcagccaggcgagtagccgtagcagcgagcgctctcgcaactcgtcccgtaactccactccgggctcttctcgcggcacgtccccggctcgtatggcaggtaacggtggtgacgctgctctggcgctgctactgctggacaggctgaaccagctggagtcgaagatgagtggtaaaggccaacagcagcagggccagaccgttaccaaaaagagcgcagctgaagcatctaaaaaaccgcgacagaaacgtaccgcgactaaagcgtacaatgtaacacaggccttcggtcgtcgaggtccggagcaaactcaaggaaactttggcgatcaggaattaatccgccaggggaccgactacaaacactggccgcaaattgcccagttcgccccatccgctagtgcattcttcggtatgagccgcatcggcatggaagtaacgccaagtggtacgtggctgacctacaccggtgctatcaagcttgatgacaaggacccgaactttaaagaccaggttattctgcttaacaaacatattgatgcctataaaactttcccgccgaccgaacccaaaaaggacaaaaagaaaaaagctgatgaaacccaggctctaccgcagcgtcagaaaaaacagcaaactgtgactctgctgccagctgcggacctggatgatttttccaagcagctgcaacagtctatgagctctgcggactctacgcaggctggtggttctggtcaccatcatcaccatcattaa

SEQ ID NO: 3128 - DNA, 2421 bp, Artificial Sequence
  Description of Artificial Sequence: Synthetic polynucleotide
atgaaaatcgaagaaggtaaactggtaatctggattaacggcgataaaggctataacggtctcgctgaagtcggtaagaaattcgagaaagataccggaattaaagtcaccgttgagcatccggataaactggaagagaaattcccacaggttgcggcaactggcgatggccctgacattatcttctgggcacacgaccgctttggtggctacgctcaatctggcctgttggctgaaatcaccccggacaaagcgttccaggacaagctgtatccgtttacctgggatgccgtacgttacaacggcaagctgattgcttacccgatcgctgttgaagcgttatcgctgatttataacaaagatctgctgccgaacccgccaaaaacctgggaagagatcccggcgctggataaagaactgaaagcgaaaggtaagagcgcgctgatgttcaacctgcaagaaccgtacttcacctggccgctgattgctgctgacgggggttatgcgttcaagtatgaaaacggcaagtacgacattaaagacgtgggcgtggataacgctggcgcgaaagcgggtctgaccttcctggttgacctgattaaaaacaaacacatgaatgcagacaccgattactccatcgcagaagctgcctttaataaaggcgaaacagcgatgaccatcaacggcccgtgggcatggtccaacatcgacaccagcaaagtgaattatggtgtaacggtactgccgaccttcaagggtcaaccatccaaaccgttcgttggcgtgctgagcgcaggtattaacgccgccagtccgaacaaagagctggcgaaagagttcctcgaaaactatctgctgactgatgaaggtctggaagcggttaataaagacaaaccgctgggtgccgtagcgctgaagtcttacgaggaagagttggcgaaagatccacgtattgccgccaccatggaaaacgcccagaaaggtgaaatcatgccgaacatcccgcagatgtccgctttctggtatgccgtgcgtactgcggtgatcaacgccgccagcggtcgtcagactgtcgatgaagccctgaaagacgcgcagactggtggttctggtgagaacctgtactttcaaagctcagataatgggcctcaaaaccagcgcaacgctccacgtataaccttcggtggcccgtctgactccacaggcagcaaccagaatggtgagcgtagtggagccaggtctaagcagcgccgtccccagggtctgccgaacaacacggcgagctggtttactgcgcttacccaacacggtaaagaagacttaaaattcccgcgtggccagggcgtcccgatcaacactaactcttccccggatgatcagattggttattaccgcagagcaactcgtcggattcgcggcggcgacggtaaaatgaaagatttgtctccgcgttggtactttaattatctcggcaccggtccggaagctggactgccctacggggcaaacaaggacgggatcatttgggtggctaccgaaggtgccctgaatactccaaaagatcatatcggcacccgtaaccctgctaataacgctgcgatcgttctgcaactgcctcagggtacaactctgccaaaaggcttctatgcagaagggtcgcgtggtggcagccaggcgagtagccgtagcagctcccgctctcgcaactcgtcccgtaactccactccgggctcttctcgcggcacgtccccggctcgtatggcaggtaacggtggtgacgctgctctggcgctgctactgctggacaggctgaaccagctggagtcgaagatgagtggtaaaggccaacagcagcagggccagaccgttaccaaaaagagcgcagctgaagcatctaaaaaaccgcgacagaaacgtaccgcgactaaagcgtacaatgtaacacaggccttcggtcgtcgaggtccggagcaaactcaaggaaactttggcgatcaggaattaatccgccaggggaccgactacaaacactggccgcaaattgcccagttcgccccatccgctagtgcattcttcggtatgagccgcatcggcatggaagtaacgccaagtggtacgtggctgacctacaccggtgctatcaagcttgatgacaaggacccgaactttaaagaccaggttattctgcttaacaaacatattgatgcctataaaactttcccgccgaccgaacccaaaaaggacaaaaagaaaaaagctgatgaaacccaggctctaccgcagcgtcagaaaaaacagcaaactgtgactctgctgccagctgcggacctggatgatttttccaagcagctgcaacagtctatgagctctgcggactctacgcaggctggtggttctggtcaccatcatcaccatcattaa

SEQ ID NO: 3129 - DNA, 2421 bp, Artificial Sequence
  Description of Artificial Sequence: Synthetic polynucleotide
atgaaaatcgaagaaggtaaactggtaatctggattaacggcgataaaggctataacggtctcgctgaagtcggtaagaaattcgagaaagataccggaattaaagtcaccgttgagcatccggataaactggaagagaaattcccacaggttgcggcaactggcgatggccctgacattatcttctgggcacacgaccgctttggtggctacgctcaatctggcctgttggctgaaatcaccccggacaaagcgttccaggacaagctgtatccgtttacctgggatgccgtacgttacaacggcaagctgattgcttacccgatcgctgttgaagcgttatcgctgatttataacaaagatctgctgccgaacccgccaaaaacctgggaagagatcccggcgctggataaagaactgaaagcgaaaggtaagagcgcgctgatgttcaacctgcaagaaccgtacttcacctggccgctgattgctgctgacgggggttatgcgttcaagtatgaaaacggcaagtacgacattaaagacgtgggcgtggataacgctggcgcgaaagcgggtctgaccttcctggttgacctgattaaaaacaaacacatgaatgcagacaccgattactccatcgcagaagctgcctttaataaaggcgaaacagcgatgaccatcaacggcccgtgggcatggtccaacatcgacaccagcaaagtgaattatggtgtaacggtactgccgaccttcaagggtcaaccatccaaaccgttcgttggcgtgctgagcgcaggtattaacgccgccagtccgaacaaagagctggcgaaagagttcctcgaaaactatctgctgactgatgaaggtctggaagcggttaataaagacaaaccgctgggtgccgtagcgctgaagtcttacgaggaagagttggcgaaagatccacgtattgccgccaccatggaaaacgcccagaaaggtgaaatcatgccgaacatcccgcagatgtccgctttctggtatgccgtgcgtactgcggtgatcaacgccgccagcggtcgtcagactgtcgatgaagccctgaaagacgcgcagactggtggttctggtgagaacctgtactttcaaagctcagataatgggcctcaaaaccagcgcaacgctccacgtataaccttcggtggcccgtctgactccacaggcagcaaccagaatggtgagcgtagtggagccaggtctaagcagcgccgtccccagggtctgccgaacaacacggcgagctggtttactgcgcttacccaacacggtaaagaagacttaaaattcccgcgtggccagggcgtcccgatcaacactaactcttccccggatgatcagattggttattaccgcagagcaactcgtcggattcgcggcggcgacggtaaaatgaaagatttgtctccgcgttggtacttttactatctcggcaccggtccggaagctggactgccctacggggcaaacaaggacgggatcatttgggtggctaccgaaggtgccctgaatactccaaaagatcatatcggcacccgtaaccctgctaataacgctgcgatcgttctgcaactgcctcagggtacaactctgccaaaaggcttctatgcagaagggtcgcgtggtggcagccaggcgagtagccgtagcagctcccgctctcgcaactcgtcccgtaactccactccgggctcttctcgcggcacgtccccggctcgtatggcaggtaacggtggtgacgctgctctggcgctgctactgctggacaggctgaaccagctggagtcgaagatgagtggtaaaggccaacagcagcagggccagaccgttaccaaaaagagcgcagctgaagcatctaaaaaaccgcgacagaaacgtaccgcgactaaagcgtacaatgtaacacaggccttcggtcgtcgaggtccggagcaaactcaaggaaactttggcgatcaggaattaatccgccaggggaccgactacaaacactggccgcaaattgcccagttcgccccatccgctagtgcattcttcggtatgagccgcatcggcatggaatcgacgccaagtggtacgtggctgacctacaccggtgctatcaagcttgatgacaaggacccgaactttaaagaccaggttattctgcttaacaaacatattgatgcctataaaactttcccgccgaccgaacccaaaaaggacaaaaagaaaaaagctgatgaaacccaggctctaccgcagcgtcagaaaaaacagcaaactgtgactctgctgccagctgcggacctggatgatttttccaagcagctgcaacagtctatgagctctgcggactctacgcaggctggtggttctggtcaccatcatcaccatcattaa

SEQ ID NO: 3130 - DNA, 2421 bp, Artificial Sequence
  Description of Artificial Sequence: Synthetic polynucleotide
atgaaaatcgaagaaggtaaactggtaatctggattaacggcgataaaggctataacggtctcgctgaagtcggtaagaaattcgagaaagataccggaattaaagtcaccgttgagcatccggataaactggaagagaaattcccacaggttgcggcaactggcgatggccctgacattatcttctgggcacacgaccgctttggtggctacgctcaatctggcctgttggctgaaatcaccccggacaaagcgttccaggacaagctgtatccgtttacctgggatgccgtacgttacaacggcaagctgattgcttacccgatcgctgttgaagcgttatcgctgatttataacaaagatctgctgccgaacccgccaaaaacctgggaagagatcccggcgctggataaagaactgaaagcgaaaggtaagagcgcgctgatgttcaacctgcaagaaccgtacttcacctggccgctgattgctgctgacgggggttatgcgttcaagtatgaaaacggcaagtacgacattaaagacgtgggcgtggataacgctggcgcgaaagcgggtctgaccttcctggttgacctgattaaaaacaaacacatgaatgcagacaccgattactccatcgcagaagctgcctttaataaaggcgaaacagcgatgaccatcaacggcccgtgggcatggtccaacatcgacaccagcaaagtgaattatggtgtaacggtactgccgaccttcaagggtcaaccatccaaaccgttcgttggcgtgctgagcgcaggtattaacgccgccagtccgaacaaagagctggcgaaagagttcctcgaaaactatctgctgactgatgaaggtctggaagcggttaataaagacaaaccgctgggtgccgtagcgctgaagtcttacgaggaagagttggcgaaagatccacgtattgccgccaccatggaaaacgcccagaaaggtgaaatcatgccgaacatcccgcagatgtccgctttctggtatgccgtgcgtactgcggtgatcaacgccgccagcggtcgtcagactgtcgatgaagccctgaaagacgcgcagactggtggttctggtgagaacctgtactttcaaagctcagataatgggcctcaaaaccagcgcaacgctccacgtataaccttcggtggcccgtctgactccacaggcagcaaccagaatggtgagcgtagtggagccaggtctaagcagcgccgtccccagggtctgccgaacaacacggcgagctggtttactgcgcttacccaacacggtaaagaagacttaaaattcccgcgtggccagggcgtcccgatcaacactaactcttccccggatgatcagattggttattaccgcagagcaactcgtcggattcgcggcggcgacggtaaaatgaaagatttgtctccgcgttggtacttttactatctcggcaccggtccggaagctggactgccctacggggcaaacaaggacgggatcatttgggtggctaccgaaggtgccctgaatactccaaaagatcatatcggcacccgtaaccctgctaataacgctgcgatcgttctgcaactgcctcagggtacaactctgccaaaaggcttctatgcagaagggtcgcgtggtggcagccaggcgagtagccgtagcagctcccgctctcgcaactcgtcccgtaactccactccgggctcttctcgcggcacgtccccggctcgtatggcaggtaacggtggtgacgctgctctggcgctgctactgctggacaggctgaaccagctggagtcgaagatgagtggtaaaggccaacagcagcagggccagaccgttaccaaaaagagcgcagctgaagcatctaaaaaaccgcgacagaaacgtaccgcgactaaaggatacaatgtaacacaggccttcggtcgtcgaggtccggagcaaactcaaggaaactttggcgatcaggatttaaataaattggggaccgactacaaacactggccgcaaattgcccagttcgccccatccgctagtgcattcttcggtatgagccgcatctcaacgcgggaaacgccaagtggtacgtggctgacctacaccggtgctatcaagcttgataaaaaggacccgaactttaaagaccaggttattctgcttaacaaacatattgatgcctataaaactttcccgccgaccgaacccaaaaaggacaaaaagaaaaaagctgatgaaacccaggctctaccgcagcgtcagaaaaaacagcaaactgtgactctgctgccagctgcggacctggatgatttttccaagcagctgcaacagtctatgagctctgcggactctacgcaggctggtggttctggtcaccatcatcaccatcattaa

SEQ ID NO: 3131 - DNA, 2421 bp, Artificial Sequence
  Description of Artificial Sequence: Synthetic polynucleotide
atgaaaatcgaagaaggtaaactggtaatctggattaacggcgataaaggctataacggtctcgctgaagtcggtaagaaattcgagaaagataccggaattaaagtcaccgttgagcatccggataaactggaagagaaattcccacaggttgcggcaactggcgatggccctgacattatcttctgggcacacgaccgctttggtggctacgctcaatctggcctgttggctgaaatcaccccggacaaagcgttccaggacaagctgtatccgtttacctgggatgccgtacgttacaacggcaagctgattgcttacccgatcgctgttgaagcgttatcgctgatttataacaaagatctgctgccgaacccgccaaaaacctgggaagagatcccggcgctggataaagaactgaaagcgaaaggtaagagcgcgctgatgttcaacctgcaagaaccgtacttcacctggccgctgattgctgctgacgggggttatgcgttcaagtatgaaaacggcaagtacgacattaaagacgtgggcgtggataacgctggcgcgaaagcgggtctgaccttcctggttgacctgattaaaaacaaacacatgaatgcagacaccgattactccatcgcagaagctgcctttaataaaggcgaaacagcgatgaccatcaacggcccgtgggcatggtccaacatcgacaccagcaaagtgaattatggtgtaacggtactgccgaccttcaagggtcaaccatccaaaccgttcgttggcgtgctgagcgcaggtattaacgccgccagtccgaacaaagagctggcgaaagagttcctcgaaaactatctgctgactgatgaaggtctggaagcggttaataaagacaaaccgctgggtgccgtagcgctgaagtcttacgaggaagagttggcgaaagatccacgtattgccgccaccatggaaaacgcccagaaaggtgaaatcatgccgaacatcccgcagatgtccgctttctggtatgccgtgcgtactgcggtgatcaacgccgccagcggtcgtcagactgtcgatgaagccctgaaagacgcgcagactggtggttctggtgagaacctgtactttcaaagctcagataatgggcctcaaaaccagcgcaacgctccacgtataaccttcggtggcccgtctgactccacaggcagcaaccagaatggtgagcgtagtggagccaggtctaagcagcgccgtccccagggtctgccgaacaacacggcgagctggtttactgcgcttacccaacacggtaaagaagacttaaaattcccgcgtggccagggcgtcccgatcaacactaactcttccccggatgatcagattggttattaccgcagagcaactcgtcggattcgcggcggcgacggtaaaatgaaagatttgtctccgcgttggtacttttactatctcggcaccggtccggaagctggactgccctacggggcaaacaaggacgggatcatttgggtggctaccgaaggtgccctgaatactccaaaagatcatatcggcacccgtaaccctgctaataacgctgcgatcgttctgcaactgcctcagggtacaactctgccaaaaggcttctatgcagaagggtcgcgtggtggcagccaggcgagtagccgtagcagctcccgctctcgcaactcgtcccgtaactccactccgggctcttctcgcggcacgtccccggctcgtatggcaggtaacggtggtgacgctgctctggcgctgctactgctggacaggctgaaccagctggagtcgaagatgagtggtaaaggccaacagcagcagggccagaccgttaccaaaaagagcgcagctgaagcatctaaaaaaccgcgacagaaacgtaccgcgactaaagcgtacaatgtaacacaggccttcggtcgtcgaggtccggagcaaactcaaggaaactttggcgatcaggaattagtgcgccaggggaccgactacaaacactggccgcaaattgcccagttcgccccatccgctagtgcattcttcggtatgagccgcatcggcatggaagtaacgccaagtggtacgtggctgacctacaccggtgctatcaagcttgatgacaaggacccgaactttaaagaccaggttattctgcttaacaaacatattgatgcctataaaactttcccgccgaccgaacccaaaaaggacaaaaagaaaaaagctgatgaaacccaggctctaccgcagcgtcagaaaaaacagcaaactgtgactctgctgccagctgcggacctggatgatttttccaagcagctgcaacagtctatgagctctgcggactctacgcaggctggtggttctggtcaccatcatcaccatcattaa

SEQ ID NO: 3132 - DNA, 2421 bp, Artificial Sequence
  Description of Artificial Sequence: Synthetic polynucleotide
atgaaaatcgaagaaggtaaactggtaatctggattaacggcgataaaggctataacggtctcgctgaagtcggtaagaaattcgagaaagataccggaattaaagtcaccgttgagcatccggataaactggaagagaaattcccacaggttgcggcaactggcgatggccctgacattatcttctgggcacacgaccgctttggtggctacgctcaatctggcctgttggctgaaatcaccccggacaaagcgttccaggacaagctgtatccgtttacctgggatgccgtacgttacaacggcaagctgattgcttacccgatcgctgttgaagcgttatcgctgatttataacaaagatctgctgccgaacccgccaaaaacctgggaagagatcccggcgctggataaagaactgaaagcgaaaggtaagagcgcgctgatgttcaacctgcaagaaccgtacttcacctggccgctgattgctgctgacgggggttatgcgttcaagtatgaaaacggcaagtacgacattaaagacgtgggcgtggataacgctggcgcgaaagcgggtctgaccttcctggttgacctgattaaaaacaaacacatgaatgcagacaccgattactccatcgcagaagctgcctttaataaaggcgaaacagcgatgaccatcaacggcccgtgggcatggtccaacatcgacaccagcaaagtgaattatggtgtaacggtactgccgaccttcaagggtcaaccatccaaaccgttcgttggcgtgctgagcgcaggtattaacgccgccagtccgaacaaagagctggcgaaagagttcctcgaaaactatctgctgactgatgaaggtctggaagcggttaataaagacaaaccgctgggtgccgtagcgctgaagtcttacgaggaagagttggcgaaagatccacgtattgccgccaccatggaaaacgcccagaaaggtgaaatcatgccgaacatcccgcagatgtccgctttctggtatgccgtgcgtactgcggtgatcaacgccgccagcggtcgtcagactgtcgatgaagccctgaaagacgcgcagactggtggttctggtgagaacctgtactttcaaagctcagataatgggcctcaaaaccagcgcaacgctccacgtataaccttcggtggcccgtctgactccacaggcagcaaccagaatggtgagcgtagtggagccaggtctaagcagcgccgtccccagggtctgccgaacaacacggcgagctggtttactgcgcttacccaacacggtaaagaagacttaaaattcccgcgtggccagggcgtcccgatcaacactaactcttccccggatgatcagattggttattaccgcagagcaactcgtcggattcgcggcggcgacggtaaaatgaaagatttgtctccgcgttggtacttttactatctcggcaccggtccggaagctggactgccctacggggcaaacaaggacgggatcatttgggtggctaccgaaggtgccctgaatactccaaaagatcatatcggcacccgtaaccctgctaataacgctgcgatcgttctgcaactgcctcagggtacaactctgccaaaaggcttctatgcagaagggtcgcgtggtggcagccaggcgagtagccgtagcagctcccgctctcgcaactcgtcccgtaactccactccgggctcttctcgcggcacgtccccggctcgtatggcaggtaacggtggtgacgctgctctggcgctgctactgctggacaggctgaaccagctggagtcgaagatgagtggtaaaggccaacagcagcagggccagaccgttaccaaaaagagcgcagctgaagcatctaaaaaaccgcgacagaaacgtaccgcgactaaagcgtacaatgtaacacaggccttcggtcgtcgaggtccggagcaaactcaaggaaactttggcgatcaggaattaatccgccaggggaccgactacaaacactggccgcaaattgcccagttcttgccatccgctagtgcattcttcggtatgagccgcatcggcatggaagtaacgccaagtggtacgtggctgacctacaccggtgctatcaagcttgatgacaaggacccgaactttaaagaccaggttattctgcttaacaaacatattgatgcctataaaactttcccgccgaccgaacccaaaaaggacaaaaagaaaaaagctgatgaaacccaggctctaccgcagcgtcagaaaaaacagcaaactgtgactctgctgccagctgcggacctggatgatttttccaagcagctgcaacagtctatgagctctgcggactctacgcaggctggtggttctggtcaccatcatcaccatcattaa

SEQ ID NO: 3133 - DNA, 2421 bp, Artificial Sequence
  Description of Artificial Sequence: Synthetic polynucleotide
atgaaaatcgaagaaggtaaactggtaatctggattaacggcgataaaggctataacggtctcgctgaagtcggtaagaaattcgagaaagataccggaattaaagtcaccgttgagcatccggataaactggaagagaaattcccacaggttgcggcaactggcgatggccctgacattatcttctgggcacacgaccgctttggtggctacgctcaatctggcctgttggctgaaatcaccccggacaaagcgttccaggacaagctgtatccgtttacctgggatgccgtacgttacaacggcaagctgattgcttacccgatcgctgttgaagcgttatcgctgatttataacaaagatctgctgccgaacccgccaaaaacctgggaagagatcccggcgctggataaagaactgaaagcgaaaggtaagagcgcgctgatgttcaacctgcaagaaccgtacttcacctggccgctgattgctgctgacgggggttatgcgttcaagtatgaaaacggcaagtacgacattaaagacgtgggcgtggataacgctggcgcgaaagcgggtctgaccttcctggttgacctgattaaaaacaaacacatgaatgcagacaccgattactccatcgcagaagctgcctttaataaaggcgaaacagcgatgaccatcaacggcccgtgggcatggtccaacatcgacaccagcaaagtgaattatggtgtaacggtactgccgaccttcaagggtcaaccatccaaaccgttcgttggcgtgctgagcgcaggtattaacgccgccagtccgaacaaagagctggcgaaagagttcctcgaaaactatctgctgactgatgaaggtctggaagcggttaataaagacaaaccgctgggtgccgtagcgctgaagtcttacgaggaagagttggcgaaagatccacgtattgccgccaccatggaaaacgcccagaaaggtgaaatcatgccgaacatcccgcagatgtccgctttctggtatgccgtgcgtactgcggtgatcaacgccgccagcggtcgtcagactgtcgatgaagccctgaaagacgcgcagactggtggttctggtgagaacctgtactttcaaagctcagataatgggcctcaaaaccagcgcaacgctccacgtataaccttcggtggcccgtctgactccacaggcagcaaccagaatggtgagcgtagtggagccaggtctaagcagcgccgtccccagggtctgccgaacaacacggcgagctggtttactgcgcttacccaacacggtaaagaagacttaaaattcccgcgtggccagggcgtcccgatcaacactaactcttccccggatgatcagattggttattaccgcagagcaactcgtcggattcgcggcggcgacggtaaaatgaaagatttgtctccgcgttggtacttttactatctcggcaccggtccggaagctggactgccctacggggcaaacaagagtgggatcatttgggtggctaccgaaggtgccctgaatactccaaaagatcatatcggcacccgtaaccctgctaataacgctgcgatcgttctgcaactgcctcagggtacaactctgccaaaaggcttctatgcagaagggtcgcgtggtggcagccaggcgagtagccgtagcagctcccgctctcgcaactcgtcccgtaactccactccgggctcttctcgcggcacgtccccggctcgtatggcaggtaacggtggtgacgctgctctggcgctgctactgctggacaggctgaaccagctggagtcgaagatgagtggtaaaggccaacagcagcagggccagaccgttaccaaaaagagcgcagctgaagcatctaaaaaaccgcgacagaaacgtaccgcgactaaagcgtacaatgtaacacaggccttcggtcgtcgaggtccggagcaaactcaaggaaactttggcgatcaggaattaatccgccaggggaccgactacaaacactggccgcaaattgcccagttcgccccatccgctagtgcattcttcggtatgagccgcatcggcatggaagtaacgccaagtggtacgtggctgacctacaccggtgctatcaagcttgatgacaaggacccgaactttaaagaccaggttattctgcttaacaaacatattgatgcctataaaactttcccgccgaccgaacccaaaaaggacaaaaagaaaaaagctgatgaaacccaggctctaccgcagcgtcagaaaaaacagcaaactgtgactctgctgccagctgcggacctggatgatttttccaagcagctgcaacagtctatgagctctgcggactctacgcaggctggtggttctggtcaccatcatcaccatcattaa

SEQ ID NO: 3134 - DNA, 2421 bp, Artificial Sequence
  Description of Artificial Sequence: Synthetic polynucleotide
atgaaaatcgaagaaggtaaactggtaatctggattaacggcgataaaggctataacggtctcgctgaagtcggtaagaaattcgagaaagataccggaattaaagtcaccgttgagcatccggataaactggaagagaaattcccacaggttgcggcaactggcgatggccctgacattatcttctgggcacacgaccgctttggtggctacgctcaatctggcctgttggctgaaatcaccccggacaaagcgttccaggacaagctgtatccgtttacctgggatgccgtacgttacaacggcaagctgattgcttacccgatcgctgttgaagcgttatcgctgatttataacaaagatctgctgccgaacccgccaaaaacctgggaagagatcccggcgctggataaagaactgaaagcgaaaggtaagagcgcgctgatgttcaacctgcaagaaccgtacttcacctggccgctgattgctgctgacgggggttatgcgttcaagtatgaaaacggcaagtacgacattaaagacgtgggcgtggataacgctggcgcgaaagcgggtctgaccttcctggttgacctgattaaaaacaaacacatgaatgcagacaccgattactccatcgcagaagctgcctttaataaaggcgaaacagcgatgaccatcaacggcccgtgggcatggtccaacatcgacaccagcaaagtgaattatggtgtaacggtactgccgaccttcaagggtcaaccatccaaaccgttcgttggcgtgctgagcgcaggtattaacgccgccagtccgaacaaagagctggcgaaagagttcctcgaaaactatctgctgactgatgaaggtctggaagcggttaataaagacaaaccgctgggtgccgtagcgctgaagtcttacgaggaagagttggcgaaagatccacgtattgccgccaccatggaaaacgcccagaaaggtgaaatcatgccgaacatcccgcagatgtccgctttctggtatgccgtgcgtactgcggtgatcaacgccgccagcggtcgtcagactgtcgatgaagccctgaaagacgcgcagactggtggttctggtgagaacctgtactttcaaagctcagataatgggcctcaaaaccagcgcaacgctccacgtataaccttcggtggcccgtctgactccacaggcagcaaccagaatggtgagcgtagtggagccaggtctaagcagcgccgtccccagggtctgccgaacaacacggcgagctggtttactgcgcttacccaacacggtaaagaagacttaaaattcccgcgtggccagggcgtcccgatcaacactaactcttccccggatgatcagattggttattaccgcagagcaactcgtcggattcgcggcggcgacggtaaaatgaaagatttgtctccgcgttggtacttttactatctcggcaccggtccggaagctggactgccctacggggcaaacaaggacgggatcatttgggtggctaccgaaggtgccctgaatactccaaaagatcatatcggcacccgtaaccctgctaataacgctgcgatcgttctgcaactgcctcagggtacaactctgccaaaaggcttctatgcagaagggtcgcgtggtggcagccaggcgagtagccgtagcagctcccgctctcgcaactcgtcccgtaactccactccgggctctgagcgcggcacgtccccggctcgtatggcaggtaacggtggtgacgctgctctggcgctgctactgctggacaggctgaaccagctggagtcgaagatgagtggtaaaggccaacagcagcagggccagaccgttaccaaaaagagcgcagctgaagcatctaaaaaaccgcgacagaaacgtaccgcgactaaagcgtacaatgtaacacaggccttcggtcgtcgaggtccggagcaaactcaaggaaactttggcgatcaggaattaatccgccaggggaccgactacaaacactggccgcaaattgcccagttcgccccatccgctagtgcattcttcggtatgagccgcatcggcatggaagtaacgccaagtggtacgtggctgacctacaccggtgctatcaagcttgatgacaaggacccgaactttaaagaccaggttattctgcttaacaaacatattgatgcctataaaactttcccgccgaccgaacccaaaaaggacaaaaagaaaaaagctgatgaaacccaggctctaccgcagcgtcagaaaaaacagcaaactgtgactctgctgccagctgcggacctggatgatttttccaagcagctgcaacagtctatgagctctgcggactctacgcaggctggtggttctggtcaccatcatcaccatcattaa

SEQ ID NO: 3135 - DNA, 2421 bp, Artificial Sequence
  Description of Artificial Sequence: Synthetic polynucleotide
atgaaaatcgaagaaggtaaactggtaatctggattaacggcgataaaggctataacggtctcgctgaagtcggtaagaaattcgagaaagataccggaattaaagtcaccgttgagcatccggataaactggaagagaaattcccacaggttgcggcaactggcgatggccctgacattatcttctgggcacacgaccgctttggtggctacgctcaatctggcctgttggctgaaatcaccccggacaaagcgttccaggacaagctgtatccgtttacctgggatgccgtacgttacaacggcaagctgattgcttacccgatcgctgttgaagcgttatcgctgatttataacaaagatctgctgccgaacccgccaaaaacctgggaagagatcccggcgctggataaagaactgaaagcgaaaggtaagagcgcgctgatgttcaacctgcaagaaccgtacttcacctggccgctgattgctgctgacgggggttatgcgttcaagtatgaaaacggcaagtacgacattaaagacgtgggcgtggataacgctggcgcgaaagcgggtctgaccttcctggttgacctgattaaaaacaaacacatgaatgcagacaccgattactccatcgcagaagctgcctttaataaaggcgaaacagcgatgaccatcaacggcccgtgggcatggtccaacatcgacaccagcaaagtgaattatggtgtaacggtactgccgaccttcaagggtcaaccatccaaaccgttcgttggcgtgctgagcgcaggtattaacgccgccagtccgaacaaagagctggcgaaagagttcctcgaaaactatctgctgactgatgaaggtctggaagcggttaataaagacaaaccgctgggtgccgtagcgctgaagtcttacgaggaagagttggcgaaagatccacgtattgccgccaccatggaaaacgcccagaaaggtgaaatcatgccgaacatcccgcagatgtccgctttctggtatgccgtgcgtactgcggtgatcaacgccgccagcggtcgtcagactgtcgatgaagccctgaaagacgcgcagactggtggttctggtgagaacctgtactttcaaagctcagataatgggcctcaaaaccagcgcaacgctccacgtataaccttcggtggcccgtctgactccacaggcagcaaccagaatggtgagcgtagtggagccaggtctaagcagcgccgtccccagggtctgccgaacaacacggcgagctggtttactgcgcttacccaacacggtaaagaagacttaaaattcccgcgtggccagggcgtcccgatcaacactaactcttccccggatgatcagattggttattaccgcagagcaactcgtcggattcgcggcggcgacggtaaaatgaaagatttggatccgcgttggtacttttactatctcggcaccggtccggaagctggactgccctacggggcaaacaaggacgggatcatttgggtggctaccgaaggtgccctgaatactccaaaagatcatatcggcacccgtaaccctgctaataacgctgcgatcgttctgcaactgcctcagggtacaactctgccaaaaggcttctatgcagaagggtcgcgtggtggcagccaggcgagtagccgtagcagctcccgctctcgcaactcgtcccgtaactccactccgggctcttctcgcggcacgtccccggctcgtatggcaggtaacggtggtgacgctgctctggcgctgctactgctggacaggctgaaccagctggagtcgaagatgagtggtaaaggccaacagcagcagggccagaccgttaccaaaaagagcgcagctgaagcatctaaaaaaccgcgacagaaacgtaccgcgactaaagcgtacaatgtaacacaggccttcggtcgtcgaggtccggagcaaactcaaggaaactttggcgatcaggaattaatccgccaggggaccgactacaaacactggccgcaaattgcccagttcgccccatccgctagtgcattcttcggtatgagccgcatcggcatggaagtaacgccaagtggtacgtggctgacctacaccggtgctatcaagcttgatgacaaggacccgaactttaaagaccaggttattctgcttaacaaacatattgatgcctataaaactttcccgccgaccgaacccaaaaaggacaaaaagaaaaaagctgatgaaacccaggctctaccgcagcgtcagaaaaaacagcaaactgtgactctgctgccagctgcggacctggatgatttttccaagcagctgcaacagtctatgagctctgcggactctacgcaggctggtggttctggtcaccatcatcaccatcattaa

SEQ ID NO: 3136 - DNA, 2421 bp, Artificial Sequence
  Description of Artificial Sequence: Synthetic polynucleotide
atgaaaatcgaagaaggtaaactggtaatctggattaacggcgataaaggctataacggtctcgctgaagtcggtaagaaattcgagaaagataccggaattaaagtcaccgttgagcatccggataaactggaagagaaattcccacaggttgcggcaactggcgatggccctgacattatcttctgggcacacgaccgctttggtggctacgctcaatctggcctgttggctgaaatcaccccggacaaagcgttccaggacaagctgtatccgtttacctgggatgccgtacgttacaacggcaagctgattgcttacccgatcgctgttgaagcgttatcgctgatttataacaaagatctgctgccgaacccgccaaaaacctgggaagagatcccggcgctggataaagaactgaaagcgaaaggtaagagcgcgctgatgttcaacctgcaagaaccgtacttcacctggccgctgattgctgctgacgggggttatgcgttcaagtatgaaaacggcaagtacgacattaaagacgtgggcgtggataacgctggcgcgaaagcgggtctgaccttcctggttgacctgattaaaaacaaacacatgaatgcagacaccgattactccatcgcagaagctgcctttaataaaggcgaaacagcgatgaccatcaacggcccgtgggcatggtccaacatcgacaccagcaaagtgaattatggtgtaacggtactgccgaccttcaagggtcaaccatccaaaccgttcgttggcgtgctgagcgcaggtattaacgccgccagtccgaacaaagagctggcgaaagagttcctcgaaaactatctgctgactgatgaaggtctggaagcggttaataaagacaaaccgctgggtgccgtagcgctgaagtcttacgaggaagagttggcgaaagatccacgtattgccgccaccatggaaaacgcccagaaaggtgaaatcatgccgaacatcccgcagatgtccgctttctggtatgccgtgcgtactgcggtgatcaacgccgccagcggtcgtcagactgtcgatgaagccctgaaagacgcgcagactggtggttctggtgagaacctgtactttcaaagctcagataatgggcctcaaaaccagcgcaacgctccacgtataaccttcggtggcccgtctgactccacaggcagcaaccagaatggtgagcgtagtggagccaggtctaagcagcgccgtccccagggtctgccgaacaacacggcgagctggtttactgcgcttacccaacacggtaaagaagacttaaaattcccgcgtggccagggcgtcccgatcaacactaactcttccccggatgatcagattggttattaccgcagagcaactcgtcggattcgcggcggcgacggtaaaatgaaagatttgtctccgcgttggtacttttactatctcggcaccggtccggaagctggactgccctacggggcaaacaaggacgggatcatttgggtggctaccgaaggtgccctgaatactccaaaagatcatatcggcacccgtaaccctgctaataacgctgcggccgttctgcaactgcctcagggtacaactctgccaaaaggcttctatgcagaagggtcgcgtggtggcagccaggcgagtagccgtagcagctcccgctctcgcaactcgtcccgtaactccactccgggctcttctcgcggcacgtccccggctcgtatggcaggtaacggtggtgacgctgctctggcgctgctactgctggacaggctgaaccagctggagtcgaagatgagtggtaaaggccaacagcagcagggccagaccgttaccaaaaagagcgcagctgaagcatctaaaaaaccgcgacagaaacgtaccgcgactaaagcgtacaatgtaacacaggccttcggtcgtcgaggtccggagcaaactcaaggaaactttggcgatcaggaattaatccgccaggggaccgactacaaacactggccgcaaattgcccagttcgccccatccgctagtgcattcttcggtatgagccgcatcggcatggaagtaacgccaagtggtacgtggctgacctacaccggtgctatcaagcttgatgacaaggacccgaactttaaagaccaggttattctgcttaacaaacatattgatgcctataaaactttcccgccgaccgaacccaaaaaggacaaaaagaaaaaagctgatgaaacccaggctctaccgcagcgtcagaaaaaacagcaaactgtgactctgctgccagctgcggacctggatgatttttccaagcagctgcaacagtctatgagctctgcggactctacgcaggctggtggttctggtcaccatcatcaccatcattaa

SEQ ID NO: 3137 - DNA, 2421 bp, Artificial Sequence
  Description of Artificial Sequence: Synthetic polynucleotide
atgaaaatcgaagaaggtaaactggtaatctggattaacggcgataaaggctataacggtctcgctgaagtcggtaagaaattcgagaaagataccggaattaaagtcaccgttgagcatccggataaactggaagagaaattcccacaggttgcggcaactggcgatggccctgacattatcttctgggcacacgaccgctttggtggctacgctcaatctggcctgttggctgaaatcaccccggacaaagcgttccaggacaagctgtatccgtttacctgggatgccgtacgttacaacggcaagctgattgcttacccgatcgctgttgaagcgttatcgctgatttataacaaagatctgctgccgaacccgccaaaaacctgggaagagatcccggcgctggataaagaactgaaagcgaaaggtaagagcgcgctgatgttcaacctgcaagaaccgtacttcacctggccgctgattgctgctgacgggggttatgcgttcaagtatgaaaacggcaagtacgacattaaagacgtgggcgtggataacgctggcgcgaaagcgggtctgaccttcctggttgacctgattaaaaacaaacacatgaatgcagacaccgattactccatcgcagaagctgcctttaataaaggcgaaacagcgatgaccatcaacggcccgtgggcatggtccaacatcgacaccagcaaagtgaattatggtgtaacggtactgccgaccttcaagggtcaaccatccaaaccgttcgttggcgtgctgagcgcaggtattaacgccgccagtccgaacaaagagctggcgaaagagttcctcgaaaactatctgctgactgatgaaggtctggaagcggttaataaagacaaaccgctgggtgccgtagcgctgaagtcttacgaggaagagttggcgaaagatccacgtattgccgccaccatggaaaacgcccagaaaggtgaaatcatgccgaacatcccgcagatgtccgctttctggtatgccgtgcgtactgcggtgatcaacgccgccagcggtcgtcagactgtcgatgaagccctgaaagacgcgcagactggtggttctggtgagaacctgtactttcaaagctcagataatgggcctcaaaaccagcgcaacgctccacgtataaccttcggtggcccgtctgactccacaggcagcaaccagaatggtgagcgtagtggagccaggtctaagcagcgccgtccccagggtctgccgaacaacacggcgagctggtttactgcgcttacccaacacggtaaagaagacttaaaattcccgcgtggccagggcgtcccgatcaacactaactcttccccggatgatcagattggttattaccgcagagcaactcgtcggattcgcggcggcgacggtaaaatgaaagatttgtctccgcgttggtacttttactatctcggcaccggtccggaagctggactgccctacggggcaaacaaggacgggatcatttgggtggctaccgaaggtgccctgaatactccaaaagatcatatcggcacccgtaaccctgctaataacgctgcgatcgttctgcaactgcctcagggtacaactctgccaaaaggcttctatgcagaagggtcgcgtggtggcagccaggcgagtagccgtagcagctcccgctctcgcaactcgtcccgtaactccactccgggctcttctcgcggcacgtccccggctcgtatggcaggtaacggtggtgacgctgctctggcgctgctactgctggacaggctgaaccagctggagtcgaagatgagtggtaaaggccaacagcagcagggccagaccgttaccaaaaagagcgcagctgaaatgtctaaaaaaccgcgacagaaacgtaccgcgactaaagaatgtaatgtaacacagtgcttcggtcctcgaggtccggagcaaactcaaggaaactttggcgatgcagaattaaataaaaagggggtcgactacaaacactggccgcaaattgcccagttcgccccatccgctagtgcattcttcggtatgagccgcatctcgagcaaggaaacgccaagtggtacgtggctgacctacaccggtgctatcaagcttgataaagatgacccgaactttaaagaccaggttattctgcttaacaaacatattgatgcctataaaactttcccgccgaccgaacccaaaaaggacaaaaagaaaaaagctgatgaaacccaggctctaccgcagcgtcagaaaaaacagcaaactgtgactctgctgccagctgcggacctggatgatttttccaagcagctgcaacagtctatgagctctgcggactctacgcaggctggtggttctggtcaccatcatcaccatcattaa

SEQ ID NO: 3138 - DNA, 2421 bp, Artificial Sequence
  Description of Artificial Sequence: Synthetic polynucleotide
atgaaaatcgaagaaggtaaactggtaatctggattaacggcgataaaggctataacggtctcgctgaagtcggtaagaaattcgagaaagataccggaattaaagtcaccgttgagcatccggataaactggaagagaaattcccacaggttgcggcaactggcgatggccctgacattatcttctgggcacacgaccgctttggtggctacgctcaatctggcctgttggctgaaatcaccccggacaaagcgttccaggacaagctgtatccgtttacctgggatgccgtacgttacaacggcaagctgattgcttacccgatcgctgttgaagcgttatcgctgatttataacaaagatctgctgccgaacccgccaaaaacctgggaagagatcccggcgctggataaagaactgaaagcgaaaggtaagagcgcgctgatgttcaacctgcaagaaccgtacttcacctggccgctgattgctgctgacgggggttatgcgttcaagtatgaaaacggcaagtacgacattaaagacgtgggcgtggataacgctggcgcgaaagcgggtctgaccttcctggttgacctgattaaaaacaaacacatgaatgcagacaccgattactccatcgcagaagctgcctttaataaaggcgaaacagcgatgaccatcaacggcccgtgggcatggtccaacatcgacaccagcaaagtgaattatggtgtaacggtactgccgaccttcaagggtcaaccatccaaaccgttcgttggcgtgctgagcgcaggtattaacgccgccagtccgaacaaagagctggcgaaagagttcctcgaaaactatctgctgactgatgaaggtctggaagcggttaataaagacaaaccgctgggtgccgtagcgctgaagtcttacgaggaagagttggcgaaagatccacgtattgccgccaccatggaaaacgcccagaaaggtgaaatcatgccgaacatcccgcagatgtccgctttctggtatgccgtgcgtactgcggtgatcaacgccgccagcggtcgtcagactgtcgatgaagccctgaaagacgcgcagactggtggttctggtgagaacctgtactttcaaagctcagataatgggcctcaaaaccagcgcaacgctccacgtataaccttcggtggcccgtctgactccacaggcagcaaccagaatggtgagcgtagtggagccaggtctaagcagcgccgtccccagggtctgccgaacaacacggcgagctggtttactgcgcttacccaacacggtaaagaagacttaaaattcccgcgtggccagggcgtcccgatcaacactaactcttccccggatgatcagattggttattaccgcagagcaactcgtcggattcgcggcggcgacggtaaaatgaaagatttgtctccgcgttggtacttttactatctcggcaccggtccggaagctggactgccctacggggcaaacaaggacgggatcatttgggtggctaccgaaggtgccctgaatactccaaaagatcatatcggcacccgtaaccctgctaataacgctgcgatcgttctgcaactgcctcagggtacaactctgccaaaaggcttctatgcagaagggtcgcgtggtggcagccaggcgagtagccgtagcagctcccgctctcgcaactcgtcccgtaactccactccgggctcttctcgcggcacgtccccggctcgtatggcaggtaacggtggtgacgctgctctggcgctgctactgctggacaggctgaaccagctggagtcgaagatgagtggtaaaggccaacagcagcagggccagaccgttaccaaaaagagcgcagctgaagcatctaaaaaaccgcgacagaaacgtaccgcgactaaagcgtacaatgtaacacaggccttcggtcgtcgaggtccggagcaaactcaaggaaactttggcgatcaggaattaatccgccaggggaccgactacaaacactggccgcaaattgcccagttcgccccatccgctagtgcattcttcggtatgagccgcatcggcatggaagtaacgccaagtggtacgtggctgacctacaccggtgctatcaagcttgatgacaaggacccgaactttaaagagcaggttattctgcttaacaaacatattgatgcctataaaactttcccgccgaccgaacccaaaaaggacaaaaagaaaaaagctgatgaaacccaggctctaccgcagcgtcagaaaaaacagcaaactgtgactctgctgccagctgcggacctggatgatttttccaagcagctgcaacagtctatgagctctgcggactctacgcaggctggtggttctggtcaccatcatcaccatcattaa

SEQ ID NO: 3139 - DNA, 2421 bp, Artificial Sequence
  Description of Artificial Sequence: Synthetic polynucleotide
atgaaaatcgaagaaggtaaactggtaatctggattaacggcgataaaggctataacggtctcgctgaagtcggtaagaaattcgagaaagataccggaattaaagtcaccgttgagcatccggataaactggaagagaaattcccacaggttgcggcaactggcgatggccctgacattatcttctgggcacacgaccgctttggtggctacgctcaatctggcctgttggctgaaatcaccccggacaaagcgttccaggacaagctgtatccgtttacctgggatgccgtacgttacaacggcaagctgattgcttacccgatcgctgttgaagcgttatcgctgatttataacaaagatctgctgccgaacccgccaaaaacctgggaagagatcccggcgctggataaagaactgaaagcgaaaggtaagagcgcgctgatgttcaacctgcaagaaccgtacttcacctggccgctgattgctgctgacgggggttatgcgttcaagtatgaaaacggcaagtacgacattaaagacgtgggcgtggataacgctggcgcgaaagcgggtctgaccttcctggttgacctgattaaaaacaaacacatgaatgcagacaccgattactccatcgcagaagctgcctttaataaaggcgaaacagcgatgaccatcaacggcccgtgggcatggtccaacatcgacaccagcaaagtgaattatggtgtaacggtactgccgaccttcaagggtcaaccatccaaaccgttcgttggcgtgctgagcgcaggtattaacgccgccagtccgaacaaagagctggcgaaagagttcctcgaaaactatctgctgactgatgaaggtctggaagcggttaataaagacaaaccgctgggtgccgtagcgctgaagtcttacgaggaagagttggcgaaagatccacgtattgccgccaccatggaaaacgcccagaaaggtgaaatcatgccgaacatcccgcagatgtccgctttctggtatgccgtgcgtactgcggtgatcaacgccgccagcggtcgtcagactgtcgatgaagccctgaaagacgcgcagactggtggttctggtgagaacctgtactttcaaagctcagataatgggcctcaaaaccagcgcaacgctccacgtataaccttcggtggcccgtctgactccacaggcagcaaccagaatggtgagcgtagtggagccaggtctaagcagcgccgtccccagggtctgccgaacaacacggcgagctggtttactgcgcttacccaacacggtaaagaagacttaaaattcccgcgtggccagggcgtcccgatcaacactaactcttccccggatgatcagattggttattaccgcagagcaactcgtcggattcgcggcggcgacggtaaaatgaaagatttgtctccgcgttggtacttttactatctcggcaccggtccggaagctggactgccctacggggcaaacaaggacgggatcatttgggtggctaccgaaggtgccctgaatactccaaaagatcatatcggcacccgtaaccctgctaataacgctgcgatcgttgtacaactgcctcagggtacaactctgccaaaaggcttctatgcagaagggtcgcgtggtggcagccaggcgagtagccgtagcagctcccgctctcgcaactcgtcccgtaactccactccgggctcttctcgcggcacgtccccggctcgtatggcaggtaacggtggtgacgctgctctggcgctgctactgctggacaggctgaaccagctggagtcgaagatgagtggtaaaggccaacagcagcagggccagaccgttaccaaaaagagcgcagctgaagcatctaaaaaaccgcgacagaaacgtaccgcgactaaagcgtacaatgtaacacaggccttcggtcgtcgaggtccggagcaaactcaaggaaactttggcgatcaggaattaatccgccaggggaccgactacaaacactggccgcaaattgcccagttcgccccatccgctagtgcattcttcggtatgagccgcatcggcatggaagtaacgccaagtggtacgtggctgacctacaccggtgctatcaagcttgatgacaaggacccgaactttaaagaccaggttattctgcttaacaaacatattgatgcctataaaactttcccgccgaccgaacccaaaaaggacaaaaagaaaaaagctgatgaaacccaggctctaccgcagcgtcagaaaaaacagcaaactgtgactctgctgccagctgcggacctggatgatttttccaagcagctgcaacagtctatgagctctgcggactctacgcaggctggtggttctggtcaccatcatcaccatcattaa

SEQ ID NO: 3140 - DNA, 2421 bp, Artificial Sequence
  Description of Artificial Sequence: Synthetic polynucleotide
atgaaaatcgaagaaggtaaactggtaatctggattaacggcgataaaggctataacggtctcgctgaagtcggtaagaaattcgagaaagataccggaattaaagtcaccgttgagcatccggataaactggaagagaaattcccacaggttgcggcaactggcgatggccctgacattatcttctgggcacacgaccgctttggtggctacgctcaatctggcctgttggctgaaatcaccccggacaaagcgttccaggacaagctgtatccgtttacctgggatgccgtacgttacaacggcaagctgattgcttacccgatcgctgttgaagcgttatcgctgatttataacaaagatctgctgccgaacccgccaaaaacctgggaagagatcccggcgctggataaagaactgaaagcgaaaggtaagagcgcgctgatgttcaacctgcaagaaccgtacttcacctggccgctgattgctgctgacgggggttatgcgttcaagtatgaaaacggcaagtacgacattaaagacgtgggcgtggataacgctggcgcgaaagcgggtctgaccttcctggttgacctgattaaaaacaaacacatgaatgcagacaccgattactccatcgcagaagctgcctttaataaaggcgaaacagcgatgaccatcaacggcccgtgggcatggtccaacatcgacaccagcaaagtgaattatggtgtaacggtactgccgaccttcaagggtcaaccatccaaaccgttcgttggcgtgctgagcgcaggtattaacgccgccagtccgaacaaagagctggcgaaagagttcctcgaaaactatctgctgactgatgaaggtctggaagcggttaataaagacaaaccgctgggtgccgtagcgctgaagtcttacgaggaagagttggcgaaagatccacgtattgccgccaccatggaaaacgcccagaaaggtgaaatcatgccgaacatcccgcagatgtccgctttctggtatgccgtgcgtactgcggtgatcaacgccgccagcggtcgtcagactgtcgatgaagccctgaaagacgcgcagactggtggttctggtgagaacctgtactttcaaagctcagataatgggcctcaaaaccagcgcaacgctccacgtataaccttcggtggcccgtctgactccacaggcagcaaccagaatggtgagcgtagtggagccaggtctaagcagcgccgtccccagggtctgccgaacaacacggcgagctggtttactgcgcttacccaacacggtaaagaagacttaaaattcccgcgtggccagggcgtcccgatcaacactaactcttccccggatgatcagattggttattaccgcagagcaactcgtcggattcgcggcggcgacggtaaaatgaaagatttgtctccgcgttggtacttttactatctcggcaccggtccggaagctggactgccctacggggcaaacaaggacgggatcatttgggtggctaccgaaggtgccctgaatactccaaaagatcatatcggcacccgtaaccctgctaataacgctgcgatcgttctgcaactgcctcagggtacaactctgccaaaaggcttctatgcagaagggtcgcgtggtggcagccaggcgagtagccgtagcagctcccgctctcgcaactcgtcccgtaactccactccgggctcttctcgcggcacgtccccggctcgtatggcaggtaacggtggtgacgctgctctggcgctgctactgctggacaggctgaaccagctggagtcgaagatgagtggtaaaggccaacagcagcagggccagaccgttaccaaaaagagcgcagctgaagcatctaaaaaaccgcgacagaaacgtaccgcgactaaagtatacaatgtaacacaggccttcggtcgtcgaggtccggagcaaactcaaggaaactttggcgatcaggaattaatccgccaggggaccgactacaaacactggccgcaaattgcccagttcgccccatccgctagtgcattcttcggtatgagccgcatcggcatggaagtaacgccaagtggtacgtggctgacctacaccggtgctatcaagcttgatgacaaggacccgaactttaaagaccaggttattctgcttaacaaacatattgatgcctataaaactttcccgccgaccgaacccaaaaaggacaaaaagaaaaaagctgatgaaacccaggctctaccgcagcgtcagaaaaaacagcaaactgtgactctgctgccagctgcggacctggatgatttttccaagcagctgcaacagtctatgagctctgcggactctacgcaggctggtggttctggtcaccatcatcaccatcattaa

SEQ ID NO: 3141 - DNA, 2421 bp, Artificial Sequence
  Description of Artificial Sequence: Synthetic polynucleotide
atgaaaatcgaagaaggtaaactggtaatctggattaacggcgataaaggctataacggtctcgctgaagtcggtaagaaattcgagaaagataccggaattaaagtcaccgttgagcatccggataaactggaagagaaattcccacaggttgcggcaactggcgatggccctgacattatcttctgggcacacgaccgctttggtggctacgctcaatctggcctgttggctgaaatcaccccggacaaagcgttccaggacaagctgtatccgtttacctgggatgccgtacgttacaacggcaagctgattgcttacccgatcgctgttgaagcgttatcgctgatttataacaaagatctgctgccgaacccgccaaaaacctgggaagagatcccggcgctggataaagaactgaaagcgaaaggtaagagcgcgctgatgttcaacctgcaagaaccgtacttcacctggccgctgattgctgctgacgggggttatgcgttcaagtatgaaaacggcaagtacgacattaaagacgtgggcgtggataacgctggcgcgaaagcgggtctgaccttcctggttgacctgattaaaaacaaacacatgaatgcagacaccgattactccatcgcagaagctgcctttaataaaggcgaaacagcgatgaccatcaacggcccgtgggcatggtccaacatcgacaccagcaaagtgaattatggtgtaacggtactgccgaccttcaagggtcaaccatccaaaccgttcgttggcgtgctgagcgcaggtattaacgccgccagtccgaacaaagagctggcgaaagagttcctcgaaaactatctgctgactgatgaaggtctggaagcggttaataaagacaaaccgctgggtgccgtagcgctgaagtcttacgaggaagagttggcgaaagatccacgtattgccgccaccatggaaaacgcccagaaaggtgaaatcatgccgaacatcccgcagatgtccgctttctggtatgccgtgcgtactgcggtgatcaacgccgccagcggtcgtcagactgtcgatgaagccctgaaagacgcgcagactggtggttctggtgagaacctgtactttcaaagctcagataatgggcctcaaaaccagcgcaacgctccacgtataaccttcggtggcccgtctgactccacaggcagcaaccagaatggtgagcgtagtggagccaggtctaagcagcgccgtccccagggtctgccgaacaacacggcgagctggtttactgcgcttacccaacacggtaaagaagacttaaaattcccgcgtggccagggcgtcccgatcaacactaactcttccccggatgatcagattggttattaccgcagagcaactcgtcggattcgcggcggcgacggtaaaatgaaagatttgtctccgcgttggtacttttactatctcggcaccggtccggaagctggactgccctacggggcaaacaaggacgggatcatttgggtggctaccgaaggtgccctgaatactccaaaagatcatatcggcacccgtaaccctgctaataacgctgcgatcgttctgcaactgcctcagggtacaactctgccaaaaggcttctatgcagaagggtcgcgtggtggcagccaggcgagtagccgtagcagctcccgctctcgcaactcgtcccgtaactccactccgggctcttctcgcggcacgtccccggctcgtatggcaggtaacggtggtgacgctgctctggcgctgctactgctggacaggctgaaccagctggagtcgaagatgagtggtaaaggccaacagcagcagggccagaccgttaccaaaaagagcgcagctgaagcatctaaaaaaccgcgacagaaacgtaccgcgactaaagcgtacaatgtaacacaggccttcggtcgtcgaggtccggagcaaactcaaggaaactttggcgatcaggatttaatccgccaggggaccgactacaaacactggccgcaaattgcccagttcgccccatccgctagtgcattcttcggtatgagccgcatcggcatggaagtaacgccaagtggtacgtggctgacctacaccggtgctatcaagcttgatgacaaggacccgaactttaaagaccaggttattctgcttaacaaacatattgatgcctataaaactttcccgccgaccgaacccaaaaaggacaaaaagaaaaaagctgatgaaacccaggctctaccgcagcgtcagaaaaaacagcaaactgtgactctgctgccagctgcggacctggatgatttttccaagcagctgcaacagtctatgagctctgcggactctacgcaggctggtggttctggtcaccatcatcaccatcattaa

SEQ ID NO: 3142 - DNA, 2421 bp, Artificial Sequence
  Description of Artificial Sequence: Synthetic polynucleotide
atgaaaatcgaagaaggtaaactggtaatctggattaacggcgataaaggctataacggtctcgctgaagtcggtaagaaattcgagaaagataccggaattaaagtcaccgttgagcatccggataaactggaagagaaattcccacaggttgcggcaactggcgatggccctgacattatcttctgggcacacgaccgctttggtggctacgctcaatctggcctgttggctgaaatcaccccggacaaagcgttccaggacaagctgtatccgtttacctgggatgccgtacgttacaacggcaagctgattgcttacccgatcgctgttgaagcgttatcgctgatttataacaaagatctgctgccgaacccgccaaaaacctgggaagagatcccggcgctggataaagaactgaaagcgaaaggtaagagcgcgctgatgttcaacctgcaagaaccgtacttcacctggccgctgattgctgctgacgggggttatgcgttcaagtatgaaaacggcaagtacgacattaaagacgtgggcgtggataacgctggcgcgaaagcgggtctgaccttcctggttgacctgattaaaaacaaacacatgaatgcagacaccgattactccatcgcagaagctgcctttaataaaggcgaaacagcgatgaccatcaacggcccgtgggcatggtccaacatcgacaccagcaaagtgaattatggtgtaacggtactgccgaccttcaagggtcaaccatccaaaccgttcgttggcgtgctgagcgcaggtattaacgccgccagtccgaacaaagagctggcgaaagagttcctcgaaaactatctgctgactgatgaaggtctggaagcggttaataaagacaaaccgctgggtgccgtagcgctgaagtcttacgaggaagagttggcgaaagatccacgtattgccgccaccatggaaaacgcccagaaaggtgaaatcatgccgaacatcccgcagatgtccgctttctggtatgccgtgcgtactgcggtgatcaacgccgccagcggtcgtcagactgtcgatgaagccctgaaagacgcgcagactggtggttctggtgagaacctgtactttcaaagctcagataatgggcctcaaaaccagcgcaacgctccacgtataaccttcggtggcccgtctgactccacaggcagcaaccagaatggtgagcgtagtggagccaggtctaagcagcgccgtccccagggtctgccgaacaacacggcgagctggtttactgcgcttacccaacacggtaaagaagacttaaaattcccgcgtggccagggcgtcccgatcaacactaactcttccccggatgatcagattggttattaccgcagagcaactcgtcggattcgcggcggcgacggtaaaatgaaagatttgtctccgaagtggtacttttactatctcggcaccggtccggaagctggactgccctacggggcaaacaaggacgggatcatttgggtggctaccgaaggtgccctgaatactccaaaagatcatatcggcacccgtaaccctgctaataacgctgcgatcgttctgcaactgcctcagggtacaactctgccaaaaggcttctatgcagaagggtcgcgtggtggcagccaggcgagtagccgtagcagctcccgctctcgcaactcgtcccgtaactccactccgggctcttctcgcggcacgtccccggctcgtatggcaggtaacggtggtgacgctgctctggcgctgctactgctggacaggctgaaccagctggagtcgaagatgagtggtaaaggccaacagcagcagggccagaccgttaccaaaaagagcgcagctgaagcatctaaaaaaccgcgacagaaacgtaccgcgactaaagcgtacaatgtaacacaggccttcggtcgtcgaggtccggagcaaactcaaggaaactttggcgatcaggaattaatccgccaggggaccgactacaaacactggccgcaaattgcccagttcgccccatccgctagtgcattcttcggtatgagccgcatcggcatggaagtaacgccaagtggtacgtggctgacctacaccggtgctatcaagcttgatgacaaggacccgaactttaaagaccaggttattctgcttaacaaacatattgatgcctataaaactttcccgccgaccgaacccaaaaaggacaaaaagaaaaaagctgatgaaacccaggctctaccgcagcgtcagaaaaaacagcaaactgtgactctgctgccagctgcggacctggatgatttttccaagcagctgcaacagtctatgagctctgcggactctacgcaggctggtggttctggtcaccatcatcaccatcattaa

SEQ ID NO: 3143 - DNA, 2421 bp, Artificial Sequence
  Description of Artificial Sequence: Synthetic polynucleotide
atgaaaatcgaagaaggtaaactggtaatctggattaacggcgataaaggctataacggtctcgctgaagtcggtaagaaattcgagaaagataccggaattaaagtcaccgttgagcatccggataaactggaagagaaattcccacaggttgcggcaactggcgatggccctgacattatcttctgggcacacgaccgctttggtggctacgctcaatctggcctgttggctgaaatcaccccggacaaagcgttccaggacaagctgtatccgtttacctgggatgccgtacgttacaacggcaagctgattgcttacccgatcgctgttgaagcgttatcgctgatttataacaaagatctgctgccgaacccgccaaaaacctgggaagagatcccggcgctggataaagaactgaaagcgaaaggtaagagcgcgctgatgttcaacctgcaagaaccgtacttcacctggccgctgattgctgctgacgggggttatgcgttcaagtatgaaaacggcaagtacgacattaaagacgtgggcgtggataacgctggcgcgaaagcgggtctgaccttcctggttgacctgattaaaaacaaacacatgaatgcagacaccgattactccatcgcagaagctgcctttaataaaggcgaaacagcgatgaccatcaacggcccgtgggcatggtccaacatcgacaccagcaaagtgaattatggtgtaacggtactgccgaccttcaagggtcaaccatccaaaccgttcgttggcgtgctgagcgcaggtattaacgccgccagtccgaacaaagagctggcgaaagagttcctcgaaaactatctgctgactgatgaaggtctggaagcggttaataaagacaaaccgctgggtgccgtagcgctgaagtcttacgaggaagagttggcgaaagatccacgtattgccgccaccatggaaaacgcccagaaaggtgaaatcatgccgaacatcccgcagatgtccgctttctggtatgccgtgcgtactgcggtgatcaacgccgccagcggtcgtcagactgtcgatgaagccctgaaagacgcgcagactggtggttctggtgagaacctgtactttcaaagctcagataatgggcctcaaaaccagcgcaacgctccacgtataaccttcggtggcccgtctgactccacaggcagcaaccagaatggtgagcgtagtggagccaggtctaagcagcgccgtccccagggtctgccgaacaacacggcgagctggtttactgcgcttacccaacacggtaaagaagacttaaaattcccgcgtggccagggcgtcccgatcaacactaactcttccccggatgatcagattggttattaccgcagagcaactcgtcggattcgcggcggcgacggtaaaatgaaagatttgtctccgcgttggtacttttactatctcggcaccggtccggaagctggactgccctacggggcaaacaaggacgggatcatttgggtggctaccgaaggtgccctgaatactccaaaagatcatatcggcacccgtaaccctgctaataacgctgcgggcgttctgcaactgcctcagggtacaactctgccaaaaggcttctatgcagaagggtcgcgtggtggcagccaggcgagtagccgtagcagctcccgctctcgcaactcgtcccgtaactccactccgggctcttctcgcggcacgtccccggctcgtatggcaggtaacggtggtgacgctgctctggcgctgctactgctggacaggctgaaccagctggagtcgaagatgagtggtaaaggccaacagcagcagggccagaccgttaccaaaaagagcgcagctgaagcatctaaaaaaccgcgacagaaacgtaccgcgactaaagcgtacaatgtaacacaggccttcggtcgtcgaggtccggagcaaactcaaggaaactttggcgatcaggaattaatccgccaggggaccgactacaaacactggccgcaaattgcccagttcgccccatccgctagtgcattcttcggtatgagccgcatcggcatggaagtaacgccaagtggtacgtggctgacctacaccggtgctatcaagcttgatgacaaggacccgaactttaaagaccaggttattctgcttaacaaacatattgatgcctataaaactttcccgccgaccgaacccaaaaaggacaaaaagaaaaaagctgatgaaacccaggctctaccgcagcgtcagaaaaaacagcaaactgtgactctgctgccagctgcggacctggatgatttttccaagcagctgcaacagtctatgagctctgcggactctacgcaggctggtggttctggtcaccatcatcaccatcattaa

SEQ ID NO: 3144 - DNA, 2421 bp, Artificial Sequence
  Description of Artificial Sequence: Synthetic polynucleotide
atgaaaatcgaagaaggtaaactggtaatctggattaacggcgataaaggctataacggtctcgctgaagtcggtaagaaattcgagaaagataccggaattaaagtcaccgttgagcatccggataaactggaagagaaattcccacaggttgcggcaactggcgatggccctgacattatcttctgggcacacgaccgctttggtggctacgctcaatctggcctgttggctgaaatcaccccggacaaagcgttccaggacaagctgtatccgtttacctgggatgccgtacgttacaacggcaagctgattgcttacccgatcgctgttgaagcgttatcgctgatttataacaaagatctgctgccgaacccgccaaaaacctgggaagagatcccggcgctggataaagaactgaaagcgaaaggtaagagcgcgctgatgttcaacctgcaagaaccgtacttcacctggccgctgattgctgctgacgggggttatgcgttcaagtatgaaaacggcaagtacgacattaaagacgtgggcgtggataacgctggcgcgaaagcgggtctgaccttcctggttgacctgattaaaaacaaacacatgaatgcagacaccgattactccatcgcagaagctgcctttaataaaggcgaaacagcgatgaccatcaacggcccgtgggcatggtccaacatcgacaccagcaaagtgaattatggtgtaacggtactgccgaccttcaagggtcaaccatccaaaccgttcgttggcgtgctgagcgcaggtattaacgccgccagtccgaacaaagagctggcgaaagagttcctcgaaaactatctgctgactgatgaaggtctggaagcggttaataaagacaaaccgctgggtgccgtagcgctgaagtcttacgaggaagagttggcgaaagatccacgtattgccgccaccatggaaaacgcccagaaaggtgaaatcatgccgaacatcccgcagatgtccgctttctggtatgccgtgcgtactgcggtgatcaacgccgccagcggtcgtcagactgtcgatgaagccctgaaagacgcgcagactggtggttctggtgagaacctgtactttcaaagctcagataatgggcctcaaaaccagcgcaacgctccacgtataaccttcggtggcccgtctgactccacaggcagcaaccagaatggtgagcgtagtggagccaggtctaagcagcgccgtccccagggtctgccgaacaacacggcgagctggtttactgcgcttacccaacacggtaaagaagacttaaaattcccgcgtggccagggcgtcccgatcaacactaactcttccccggatgatcagattggttattaccgcagagcaactcgtcggattcgcggcggcgacggtaaaatgaaagatttgtctccgcgttggtacttttactatctcggcaccggtccggaagctggactgccctacggggataacaaggacgggatcatttgggtggctaccgaaggtgccctgaatactccaaaagatcatatcggcacccgtaaccctgctaataacgctgcgatcgttctgcaactgcctcagggtacaactctgccaaaaggcttctatgcagaagggtcgcgtggtggcagccaggcgagtagccgtagcagctcccgctctcgcaactcgtcccgtaactccactccgggctcttctcgcggcacgtccccggctcgtatggcaggtaacggtggtgacgctgctctggcgctgctactgctggacaggctgaaccagctggagtcgaagatgagtggtaaaggccaacagcagcagggccagaccgttaccaaaaagagcgcagctgaagcatctaaaaaaccgcgacagaaacgtaccgcgactaaagcgtacaatgtaacacaggccttcggtcgtcgaggtccggagcaaactcaaggaaactttggcgatcaggaattaatccgccaggggaccgactacaaacactggccgcaaattgcccagttcgccccatccgctagtgcattcttcggtatgagccgcatcggcatggaagtaacgccaagtggtacgtggctgacctacaccggtgctatcaagcttgatgacaaggacccgaactttaaagaccaggttattctgcttaacaaacatattgatgcctataaaactttcccgccgaccgaacccaaaaaggacaaaaagaaaaaagctgatgaaacccaggctctaccgcagcgtcagaaaaaacagcaaactgtgactctgctgccagctgcggacctggatgatttttccaagcagctgcaacagtctatgagctctgcggactctacgcaggctggtggttctggtcaccatcatcaccatcattaa

SEQ ID NO: 3145 - DNA, 2421 bp, Artificial Sequence
  Description of Artificial Sequence: Synthetic polynucleotide
atgaaaatcgaagaaggtaaactggtaatctggattaacggcgataaaggctataacggtctcgctgaagtcggtaagaaattcgagaaagataccggaattaaagtcaccgttgagcatccggataaactggaagagaaattcccacaggttgcggcaactggcgatggccctgacattatcttctgggcacacgaccgctttggtggctacgctcaatctggcctgttggctgaaatcaccccggacaaagcgttccaggacaagctgtatccgtttacctgggatgccgtacgttacaacggcaagctgattgcttacccgatcgctgttgaagcgttatcgctgatttataacaaagatctgctgccgaacccgccaaaaacctgggaagagatcccggcgctggataaagaactgaaagcgaaaggtaagagcgcgctgatgttcaacctgcaagaaccgtacttcacctggccgctgattgctgctgacgggggttatgcgttcaagtatgaaaacggcaagtacgacattaaagacgtgggcgtggataacgctggcgcgaaagcgggtctgaccttcctggttgacctgattaaaaacaaacacatgaatgcagacaccgattactccatcgcagaagctgcctttaataaaggcgaaacagcgatgaccatcaacggcccgtgggcatggtccaacatcgacaccagcaaagtgaattatggtgtaacggtactgccgaccttcaagggtcaaccatccaaaccgttcgttggcgtgctgagcgcaggtattaacgccgccagtccgaacaaagagctggcgaaagagttcctcgaaaactatctgctgactgatgaaggtctggaagcggttaataaagacaaaccgctgggtgccgtagcgctgaagtcttacgaggaagagttggcgaaagatccacgtattgccgccaccatggaaaacgcccagaaaggtgaaatcatgccgaacatcccgcagatgtccgctttctggtatgccgtgcgtactgcggtgatcaacgccgccagcggtcgtcagactgtcgatgaagccctgaaagacgcgcagactggtggttctggtgagaacctgtactttcaaagctcagataatgggcctcaaaaccagcgcaacgctccacgtataaccttcggtggcccgtctgactccacaggcagcaaccagaatggtgagcgtagtggagccaggtctaagcagcgccgtccccagggtctgccgaacaacacggcgagctggtttactggccttacccaacacggtaaagaagacttaaaattcccgcgtggccagggcgtcccgatcaacactaactcttccccggatgatcagattggttattaccgcagagcaactcgtcggattcgcggcggcgacggtaaaatgaaagatttgtctccgcgttggtacttttactatctcggcaccggtccggaagctggactgccctacggggcaaacaaggacgggatcatttgggtggctaccgaaggtgccctgaatactccaaaagatcatatcggcacccgtaaccctgctaataacgctgcgatcgttctgcaactgcctcagggtacaactctgccaaaaggcttctatgcagaagggtcgcgtggtggcagccaggcgagtagccgtagcagctcccgctctcgcaactcgtcccgtaactccactccgggctcttctcgcggcacgtccccggctcgtatggcaggtaacggtggtgacgctgctctggcgctgctactgctggacaggctgaaccagctggagtcgaagatgagtggtaaaggccaacagcagcagggccagaccgttaccaaaaagagcgcagctgaagcatctaaaaaaccgcgacagaaacgtaccgcgactaaagcgtacaatgtaacacaggccttcggtcgtcgaggtccggagcaaactcaaggaaactttggcgatcaggaattaatccgccaggggaccgactacaaacactggccgcaaattgcccagttcgccccatccgctagtgcattcttcggtatgagccgcatcggcatggaagtaacgccaagtggtacgtggctgacctacaccggtgctatcaagcttgatgacaaggacccgaactttaaagaccaggttattctgcttaacaaacatattgatgcctataaaactttcccgccgaccgaacccaaaaaggacaaaaagaaaaaagctgatgaaacccaggctctaccgcagcgtcagaaaaaacagcaaactgtgactctgctgccagctgcggacctggatgatttttccaagcagctgcaacagtctatgagctctgcggactctacgcaggctggtggttctggtcaccatcatcaccatcattaa

SEQ ID NO: 3146 - DNA, 2421 bp, Artificial Sequence
  Description of Artificial Sequence: Synthetic polynucleotide
atgaaaatcgaagaaggtaaactggtaatctggattaacggcgataaaggctataacggtctcgctgaagtcggtaagaaattcgagaaagataccggaattaaagtcaccgttgagcatccggataaactggaagagaaattcccacaggttgcggcaactggcgatggccctgacattatcttctgggcacacgaccgctttggtggctacgctcaatctggcctgttggctgaaatcaccccggacaaagcgttccaggacaagctgtatccgtttacctgggatgccgtacgttacaacggcaagctgattgcttacccgatcgctgttgaagcgttatcgctgatttataacaaagatctgctgccgaacccgccaaaaacctgggaagagatcccggcgctggataaagaactgaaagcgaaaggtaagagcgcgctgatgttcaacctgcaagaaccgtacttcacctggccgctgattgctgctgacgggggttatgcgttcaagtatgaaaacggcaagtacgacattaaagacgtgggcgtggataacgctggcgcgaaagcgggtctgaccttcctggttgacctgattaaaaacaaacacatgaatgcagacaccgattactccatcgcagaagctgcctttaataaaggcgaaacagcgatgaccatcaacggcccgtgggcatggtccaacatcgacaccagcaaagtgaattatggtgtaacggtactgccgaccttcaagggtcaaccatccaaaccgttcgttggcgtgctgagcgcaggtattaacgccgccagtccgaacaaagagctggcgaaagagttcctcgaaaactatctgctgactgatgaaggtctggaagcggttaataaagacaaaccgctgggtgccgtagcgctgaagtcttacgaggaagagttggcgaaagatccacgtattgccgccaccatggaaaacgcccagaaaggtgaaatcatgccgaacatcccgcagatgtccgctttctggtatgccgtgcgtactgcggtgatcaacgccgccagcggtcgtcagactgtcgatgaagccctgaaagacgcgcagactggtggttctggtgagaacctgtactttcaaagctcagataatgggcctcaaaaccagcgcaacgctccacgtataaccttcggtggcccgtctgactccacaggcagcaaccagaatggtgagcgtagtggagccaggtctaagcagcgccgtccccagggtctgccgaacaacacggcgagctggtttactgcgcttacccaacacggtaaagaagacttaaaattcccgcgtggccagggcgtcccgatcaacactaactcttccccggatgatcagattggttattaccgcagagcaactcgtcggattcgcggcggcgacggtaaaatgaaagatttgtctccgcgttggtacttttactatctcggcaccggtccggaagctggactgccctacggggcaaacaaggacgggatcatttgggtggctaccgaaggtgccctgaatactccaaaagatcatatcggcacccgtaaccctgctaataacgctgcgatcgttctgcaactgcctcagggtacaactctgccaaaaggcttctatgcagaagggtcgcgtggtggcagccaggcgagtagccgtagcagctcccgctctcgcaactcgtcccgtaactccactccgggctcttctcgcggcacgtccccggctcgtatggcaggtaacggtggtgacgctgctctggcgctgctactgctggacaggctgaaccagctggagtcgaagatgagtggtaaaggccaacagcagcagggccagaccgttaccaaaaagagcgcagctgaagcatctaaaaaaccgcgacagaaacgtaccgcgactaaagcgtacaatgtaacacaggccttcggtcgtcgaggtccggagcaaactcaaggaaactttggcgatcaggaattaatccgccaggggaccgactacaaaaaatggccgcaaattgcccagttcgccccatccgctagtgcattcttcggtatgagccgcatcggcatggaagtaacgccaagtggtacgtggctgacctacaccggtgctatcaagcttgatgacaaggacccgaactttaaagaccaggttattctgcttaacaaacatattgatgcctataaaactttcccgccgaccgaacccaaaaaggacaaaaagaaaaaagctgatgaaacccaggctctaccgcagcgtcagaaaaaacagcaaactgtgactctgctgccagctgcggacctggatgatttttccaagcagctgcaacagtctatgagctctgcggactctacgcaggctggtggttctggtcaccatcatcaccatcattaa

SEQ ID NO: 3147 - DNA, 2421 bp, Artificial Sequence
  Description of Artificial Sequence: Synthetic polynucleotide
atgaaaatcgaagaaggtaaactggtaatctggattaacggcgataaaggctataacggtctcgctgaagtcggtaagaaattcgagaaagataccggaattaaagtcaccgttgagcatccggataaactggaagagaaattcccacaggttgcggcaactggcgatggccctgacattatcttctgggcacacgaccgctttggtggctacgctcaatctggcctgttggctgaaatcaccccggacaaagcgttccaggacaagctgtatccgtttacctgggatgccgtacgttacaacggcaagctgattgcttacccgatcgctgttgaagcgttatcgctgatttataacaaagatctgctgccgaacccgccaaaaacctgggaagagatcccggcgctggataaagaactgaaagcgaaaggtaagagcgcgctgatgttcaacctgcaagaaccgtacttcacctggccgctgattgctgctgacgggggttatgcgttcaagtatgaaaacggcaagtacgacattaaagacgtgggcgtggataacgctggcgcgaaagcgggtctgaccttcctggttgacctgattaaaaacaaacacatgaatgcagacaccgattactccatcgcagaagctgcctttaataaaggcgaaacagcgatgaccatcaacggcccgtgggcatggtccaacatcgacaccagcaaagtgaattatggtgtaacggtactgccgaccttcaagggtcaaccatccaaaccgttcgttggcgtgctgagcgcaggtattaacgccgccagtccgaacaaagagctggcgaaagagttcctcgaaaactatctgctgactgatgaaggtctggaagcggttaataaagacaaaccgctgggtgccgtagcgctgaagtcttacgaggaagagttggcgaaagatccacgtattgccgccaccatggaaaacgcccagaaaggtgaaatcatgccgaacatcccgcagatgtccgctttctggtatgccgtgcgtactgcggtgatcaacgccgccagcggtcgtcagactgtcgatgaagccctgaaagacgcgcagactggtggttctggtgagaacctgtactttcaaagctcagataatgggcctcaaaaccagcgcaacgctccacgtataaccttcggtggcccgtctgactccacaggcagcaaccagaatggtgagcgtagtggagccaggtctaagcagcgccgtccccagggtctgccgaacaacacggcgagctggtttactgcgcttacccaacacggtaaagaagacttaaaattcccgcgtggccagggcgtcccgatcaacactaactcttccccggatgatcagattggtaattaccgcagagcaactcgtcggattcgcggcggcgacggtaaaatgaaagatttgtctccgcgttggtacttttactatctcggcaccggtccggaagctggactgccctacggggcaaacaaggacgggatcatttgggtggctaccgaaggtgccctgaatactccaaaagatcatatcggcacccgtaaccctgctaataacgctgcgatcgttctgcaactgcctcagggtacaactctgccaaaaggcttctatgcagaagggtcgcgtggtggcagccaggcgagtagccgtagcagctcccgctctcgcaactcgtcccgtaactccactccgggctcttctcgcggcacgtccccggctcgtatggcaggtaacggtggtgacgctgctctggcgctgctactgctggacaggctgaaccagctggagtcgaagatgagtggtaaaggccaacagcagcagggccagaccgttaccaaaaagagcgcagctgaagcatctaaaaaaccgcgacagaaacgtaccgcgactaaagcgtacaatgtaacacaggccttcggtcgtcgaggtccggagcaaactcaaggaaactttggcgatcaggaattaatccgccaggggaccgactacaaacactggccgcaaattgcccagttcgccccatccgctagtgcattcttcggtatgagccgcatcggcatggaagtaacgccaagtggtacgtggctgacctacaccggtgctatcaagcttgatgacaaggacccgaactttaaagaccaggttattctgcttaacaaacatattgatgcctataaaactttcccgccgaccgaacccaaaaaggacaaaaagaaaaaagctgatgaaacccaggctctaccgcagcgtcagaaaaaacagcaaactgtgactctgctgccagctgcggacctggatgatttttccaagcagctgcaacagtctatgagctctgcggactctacgcaggctggtggttctggtcaccatcatcaccatcattaa

SEQ ID NO: 3148 - DNA, 2421 bp, Artificial Sequence
  Description of Artificial Sequence: Synthetic polynucleotide
atgaaaatcgaagaaggtaaactggtaatctggattaacggcgataaaggctataacggtctcgctgaagtcggtaagaaattcgagaaagataccggaattaaagtcaccgttgagcatccggataaactggaagagaaattcccacaggttgcggcaactggcgatggccctgacattatcttctgggcacacgaccgctttggtggctacgctcaatctggcctgttggctgaaatcaccccggacaaagcgttccaggacaagctgtatccgtttacctgggatgccgtacgttacaacggcaagctgattgcttacccgatcgctgttgaagcgttatcgctgatttataacaaagatctgctgccgaacccgccaaaaacctgggaagagatcccggcgctggataaagaactgaaagcgaaaggtaagagcgcgctgatgttcaacctgcaagaaccgtacttcacctggccgctgattgctgctgacgggggttatgcgttcaagtatgaaaacggcaagtacgacattaaagacgtgggcgtggataacgctggcgcgaaagcgggtctgaccttcctggttgacctgattaaaaacaaacacatgaatgcagacaccgattactccatcgcagaagctgcctttaataaaggcgaaacagcgatgaccatcaacggcccgtgggcatggtccaacatcgacaccagcaaagtgaattatggtgtaacggtactgccgaccttcaagggtcaaccatccaaaccgttcgttggcgtgctgagcgcaggtattaacgccgccagtccgaacaaagagctggcgaaagagttcctcgaaaactatctgctgactgatgaaggtctggaagcggttaataaagacaaaccgctgggtgccgtagcgctgaagtcttacgaggaagagttggcgaaagatccacgtattgccgccaccatggaaaacgcccagaaaggtgaaatcatgccgaacatcccgcagatgtccgctttctggtatgccgtgcgtactgcggtgatcaacgccgccagcggtcgtcagactgtcgatgaagccctgaaagacgcgcagactggtggttctggtgagaacctgtactttcaaagctcagataatgggcctcaaaaccagcgcaacgctccacgtataaccttcggtggcccgtctgactccacaggcagcaaccagaatggtgagcgtagtggagccaggtctaagcagcgccgtccccagggtctgccgaacaacacggcgagctggtttactgcgcttacccaacacggtaaagaagacttaaaattcccgcgtggccagggcgtcccgatcaacactaactcttccccggatgatcagattggttattaccgcagatgtactcgtcggattcgcggcggcgacggtaaaatgaaagatttgtctccgcgttggtacttttactatctcggcaccggtccggaagctggactgccctacggggcaaacaaggacgggatcatttgggtggctaccgaaggtgccctgaatactccaaaagatcatatcggcacccgtaaccctgctaataacgctgcgatcgttctgcaactgcctcagggtacaactctgccaaaaggcttctatgcagaagggtcgcgtggtggcagccaggcgagtagccgtagcagctcccgctctcgcaactcgtcccgtaactccactccgggctcttctcgcggcacgtccccggctcgtatggcaggtaacggtggtgacgctgctctggcgctgctactgctggacaggctgaaccagctggagtcgaagatgagtggtaaaggccaacagcagcagggccagaccgttaccaaaaagagcgcagctgaagcatctaaaaaaccgcgacagaaacgtaccgcgactaaagcgtacaatgtaacacaggccttcggtcgtcgaggtccggagcaaactcaaggaaactttggcgatcaggaattaatccgccaggggaccgactacaaacactggccgcaaattgcccagttcgccccatccgctagtgcattcttcggtatgagccgcatcggcatggaagtaacgccaagtggtacgtggctgacctacaccggtgctatcaagcttgatgacaaggacccgaactttaaagaccaggttattctgcttaacaaacatattgatgcctataaaactttcccgccgaccgaacccaaaaaggacaaaaagaaaaaagctgatgaaacccaggctctaccgcagcgtcagaaaaaacagcaaactgtgactctgctgccagctgcggacctggatgatttttccaagcagctgcaacagtctatgagctctgcggactctacgcaggctggtggttctggtcaccatcatcaccatcattaa

SEQ ID NO: 3149 - DNA, 2421 bp, Artificial Sequence
  Description of Artificial Sequence: Synthetic polynucleotide
atgaaaatcgaagaaggtaaactggtaatctggattaacggcgataaaggctataacggtctcgctgaagtcggtaagaaattcgagaaagataccggaattaaagtcaccgttgagcatccggataaactggaagagaaattcccacaggttgcggcaactggcgatggccctgacattatcttctgggcacacgaccgctttggtggctacgctcaatctggcctgttggctgaaatcaccccggacaaagcgttccaggacaagctgtatccgtttacctgggatgccgtacgttacaacggcaagctgattgcttacccgatcgctgttgaagcgttatcgctgatttataacaaagatctgctgccgaacccgccaaaaacctgggaagagatcccggcgctggataaagaactgaaagcgaaaggtaagagcgcgctgatgttcaacctgcaagaaccgtacttcacctggccgctgattgctgctgacgggggttatgcgttcaagtatgaaaacggcaagtacgacattaaagacgtgggcgtggataacgctggcgcgaaagcgggtctgaccttcctggttgacctgattaaaaacaaacacatgaatgcagacaccgattactccatcgcagaagctgcctttaataaaggcgaaacagcgatgaccatcaacggcccgtgggcatggtccaacatcgacaccagcaaagtgaattatggtgtaacggtactgccgaccttcaagggtcaaccatccaaaccgttcgttggcgtgctgagcgcaggtattaacgccgccagtccgaacaaagagctggcgaaagagttcctcgaaaactatctgctgactgatgaaggtctggaagcggttaataaagacaaaccgctgggtgccgtagcgctgaagtcttacgaggaagagttggcgaaagatccacgtattgccgccaccatggaaaacgcccagaaaggtgaaatcatgccgaacatcccgcagatgtccgctttctggtatgccgtgcgtactgcggtgatcaacgccgccagcggtcgtcagactgtcgatgaagccctgaaagacgcgcagactggtggttctggtgagaacctgtactttcaaagctcagataatgggcctcaaaaccagcgcaacgctccacgtataaccttcggtggcccgtctgactccacaggcagcaaccagaatggtgagcgtagtggagccaggtctaagcagcgccgtccccagggtctgccgaacaacacggcgagctggtttactgcgcttacccaacacggtaaagaagacttaaaattcccgccaggccagggcgtcccgatcaacccgaactctaaaccggatgatcagattggttattaccgcagacaaactcgtcggtatcgcggcggcgacggtcagatgaaagatttgcctccgcgttggtacttttactatctcggcaccggtccggaagctggactgccctacggggcaaacaaggacgggatcatttgggtggctaccgaaggtgccctgaatactccaaaagatcatatcggcacccgtaaccctgctaataacgctgcgatcgttctgcaactgcctcagggtacaactctgccaaaaggcttctatgcagaagggtcgcgtggtggcagccaggcgagtagccgtagcagctcccgctctcgcaactcgtcccgtaactccactccgggctcttctcgcggcacgtccccggctcgtatggcaggtaacggtggtgacgctgctctggcgctgctactgctggacaggctgaaccagctggagtcgaagatgagtggtaaaggccaacagcagcagggccagaccgttaccaaaaagagcgcagctgaagcatctaaaaaaccgcgacagaaacgtaccgcgactaaagcgtacaatgtaacacaggccttcggtcgtcgaggtccggagcaaactcaaggaaactttggcgatcaggaattaatccgccaggggaccgactacaaacactggccgcaaattgcccagttcgccccatccgctagtgcattcttcggtatgagccgcatcggcatggaagtaacgccaagtggtacgtggctgacctacaccggtgctatcaagcttgatgacaaggacccgaactttaaagaccaggttattctgcttaacaaacatattgatgcctataaaactttcccgccgaccgaacccaaaaaggacaaaaagaaaaaagctgatgaaacccaggctctaccgcagcgtcagaaaaaacagcaaactgtgactctgctgccagctgcggacctggatgatttttccaagcagctgcaacagtctatgagctctgcggactctacgcaggctggtggttctggtcaccatcatcaccatcattaa

SEQ ID NO: 3150 - DNA, 2421 bp, Artificial Sequence
  Description of Artificial Sequence: Synthetic polynucleotide
atgaaaatcgaagaaggtaaactggtaatctggattaacggcgataaaggctataacggtctcgctgaagtcggtaagaaattcgagaaagataccggaattaaagtcaccgttgagcatccggataaactggaagagaaattcccacaggttgcggcaactggcgatggccctgacattatcttctgggcacacgaccgctttggtggctacgctcaatctggcctgttggctgaaatcaccccggacaaagcgttccaggacaagctgtatccgtttacctgggatgccgtacgttacaacggcaagctgattgcttacccgatcgctgttgaagcgttatcgctgatttataacaaagatctgctgccgaacccgccaaaaacctgggaagagatcccggcgctggataaagaactgaaagcgaaaggtaagagcgcgctgatgttcaacctgcaagaaccgtacttcacctggccgctgattgctgctgacgggggttatgcgttcaagtatgaaaacggcaagtacgacattaaagacgtgggcgtggataacgctggcgcgaaagcgggtctgaccttcctggttgacctgattaaaaacaaacacatgaatgcagacaccgattactccatcgcagaagctgcctttaataaaggcgaaacagcgatgaccatcaacggcccgtgggcatggtccaacatcgacaccagcaaagtgaattatggtgtaacggtactgccgaccttcaagggtcaaccatccaaaccgttcgttggcgtgctgagcgcaggtattaacgccgccagtccgaacaaagagctggcgaaagagttcctcgaaaactatctgctgactgatgaaggtctggaagcggttaataaagacaaaccgctgggtgccgtagcgctgaagtcttacgaggaagagttggcgaaagatccacgtattgccgccaccatggaaaacgcccagaaaggtgaaatcatgccgaacatcccgcagatgtccgctttctggtatgccgtgcgtactgcggtgatcaacgccgccagcggtcgtcagactgtcgatgaagccctgaaagacgcgcagactggtggttctggtgagaacctgtactttcaaagctcagataatgggcctcaaaaccagcgcaacgctccacgtataaccttcggtggcccgtctgactccacaggcagcaaccagaatggtgagcgtagtggagccaggtctaagcagcgccgtccccagggtctgccgaacaacacggcgagctggtttactgcgcttacccaacacggtaaagaagacttaaaattcccgcgtggccagggcgtcccgatcaacactaactcttccccggatgatcagattggttattaccgcagagcaactcgtcggattcgcggcggcgacggtaaaatgaaagatttgtctccgcgttggtacttttactatctcggcaccggtccggaagctggactgccctacggggcaaacaaggacgggatcatttgggtggctaccgaaggtgccctgaatactccaaaagatcatatcggcacccgtaaccctgctaataacgctgcgatcgttctgcaactgcctcagggtacaactctgccaaaaggcttctatgcagaagggtcgcgtggtggcagccaggcgagtagccgtagcagctcccgctctcgcaactcgtcccgtaactccactccgggctcttctcgcggcacgtccccggctcgtatggcaggtaacggtggtgacgctgctctggcgctgctactgctggacaggctgaaccagctggagtcgaagatgagtggtaaaggccaacagcagcagggccagaccgttaccaaaaagagcgcagctgaagcatctaaaaaaccgcgacagaaacgtaccgcgactaaagcgtacaatgtaacacaggccttcggtcgtcgaggtccggagcaaactcaaggaaactttggcgatcaggaattaatccgccaggggaccgactacaaacactggccgcaaattgcccagttcgccccatccgctagtgcattcttctttatgagccgcatcggcatggaagtaacgccaagtggtacgtggctgacctacaccggtgctatcaagcttgatgacaaggacccgaactttaaagaccaggttattctgcttaacaaacatattgatgcctataaaactttcccgccgaccgaacccaaaaaggacaaaaagaaaaaagctgatgaaacccaggctctaccgcagcgtcagaaaaaacagcaaactgtgactctgctgccagctgcggacctggatgatttttccaagcagctgcaacagtctatgagctctgcggactctacgcaggctggtggttctggtcaccatcatcaccatcattaa

SEQ ID NO: 3151 - DNA, 2421 bp, Artificial Sequence
  Description of Artificial Sequence: Synthetic polynucleotide
atgaaaatcgaagaaggtaaactggtaatctggattaacggcgataaaggctataacggtctcgctgaagtcggtaagaaattcgagaaagataccggaattaaagtcaccgttgagcatccggataaactggaagagaaattcccacaggttgcggcaactggcgatggccctgacattatcttctgggcacacgaccgctttggtggctacgctcaatctggcctgttggctgaaatcaccccggacaaagcgttccaggacaagctgtatccgtttacctgggatgccgtacgttacaacggcaagctgattgcttacccgatcgctgttgaagcgttatcgctgatttataacaaagatctgctgccgaacccgccaaaaacctgggaagagatcccggcgctggataaagaactgaaagcgaaaggtaagagcgcgctgatgttcaacctgcaagaaccgtacttcacctggccgctgattgctgctgacgggggttatgcgttcaagtatgaaaacggcaagtacgacattaaagacgtgggcgtggataacgctggcgcgaaagcgggtctgaccttcctggttgacctgattaaaaacaaacacatgaatgcagacaccgattactccatcgcagaagctgcctttaataaaggcgaaacagcgatgaccatcaacggcccgtgggcatggtccaacatcgacaccagcaaagtgaattatggtgtaacggtactgccgaccttcaagggtcaaccatccaaaccgttcgttggcgtgctgagcgcaggtattaacgccgccagtccgaacaaagagctggcgaaagagttcctcgaaaactatctgctgactgatgaaggtctggaagcggttaataaagacaaaccgctgggtgccgtagcgctgaagtcttacgaggaagagttggcgaaagatccacgtattgccgccaccatggaaaacgcccagaaaggtgaaatcatgccgaacatcccgcagatgtccgctttctggtatgccgtgcgtactgcggtgatcaacgccgccagcggtcgtcagactgtcgatgaagccctgaaagacgcgcagactggtggttctggtgagaacctgtactttcaaagctcagataatgggcctcaaaaccagcgcaacgctccacgtataaccttcggtggcccgtctgactccacaggcagcaaccagaatggtgagcgtagtggagccaggtctaagcagcgccgtccccagggtctgccgaacaacacggcgagctggtttactgcgcttacccaacacggtaaagaagacttaaaattcccgcgtggccagggcgtcccgatcaacactaactcttccccggatgatcagattggttattaccgcagagcaactcgtcggattcgcggcggcgacggtaaaatgaaagatttgtctccgcgttggtacttttactatctcggcaccggtccggaagctggactgccctacggggcaaacaaggacgggatcatttgggtggctaccgaaggtgccctgaatactccaaaagatcatatcggcacccgtaaccctgctaataacgctgcgatcgttctgcaactgcctcagggtacaactctgccaaaaggcttctatgcagaagggtcgcgtggtggcagccaggcgagtagccgtagcagctcccgctctcgcaactcgtcccgtaactccactccgggctcttctcgcggcacgtccccggctcgtatggcaggtaacggtggtgacgctgctctggcgctgctactgctggacaggctgaaccagctggagtcgaagatgagtggtaaaggccaacagcagcagggccagaccgttaccaaaaagagcgcagctgaagcatctaaaaaaccgcgacagaaacgtaccgcgactaaagcgtacaatgtaacacaggccttcggtcgtcgaggtccggagcaaactcaaggaaactttggcgatcaggaattaatccgccaggggaccgactacaaacactggccgcaaattgcccagttcgccccatccgctagtgcattcttcggtatgagccgcatcggcatggaagtatcgccaagtggtacgtggctgacctacaccggtgctatcaagcttgatgacaaggacccgaactttaaagaccaggttattctgcttaacaaacatattgatgcctataaaactttcccgccgaccgaacccaaaaaggacaaaaagaaaaaagctgatgaaacccaggctctaccgcagcgtcagaaaaaacagcaaactgtgactctgctgccagctgcggacctggatgatttttccaagcagctgcaacagtctatgagctctgcggactctacgcaggctggtggttctggtcaccatcatcaccatcattaa

SEQ ID NO: 3152 - DNA, 2421 bp, Artificial Sequence
  Description of Artificial Sequence: Synthetic polynucleotide
atgaaaatcgaagaaggtaaactggtaatctggattaacggcgataaaggctataacggtctcgctgaagtcggtaagaaattcgagaaagataccggaattaaagtcaccgttgagcatccggataaactggaagagaaattcccacaggttgcggcaactggcgatggccctgacattatcttctgggcacacgaccgctttggtggctacgctcaatctggcctgttggctgaaatcaccccggacaaagcgttccaggacaagctgtatccgtttacctgggatgccgtacgttacaacggcaagctgattgcttacccgatcgctgttgaagcgttatcgctgatttataacaaagatctgctgccgaacccgccaaaaacctgggaagagatcccggcgctggataaagaactgaaagcgaaaggtaagagcgcgctgatgttcaacctgcaagaaccgtacttcacctggccgctgattgctgctgacgggggttatgcgttcaagtatgaaaacggcaagtacgacattaaagacgtgggcgtggataacgctggcgcgaaagcgggtctgaccttcctggttgacctgattaaaaacaaacacatgaatgcagacaccgattactccatcgcagaagctgcctttaataaaggcgaaacagcgatgaccatcaacggcccgtgggcatggtccaacatcgacaccagcaaagtgaattatggtgtaacggtactgccgaccttcaagggtcaaccatccaaaccgttcgttggcgtgctgagcgcaggtattaacgccgccagtccgaacaaagagctggcgaaagagttcctcgaaaactatctgctgactgatgaaggtctggaagcggttaataaagacaaaccgctgggtgccgtagcgctgaagtcttacgaggaagagttggcgaaagatccacgtattgccgccaccatggaaaacgcccagaaaggtgaaatcatgccgaacatcccgcagatgtccgctttctggtatgccgtgcgtactgcggtgatcaacgccgccagcggtcgtcagactgtcgatgaagccctgaaagacgcgcagactggtggttctggtgagaacctgtactttcaaagctcagataatgggcctcaaaaccagcgcaacgctccacgtataaccttcggtggcccgtctgactccacaggcagcaaccagaatggtgagcgtagtggagccaggtctaagcagcgccgtccccagggtctgccgaacaacacggcgagctggtttactgcgcttacccaacacggtaaagaagacttaaaattcccgcgtggccagggcgtcccgatcaacactaactcttccccggatgatcagattggttattaccgcagagcaactcgtcggattcgcggcggcgacggtaaaatgaaagatttgtctccgcgttggtacttttactatctcggcaccggtccggaagctggactgccctacggggcaaacaaggacgggatcatttgggtggctaccgaaggtgccctgaatactccaaaagatcatatcggcacccgtaaccctgctaataacgctgcgatcgttctgcaactgcctcagggtacaactctgccaaaaggcttctatgcagaagggtcgcgtggtggcagccaggcgagtagccgtagcagctcccgctctcgcaactcgtcccgtaactccactccgggctcttctcgcggcacgtccccggctcgtatggcaggtaacggtggtgacgctgctctggcgctgctactgctggacaggctgaaccagctggagtcgaagatgagtggtaaaggccaacagcagcagggccagaccgttaccaaaaagagcgcagctgaagcatctaaaaaaccgcgacagaaacgtaccgcgactaaagcgtacaatgtaacacaggccttcggtcgtcgaggtccggagcaaactcaaggaaactttggcgatcaggaattaatccgccaggggaccgactacaaacactggccgcaaattgcccagttcgccccatccgctagtgcattcttcggtatgagccgcatcggcatggaagtaacgccaagtggtacgtggctgacctacaccggtgctatcaagcttgatgacaaggacccgaactttaaagaccaggttattctgcttaaccaacatattgatgcctataaaactttcccgccgaccgaacccaaaaaggacaaaaagaaaaaagctgatgaaacccaggctctaccgcagcgtcagaaaaaacagcaaactgtgactctgctgccagctgcggacctggatgatttttccaagcagctgcaacagtctatgagctctgcggactctacgcaggctggtggttctggtcaccatcatcaccatcattaa

SEQ ID NO: 3153 - DNA, 2421 bp, Artificial Sequence
  Description of Artificial Sequence: Synthetic polynucleotide
atgaaaatcgaagaaggtaaactggtaatctggattaacggcgataaaggctataacggtctcgctgaagtcggtaagaaattcgagaaagataccggaattaaagtcaccgttgagcatccggataaactggaagagaaattcccacaggttgcggcaactggcgatggccctgacattatcttctgggcacacgaccgctttggtggctacgctcaatctggcctgttggctgaaatcaccccggacaaagcgttccaggacaagctgtatccgtttacctgggatgccgtacgttacaacggcaagctgattgcttacccgatcgctgttgaagcgttatcgctgatttataacaaagatctgctgccgaacccgccaaaaacctgggaagagatcccggcgctggataaagaactgaaagcgaaaggtaagagcgcgctgatgttcaacctgcaagaaccgtacttcacctggccgctgattgctgctgacgggggttatgcgttcaagtatgaaaacggcaagtacgacattaaagacgtgggcgtggataacgctggcgcgaaagcgggtctgaccttcctggttgacctgattaaaaacaaacacatgaatgcagacaccgattactccatcgcagaagctgcctttaataaaggcgaaacagcgatgaccatcaacggcccgtgggcatggtccaacatcgacaccagcaaagtgaattatggtgtaacggtactgccgaccttcaagggtcaaccatccaaaccgttcgttggcgtgctgagcgcaggtattaacgccgccagtccgaacaaagagctggcgaaagagttcctcgaaaactatctgctgactgatgaaggtctggaagcggttaataaagacaaaccgctgggtgccgtagcgctgaagtcttacgaggaagagttggcgaaagatccacgtattgccgccaccatggaaaacgcccagaaaggtgaaatcatgccgaacatcccgcagatgtccgctttctggtatgccgtgcgtactgcggtgatcaacgccgccagcggtcgtcagactgtcgatgaagccctgaaagacgcgcagactggtggttctggtgagaacctgtactttcaaagctcagataatgggcctcaaaaccagcgcaacgctccacgtataaccttcggtggcccgtctgactccacaggcagcaaccagaatggtgagcgtagtggagccaggtctaagcagcgccgtccccagggtctgccgaacaacacggcgagctggtttactgcgcttacccaacacggtaaagaagacttaaaattcccgcgtggccagggcgtcccgatcaacactaactcttccccggatgatcagattggttattaccgcagagcaactcgtcggattcgcggcggcgacggtaaaatgaaagatttgtctccgcgttggtacttttactatctcggcaccggtccggaagctggactgccctacggggcaaacaaggacgggatcatttgggtggctaccgaaggtgccctgaatactccaaaagatcatatcggcacccgtaaccctgctaataacgctgcgatcgttctgcaactgcctcagggtacaactctgccaaaaggcttctatgcagaagggtcgcgtggtggcagccaggcgagtagccgtagcagctcccgctctcgcaactcgtcccgtaactccactccgggctcttctcgcggcacgtccccggctcgtatggcaggtaacggtggtgacgctgctctggcgctgctactgctggacaggctgaaccagctggagtcgaagatgagtggtaaaggccaacagcagcagggccagaccgttaccaaaaagagcgcagctgaaatgtctaaaaaaccgcgacagaaacgtaccgcgactaaaggctgtaatgtaacacagtgcttcggtccgcgaggtccggagcaaactcaaggaaactttggcgatgcggatttaatcaagaaagggaccgactacaaacactggccgcaaattgcccagttcgccccatccgctagtgcattcttcggtatgagccgcatctcgtcaaaagaaacgccaagtggtacgtggctgacctacaccggtgctatcaagcttgataaagatgacccgaactttaaagaccaggttattctgcttaacaaacatattgatgcctataaaactttcccgccgaccgaacccaaaaaggacaaaaagaaaaaagctgatgaaacccaggctctaccgcagcgtcagaaaaaacagcaaactgtgactctgctgccagctgcggacctggatgatttttccaagcagctgcaacagtctatgagctctgcggactctacgcaggctggtggttctggtcaccatcatcaccatcattaa

SEQ ID NO: 3154 - DNA, 2421 bp, Artificial Sequence
  Description of Artificial Sequence: Synthetic polynucleotide
atgaaaatcgaagaaggtaaactggtaatctggattaacggcgataaaggctataacggtctcgctgaagtcggtaagaaattcgagaaagataccggaattaaagtcaccgttgagcatccggataaactggaagagaaattcccacaggttgcggcaactggcgatggccctgacattatcttctgggcacacgaccgctttggtggctacgctcaatctggcctgttggctgaaatcaccccggacaaagcgttccaggacaagctgtatccgtttacctgggatgccgtacgttacaacggcaagctgattgcttacccgatcgctgttgaagcgttatcgctgatttataacaaagatctgctgccgaacccgccaaaaacctgggaagagatcccggcgctggataaagaactgaaagcgaaaggtaagagcgcgctgatgttcaacctgcaagaaccgtacttcacctggccgctgattgctgctgacgggggttatgcgttcaagtatgaaaacggcaagtacgacattaaagacgtgggcgtggataacgctggcgcgaaagcgggtctgaccttcctggttgacctgattaaaaacaaacacatgaatgcagacaccgattactccatcgcagaagctgcctttaataaaggcgaaacagcgatgaccatcaacggcccgtgggcatggtccaacatcgacaccagcaaagtgaattatggtgtaacggtactgccgaccttcaagggtcaaccatccaaaccgttcgttggcgtgctgagcgcaggtattaacgccgccagtccgaacaaagagctggcgaaagagttcctcgaaaactatctgctgactgatgaaggtctggaagcggttaataaagacaaaccgctgggtgccgtagcgctgaagtcttacgaggaagagttggcgaaagatccacgtattgccgccaccatggaaaacgcccagaaaggtgaaatcatgccgaacatcccgcagatgtccgctttctggtatgccgtgcgtactgcggtgatcaacgccgccagcggtcgtcagactgtcgatgaagccctgaaagacgcgcagactggtggttctggtgagaacctgtactttcaaagctcagataatgggcctcaaaaccagcgcaacgctccacgtataaccttcggtggcccgtctgactccacaggcagcaaccagaatggtgagcgtagtggagccaggtctaagcagcgccgtccccagggtctgccgaacaacacggcgagctggtttactccgcttgtgcaatttggtaaagaagacttaaaattcccgccgggccagggcgtcccgatcaacactaactcttccccggatgatcagattggttattaccgcagagcaactcgtcggattcgcggcggcgacggtaaaatgaaagatttgcctccgaagtggtacttttactatctcggcaccggtccgcatgctgatctgccctacgggcaaaaacacccaggggttgtatgggtggctcggccaggtgccctgaatactccaaaagatcatatcggcacccgtaaccctgctaataacgctgcgatcccgctgcaactgcctcctggtacaaaactgccaaaaggcttctatgcagaagggtcgcgtggtggcagccaggcgagtagccgtagcagctcccgctctcgcaactcgtcccgtaactccactccgggctcttctcgcggcacgtccccggctcgtatggcaggtaacggtggtgacgctgctctggcgctgctactgctggacaggctgaaccagctggagtcgaagatgagtggtaaaggccaacagcagcagggccagaccgttaccaaaaagagcgcagctgaagcatctaaaaaaccgcgacagaaacgtaccgcgactaaagcgtacaatgtaacacaggccttcggtcgtcgaggtccggagcaaactcaaggaaactttggcgatcaggaattaatccgccaggggaccgactacaaacactggccgcaaattgcccagttcgccccatccgctagtgcattcttcggtatgagccgcatcggcatggaagtaacgccaagtggtacgtggctgacctacaccggtgctatcaagcttgatgacaaggacccgaactttaaagaccaggttattctgcttaacaaacatattgatgcctataaaactttcccgccgaccgaacccaaaaaggacaaaaagaaaaaagctgatgaaacccaggctctaccgcagcgtcagaaaaaacagcaaactgtgactctgctgccagctgcggacctggatgatttttccaagcagctgcaacagtctatgagctctgcggactctacgcaggctggtggttctggtcaccatcatcaccatcattaa

SEQ ID NO: 3155 - DNA, 2421 bp, Artificial Sequence
  Description of Artificial Sequence: Synthetic polynucleotide
atgaaaatcgaagaaggtaaactggtaatctggattaacggcgataaaggctataacggtctcgctgaagtcggtaagaaattcgagaaagataccggaattaaagtcaccgttgagcatccggataaactggaagagaaattcccacaggttgcggcaactggcgatggccctgacattatcttctgggcacacgaccgctttggtggctacgctcaatctggcctgttggctgaaatcaccccggacaaagcgttccaggacaagctgtatccgtttacctgggatgccgtacgttacaacggcaagctgattgcttacccgatcgctgttgaagcgttatcgctgatttataacaaagatctgctgccgaacccgccaaaaacctgggaagagatcccggcgctggataaagaactgaaagcgaaaggtaagagcgcgctgatgttcaacctgcaagaaccgtacttcacctggccgctgattgctgctgacgggggttatgcgttcaagtatgaaaacggcaagtacgacattaaagacgtgggcgtggataacgctggcgcgaaagcgggtctgaccttcctggttgacctgattaaaaacaaacacatgaatgcagacaccgattactccatcgcagaagctgcctttaataaaggcgaaacagcgatgaccatcaacggcccgtgggcatggtccaacatcgacaccagcaaagtgaattatggtgtaacggtactgccgaccttcaagggtcaaccatccaaaccgttcgttggcgtgctgagcgcaggtattaacgccgccagtccgaacaaagagctggcgaaagagttcctcgaaaactatctgctgactgatgaaggtctggaagcggttaataaagacaaaccgctgggtgccgtagcgctgaagtcttacgaggaagagttggcgaaagatccacgtattgccgccaccatggaaaacgcccagaaaggtgaaatcatgccgaacatcccgcagatgtccgctttctggtatgccgtgcgtactgcggtgatcaacgccgccagcggtcgtcagactgtcgatgaagccctgaaagacgcgcagactggtggttctggtgagaacctgtactttcaaagctcagataatgggcctcaaaaccagcgcaacgctccacgtataaccttcggtggcccgtctgactccacaggcagcaaccagaatggtgagcgtagtggagccaggtctaagcagcgccgtccccagggtctgccgaacaacacggcgagctggtttactgcgcttacccaacacggtaaagaagacttaaaattcccgcgtggccagggcgtcccgatcaacactaactcttccccggatgatcagattggttattaccgcagagcaactcgtcggattcgcggcggcgacggtaaaatgaaagatttgtctccgcgttggtacttttactatctcggcaccggtccggaagctggactgccctacggggcaaacaaggacgggatcatttgggtggctaccgaaggtgccctgaatactccaaaagatcatatcggcacccgtaaccctgctaatcatgctgcgatcgttctgcaactgcctcagggtacaactctgccaaaaggcttctatgcagaagggtcgcgtggtggcagccaggcgagtagccgtagcagctcccgctctcgcaactcgtcccgtaactccactccgggctcttctcgcggcacgtccccggctcgtatggcaggtaacggtggtgacgctgctctggcgctgctactgctggacaggctgaaccagctggagtcgaagatgagtggtaaaggccaacagcagcagggccagaccgttaccaaaaagagcgcagctgaagcatctaaaaaaccgcgacagaaacgtaccgcgactaaagcgtacaatgtaacacaggccttcggtcgtcgaggtccggagcaaactcaaggaaactttggcgatcaggaattaatccgccaggggaccgactacaaacactggccgcaaattgcccagttcgccccatccgctagtgcattcttcggtatgagccgcatcggcatggaagtaacgccaagtggtacgtggctgacctacaccggtgctatcaagcttgatgacaaggacccgaactttaaagaccaggttattctgcttaacaaacatattgatgcctataaaactttcccgccgaccgaacccaaaaaggacaaaaagaaaaaagctgatgaaacccaggctctaccgcagcgtcagaaaaaacagcaaactgtgactctgctgccagctgcggacctggatgatttttccaagcagctgcaacagtctatgagctctgcggactctacgcaggctggtggttctggtcaccatcatcaccatcattaa

SEQ ID NO: 3156 - DNA, 2421 bp, Artificial Sequence
  Description of Artificial Sequence: Synthetic polynucleotide
atgaaaatcgaagaaggtaaactggtaatctggattaacggcgataaaggctataacggtctcgctgaagtcggtaagaaattcgagaaagataccggaattaaagtcaccgttgagcatccggataaactggaagagaaattcccacaggttgcggcaactggcgatggccctgacattatcttctgggcacacgaccgctttggtggctacgctcaatctggcctgttggctgaaatcaccccggacaaagcgttccaggacaagctgtatccgtttacctgggatgccgtacgttacaacggcaagctgattgcttacccgatcgctgttgaagcgttatcgctgatttataacaaagatctgctgccgaacccgccaaaaacctgggaagagatcccggcgctggataaagaactgaaagcgaaaggtaagagcgcgctgatgttcaacctgcaagaaccgtacttcacctggccgctgattgctgctgacgggggttatgcgttcaagtatgaaaacggcaagtacgacattaaagacgtgggcgtggataacgctggcgcgaaagcgggtctgaccttcctggttgacctgattaaaaacaaacacatgaatgcagacaccgattactccatcgcagaagctgcctttaataaaggcgaaacagcgatgaccatcaacggcccgtgggcatggtccaacatcgacaccagcaaagtgaattatggtgtaacggtactgccgaccttcaagggtcaaccatccaaaccgttcgttggcgtgctgagcgcaggtattaacgccgccagtccgaacaaagagctggcgaaagagttcctcgaaaactatctgctgactgatgaaggtctggaagcggttaataaagacaaaccgctgggtgccgtagcgctgaagtcttacgaggaagagttggcgaaagatccacgtattgccgccaccatggaaaacgcccagaaaggtgaaatcatgccgaacatcccgcagatgtccgctttctggtatgccgtgcgtactgcggtgatcaacgccgccagcggtcgtcagactgtcgatgaagccctgaaagacgcgcagactggtggttctggtgagaacctgtactttcaaagctcagataatgggcctcaaaaccagcgcaacgctccacgtataaccttcggtggcccgtctgactccacaggcagcaaccagaatggtgagcgtagtggagccaggtctaagcagcgccgtccccagggtctgccgaacaacacggcgagctggtttactgcgcttacccaacacggtaaagaagacttaaaattcccgcgtggccagggcgtcccgatcaacactaactcttccccggatgatcagattggttattaccgcagagcaactcgtcggattcgcggcggcgacggtaaaatgaaagatttgtctccgcgttggtacttttactatctcggcaccggtccggaagctggactgccctacggggcaaacaaggacgggatcatttgggtggctaccgaaggtgccctgaatactccaaaagatcatatcggcacccgtaaccctgctaataacgctgcgatcgttctgcaactgcctcagggtacaactctgccaaaaggcttctatgcagaagggtcgcgtggtggcagccaggcgagtagccgtagcagctcccgctctcgcaactcgtcccgtaactccactccgggctcttctcgcggcacgtccccggctcgtatggcaggtaacggtggtgacgctgctctggcgctgctactgctggacaggctgaaccagctggagtcgaagatgagtggtaaaggccaacagcagcagggccagaccgttaccaaaaagagcgcagctgaagcatctaaaaaaccgcgacagaaacgtaccgcgactaaagcgtacaatgtaacacaggccttcggtcgtcgaggtccggagcaaactcaaggaaactttggcgatcaggaattaatccgccaggggaccgactacaaacactggccgcaaattgcccagttcgccccatccgctagtgcattcttcggtatgagccgcatcggcatggaagtaacgccaagtggtacgtggctgacctacaccggtacgatcaagcttgatgacaaggacccgaactttaaagaccaggttattctgcttaacaaacatattgatgcctataaaactttcccgccgaccgaacccaaaaaggacaaaaagaaaaaagctgatgaaacccaggctctaccgcagcgtcagaaaaaacagcaaactgtgactctgctgccagctgcggacctggatgatttttccaagcagctgcaacagtctatgagctctgcggactctacgcaggctggtggttctggtcaccatcatcaccatcattaa

SEQ ID NO: 3157 - DNA, 2421 bp, Artificial Sequence
  Description of Artificial Sequence: Synthetic polynucleotide
atgaaaatcgaagaaggtaaactggtaatctggattaacggcgataaaggctataacggtctcgctgaagtcggtaagaaattcgagaaagataccggaattaaagtcaccgttgagcatccggataaactggaagagaaattcccacaggttgcggcaactggcgatggccctgacattatcttctgggcacacgaccgctttggtggctacgctcaatctggcctgttggctgaaatcaccccggacaaagcgttccaggacaagctgtatccgtttacctgggatgccgtacgttacaacggcaagctgattgcttacccgatcgctgttgaagcgttatcgctgatttataacaaagatctgctgccgaacccgccaaaaacctgggaagagatcccggcgctggataaagaactgaaagcgaaaggtaagagcgcgctgatgttcaacctgcaagaaccgtacttcacctggccgctgattgctgctgacgggggttatgcgttcaagtatgaaaacggcaagtacgacattaaagacgtgggcgtggataacgctggcgcgaaagcgggtctgaccttcctggttgacctgattaaaaacaaacacatgaatgcagacaccgattactccatcgcagaagctgcctttaataaaggcgaaacagcgatgaccatcaacggcccgtgggcatggtccaacatcgacaccagcaaagtgaattatggtgtaacggtactgccgaccttcaagggtcaaccatccaaaccgttcgttggcgtgctgagcgcaggtattaacgccgccagtccgaacaaagagctggcgaaagagttcctcgaaaactatctgctgactgatgaaggtctggaagcggttaataaagacaaaccgctgggtgccgtagcgctgaagtcttacgaggaagagttggcgaaagatccacgtattgccgccaccatggaaaacgcccagaaaggtgaaatcatgccgaacatcccgcagatgtccgctttctggtatgccgtgcgtactgcggtgatcaacgccgccagcggtcgtcagactgtcgatgaagccctgaaagacgcgcagactggtggttctggtgagaacctgtactttcaaagctcagataatgggcctcaaaaccagcgcaacgctccacgtataaccttcggtggcccgtctgactccacaggcagcaaccagaatggtgagcgtagtggagccaggtctaagcagcgccgtccccagggtctgccgaacaacacggcgagctggtttactgcgcttacccaacacggtaaagaagacttaaaattcccgcgtggccagggcgtcccgatcaacactaactcttccccggatgatcagattggttattaccgcagagcaactcgtcggattcgcggcggcgacggtaaaatgaaagatttgtctccgcgttggtacttttactatctcggcaccggtccggaagctggactgccctacggggcaaacaaggacgggatcatttgggtggctaccgaaggtgccctgaatactccaaaagatcatatcggcacccgtaaccctgctaataacgctgcgatcgttctgcaactgcctcagggtacaactctgccaaaaggcttctatgcagaagggtcgcgtggtggcagccaggcgagtagccgtagcagctcccgctctcgcaactcgtcccgtaactccactccgggctcttctcgcggcacgtccccggctcgtatggcaggtaacggtggtgacgctgctctggcgctgctactgctggacaggctgaaccagctggagtcgaagatgagtggtaaaggccaacagcagcagggccagaccgttaccaaaaagagcgcagctgaagcatctaaaaaaccgcgacagaaacgtaccgcgactaaagagtacaatgtaacacaggccttcggtcgtcgaggtccggagcaaactcaaggaaactttggcgatcaggaattaatccgccaggggaccgactacaaacactggccgcaaattgcccagttcgccccatccgctagtgcattcttcggtatgagccgcatcggcatggaagtaacgccaagtggtacgtggctgacctacaccggtgctatcaagcttgatgacaaggacccgaactttaaagaccaggttattctgcttaacaaacatattgatgcctataaaactttcccgccgaccgaacccaaaaaggacaaaaagaaaaaagctgatgaaacccaggctctaccgcagcgtcagaaaaaacagcaaactgtgactctgctgccagctgcggacctggatgatttttccaagcagctgcaacagtctatgagctctgcggactctacgcaggctggtggttctggtcaccatcatcaccatcattaa

SEQ ID NO: 3158 - DNA, 2421 bp, Artificial Sequence
  Description of Artificial Sequence: Synthetic polynucleotide
atgaaaatcgaagaaggtaaactggtaatctggattaacggcgataaaggctataacggtctcgctgaagtcggtaagaaattcgagaaagataccggaattaaagtcaccgttgagcatccggataaactggaagagaaattcccacaggttgcggcaactggcgatggccctgacattatcttctgggcacacgaccgctttggtggctacgctcaatctggcctgttggctgaaatcaccccggacaaagcgttccaggacaagctgtatccgtttacctgggatgccgtacgttacaacggcaagctgattgcttacccgatcgctgttgaagcgttatcgctgatttataacaaagatctgctgccgaacccgccaaaaacctgggaagagatcccggcgctggataaagaactgaaagcgaaaggtaagagcgcgctgatgttcaacctgcaagaaccgtacttcacctggccgctgattgctgctgacgggggttatgcgttcaagtatgaaaacggcaagtacgacattaaagacgtgggcgtggataacgctggcgcgaaagcgggtctgaccttcctggttgacctgattaaaaacaaacacatgaatgcagacaccgattactccatcgcagaagctgcctttaataaaggcgaaacagcgatgaccatcaacggcccgtgggcatggtccaacatcgacaccagcaaagtgaattatggtgtaacggtactgccgaccttcaagggtcaaccatccaaaccgttcgttggcgtgctgagcgcaggtattaacgccgccagtccgaacaaagagctggcgaaagagttcctcgaaaactatctgctgactgatgaaggtctggaagcggttaataaagacaaaccgctgggtgccgtagcgctgaagtcttacgaggaagagttggcgaaagatccacgtattgccgccaccatggaaaacgcccagaaaggtgaaatcatgccgaacatcccgcagatgtccgctttctggtatgccgtgcgtactgcggtgatcaacgccgccagcggtcgtcagactgtcgatgaagccctgaaagacgcgcagactggtggttctggtgagaacctgtactttcaaagctcagataatgggcctcaaaaccagcgcaacgctccacgtataaccttcggtggcccgtctgactccacaggcagcaaccagaatggtgagcgtagtggagccaggtctaagcagcgccgtccccagggtctgccgaacaacacggcgagctggtttactgcgcttacccaacacggtaaagaagacttaaaattcccgcgtggccagggcgtcccgatcaacactaactcttccccggatgatcagattggttattaccgcagagcaactcgtcggattcgcggcggcgacggtaaaatgaaagatttgtctccgcgttggtacttttactatctcggcaccggtccggaagctggactgccctacggggcaaacaaggacgggatcatttgggtggctaccgaaggtgccctgaatactccaaaagatcatatcggcacccgtaaccctgctaataacgctgcgatcgttctgcaactgcctcagggtacaactctgccaaaaggcttctatgcagaagggtcgcgtggtggcagccaggcgagtagccgtagcagctcccgctctcgcaactcgtcccgtaactccactccgggctcttctcgcggcacgtccccggctcgtatggcaggtaacggtggtgacgctgctctggcgctgctactgctggacaggctgaaccagctggagtcgaagatgagtggtaaaggccaacagcagcagggccagaccgttaccaaaaagagcgcagctgaagcatctaaaaaaccgcgacagaaacgtaccgcgactaaaggatacaatgtaacacaggccttcggtcgtcgaggtccggagcaaactcaaggaaactttggcgatcaggatttaatccgcgaagggaccgactacaaacactggccgcaaattgcccagttcgccccatccgctagtgcattcttcggtatgagccgcatcggcacggaagaaacgccaagtggtacgtggctgacctacaccggtgctatcaagcttgataagaaggacccgaactttaaagaccaggttattctgcttaacaaacatattgatgcctataaaactttcccgccgaccgaacccaaaaaggacaaaaagaaaaaagctgatgaaacccaggctctaccgcagcgtcagaaaaaacagcaaactgtgactctgctgccagctgcggacctggatgatttttccaagcagctgcaacagtctatgagctctgcggactctacgcaggctggtggttctggtcaccatcatcaccatcattaa

SEQ ID NO: 3159 - DNA, 2421 bp, Artificial Sequence
  Description of Artificial Sequence: Synthetic polynucleotide
atgaaaatcgaagaaggtaaactggtaatctggattaacggcgataaaggctataacggtctcgctgaagtcggtaagaaattcgagaaagataccggaattaaagtcaccgttgagcatccggataaactggaagagaaattcccacaggttgcggcaactggcgatggccctgacattatcttctgggcacacgaccgctttggtggctacgctcaatctggcctgttggctgaaatcaccccggacaaagcgttccaggacaagctgtatccgtttacctgggatgccgtacgttacaacggcaagctgattgcttacccgatcgctgttgaagcgttatcgctgatttataacaaagatctgctgccgaacccgccaaaaacctgggaagagatcccggcgctggataaagaactgaaagcgaaaggtaagagcgcgctgatgttcaacctgcaagaaccgtacttcacctggccgctgattgctgctgacgggggttatgcgttcaagtatgaaaacggcaagtacgacattaaagacgtgggcgtggataacgctggcgcgaaagcgggtctgaccttcctggttgacctgattaaaaacaaacacatgaatgcagacaccgattactccatcgcagaagctgcctttaataaaggcgaaacagcgatgaccatcaacggcccgtgggcatggtccaacatcgacaccagcaaagtgaattatggtgtaacggtactgccgaccttcaagggtcaaccatccaaaccgttcgttggcgtgctgagcgcaggtattaacgccgccagtccgaacaaagagctggcgaaagagttcctcgaaaactatctgctgactgatgaaggtctggaagcggttaataaagacaaaccgctgggtgccgtagcgctgaagtcttacgaggaagagttggcgaaagatccacgtattgccgccaccatggaaaacgcccagaaaggtgaaatcatgccgaacatcccgcagatgtccgctttctggtatgccgtgcgtactgcggtgatcaacgccgccagcggtcgtcagactgtcgatgaagccctgaaagacgcgcagactggtggttctggtgagaacctgtactttcaaagctcagataatgggcctcaaaaccagcgcaacgctccacgtataaccttcggtggcccgtctgactccacaggcagcaaccagaatggtgagcgtagtggagccaggtctaagcagcgccgtccccagggtctgccgaacaacacggcgagctggtttactgcgcttacccaacacggtaaagaagacttaaaattcccgcgtggccagggcgtcccgatcaacactaactcttccccggatgatcagattggttattaccgcagagcaactcgtcggattcgcggcggcgacggtaaaatgaaagatttgtctccgcgttggtacttttactatctcggcaccggtccggaagctggactgccctacggggcaaacaaggacgggatcatttgggtggctaccgaaggtgccctgaatactccaaaagatcatatcggcacccgtaaccctgctaataacgctgcgatcgttctgcaactgcctcagggtacaactctgccaaaaggcttctatgcagaagggtcgcgtggtggcagccaggcgagtagccgtagcagctcccgctctcgcaactcgtcccgtaactccactccgggctcttctcgcggcacgtccccggctcgtatggcaggtaacggtggtgacgctgctctggcgctgctactgctggacaggctgaaccagctggagtcgaagatgagtggtaaaggccaacagcagcagggccagaccgttaccaaaaagagcgcagctgaagcatctaaaaaaccgcgacagaaacgtaccgcgactaaagcgtacaatgtaacacaggccttcggtcgtcgaggtccggagcaaactcaaggaaactttggcgatcaggaattaatccgccaggggaccgactacaaacactggccgcaacttgcccagttcgccccatccgctagtgcattcttcggtatgagccgcatcggcatggaagtaacgccaagtggtacgtggctgacctacaccggtgctatcaagcttgatgacaaggacccgaactttaaagaccaggttattctgcttaacaaacatattgatgcctataaaactttcccgccgaccgaacccaaaaaggacaaaaagaaaaaagctgatgaaacccaggctctaccgcagcgtcagaaaaaacagcaaactgtgactctgctgccagctgcggacctggatgatttttccaagcagctgcaacagtctatgagctctgcggactctacgcaggctggtggttctggtcaccatcatcaccatcattaa

SEQ ID NO: 3160 - DNA, 2421 bp, Artificial Sequence
  Description of Artificial Sequence: Synthetic polynucleotide
atgaaaatcgaagaaggtaaactggtaatctggattaacggcgataaaggctataacggtctcgctgaagtcggtaagaaattcgagaaagataccggaattaaagtcaccgttgagcatccggataaactggaagagaaattcccacaggttgcggcaactggcgatggccctgacattatcttctgggcacacgaccgctttggtggctacgctcaatctggcctgttggctgaaatcaccccggacaaagcgttccaggacaagctgtatccgtttacctgggatgccgtacgttacaacggcaagctgattgcttacccgatcgctgttgaagcgttatcgctgatttataacaaagatctgctgccgaacccgccaaaaacctgggaagagatcccggcgctggataaagaactgaaagcgaaaggtaagagcgcgctgatgttcaacctgcaagaaccgtacttcacctggccgctgattgctgctgacgggggttatgcgttcaagtatgaaaacggcaagtacgacattaaagacgtgggcgtggataacgctggcgcgaaagcgggtctgaccttcctggttgacctgattaaaaacaaacacatgaatgcagacaccgattactccatcgcagaagctgcctttaataaaggcgaaacagcgatgaccatcaacggcccgtgggcatggtccaacatcgacaccagcaaagtgaattatggtgtaacggtactgccgaccttcaagggtcaaccatccaaaccgttcgttggcgtgctgagcgcaggtattaacgccgccagtccgaacaaagagctggcgaaagagttcctcgaaaactatctgctgactgatgaaggtctggaagcggttaataaagacaaaccgctgggtgccgtagcgctgaagtcttacgaggaagagttggcgaaagatccacgtattgccgccaccatggaaaacgcccagaaaggtgaaatcatgccgaacatcccgcagatgtccgctttctggtatgccgtgcgtactgcggtgatcaacgccgccagcggtcgtcagactgtcgatgaagccctgaaagacgcgcagactggtggttctggtgagaacctgtactttcaaagctcagataatgggcctcaaaaccagcgcaacgctccacgtataaccttcggtggcccgtctgactccacaggcagcaaccagaatggtgagcgtagtggagccaggtctaagcagcgccgtccccagggtctgccgaacaacacggcgagctggtttactgcgcttacccaacacggtaaagaagacttaaaattcccgcgtggccagggcgtcccgatcaacactaactcttccccggatgatcagattggttattaccgcagagcaactcgtcggattcgcggcggcgacggtaaaatgaaagatttgtctccgcgttggtacttttactatctcggcaccggtccggaagctggactgccctacggggcaaacaaggacgggatcatttgggtggctaccgaaggtgccctgaatactccaaaagatcatatcggcacccgtaaccctgctaataacgctgcgatcgttctgcaactgcctcagggtacaactctgccaaaaggcttctatgcagaagggtcgcgtggtggcagccaggcgagtagccgtagcagctcccgctctcgcaactcgtcccgtaactccactccgggctcttctcgcggcacgtccccggctcgtatggcaggtaacggtggtgacgctgctctggcgctgctactgctggacaggctgaaccagctggagtcgaagatgagtggtaaaggccaacagcagcagggccagaccgttaccaaaaagagcgcagctgaagcatctaaaaaaccgcgacagaaacgtaccgcgactaaagggtacaatgtaacacaggccttcggtcgtcgaggtccggagcaaactcaaggaaactttggcgatcaggatttaatccgcgaagggaccgactacaaacactggccgcaaattgcccagttcgccccatccgctagtgcattcttcggtatgagccgcatctcgacggaagaaacgccaagtggtacgtggctgacctacaccggtgctatcaagcttgataaaaaggacccgaactttaaagaccaggttattctgcttaacaaacatattgatgcctataaaactttcccgccgaccgaacccaaaaaggacaaaaagaaaaaagctgatgaaacccaggctctaccgcagcgtcagaaaaaacagcaaactgtgactctgctgccagctgcggacctggatgatttttccaagcagctgcaacagtctatgagctctgcggactctacgcaggctggtggttctggtcaccatcatcaccatcattaa

SEQ ID NO: 3161 - DNA, 2421 bp, Artificial Sequence
  Description of Artificial Sequence: Synthetic polynucleotide
atgaaaatcgaagaaggtaaactggtaatctggattaacggcgataaaggctataacggtctcgctgaagtcggtaagaaattcgagaaagataccggaattaaagtcaccgttgagcatccggataaactggaagagaaattcccacaggttgcggcaactggcgatggccctgacattatcttctgggcacacgaccgctttggtggctacgctcaatctggcctgttggctgaaatcaccccggacaaagcgttccaggacaagctgtatccgtttacctgggatgccgtacgttacaacggcaagctgattgcttacccgatcgctgttgaagcgttatcgctgatttataacaaagatctgctgccgaacccgccaaaaacctgggaagagatcccggcgctggataaagaactgaaagcgaaaggtaagagcgcgctgatgttcaacctgcaagaaccgtacttcacctggccgctgattgctgctgacgggggttatgcgttcaagtatgaaaacggcaagtacgacattaaagacgtgggcgtggataacgctggcgcgaaagcgggtctgaccttcctggttgacctgattaaaaacaaacacatgaatgcagacaccgattactccatcgcagaagctgcctttaataaaggcgaaacagcgatgaccatcaacggcccgtgggcatggtccaacatcgacaccagcaaagtgaattatggtgtaacggtactgccgaccttcaagggtcaaccatccaaaccgttcgttggcgtgctgagcgcaggtattaacgccgccagtccgaacaaagagctggcgaaagagttcctcgaaaactatctgctgactgatgaaggtctggaagcggttaataaagacaaaccgctgggtgccgtagcgctgaagtcttacgaggaagagttggcgaaagatccacgtattgccgccaccatggaaaacgcccagaaaggtgaaatcatgccgaacatcccgcagatgtccgctttctggtatgccgtgcgtactgcggtgatcaacgccgccagcggtcgtcagactgtcgatgaagccctgaaagacgcgcagactggtggttctggtgagaacctgtactttcaaagctcagataatgggcctcaaaaccagcgcaacgctccacgtataaccttcggtggcccgtctgactccacaggcagcaaccagaatggtgagcgtagtggagccaggtctaagcagcgccgtccccagggtctgccgaacaacacggcgagctggtttactgcgcttacccaacacggtaaagaagacttaaaattcccgaaaggccagggcgtcccgatcaacactaactctaagccggatgatcagattggttattggcgcagagaaactcgtcggtaccgcggcggcgacggtcaaatgaaagatttggatccgcgttggtacttttactatctcggcaccggtccggaagctggactgccctacggggcaaacaaggacgggatcatttgggtggctaccgaaggtgccctgaatactccaaaagatcatatcggcacccgtaaccctgctaataacgctgcgatcgttctgcaactgcctcagggtacaactctgccaaaaggcttctatgcagaagggtcgcgtggtggcagccaggcgagtagccgtagcagctcccgctctcgcaactcgtcccgtaactccactccgggctcttctcgcggcacgtccccggctcgtatggcaggtaacggtggtgacgctgctctggcgctgctactgctggacaggctgaaccagctggagtcgaagatgagtggtaaaggccaacagcagcagggccagaccgttaccaaaaagagcgcagctgaagcatctaaaaaaccgcgacagaaacgtaccgcgactaaagcgtacaatgtaacacaggccttcggtcgtcgaggtccggagcaaactcaaggaaactttggcgatcaggaattaatccgccaggggaccgactacaaacactggccgcaaattgcccagttcgccccatccgctagtgcattcttcggtatgagccgcatcggcatggaagtaacgccaagtggtacgtggctgacctacaccggtgctatcaagcttgatgacaaggacccgaactttaaagaccaggttattctgcttaacaaacatattgatgcctataaaactttcccgccgaccgaacccaaaaaggacaaaaagaaaaaagctgatgaaacccaggctctaccgcagcgtcagaaaaaacagcaaactgtgactctgctgccagctgcggacctggatgatttttccaagcagctgcaacagtctatgagctctgcggactctacgcaggctggtggttctggtcaccatcatcaccatcattaa

SEQ ID NO: 3162 - DNA, 2421 bp, Artificial Sequence
  Description of Artificial Sequence: Synthetic polynucleotide
atgaaaatcgaagaaggtaaactggtaatctggattaacggcgataaaggctataacggtctcgctgaagtcggtaagaaattcgagaaagataccggaattaaagtcaccgttgagcatccggataaactggaagagaaattcccacaggttgcggcaactggcgatggccctgacattatcttctgggcacacgaccgctttggtggctacgctcaatctggcctgttggctgaaatcaccccggacaaagcgttccaggacaagctgtatccgtttacctgggatgccgtacgttacaacggcaagctgattgcttacccgatcgctgttgaagcgttatcgctgatttataacaaagatctgctgccgaacccgccaaaaacctgggaagagatcccggcgctggataaagaactgaaagcgaaaggtaagagcgcgctgatgttcaacctgcaagaaccgtacttcacctggccgctgattgctgctgacgggggttatgcgttcaagtatgaaaacggcaagtacgacattaaagacgtgggcgtggataacgctggcgcgaaagcgggtctgaccttcctggttgacctgattaaaaacaaacacatgaatgcagacaccgattactccatcgcagaagctgcctttaataaaggcgaaacagcgatgaccatcaacggcccgtgggcatggtccaacatcgacaccagcaaagtgaattatggtgtaacggtactgccgaccttcaagggtcaaccatccaaaccgttcgttggcgtgctgagcgcaggtattaacgccgccagtccgaacaaagagctggcgaaagagttcctcgaaaactatctgctgactgatgaaggtctggaagcggttaataaagacaaaccgctgggtgccgtagcgctgaagtcttacgaggaagagttggcgaaagatccacgtattgccgccaccatggaaaacgcccagaaaggtgaaatcatgccgaacatcccgcagatgtccgctttctggtatgccgtgcgtactgcggtgatcaacgccgccagcggtcgtcagactgtcgatgaagccctgaaagacgcgcagactggtggttctggtgagaacctgtactttcaaagctcagataatgggcctcaaaaccagcgcaacgctccacgtataaccttcggtggcccgtctgactccacaggcagcaaccagaatggtgagcgtagtggagccaggtctaagcagcgccgtccccagggtctgccgaacaacacggcgagctggtttactgcgcttacccaacacggtaaagaagacttaaaattcccgcgtggccagggcgtcccgatcaacactaactcttccccggatgatcagattggttattaccgcagagcaactcgtcggattcgcggcggcgacggtaaaatgaaagatttgtctccgcgttggtacttttactatctcggcaccggtccggaagctggactgccctacggggcaaacaaggacgggatcatttgggtggctaccgaaggtgccctgaatactccaaaagatcatatcggcacccgtaaccctgctaataacgctgcgatcgttctgcaactgcctcagggtacaactctgccaaaaggcttctatgcagaagggtcgcgtggtggcagccaggcgagtagccgtagcagctcccgctctcgcaactcgtcccgtaactccactccgggctcttctcgcggcacgtccccggctcgtatggcaggtaacggtggtgacgctgctctggcgctgctactgctggacaggctgaaccagctggagtcgaagatgagtggtaaaggccaacagcagcagggccagaccgttaccaaaaagagcgcagctgaagcatctaaaaaaccgcgacagaaacgtaccgcgactaaaggatacaatgtaacacaggccttcggtcgtcgaggtccggagcaaactcaaggaaactttggcgatcaggatttaatcaaattagggaccgactacaaacactggccgcaaattgcccagttcgccccatccgctagtgcattcttcggtatgagccgcatcagcacggaagaaacgccaagtggtacgtggctgacctacaccggtgctatcaagcttgataaaaaggacccgaactttaaagaccaggttattctgcttaacaaacatattgatgcctataaaactttcccgccgaccgaacccaaaaaggacaaaaagaaaaaagctgatgaaacccaggctctaccgcagcgtcagaaaaaacagcaaactgtgactctgctgccagctgcggacctggatgatttttccaagcagctgcaacagtctatgagctctgcggactctacgcaggctggtggttctggtcaccatcatcaccatcattaa

SEQ ID NO: 3163 - DNA, 2421 bp, Artificial Sequence
  Description of Artificial Sequence: Synthetic polynucleotide
atgaaaatcgaagaaggtaaactggtaatctggattaacggcgataaaggctataacggtctcgctgaagtcggtaagaaattcgagaaagataccggaattaaagtcaccgttgagcatccggataaactggaagagaaattcccacaggttgcggcaactggcgatggccctgacattatcttctgggcacacgaccgctttggtggctacgctcaatctggcctgttggctgaaatcaccccggacaaagcgttccaggacaagctgtatccgtttacctgggatgccgtacgttacaacggcaagctgattgcttacccgatcgctgttgaagcgttatcgctgatttataacaaagatctgctgccgaacccgccaaaaacctgggaagagatcccggcgctggataaagaactgaaagcgaaaggtaagagcgcgctgatgttcaacctgcaagaaccgtacttcacctggccgctgattgctgctgacgggggttatgcgttcaagtatgaaaacggcaagtacgacattaaagacgtgggcgtggataacgctggcgcgaaagcgggtctgaccttcctggttgacctgattaaaaacaaacacatgaatgcagacaccgattactccatcgcagaagctgcctttaataaaggcgaaacagcgatgaccatcaacggcccgtgggcatggtccaacatcgacaccagcaaagtgaattatggtgtaacggtactgccgaccttcaagggtcaaccatccaaaccgttcgttggcgtgctgagcgcaggtattaacgccgccagtccgaacaaagagctggcgaaagagttcctcgaaaactatctgctgactgatgaaggtctggaagcggttaataaagacaaaccgctgggtgccgtagcgctgaagtcttacgaggaagagttggcgaaagatccacgtattgccgccaccatggaaaacgcccagaaaggtgaaatcatgccgaacatcccgcagatgtccgctttctggtatgccgtgcgtactgcggtgatcaacgccgccagcggtcgtcagactgtcgatgaagccctgaaagacgcgcagactggtggttctggtgagaacctgtactttcaaagctcagataatgggcctcaaaaccagcgcaacgctccacgtataaccttcggtggcccgtctgactccacaggcagcaaccagaatggtgagcgtagtggagccaggtctaagcagcgccgtccccagggtctgccgaacaacacggcgagctggtttactgcgcttacccaacacggtaaagaagacttaaaattcccgcgtggccagggcgtcccgatcaacactaactcttccccggatgatcagattggttattaccgcagagcaactcgtcggattcgcggcggcgacggtaaaatgaaagatttgtctccgcgttggtacttttactatctcggcaccggtccggaagctggactgccctacggggcaaacaaggacgggatcatttgggtggctaccgaaggtgccatgaatactccaaaagatcatatcggcacccgtaaccctgctaataacgctgcgatcgttctgcaactgcctcagggtacaactctgccaaaaggcttctatgcagaagggtcgcgtggtggcagccaggcgagtagccgtagcagctcccgctctcgcaactcgtcccgtaactccactccgggctcttctcgcggcacgtccccggctcgtatggcaggtaacggtggtgacgctgctctggcgctgctactgctggacaggctgaaccagctggagtcgaagatgagtggtaaaggccaacagcagcagggccagaccgttaccaaaaagagcgcagctgaagcatctaaaaaaccgcgacagaaacgtaccgcgactaaagcgtacaatgtaacacaggccttcggtcgtcgaggtccggagcaaactcaaggaaactttggcgatcaggaattaatccgccaggggaccgactacaaacactggccgcaaattgcccagttcgccccatccgctagtgcattcttcggtatgagccgcatcggcatggaagtaacgccaagtggtacgtggctgacctacaccggtgctatcaagcttgatgacaaggacccgaactttaaagaccaggttattctgcttaacaaacatattgatgcctataaaactttcccgccgaccgaacccaaaaaggacaaaaagaaaaaagctgatgaaacccaggctctaccgcagcgtcagaaaaaacagcaaactgtgactctgctgccagctgcggacctggatgatttttccaagcagctgcaacagtctatgagctctgcggactctacgcaggctggtggttctggtcaccatcatcaccatcattaa

SEQ ID NO: 3164 - DNA, 2421 bp, Artificial Sequence
  Description of Artificial Sequence: Synthetic polynucleotide
atgaaaatcgaagaaggtaaactggtaatctggattaacggcgataaaggctataacggtctcgctgaagtcggtaagaaattcgagaaagataccggaattaaagtcaccgttgagcatccggataaactggaagagaaattcccacaggttgcggcaactggcgatggccctgacattatcttctgggcacacgaccgctttggtggctacgctcaatctggcctgttggctgaaatcaccccggacaaagcgttccaggacaagctgtatccgtttacctgggatgccgtacgttacaacggcaagctgattgcttacccgatcgctgttgaagcgttatcgctgatttataacaaagatctgctgccgaacccgccaaaaacctgggaagagatcccggcgctggataaagaactgaaagcgaaaggtaagagcgcgctgatgttcaacctgcaagaaccgtacttcacctggccgctgattgctgctgacgggggttatgcgttcaagtatgaaaacggcaagtacgacattaaagacgtgggcgtggataacgctggcgcgaaagcgggtctgaccttcctggttgacctgattaaaaacaaacacatgaatgcagacaccgattactccatcgcagaagctgcctttaataaaggcgaaacagcgatgaccatcaacggcccgtgggcatggtccaacatcgacaccagcaaagtgaattatggtgtaacggtactgccgaccttcaagggtcaaccatccaaaccgttcgttggcgtgctgagcgcaggtattaacgccgccagtccgaacaaagagctggcgaaagagttcctcgaaaactatctgctgactgatgaaggtctggaagcggttaataaagacaaaccgctgggtgccgtagcgctgaagtcttacgaggaagagttggcgaaagatccacgtattgccgccaccatggaaaacgcccagaaaggtgaaatcatgccgaacatcccgcagatgtccgctttctggtatgccgtgcgtactgcggtgatcaacgccgccagcggtcgtcagactgtcgatgaagccctgaaagacgcgcagactggtggttctggtgagaacctgtactttcaaagctcagataatgggcctcaaaaccagcgcaacgctccacgtataaccttcggtggcccgtctgactccacaggcagcaaccagaatggtgagcgtagtggagccaggtctaagcagcgccgtccccagggtctgccgaacaacacggcgagctggtttactgcgcttacccaacacggtaaagaagacttaaaattcccgcgtggccagggcgtcccgatcaacactaactcttccccggatgatcagattggttattaccgcagagcaactcgtcggattcgcggcggcgacggtaaaatgaaagatttgtctccgcgttggtacttttactatctcggcaccggtccggaagctggactgccctacggggcaaacaaggacgggatcatttgggtggctaccgaaggtgccctgaatactccaaaagatcatatcggcacccgtaaccctgctaataacgctgcgatcgttctgcaactgcctcagggtacaactctgccaaaaggcttctatgcagaagggtcgcgtggtggcagccaggcgagtagccgtagcagctcccgctctcgcaactcgtcccgtaactccactccgggctcttctcgcggcacgtccccggctcgtatggcaggtaacggtggtgacgctgctctggcgctgctactgctggacaggctgaaccagctggagtcgaagatgagtggtaaaggccaacagcagcagggccagaccgttaccaaaaagagcgcagctgaagcatctaaaaaaccgcgacagaaacgtaccgcgactaaagcgtacaatgtaacacaggccttcggtcgtcgaggtccggagcaaactcaaggaaactttggcgatcaggaattaatccgccagggggtggactacaaacactggccgcaaattgcccagttcgccccatccgctagtgcattcttcggtatgagccgcatcggcatggaagtaacgccaagtggtacgtggctgacctacaccggtgctatcaagcttgatgacaaggacccgaactttaaagaccaggttattctgcttaacaaacatattgatgcctataaaactttcccgccgaccgaacccaaaaaggacaaaaagaaaaaagctgatgaaacccaggctctaccgcagcgtcagaaaaaacagcaaactgtgactctgctgccagctgcggacctggatgatttttccaagcagctgcaacagtctatgagctctgcggactctacgcaggctggtggttctggtcaccatcatcaccatcattaa

SEQ ID NO: 3165 - DNA, 2421 bp, Artificial Sequence
  Description of Artificial Sequence: Synthetic polynucleotide
atgaaaatcgaagaaggtaaactggtaatctggattaacggcgataaaggctataacggtctcgctgaagtcggtaagaaattcgagaaagataccggaattaaagtcaccgttgagcatccggataaactggaagagaaattcccacaggttgcggcaactggcgatggccctgacattatcttctgggcacacgaccgctttggtggctacgctcaatctggcctgttggctgaaatcaccccggacaaagcgttccaggacaagctgtatccgtttacctgggatgccgtacgttacaacggcaagctgattgcttacccgatcgctgttgaagcgttatcgctgatttataacaaagatctgctgccgaacccgccaaaaacctgggaagagatcccggcgctggataaagaactgaaagcgaaaggtaagagcgcgctgatgttcaacctgcaagaaccgtacttcacctggccgctgattgctgctgacgggggttatgcgttcaagtatgaaaacggcaagtacgacattaaagacgtgggcgtggataacgctggcgcgaaagcgggtctgaccttcctggttgacctgattaaaaacaaacacatgaatgcagacaccgattactccatcgcagaagctgcctttaataaaggcgaaacagcgatgaccatcaacggcccgtgggcatggtccaacatcgacaccagcaaagtgaattatggtgtaacggtactgccgaccttcaagggtcaaccatccaaaccgttcgttggcgtgctgagcgcaggtattaacgccgccagtccgaacaaagagctggcgaaagagttcctcgaaaactatctgctgactgatgaaggtctggaagcggttaataaagacaaaccgctgggtgccgtagcgctgaagtcttacgaggaagagttggcgaaagatccacgtattgccgccaccatggaaaacgcccagaaaggtgaaatcatgccgaacatcccgcagatgtccgctttctggtatgccgtgcgtactgcggtgatcaacgccgccagcggtcgtcagactgtcgatgaagccctgaaagacgcgcagactggtggttctggtgagaacctgtactttcaaagctcagataatgggcctcaaaaccagcgcaacgctccacgtataaccttcggtggcccgtctgactccacaggcagcaaccagaatggtgagcgtagtggagccaggtctaagcagcgccgtccccagggtctgccgaacaacacggcgagctggtttactgcgcttacccaacacggtaaagaagacttaaaattcccgcgtggccagggcgtcccgatcaacactaactcttccccggatgatcagattggttattaccgcagagcaactcgtcggattcgcggcggcgacggtaaaatgaaagatttgtctccgcgttggtacttttactatctcggcaccggtccggaagctggactgccctacggggcaaacaaggacgggatcatttgggtggctggagaaggtgccctgaatactccaaaagatcatatcggcacccgtaaccctgctaataacgctgcgatcgttctgcaactgcctcagggtacaactctgccaaaaggcttctatgcagaagggtcgcgtggtggcagccaggcgagtagccgtagcagctcccgctctcgcaactcgtcccgtaactccactccgggctcttctcgcggcacgtccccggctcgtatggcaggtaacggtggtgacgctgctctggcgctgctactgctggacaggctgaaccagctggagtcgaagatgagtggtaaaggccaacagcagcagggccagaccgttaccaaaaagagcgcagctgaagcatctaaaaaaccgcgacagaaacgtaccgcgactaaagcgtacaatgtaacacaggccttcggtcgtcgaggtccggagcaaactcaaggaaactttggcgatcaggaattaatccgccaggggaccgactacaaacactggccgcaaattgcccagttcgccccatccgctagtgcattcttcggtatgagccgcatcggcatggaagtaacgccaagtggtacgtggctgacctacaccggtgctatcaagcttgatgacaaggacccgaactttaaagaccaggttattctgcttaacaaacatattgatgcctataaaactttcccgccgaccgaacccaaaaaggacaaaaagaaaaaagctgatgaaacccaggctctaccgcagcgtcagaaaaaacagcaaactgtgactctgctgccagctgcggacctggatgatttttccaagcagctgcaacagtctatgagctctgcggactctacgcaggctggtggttctggtcaccatcatcaccatcattaa

SEQ ID NO: 3166 - DNA, 2421 bp, Artificial Sequence
  Description of Artificial Sequence: Synthetic polynucleotide
atgaaaatcgaagaaggtaaactggtaatctggattaacggcgataaaggctataacggtctcgctgaagtcggtaagaaattcgagaaagataccggaattaaagtcaccgttgagcatccggataaactggaagagaaattcccacaggttgcggcaactggcgatggccctgacattatcttctgggcacacgaccgctttggtggctacgctcaatctggcctgttggctgaaatcaccccggacaaagcgttccaggacaagctgtatccgtttacctgggatgccgtacgttacaacggcaagctgattgcttacccgatcgctgttgaagcgttatcgctgatttataacaaagatctgctgccgaacccgccaaaaacctgggaagagatcccggcgctggataaagaactgaaagcgaaaggtaagagcgcgctgatgttcaacctgcaagaaccgtacttcacctggccgctgattgctgctgacgggggttatgcgttcaagtatgaaaacggcaagtacgacattaaagacgtgggcgtggataacgctggcgcgaaagcgggtctgaccttcctggttgacctgattaaaaacaaacacatgaatgcagacaccgattactccatcgcagaagctgcctttaataaaggcgaaacagcgatgaccatcaacggcccgtgggcatggtccaacatcgacaccagcaaagtgaattatggtgtaacggtactgccgaccttcaagggtcaaccatccaaaccgttcgttggcgtgctgagcgcaggtattaacgccgccagtccgaacaaagagctggcgaaagagttcctcgaaaactatctgctgactgatgaaggtctggaagcggttaataaagacaaaccgctgggtgccgtagcgctgaagtcttacgaggaagagttggcgaaagatccacgtattgccgccaccatggaaaacgcccagaaaggtgaaatcatgccgaacatcccgcagatgtccgctttctggtatgccgtgcgtactgcggtgatcaacgccgccagcggtcgtcagactgtcgatgaagccctgaaagacgcgcagactggtggttctggtgagaacctgtactttcaaagctcagataatgggcctcaaaaccagcgcaacgctccacgtataaccttcggtggcccgtctgactccacaggcagcaaccagaatggtgagcgtagtggagccaggtctaagcagcgccgtccccagggtctgccgaacaacacggcgagctggtttactgcgcttacccaacacggtaaagaagacttaaaattcccgcgtggccagggcgtcccgatcaacactaactcttccccggatgatcagattggttattaccgcagagcaactcgtcggattcgcggcggcgacggtaaaatgaaagatttgtctccgcgttggtacttttactatctcggcaccggtccggaagctggactgccctacggggcaaacaaggacgggatcatttgggtggctaccgaaggtgccctgaatactccaaaagatcatatcggcacccgtaaccctgctaataacgctgcgatcgttctgcaactgcctcagggtacaactctgccaaaaggcttctatgcagaagggtcgcgtggtggcagccaggcgagtagccgtagcagctcccgctctcgcaactcgtcccgtaactccactccgggctcttctcgcggcacgtccccggctcgtatggcaggtaacggtggtgacgctgctctggcgctgctactgctggacaggctgaaccagctggagtcgaagatgagtggtaaaggccaacagcagcagggccagaccgttaccaaaaagagcgcagctgaagcatctaaaaaaccgcgacagaaacgtaccgcgactaaagcgtacaatgtaacacaggccttcggtcgtcgaggtccggagcaaactcaaggaaactttggcgatcaggaattaatccgccaggggaccgactacaaaggatggccgcaaattgcccagttcgccccatccgctagtgcattcttcggtatgagccgcatcggcatggaagtaacgccaagtggtacgtggctgacctacaccggtgctatcaagcttgatgacaaggacccgaactttaaagaccaggttattctgcttaacaaacatattgatgcctataaaactttcccgccgaccgaacccaaaaaggacaaaaagaaaaaagctgatgaaacccaggctctaccgcagcgtcagaaaaaacagcaaactgtgactctgctgccagctgcggacctggatgatttttccaagcagctgcaacagtctatgagctctgcggactctacgcaggctggtggttctggtcaccatcatcaccatcattaa

SEQ ID NO: 3167 - DNA, 2421 bp, Artificial Sequence
  Description of Artificial Sequence: Synthetic polynucleotide
atgaaaatcgaagaaggtaaactggtaatctggattaacggcgataaaggctataacggtctcgctgaagtcggtaagaaattcgagaaagataccggaattaaagtcaccgttgagcatccggataaactggaagagaaattcccacaggttgcggcaactggcgatggccctgacattatcttctgggcacacgaccgctttggtggctacgctcaatctggcctgttggctgaaatcaccccggacaaagcgttccaggacaagctgtatccgtttacctgggatgccgtacgttacaacggcaagctgattgcttacccgatcgctgttgaagcgttatcgctgatttataacaaagatctgctgccgaacccgccaaaaacctgggaagagatcccggcgctggataaagaactgaaagcgaaaggtaagagcgcgctgatgttcaacctgcaagaaccgtacttcacctggccgctgattgctgctgacgggggttatgcgttcaagtatgaaaacggcaagtacgacattaaagacgtgggcgtggataacgctggcgcgaaagcgggtctgaccttcctggttgacctgattaaaaacaaacacatgaatgcagacaccgattactccatcgcagaagctgcctttaataaaggcgaaacagcgatgaccatcaacggcccgtgggcatggtccaacatcgacaccagcaaagtgaattatggtgtaacggtactgccgaccttcaagggtcaaccatccaaaccgttcgttggcgtgctgagcgcaggtattaacgccgccagtccgaacaaagagctggcgaaagagttcctcgaaaactatctgctgactgatgaaggtctggaagcggttaataaagacaaaccgctgggtgccgtagcgctgaagtcttacgaggaagagttggcgaaagatccacgtattgccgccaccatggaaaacgcccagaaaggtgaaatcatgccgaacatcccgcagatgtccgctttctggtatgccgtgcgtactgcggtgatcaacgccgccagcggtcgtcagactgtcgatgaagccctgaaagacgcgcagactggtggttctggtgagaacctgtactttcaaagctcagataatgggcctcaaaaccagcgcaacgctccacgtataaccttcggtggcccgtctgactccacaggcagcaaccagaatggtgagcgtagtggagccaggtctaagcagcgccgtccccagggtctgccgaacaacacggcgagctggtttactgcgcttacccaacacggtaaagaagacttaaaattcccgcgtggccagggcgtcccgatcaacactaactcttccccggatgatcagattggttattaccgcagagcaactcgtcggattcgcggcggcgacggtaaaatgaaagatttgtctccgcgttggtacttttactatctcggcaccggtccggaagctggactgccctacggggcaaacaaggacgggatcatttgggtggctaaagaaggtgccctgaatactccaaaagatcatatcggcacccgtaaccctgctaataacgctgcgatcgttctgcaactgcctcagggtacaactctgccaaaaggcttctatgcagaagggtcgcgtggtggcagccaggcgagtagccgtagcagctcccgctctcgcaactcgtcccgtaactccactccgggctcttctcgcggcacgtccccggctcgtatggcaggtaacggtggtgacgctgctctggcgctgctactgctggacaggctgaaccagctggagtcgaagatgagtggtaaaggccaacagcagcagggccagaccgttaccaaaaagagcgcagctgaagcatctaaaaaaccgcgacagaaacgtaccgcgactaaagcgtacaatgtaacacaggccttcggtcgtcgaggtccggagcaaactcaaggaaactttggcgatcaggaattaatccgccaggggaccgactacaaacactggccgcaaattgcccagttcgccccatccgctagtgcattcttcggtatgagccgcatcggcatggaagtaacgccaagtggtacgtggctgacctacaccggtgctatcaagcttgatgacaaggacccgaactttaaagaccaggttattctgcttaacaaacatattgatgcctataaaactttcccgccgaccgaacccaaaaaggacaaaaagaaaaaagctgatgaaacccaggctctaccgcagcgtcagaaaaaacagcaaactgtgactctgctgccagctgcggacctggatgatttttccaagcagctgcaacagtctatgagctctgcggactctacgcaggctggtggttctggtcaccatcatcaccatcattaa

SEQ ID NO: 3168 - DNA, 2421 bp, Artificial Sequence
  Description of Artificial Sequence: Synthetic polynucleotide
atgaaaatcgaagaaggtaaactggtaatctggattaacggcgataaaggctataacggtctcgctgaagtcggtaagaaattcgagaaagataccggaattaaagtcaccgttgagcatccggataaactggaagagaaattcccacaggttgcggcaactggcgatggccctgacattatcttctgggcacacgaccgctttggtggctacgctcaatctggcctgttggctgaaatcaccccggacaaagcgttccaggacaagctgtatccgtttacctgggatgccgtacgttacaacggcaagctgattgcttacccgatcgctgttgaagcgttatcgctgatttataacaaagatctgctgccgaacccgccaaaaacctgggaagagatcccggcgctggataaagaactgaaagcgaaaggtaagagcgcgctgatgttcaacctgcaagaaccgtacttcacctggccgctgattgctgctgacgggggttatgcgttcaagtatgaaaacggcaagtacgacattaaagacgtgggcgtggataacgctggcgcgaaagcgggtctgaccttcctggttgacctgattaaaaacaaacacatgaatgcagacaccgattactccatcgcagaagctgcctttaataaaggcgaaacagcgatgaccatcaacggcccgtgggcatggtccaacatcgacaccagcaaagtgaattatggtgtaacggtactgccgaccttcaagggtcaaccatccaaaccgttcgttggcgtgctgagcgcaggtattaacgccgccagtccgaacaaagagctggcgaaagagttcctcgaaaactatctgctgactgatgaaggtctggaagcggttaataaagacaaaccgctgggtgccgtagcgctgaagtcttacgaggaagagttggcgaaagatccacgtattgccgccaccatggaaaacgcccagaaaggtgaaatcatgccgaacatcccgcagatgtccgctttctggtatgccgtgcgtactgcggtgatcaacgccgccagcggtcgtcagactgtcgatgaagccctgaaagacgcgcagactggtggttctggtgagaacctgtactttcaaagctcagataatgggcctcaaaaccagcgcaacgctccacgtataaccttcggtggcccgtctgactccacaggcagcaaccagaatggtgagcgtagtggagccaggtctaagcagcgccgtccccagggtctgccgaacaacacggcgagctggtttactgcgcttacccaacacggtaaagaagacttaaaattcccgcgtggccagggcgtcccgatcaacactaactcttccccggatgatcagattggttattaccgcagagcaactcgtcggattcgcggcggcgacggtaaaatgaaagatttgtctccgcgttggtacttttactatctcggcaccggtccggaagctggactgccctacggggcaaacaaggacgggatcatttgggtggctaccgaaggtgccctgaatactccaaaagatcatatcggcacccgtaaccctgctaataacgctgcgacggttctgcaactgcctcagggtacaactctgccaaaaggcttctatgcagaagggtcgcgtggtggcagccaggcgagtagccgtagcagctcccgctctcgcaactcgtcccgtaactccactccgggctcttctcgcggcacgtccccggctcgtatggcaggtaacggtggtgacgctgctctggcgctgctactgctggacaggctgaaccagctggagtcgaagatgagtggtaaaggccaacagcagcagggccagaccgttaccaaaaagagcgcagctgaagcatctaaaaaaccgcgacagaaacgtaccgcgactaaagcgtacaatgtaacacaggccttcggtcgtcgaggtccggagcaaactcaaggaaactttggcgatcaggaattaatccgccaggggaccgactacaaacactggccgcaaattgcccagttcgccccatccgctagtgcattcttcggtatgagccgcatcggcatggaagtaacgccaagtggtacgtggctgacctacaccggtgctatcaagcttgatgacaaggacccgaactttaaagaccaggttattctgcttaacaaacatattgatgcctataaaactttcccgccgaccgaacccaaaaaggacaaaaagaaaaaagctgatgaaacccaggctctaccgcagcgtcagaaaaaacagcaaactgtgactctgctgccagctgcggacctggatgatttttccaagcagctgcaacagtctatgagctctgcggactctacgcaggctggtggttctggtcaccatcatcaccatcattaa

SEQ ID NO: 3169 - DNA, 2421 bp, Artificial Sequence
  Description of Artificial Sequence: Synthetic polynucleotide
atgaaaatcgaagaaggtaaactggtaatctggattaacggcgataaaggctataacggtctcgctgaagtcggtaagaaattcgagaaagataccggaattaaagtcaccgttgagcatccggataaactggaagagaaattcccacaggttgcggcaactggcgatggccctgacattatcttctgggcacacgaccgctttggtggctacgctcaatctggcctgttggctgaaatcaccccggacaaagcgttccaggacaagctgtatccgtttacctgggatgccgtacgttacaacggcaagctgattgcttacccgatcgctgttgaagcgttatcgctgatttataacaaagatctgctgccgaacccgccaaaaacctgggaagagatcccggcgctggataaagaactgaaagcgaaaggtaagagcgcgctgatgttcaacctgcaagaaccgtacttcacctggccgctgattgctgctgacgggggttatgcgttcaagtatgaaaacggcaagtacgacattaaagacgtgggcgtggataacgctggcgcgaaagcgggtctgaccttcctggttgacctgattaaaaacaaacacatgaatgcagacaccgattactccatcgcagaagctgcctttaataaaggcgaaacagcgatgaccatcaacggcccgtgggcatggtccaacatcgacaccagcaaagtgaattatggtgtaacggtactgccgaccttcaagggtcaaccatccaaaccgttcgttggcgtgctgagcgcaggtattaacgccgccagtccgaacaaagagctggcgaaagagttcctcgaaaactatctgctgactgatgaaggtctggaagcggttaataaagacaaaccgctgggtgccgtagcgctgaagtcttacgaggaagagttggcgaaagatccacgtattgccgccaccatggaaaacgcccagaaaggtgaaatcatgccgaacatcccgcagatgtccgctttctggtatgccgtgcgtactgcggtgatcaacgccgccagcggtcgtcagactgtcgatgaagccctgaaagacgcgcagactggtggttctggtgagaacctgtactttcaaagctcagataatgggcctcaaaaccagcgcaacgctccacgtataaccttcggtggcccgtctgactccacaggcagcaaccagaatggtgagcgtagtggagccaggtctaagcagcgccgtccccagggtctgccgaacaacacggcgagctggtttactgcgcttacccaacacggtaaagaagacttaaaattcccgcgtggccagggcgtcccgatcaacactaactcttccccggatgatcagattggttattaccgcagagcaactcgtcggattcgcggcggcgacggtaaaatgaaagatttgtctccgcgttggtacttttactatctcggcaccggtccggaagctggactgccctacggggcaaacaaggacgggatcatttgggtggctaccgaaggtgccctgaatactccaaaagatcatatcggcacccgtaaccctgctaataacgctgcgatcgttctgcaactgcctgagggtacaactctgccaaaaggcttctatgcagaagggtcgcgtggtggcagccaggcgagtagccgtagcagctcccgctctcgcaactcgtcccgtaactccactccgggctcttctcgcggcacgtccccggctcgtatggcaggtaacggtggtgacgctgctctggcgctgctactgctggacaggctgaaccagctggagtcgaagatgagtggtaaaggccaacagcagcagggccagaccgttaccaaaaagagcgcagctgaagcatctaaaaaaccgcgacagaaacgtaccgcgactaaagcgtacaatgtaacacaggccttcggtcgtcgaggtccggagcaaactcaaggaaactttggcgatcaggaattaatccgccaggggaccgactacaaacactggccgcaaattgcccagttcgccccatccgctagtgcattcttcggtatgagccgcatcggcatggaagtaacgccaagtggtacgtggctgacctacaccggtgctatcaagcttgatgacaaggacccgaactttaaagaccaggttattctgcttaacaaacatattgatgcctataaaactttcccgccgaccgaacccaaaaaggacaaaaagaaaaaagctgatgaaacccaggctctaccgcagcgtcagaaaaaacagcaaactgtgactctgctgccagctgcggacctggatgatttttccaagcagctgcaacagtctatgagctctgcggactctacgcaggctggtggttctggtcaccatcatcaccatcattaa

SEQ ID NO: 3170 - DNA, 2421 bp, Artificial Sequence
  Description of Artificial Sequence: Synthetic polynucleotide
atgaaaatcgaagaaggtaaactggtaatctggattaacggcgataaaggctataacggtctcgctgaagtcggtaagaaattcgagaaagataccggaattaaagtcaccgttgagcatccggataaactggaagagaaattcccacaggttgcggcaactggcgatggccctgacattatcttctgggcacacgaccgctttggtggctacgctcaatctggcctgttggctgaaatcaccccggacaaagcgttccaggacaagctgtatccgtttacctgggatgccgtacgttacaacggcaagctgattgcttacccgatcgctgttgaagcgttatcgctgatttataacaaagatctgctgccgaacccgccaaaaacctgggaagagatcccggcgctggataaagaactgaaagcgaaaggtaagagcgcgctgatgttcaacctgcaagaaccgtacttcacctggccgctgattgctgctgacgggggttatgcgttcaagtatgaaaacggcaagtacgacattaaagacgtgggcgtggataacgctggcgcgaaagcgggtctgaccttcctggttgacctgattaaaaacaaacacatgaatgcagacaccgattactccatcgcagaagctgcctttaataaaggcgaaacagcgatgaccatcaacggcccgtgggcatggtccaacatcgacaccagcaaagtgaattatggtgtaacggtactgccgaccttcaagggtcaaccatccaaaccgttcgttggcgtgctgagcgcaggtattaacgccgccagtccgaacaaagagctggcgaaagagttcctcgaaaactatctgctgactgatgaaggtctggaagcggttaataaagacaaaccgctgggtgccgtagcgctgaagtcttacgaggaagagttggcgaaagatccacgtattgccgccaccatggaaaacgcccagaaaggtgaaatcatgccgaacatcccgcagatgtccgctttctggtatgccgtgcgtactgcggtgatcaacgccgccagcggtcgtcagactgtcgatgaagccctgaaagacgcgcagactggtggttctggtgagaacctgtactttcaaagctcagataatgggcctcaaaaccagcgcaacgctccacgtataaccttcggtggcccgtctgactccacaggcagcaaccagaatggtgagcgtagtggagccaggtctaagcagcgccgtccccagggtctgccgaacaacacggcgagctggtttactgcgcttacccaacacggtaaagaagacttaaaattcccgcgtggccagggcgtcccgatcaacactaactcttccccggatgatcagattggttattaccgcagactgactcgtcggattcgcggcggcgacggtaaaatgaaagatttgtctccgcgttggtacttttactatctcggcaccggtccggaagctggactgccctacggggcaaacaaggacgggatcatttgggtggctaccgaaggtgccctgaatactccaaaagatcatatcggcacccgtaaccctgctaataacgctgcgatcgttctgcaactgcctcagggtacaactctgccaaaaggcttctatgcagaagggtcgcgtggtggcagccaggcgagtagccgtagcagctcccgctctcgcaactcgtcccgtaactccactccgggctcttctcgcggcacgtccccggctcgtatggcaggtaacggtggtgacgctgctctggcgctgctactgctggacaggctgaaccagctggagtcgaagatgagtggtaaaggccaacagcagcagggccagaccgttaccaaaaagagcgcagctgaagcatctaaaaaaccgcgacagaaacgtaccgcgactaaagcgtacaatgtaacacaggccttcggtcgtcgaggtccggagcaaactcaaggaaactttggcgatcaggaattaatccgccaggggaccgactacaaacactggccgcaaattgcccagttcgccccatccgctagtgcattcttcggtatgagccgcatcggcatggaagtaacgccaagtggtacgtggctgacctacaccggtgctatcaagcttgatgacaaggacccgaactttaaagaccaggttattctgcttaacaaacatattgatgcctataaaactttcccgccgaccgaacccaaaaaggacaaaaagaaaaaagctgatgaaacccaggctctaccgcagcgtcagaaaaaacagcaaactgtgactctgctgccagctgcggacctggatgatttttccaagcagctgcaacagtctatgagctctgcggactctacgcaggctggtggttctggtcaccatcatcaccatcattaa

SEQ ID NO: 3171 - DNA, 2421 bp, Artificial Sequence
  Description of Artificial Sequence: Synthetic polynucleotide
atgaaaatcgaagaaggtaaactggtaatctggattaacggcgataaaggctataacggtctcgctgaagtcggtaagaaattcgagaaagataccggaattaaagtcaccgttgagcatccggataaactggaagagaaattcccacaggttgcggcaactggcgatggccctgacattatcttctgggcacacgaccgctttggtggctacgctcaatctggcctgttggctgaaatcaccccggacaaagcgttccaggacaagctgtatccgtttacctgggatgccgtacgttacaacggcaagctgattgcttacccgatcgctgttgaagcgttatcgctgatttataacaaagatctgctgccgaacccgccaaaaacctgggaagagatcccggcgctggataaagaactgaaagcgaaaggtaagagcgcgctgatgttcaacctgcaagaaccgtacttcacctggccgctgattgctgctgacgggggttatgcgttcaagtatgaaaacggcaagtacgacattaaagacgtgggcgtggataacgctggcgcgaaagcgggtctgaccttcctggttgacctgattaaaaacaaacacatgaatgcagacaccgattactccatcgcagaagctgcctttaataaaggcgaaacagcgatgaccatcaacggcccgtgggcatggtccaacatcgacaccagcaaagtgaattatggtgtaacggtactgccgaccttcaagggtcaaccatccaaaccgttcgttggcgtgctgagcgcaggtattaacgccgccagtccgaacaaagagctggcgaaagagttcctcgaaaactatctgctgactgatgaaggtctggaagcggttaataaagacaaaccgctgggtgccgtagcgctgaagtcttacgaggaagagttggcgaaagatccacgtattgccgccaccatggaaaacgcccagaaaggtgaaatcatgccgaacatcccgcagatgtccgctttctggtatgccgtgcgtactgcggtgatcaacgccgccagcggtcgtcagactgtcgatgaagccctgaaagacgcgcagactggtggttctggtgagaacctgtactttcaaagctcagataatgggcctcaaaaccagcgcaacgctccacgtataaccttcggtggcccgtctgactccacaggcagcaaccagaatggtgagcgtagtggagccaggtctaagcagcgccgtccccagggtctgccgaacaacacggcgagctggtttactgcgcttacccaacacggtaaagaagacttaaaattcccgcgtggccagggcgtcccgatcaacactaactcttccccggatgatcagattggttattaccgcagagcaactcgtcggattcgcggcggcgacggtaaaatgaaagatttgtctccgcgttggtacttttactatctcggcaccggtccggaagctggactgccctacggggcaaacaaggacgggatcatttgggtggctaccgaaggtgccctgaatactccaaaagatcatatcggcacccgtaaccctgctaataacgctgcgatcgttctgcaactgcctcagggtacaactctgccaaaaggcttctatgcagaagggtcgcgtggtggcagccaggcgagtagccgtagcagctcccgctctcgcaactcgtcccgtaactccactccgggctcttctcgcggcacgtccccggctcgtatggcaggtaacggtggtgacgctgctctggcgctgctactgctggacaggctgaaccagctggagtcgaagatgagtggtaaaggccaacagcagcagggccagaccgttaccaaaaagagcgcagctgaagcatctaaaaaaccgcgacagaaacgtaccgcgactaaagattacaatgtaacacaggccttcggtcgtcgaggtccggagcaaactcaaggaaactttggcgatcaggatttaaataaattggggaccgactacaaacactggccgcaaattgcccagttcgccccatccgctagtgcattcttcggtatgagccgcatctcaacgcgcgaaacgccaagtggtacgtggctgacctacaccggtgctatcaagcttgataaaaaggacccgaactttaaagaccaggttattctgcttaacaaacatattgatgcctataaaactttcccgccgaccgaacccaaaaaggacaaaaagaaaaaagctgatgaaacccaggctctaccgcagcgtcagaaaaaacagcaaactgtgactctgctgccagctgcggacctggatgatttttccaagcagctgcaacagtctatgagctctgcggactctacgcaggctggtggttctggtcaccatcatcaccatcattaa

SEQ ID NO: 3172 - DNA, 2421 bp, Artificial Sequence
  Description of Artificial Sequence: Synthetic polynucleotide
atgaaaatcgaagaaggtaaactggtaatctggattaacggcgataaaggctataacggtctcgctgaagtcggtaagaaattcgagaaagataccggaattaaagtcaccgttgagcatccggataaactggaagagaaattcccacaggttgcggcaactggcgatggccctgacattatcttctgggcacacgaccgctttggtggctacgctcaatctggcctgttggctgaaatcaccccggacaaagcgttccaggacaagctgtatccgtttacctgggatgccgtacgttacaacggcaagctgattgcttacccgatcgctgttgaagcgttatcgctgatttataacaaagatctgctgccgaacccgccaaaaacctgggaagagatcccggcgctggataaagaactgaaagcgaaaggtaagagcgcgctgatgttcaacctgcaagaaccgtacttcacctggccgctgattgctgctgacgggggttatgcgttcaagtatgaaaacggcaagtacgacattaaagacgtgggcgtggataacgctggcgcgaaagcgggtctgaccttcctggttgacctgattaaaaacaaacacatgaatgcagacaccgattactccatcgcagaagctgcctttaataaaggcgaaacagcgatgaccatcaacggcccgtgggcatggtccaacatcgacaccagcaaagtgaattatggtgtaacggtactgccgaccttcaagggtcaaccatccaaaccgttcgttggcgtgctgagcgcaggtattaacgccgccagtccgaacaaagagctggcgaaagagttcctcgaaaactatctgctgactgatgaaggtctggaagcggttaataaagacaaaccgctgggtgccgtagcgctgaagtcttacgaggaagagttggcgaaagatccacgtattgccgccaccatggaaaacgcccagaaaggtgaaatcatgccgaacatcccgcagatgtccgctttctggtatgccgtgcgtactgcggtgatcaacgccgccagcggtcgtcagactgtcgatgaagccctgaaagacgcgcagactggtggttctggtgagaacctgtactttcaaagctcagataatgggcctcaaaaccagcgcaacgctccacgtataaccttcggtggcccgtctgactccacaggcagcaaccagaatggtgagcgtagtggagccaggtctaagcagcgccgtccccagggtctgccgaacaacacggcgagctggtttactgcgcttacccaacagggtaaagaagacttaaaattcccgcgtggccagggcgtcccgatcaacactaactcttccccggatgatcagattggttattaccgcagagcaactcgtcggattcgcggcggcgacggtaaaatgaaagatttgtctccgcgttggtacttttactatctcggcaccggtccggaagctggactgccctacggggcaaacaaggacgggatcatttgggtggctaccgaaggtgccctgaatactccaaaagatcatatcggcacccgtaaccctgctaataacgctgcgatcgttctgcaactgcctcagggtacaactctgccaaaaggcttctatgcagaagggtcgcgtggtggcagccaggcgagtagccgtagcagctcccgctctcgcaactcgtcccgtaactccactccgggctcttctcgcggcacgtccccggctcgtatggcaggtaacggtggtgacgctgctctggcgctgctactgctggacaggctgaaccagctggagtcgaagatgagtggtaaaggccaacagcagcagggccagaccgttaccaaaaagagcgcagctgaagcatctaaaaaaccgcgacagaaacgtaccgcgactaaagcgtacaatgtaacacaggccttcggtcgtcgaggtccggagcaaactcaaggaaactttggcgatcaggaattaatccgccaggggaccgactacaaacactggccgcaaattgcccagttcgccccatccgctagtgcattcttcggtatgagccgcatcggcatggaagtaacgccaagtggtacgtggctgacctacaccggtgctatcaagcttgatgacaaggacccgaactttaaagaccaggttattctgcttaacaaacatattgatgcctataaaactttcccgccgaccgaacccaaaaaggacaaaaagaaaaaagctgatgaaacccaggctctaccgcagcgtcagaaaaaacagcaaactgtgactctgctgccagctgcggacctggatgatttttccaagcagctgcaacagtctatgagctctgcggactctacgcaggctggtggttctggtcaccatcatcaccatcattaa

SEQ ID NO: 3173 - DNA, 2421 bp, Artificial Sequence
  Description of Artificial Sequence: Synthetic polynucleotide
atgaaaatcgaagaaggtaaactggtaatctggattaacggcgataaaggctataacggtctcgctgaagtcggtaagaaattcgagaaagataccggaattaaagtcaccgttgagcatccggataaactggaagagaaattcccacaggttgcggcaactggcgatggccctgacattatcttctgggcacacgaccgctttggtggctacgctcaatctggcctgttggctgaaatcaccccggacaaagcgttccaggacaagctgtatccgtttacctgggatgccgtacgttacaacggcaagctgattgcttacccgatcgctgttgaagcgttatcgctgatttataacaaagatctgctgccgaacccgccaaaaacctgggaagagatcccggcgctggataaagaactgaaagcgaaaggtaagagcgcgctgatgttcaacctgcaagaaccgtacttcacctggccgctgattgctgctgacgggggttatgcgttcaagtatgaaaacggcaagtacgacattaaagacgtgggcgtggataacgctggcgcgaaagcgggtctgaccttcctggttgacctgattaaaaacaaacacatgaatgcagacaccgattactccatcgcagaagctgcctttaataaaggcgaaacagcgatgaccatcaacggcccgtgggcatggtccaacatcgacaccagcaaagtgaattatggtgtaacggtactgccgaccttcaagggtcaaccatccaaaccgttcgttggcgtgctgagcgcaggtattaacgccgccagtccgaacaaagagctggcgaaagagttcctcgaaaactatctgctgactgatgaaggtctggaagcggttaataaagacaaaccgctgggtgccgtagcgctgaagtcttacgaggaagagttggcgaaagatccacgtattgccgccaccatggaaaacgcccagaaaggtgaaatcatgccgaacatcccgcagatgtccgctttctggtatgccgtgcgtactgcggtgatcaacgccgccagcggtcgtcagactgtcgatgaagccctgaaagacgcgcagactggtggttctggtgagaacctgtactttcaaagctcagataatgggcctcaaaaccagcgcaacgctccacgtataaccttcggtggcccgtctgactccacaggcagcaaccagaatggtgagcgtagtggagccaggtctaagcagcgccgtccccagggtctgccgaacaacacggcgagctggtttactgcgcttacccaacacggtaaagaagacttaaaattcccgcgtggccagggcgtcccgatcaacactaactcttccccggatgatcagattggttattaccgcagagcaactcgtcggattcgcggcggcgacggtaaaatgaaagatttgtctccgcgttggtacttttactatctcggcaccggtccggaagctggactgccctacggggcaaacaaggacgggatcatttgggtggctaccgaaggtgccctgaatactccaaaagatcatatcggcacccgtaaccctgctaataacgctgcgatcgttctgcaactgcctcagggtacaactctgccaaaaggcttctatgcagaagggtcgcgtggtggcagccaggcgagtagccgtagcagctcccgctctcgcaactcgtcccgtaactccactccgggctcttctcgcggcacgtccccggctcgtatggcaggtaacggtggtgacgctgctctggcgctgctactgctggacaggctgaaccagctggagtcgaagatgagtggtaaaggccaacagcagcagggccagaccgttaccaaaaagagcgcagctgaagcatctaaaaaaccgcgacagaaacgtaccgcgactaaaaattacaatgtaacacaggccttcggtcgtcgaggtccggagcaaactcaaggaaactttggcgatcaggaattaatccgccaggggaccgactacaaacactggccgcaaattgcccagttcgccccatccgctagtgcattcttcggtatgagccgcatcggcatggaagtaacgccaagtggtacgtggctgacctacaccggtgctatcaagcttgatgacaaggacccgaactttaaagaccaggttattctgcttaacaaacatattgatgcctataaaactttcccgccgaccgaacccaaaaaggacaaaaagaaaaaagctgatgaaacccaggctctaccgcagcgtcagaaaaaacagcaaactgtgactctgctgccagctgcggacctggatgatttttccaagcagctgcaacagtctatgagctctgcggactctacgcaggctggtggttctggtcaccatcatcaccatcattaa

SEQ ID NO: 3174 - DNA, 2421 bp, Artificial Sequence
  Description of Artificial Sequence: Synthetic polynucleotide
atgaaaatcgaagaaggtaaactggtaatctggattaacggcgataaaggctataacggtctcgctgaagtcggtaagaaattcgagaaagataccggaattaaagtcaccgttgagcatccggataaactggaagagaaattcccacaggttgcggcaactggcgatggccctgacattatcttctgggcacacgaccgctttggtggctacgctcaatctggcctgttggctgaaatcaccccggacaaagcgttccaggacaagctgtatccgtttacctgggatgccgtacgttacaacggcaagctgattgcttacccgatcgctgttgaagcgttatcgctgatttataacaaagatctgctgccgaacccgccaaaaacctgggaagagatcccggcgctggataaagaactgaaagcgaaaggtaagagcgcgctgatgttcaacctgcaagaaccgtacttcacctggccgctgattgctgctgacgggggttatgcgttcaagtatgaaaacggcaagtacgacattaaagacgtgggcgtggataacgctggcgcgaaagcgggtctgaccttcctggttgacctgattaaaaacaaacacatgaatgcagacaccgattactccatcgcagaagctgcctttaataaaggcgaaacagcgatgaccatcaacggcccgtgggcatggtccaacatcgacaccagcaaagtgaattatggtgtaacggtactgccgaccttcaagggtcaaccatccaaaccgttcgttggcgtgctgagcgcaggtattaacgccgccagtccgaacaaagagctggcgaaagagttcctcgaaaactatctgctgactgatgaaggtctggaagcggttaataaagacaaaccgctgggtgccgtagcgctgaagtcttacgaggaagagttggcgaaagatccacgtattgccgccaccatggaaaacgcccagaaaggtgaaatcatgccgaacatcccgcagatgtccgctttctggtatgccgtgcgtactgcggtgatcaacgccgccagcggtcgtcagactgtcgatgaagccctgaaagacgcgcagactggtggttctggtgagaacctgtactttcaaagctcagataatgggcctcaaaaccagcgcaacgctccacgtataaccttcggtggcccgtctgactccacaggcagcaaccagaatggtgagcgtagtggagccaggtctaagcagcgccgtccccagggtctgccgaacaacacggcgagctggtttactgcgcttacccaacacggtaaagaagacttaaaattcccgcgtggccagggcgtcccgatcaacactaactcttccccggatgatcagattggttattaccgcagagcaactcgtcggattcgcggcggcgacggtaaaatgaaagatttgtctccgcgttggtacttttactatctcggcaccggtccggaagctggactgccctacggggcaaacaaggacgggatcatttgggtggctaccgaaggtgccaaaaatactccaaaagatcatatcggcacccgtaaccctgctaataacgctgcgatcgttctgcaactgcctcagggtacaactctgccaaaaggcttctatgcagaagggtcgcgtggtggcagccaggcgagtagccgtagcagctcccgctctcgcaactcgtcccgtaactccactccgggctcttctcgcggcacgtccccggctcgtatggcaggtaacggtggtgacgctgctctggcgctgctactgctggacaggctgaaccagctggagtcgaagatgagtggtaaaggccaacagcagcagggccagaccgttaccaaaaagagcgcagctgaagcatctaaaaaaccgcgacagaaacgtaccgcgactaaagcgtacaatgtaacacaggccttcggtcgtcgaggtccggagcaaactcaaggaaactttggcgatcaggaattaatccgccaggggaccgactacaaacactggccgcaaattgcccagttcgccccatccgctagtgcattcttcggtatgagccgcatcggcatggaagtaacgccaagtggtacgtggctgacctacaccggtgctatcaagcttgatgacaaggacccgaactttaaagaccaggttattctgcttaacaaacatattgatgcctataaaactttcccgccgaccgaacccaaaaaggacaaaaagaaaaaagctgatgaaacccaggctctaccgcagcgtcagaaaaaacagcaaactgtgactctgctgccagctgcggacctggatgatttttccaagcagctgcaacagtctatgagctctgcggactctacgcaggctggtggttctggtcaccatcatcaccatcattaa

SEQ ID NO: 3175 - DNA, 2421 bp, Artificial Sequence
  Description of Artificial Sequence: Synthetic polynucleotide
atgaaaatcgaagaaggtaaactggtaatctggattaacggcgataaaggctataacggtctcgctgaagtcggtaagaaattcgagaaagataccggaattaaagtcaccgttgagcatccggataaactggaagagaaattcccacaggttgcggcaactggcgatggccctgacattatcttctgggcacacgaccgctttggtggctacgctcaatctggcctgttggctgaaatcaccccggacaaagcgttccaggacaagctgtatccgtttacctgggatgccgtacgttacaacggcaagctgattgcttacccgatcgctgttgaagcgttatcgctgatttataacaaagatctgctgccgaacccgccaaaaacctgggaagagatcccggcgctggataaagaactgaaagcgaaaggtaagagcgcgctgatgttcaacctgcaagaaccgtacttcacctggccgctgattgctgctgacgggggttatgcgttcaagtatgaaaacggcaagtacgacattaaagacgtgggcgtggataacgctggcgcgaaagcgggtctgaccttcctggttgacctgattaaaaacaaacacatgaatgcagacaccgattactccatcgcagaagctgcctttaataaaggcgaaacagcgatgaccatcaacggcccgtgggcatggtccaacatcgacaccagcaaagtgaattatggtgtaacggtactgccgaccttcaagggtcaaccatccaaaccgttcgttggcgtgctgagcgcaggtattaacgccgccagtccgaacaaagagctggcgaaagagttcctcgaaaactatctgctgactgatgaaggtctggaagcggttaataaagacaaaccgctgggtgccgtagcgctgaagtcttacgaggaagagttggcgaaagatccacgtattgccgccaccatggaaaacgcccagaaaggtgaaatcatgccgaacatcccgcagatgtccgctttctggtatgccgtgcgtactgcggtgatcaacgccgccagcggtcgtcagactgtcgatgaagccctgaaagacgcgcagactggtggttctggtgagaacctgtactttcaaagctcagataatgggcctcaaaaccagcgcaacgctccacgtataaccttcggtggcccgtctgactccacaggcagcaaccagaatggtgagcgtagtggagccaggtctaagcagcgccgtccccagggtctgccgaacaacacggcgagctggtttactgcgcttacccaacacggtaaagaagacttaaaattcccgcgtggccagggcgtcccgatcaacactaactcttccccggatgatcagattggttattaccgcagagcaactcgtcggattcgcggcggcgacggtaaaatgaaagatttgtctccgcgttggtacttttactatctcggcaccggtccggaagctggactgccctacggggcaaacaaggacgggatcatttgggtggctaccgaaggtgccctgaatactccaaaagatcatatcggcacccgtaaccctgctaataacgctgcgatcgttctgcaactgcctcagggtacaactctgccaaaaggcttctatgcagaagggtcgcgtggtggcagccaggcgagtagccgtagcagctcccgctctcgcaactcgtcccgtaactccactccgggctcttctcgcggcacgtccccggctcgtatggcaggtaacggtggtgacgctgctctggcgctgctactgctggacaggctgaaccagctggagtcgaagatgagtggtaaaggccaacagcagcagggccagaccgttaccaaaaagagcgcagctgaagcatctaaaaaaccgcgacagaaacgtaccgcgactaaagattacaatgtaacacaggccttcggtcgtcgaggtccggagcaaactcaaggaaactttggcgatcaggatttaaataagttggggaccgactacaaacactggccgcaaattgcccagttcgccccatccgctagtgcattcttcggtatgagccgcatctcgacggaagaaacgccaagtggtacgtggctgacctacaccggtgctatcaagcttgataaaaaggacccgaactttaaagaccaggttattctgcttaacaaacatattgatgcctataaaactttcccgccgaccgaacccaaaaaggacaaaaagaaaaaagctgatgaaacccaggctctaccgcagcgtcagaaaaaacagcaaactgtgactctgctgccagctgcggacctggatgatttttccaagcagctgcaacagtctatgagctctgcggactctacgcaggctggtggttctggtcaccatcatcaccatcattaa

SEQ ID NO: 3176 - DNA, 2421 bp, Artificial Sequence
  Description of Artificial Sequence: Synthetic polynucleotide
atgaaaatcgaagaaggtaaactggtaatctggattaacggcgataaaggctataacggtctcgctgaagtcggtaagaaattcgagaaagataccggaattaaagtcaccgttgagcatccggataaactggaagagaaattcccacaggttgcggcaactggcgatggccctgacattatcttctgggcacacgaccgctttggtggctacgctcaatctggcctgttggctgaaatcaccccggacaaagcgttccaggacaagctgtatccgtttacctgggatgccgtacgttacaacggcaagctgattgcttacccgatcgctgttgaagcgttatcgctgatttataacaaagatctgctgccgaacccgccaaaaacctgggaagagatcccggcgctggataaagaactgaaagcgaaaggtaagagcgcgctgatgttcaacctgcaagaaccgtacttcacctggccgctgattgctgctgacgggggttatgcgttcaagtatgaaaacggcaagtacgacattaaagacgtgggcgtggataacgctggcgcgaaagcgggtctgaccttcctggttgacctgattaaaaacaaacacatgaatgcagacaccgattactccatcgcagaagctgcctttaataaaggcgaaacagcgatgaccatcaacggcccgtgggcatggtccaacatcgacaccagcaaagtgaattatggtgtaacggtactgccgaccttcaagggtcaaccatccaaaccgttcgttggcgtgctgagcgcaggtattaacgccgccagtccgaacaaagagctggcgaaagagttcctcgaaaactatctgctgactgatgaaggtctggaagcggttaataaagacaaaccgctgggtgccgtagcgctgaagtcttacgaggaagagttggcgaaagatccacgtattgccgccaccatggaaaacgcccagaaaggtgaaatcatgccgaacatcccgcagatgtccgctttctggtatgccgtgcgtactgcggtgatcaacgccgccagcggtcgtcagactgtcgatgaagccctgaaagacgcgcagactggtggttctggtgagaacctgtactttcaaagctcagataatgggcctcaaaaccagcgcaacgctccacgtataaccttcggtggcccgtctgactccacaggcagcaaccagaatggtgagcgtagtggagccaggtctaagcagcgccgtccccagggtctgccgaacaacacggcgagctggtttactgcgcttacccaacacggtaaagaagacttaaaattcccgcgtggccagggcgtcccgatcaacactaactcttccccggatgatcagattggttattaccgcagagcaactcgtcggattcgcggcggcgacggtaaaatgaaagatttgtctccgcgttggtacttttactatctcggcaccggtccggaagctggactgccctacggggcaaacaaggacgggatcatttgggtggctaccgaaggtgccctgaatactccaaaagatcatatcggcacccgtaaccctgctaataacgctgcgatcctgctgcaactgcctcagggtacaactctgccaaaaggcttctatgcagaagggtcgcgtggtggcagccaggcgagtagccgtagcagctcccgctctcgcaactcgtcccgtaactccactccgggctcttctcgcggcacgtccccggctcgtatggcaggtaacggtggtgacgctgctctggcgctgctactgctggacaggctgaaccagctggagtcgaagatgagtggtaaaggccaacagcagcagggccagaccgttaccaaaaagagcgcagctgaagcatctaaaaaaccgcgacagaaacgtaccgcgactaaagcgtacaatgtaacacaggccttcggtcgtcgaggtccggagcaaactcaaggaaactttggcgatcaggaattaatccgccaggggaccgactacaaacactggccgcaaattgcccagttcgccccatccgctagtgcattcttcggtatgagccgcatcggcatggaagtaacgccaagtggtacgtggctgacctacaccggtgctatcaagcttgatgacaaggacccgaactttaaagaccaggttattctgcttaacaaacatattgatgcctataaaactttcccgccgaccgaacccaaaaaggacaaaaagaaaaaagctgatgaaacccaggctctaccgcagcgtcagaaaaaacagcaaactgtgactctgctgccagctgcggacctggatgatttttccaagcagctgcaacagtctatgagctctgcggactctacgcaggctggtggttctggtcaccatcatcaccatcattaa

SEQ ID NO: 3177 - DNA, 2421 bp, Artificial Sequence
  Description of Artificial Sequence: Synthetic polynucleotide
atgaaaatcgaagaaggtaaactggtaatctggattaacggcgataaaggctataacggtctcgctgaagtcggtaagaaattcgagaaagataccggaattaaagtcaccgttgagcatccggataaactggaagagaaattcccacaggttgcggcaactggcgatggccctgacattatcttctgggcacacgaccgctttggtggctacgctcaatctggcctgttggctgaaatcaccccggacaaagcgttccaggacaagctgtatccgtttacctgggatgccgtacgttacaacggcaagctgattgcttacccgatcgctgttgaagcgttatcgctgatttataacaaagatctgctgccgaacccgccaaaaacctgggaagagatcccggcgctggataaagaactgaaagcgaaaggtaagagcgcgctgatgttcaacctgcaagaaccgtacttcacctggccgctgattgctgctgacgggggttatgcgttcaagtatgaaaacggcaagtacgacattaaagacgtgggcgtggataacgctggcgcgaaagcgggtctgaccttcctggttgacctgattaaaaacaaacacatgaatgcagacaccgattactccatcgcagaagctgcctttaataaaggcgaaacagcgatgaccatcaacggcccgtgggcatggtccaacatcgacaccagcaaagtgaattatggtgtaacggtactgccgaccttcaagggtcaaccatccaaaccgttcgttggcgtgctgagcgcaggtattaacgccgccagtccgaacaaagagctggcgaaagagttcctcgaaaactatctgctgactgatgaaggtctggaagcggttaataaagacaaaccgctgggtgccgtagcgctgaagtcttacgaggaagagttggcgaaagatccacgtattgccgccaccatggaaaacgcccagaaaggtgaaatcatgccgaacatcccgcagatgtccgctttctggtatgccgtgcgtactgcggtgatcaacgccgccagcggtcgtcagactgtcgatgaagccctgaaagacgcgcagactggtggttctggtgagaacctgtactttcaaagctcagataatgggcctcaaaaccagcgcaacgctccacgtataaccttcggtggcccgtctgactccacaggcagcaaccagaatggtgagcgtagtggagccaggtctaagcagcgccgtccccagggtctgccgaacaacacggcgagctggtttactgcgcttacccaacacggtaaagaagacttaaaattcccggaaggccagggcgtcccgatcaacactaactcttccccggatgatcagattggttattaccgcagagcaactcgtcggattcgcggcggcgacggtaaaatgaaagatttgtctccgcgttggtacttttactatctcggcaccggtccggaagctggactgccctacggggcaaacaaggacgggatcatttgggtggctaccgaaggtgccctgaatactccaaaagatcatatcggcacccgtaaccctgctaataacgctgcgatcgttctgcaactgcctcagggtacaactctgccaaaaggcttctatgcagaagggtcgcgtggtggcagccaggcgagtagccgtagcagctcccgctctcgcaactcgtcccgtaactccactccgggctcttctcgcggcacgtccccggctcgtatggcaggtaacggtggtgacgctgctctggcgctgctactgctggacaggctgaaccagctggagtcgaagatgagtggtaaaggccaacagcagcagggccagaccgttaccaaaaagagcgcagctgaagcatctaaaaaaccgcgacagaaacgtaccgcgactaaagcgtacaatgtaacacaggccttcggtcgtcgaggtccggagcaaactcaaggaaactttggcgatcaggaattaatccgccaggggaccgactacaaacactggccgcaaattgcccagttcgccccatccgctagtgcattcttcggtatgagccgcatcggcatggaagtaacgccaagtggtacgtggctgacctacaccggtgctatcaagcttgatgacaaggacccgaactttaaagaccaggttattctgcttaacaaacatattgatgcctataaaactttcccgccgaccgaacccaaaaaggacaaaaagaaaaaagctgatgaaacccaggctctaccgcagcgtcagaaaaaacagcaaactgtgactctgctgccagctgcggacctggatgatttttccaagcagctgcaacagtctatgagctctgcggactctacgcaggctggtggttctggtcaccatcatcaccatcattaa

SEQ ID NO: 3178 - DNA, 2421 bp, Artificial Sequence
  Description of Artificial Sequence: Synthetic polynucleotide
atgaaaatcgaagaaggtaaactggtaatctggattaacggcgataaaggctataacggtctcgctgaagtcggtaagaaattcgagaaagataccggaattaaagtcaccgttgagcatccggataaactggaagagaaattcccacaggttgcggcaactggcgatggccctgacattatcttctgggcacacgaccgctttggtggctacgctcaatctggcctgttggctgaaatcaccccggacaaagcgttccaggacaagctgtatccgtttacctgggatgccgtacgttacaacggcaagctgattgcttacccgatcgctgttgaagcgttatcgctgatttataacaaagatctgctgccgaacccgccaaaaacctgggaagagatcccggcgctggataaagaactgaaagcgaaaggtaagagcgcgctgatgttcaacctgcaagaaccgtacttcacctggccgctgattgctgctgacgggggttatgcgttcaagtatgaaaacggcaagtacgacattaaagacgtgggcgtggataacgctggcgcgaaagcgggtctgaccttcctggttgacctgattaaaaacaaacacatgaatgcagacaccgattactccatcgcagaagctgcctttaataaaggcgaaacagcgatgaccatcaacggcccgtgggcatggtccaacatcgacaccagcaaagtgaattatggtgtaacggtactgccgaccttcaagggtcaaccatccaaaccgttcgttggcgtgctgagcgcaggtattaacgccgccagtccgaacaaagagctggcgaaagagttcctcgaaaactatctgctgactgatgaaggtctggaagcggttaataaagacaaaccgctgggtgccgtagcgctgaagtcttacgaggaagagttggcgaaagatccacgtattgccgccaccatggaaaacgcccagaaaggtgaaatcatgccgaacatcccgcagatgtccgctttctggtatgccgtgcgtactgcggtgatcaacgccgccagcggtcgtcagactgtcgatgaagccctgaaagacgcgcagactggtggttctggtgagaacctgtactttcaaagctcagataatgggcctcaaaaccagcgcaacgctccacgtataaccttcggtggcccgtctgactccacaggcagcaaccagaatggtgagcgtagtggagccaggtctaagcagcgccgtccccagggtctgccgaacaacacggcgagctggtttactgcgcttacccaacacggtaaagaagacttaaaattcccgcgtggccagggcgtcccgatcaacactaactcttccccggatgatcagattggttattaccgcagagcaactcgtcggattcgcggcggcgacggtaaaatgaaagatttgtctccgcgttggtacttttactatctcggcaccggtccggaagctggactgccctacggggcaaacaaggacgggatcatttgggtggctaccgaaggtgccctgaatactccaaaagatcatatcggcacccgtaaccctgctaataacgctgcgatcgttctgcaactgcctcagggtacaactctgccaaaaggcttctatgcagaagggtcgcgtggtggcagccaggcgagtagccgtagcagctcccgctctcgcaactcgtcccgtaactccactccgggctcttctcgcggcacgtccccggctcgtatggcaggtaacggtggtgacgctgctctggcgctgctactgctggacaggctgaaccagctggagtcgaagatgagtggtaaaggccaacagcagcagggccagaccgttaccaaaaagagcgcagctgaagcatctaaaaaaccgcgacagaaacgtaccgcgactaaagggtacaatgtaacacaggccttcggtcgtcgaggtccggagcaaactcaaggaaactttggcgatcaggatttaatcaaattggggaccgactacaaacactggccgcaaattgcccagttcgccccatccgctagtgcattcttcggtatgagccgcatcggcatggaagaaacgccaagtggtacgtggctgacctacaccggtgctatcaagcttgataaaaaggacccgaactttaaagaccaggttattctgcttaacaaacatattgatgcctataaaactttcccgccgaccgaacccaaaaaggacaaaaagaaaaaagctgatgaaacccaggctctaccgcagcgtcagaaaaaacagcaaactgtgactctgctgccagctgcggacctggatgatttttccaagcagctgcaacagtctatgagctctgcggactctacgcaggctggtggttctggtcaccatcatcaccatcattaa

SEQ ID NO: 3179 - DNA, 2421 bp, Artificial Sequence
  Description of Artificial Sequence: Synthetic polynucleotide
atgaaaatcgaagaaggtaaactggtaatctggattaacggcgataaaggctataacggtctcgctgaagtcggtaagaaattcgagaaagataccggaattaaagtcaccgttgagcatccggataaactggaagagaaattcccacaggttgcggcaactggcgatggccctgacattatcttctgggcacacgaccgctttggtggctacgctcaatctggcctgttggctgaaatcaccccggacaaagcgttccaggacaagctgtatccgtttacctgggatgccgtacgttacaacggcaagctgattgcttacccgatcgctgttgaagcgttatcgctgatttataacaaagatctgctgccgaacccgccaaaaacctgggaagagatcccggcgctggataaagaactgaaagcgaaaggtaagagcgcgctgatgttcaacctgcaagaaccgtacttcacctggccgctgattgctgctgacgggggttatgcgttcaagtatgaaaacggcaagtacgacattaaagacgtgggcgtggataacgctggcgcgaaagcgggtctgaccttcctggttgacctgattaaaaacaaacacatgaatgcagacaccgattactccatcgcagaagctgcctttaataaaggcgaaacagcgatgaccatcaacggcccgtgggcatggtccaacatcgacaccagcaaagtgaattatggtgtaacggtactgccgaccttcaagggtcaaccatccaaaccgttcgttggcgtgctgagcgcaggtattaacgccgccagtccgaacaaagagctggcgaaagagttcctcgaaaactatctgctgactgatgaaggtctggaagcggttaataaagacaaaccgctgggtgccgtagcgctgaagtcttacgaggaagagttggcgaaagatccacgtattgccgccaccatggaaaacgcccagaaaggtgaaatcatgccgaacatcccgcagatgtccgctttctggtatgccgtgcgtactgcggtgatcaacgccgccagcggtcgtcagactgtcgatgaagccctgaaagacgcgcagactggtggttctggtgagaacctgtactttcaaagctcagataatgggcctcaaaaccagcgcaacgctccacgtataaccttcggtggcccgtctgactccacaggcagcaaccagaatggtgagcgtagtggagccaggtctaagcagcgccgtccccagggtctgccgaacaacacggcgagctggtttactgcgcttacccaacacggtaaagaagacttaaaattcccgcgtggccagggcgtcccgatcaacactaactcttccccggatgatcagattggttattaccgcagagcaactcgtcggattcgcggcggcgacggtaaaatgaaagatttgtctccgcgttggtacttttactatctcggcaccggtccggaagctggactgccctacggggcaaacaaggacgggatcatttgggtggctaccgaaggtgccctgaatactccaaaagatcatatcggcacccgtaaccctgctaataacgctgcgatcgttctgcaactgcctcagggtacaactattccaaaaggcttctatgcagaagggtcgcgtggtggcagccaggcgagtagccgtagcagctcccgctctcgcaactcgtcccgtaactccactccgggctcttctcgcggcacgtccccggctcgtatggcaggtaacggtggtgacgctgctctggcgctgctactgctggacaggctgaaccagctggagtcgaagatgagtggtaaaggccaacagcagcagggccagaccgttaccaaaaagagcgcagctgaagcatctaaaaaaccgcgacagaaacgtaccgcgactaaagcgtacaatgtaacacaggccttcggtcgtcgaggtccggagcaaactcaaggaaactttggcgatcaggaattaatccgccaggggaccgactacaaacactggccgcaaattgcccagttcgccccatccgctagtgcattcttcggtatgagccgcatcggcatggaagtaacgccaagtggtacgtggctgacctacaccggtgctatcaagcttgatgacaaggacccgaactttaaagaccaggttattctgcttaacaaacatattgatgcctataaaactttcccgccgaccgaacccaaaaaggacaaaaagaaaaaagctgatgaaacccaggctctaccgcagcgtcagaaaaaacagcaaactgtgactctgctgccagctgcggacctggatgatttttccaagcagctgcaacagtctatgagctctgcggactctacgcaggctggtggttctggtcaccatcatcaccatcattaa

SEQ ID NO: 3180 - DNA, 2421 bp, Artificial Sequence
  Description of Artificial Sequence: Synthetic polynucleotide
atgaaaatcgaagaaggtaaactggtaatctggattaacggcgataaaggctataacggtctcgctgaagtcggtaagaaattcgagaaagataccggaattaaagtcaccgttgagcatccggataaactggaagagaaattcccacaggttgcggcaactggcgatggccctgacattatcttctgggcacacgaccgctttggtggctacgctcaatctggcctgttggctgaaatcaccccggacaaagcgttccaggacaagctgtatccgtttacctgggatgccgtacgttacaacggcaagctgattgcttacccgatcgctgttgaagcgttatcgctgatttataacaaagatctgctgccgaacccgccaaaaacctgggaagagatcccggcgctggataaagaactgaaagcgaaaggtaagagcgcgctgatgttcaacctgcaagaaccgtacttcacctggccgctgattgctgctgacgggggttatgcgttcaagtatgaaaacggcaagtacgacattaaagacgtgggcgtggataacgctggcgcgaaagcgggtctgaccttcctggttgacctgattaaaaacaaacacatgaatgcagacaccgattactccatcgcagaagctgcctttaataaaggcgaaacagcgatgaccatcaacggcccgtgggcatggtccaacatcgacaccagcaaagtgaattatggtgtaacggtactgccgaccttcaagggtcaaccatccaaaccgttcgttggcgtgctgagcgcaggtattaacgccgccagtccgaacaaagagctggcgaaagagttcctcgaaaactatctgctgactgatgaaggtctggaagcggttaataaagacaaaccgctgggtgccgtagcgctgaagtcttacgaggaagagttggcgaaagatccacgtattgccgccaccatggaaaacgcccagaaaggtgaaatcatgccgaacatcccgcagatgtccgctttctggtatgccgtgcgtactgcggtgatcaacgccgccagcggtcgtcagactgtcgatgaagccctgaaagacgcgcagactggtggttctggtgagaacctgtactttcaaagctcagataatgggcctcaaaaccagcgcaacgctccacgtataaccttcggtggcccgtctgactccacaggcagcaaccagaatggtgagcgtagtggagccaggtctaagcagcgccgtccccagggtctgccgaacaacacggcgagctggtttactgcgcttacccaacacggtaaagaagacttaaaattcccgcgtggccagggcgtcccgatcaacactaactcttccccggatgatcagattggtcgataccgcagagcaactcgtcggattcgcggcggcgacggtaaaatgaaagatttgtctccgcgttggtacttttactatctcggcaccggtccggaagctggactgccctacggggcaaacaaggacgggatcatttgggtggctaccgaaggtgccctgaatactccaaaagatcatatcggcacccgtaaccctgctaataacgctgcgatcgttctgcaactgcctcagggtacaactctgccaaaaggcttctatgcagaagggtcgcgtggtggcagccaggcgagtagccgtagcagctcccgctctcgcaactcgtcccgtaactccactccgggctcttctcgcggcacgtccccggctcgtatggcaggtaacggtggtgacgctgctctggcgctgctactgctggacaggctgaaccagctggagtcgaagatgagtggtaaaggccaacagcagcagggccagaccgttaccaaaaagagcgcagctgaagcatctaaaaaaccgcgacagaaacgtaccgcgactaaagcgtacaatgtaacacaggccttcggtcgtcgaggtccggagcaaactcaaggaaactttggcgatcaggaattaatccgccaggggaccgactacaaacactggccgcaaattgcccagttcgccccatccgctagtgcattcttcggtatgagccgcatcggcatggaagtaacgccaagtggtacgtggctgacctacaccggtgctatcaagcttgatgacaaggacccgaactttaaagaccaggttattctgcttaacaaacatattgatgcctataaaactttcccgccgaccgaacccaaaaaggacaaaaagaaaaaagctgatgaaacccaggctctaccgcagcgtcagaaaaaacagcaaactgtgactctgctgccagctgcggacctggatgatttttccaagcagctgcaacagtctatgagctctgcggactctacgcaggctggtggttctggtcaccatcatcaccatcattaa

SEQ ID NO: 3181 - DNA, 2421 bp, Artificial Sequence
  Description of Artificial Sequence: Synthetic polynucleotide
atgaaaatcgaagaaggtaaactggtaatctggattaacggcgataaaggctataacggtctcgctgaagtcggtaagaaattcgagaaagataccggaattaaagtcaccgttgagcatccggataaactggaagagaaattcccacaggttgcggcaactggcgatggccctgacattatcttctgggcacacgaccgctttggtggctacgctcaatctggcctgttggctgaaatcaccccggacaaagcgttccaggacaagctgtatccgtttacctgggatgccgtacgttacaacggcaagctgattgcttacccgatcgctgttgaagcgttatcgctgatttataacaaagatctgctgccgaacccgccaaaaacctgggaagagatcccggcgctggataaagaactgaaagcgaaaggtaagagcgcgctgatgttcaacctgcaagaaccgtacttcacctggccgctgattgctgctgacgggggttatgcgttcaagtatgaaaacggcaagtacgacattaaagacgtgggcgtggataacgctggcgcgaaagcgggtctgaccttcctggttgacctgattaaaaacaaacacatgaatgcagacaccgattactccatcgcagaagctgcctttaataaaggcgaaacagcgatgaccatcaacggcccgtgggcatggtccaacatcgacaccagcaaagtgaattatggtgtaacggtactgccgaccttcaagggtcaaccatccaaaccgttcgttggcgtgctgagcgcaggtattaacgccgccagtccgaacaaagagctggcgaaagagttcctcgaaaactatctgctgactgatgaaggtctggaagcggttaataaagacaaaccgctgggtgccgtagcgctgaagtcttacgaggaagagttggcgaaagatccacgtattgccgccaccatggaaaacgcccagaaaggtgaaatcatgccgaacatcccgcagatgtccgctttctggtatgccgtgcgtactgcggtgatcaacgccgccagcggtcgtcagactgtcgatgaagccctgaaagacgcgcagactggtggttctggtgagaacctgtactttcaaagctcagataatgggcctcaaaaccagcgcaacgctccacgtataaccttcggtggcccgtctgactccacaggcagcaaccagaatggtgagcgtagtggagccaggtctaagcagcgccgtccccagggtctgccgaacaacacggcgagctggtttactccgcttacccaatttggtaaagaagacttaaaattcccgccaggccagggcgtcccgatcaacactaactcttccccggatgatcagattggttattaccgcagagcaactcgtcggattcgcggcggcgacggtaaaatgaaagatttgcctccgaagtggtacttttactatctcggcaccggtccgcatgctgatctgccctacgggcacaaacatgacggggtagtgtgggtggctcgaccaggtgccctgaatactccaaaagatcatatcggcacccgtaaccctgctaataacgctgcgatcccgctgcaactgcctccaggtacaaaactgccaaaaggcttctatgcagaagggtcgcgtggtggcagccaggcgagtagccgtagcagctcccgctctcgcaactcgtcccgtaactccactccgggctcttctcgcggcacgtccccggctcgtatggcaggtaacggtggtgacgctgctctggcgctgctactgctggacaggctgaaccagctggagtcgaagatgagtggtaaaggccaacagcagcagggccagaccgttaccaaaaagagcgcagctgaagcatctaaaaaaccgcgacagaaacgtaccgcgactaaagcgtacaatgtaacacaggccttcggtcgtcgaggtccggagcaaactcaaggaaactttggcgatcaggaattaatccgccaggggaccgactacaaacactggccgcaaattgcccagttcgccccatccgctagtgcattcttcggtatgagccgcatcggcatggaagtaacgccaagtggtacgtggctgacctacaccggtgctatcaagcttgatgacaaggacccgaactttaaagaccaggttattctgcttaacaaacatattgatgcctataaaactttcccgccgaccgaacccaaaaaggacaaaaagaaaaaagctgatgaaacccaggctctaccgcagcgtcagaaaaaacagcaaactgtgactctgctgccagctgcggacctggatgatttttccaagcagctgcaacagtctatgagctctgcggactctacgcaggctggtggttctggtcaccatcatcaccatcattaa

SEQ ID NO: 3182 - DNA, 2421 bp, Artificial Sequence
  Description of Artificial Sequence: Synthetic polynucleotide
atgaaaatcgaagaaggtaaactggtaatctggattaacggcgataaaggctataacggtctcgctgaagtcggtaagaaattcgagaaagataccggaattaaagtcaccgttgagcatccggataaactggaagagaaattcccacaggttgcggcaactggcgatggccctgacattatcttctgggcacacgaccgctttggtggctacgctcaatctggcctgttggctgaaatcaccccggacaaagcgttccaggacaagctgtatccgtttacctgggatgccgtacgttacaacggcaagctgattgcttacccgatcgctgttgaagcgttatcgctgatttataacaaagatctgctgccgaacccgccaaaaacctgggaagagatcccggcgctggataaagaactgaaagcgaaaggtaagagcgcgctgatgttcaacctgcaagaaccgtacttcacctggccgctgattgctgctgacgggggttatgcgttcaagtatgaaaacggcaagtacgacattaaagacgtgggcgtggataacgctggcgcgaaagcgggtctgaccttcctggttgacctgattaaaaacaaacacatgaatgcagacaccgattactccatcgcagaagctgcctttaataaaggcgaaacagcgatgaccatcaacggcccgtgggcatggtccaacatcgacaccagcaaagtgaattatggtgtaacggtactgccgaccttcaagggtcaaccatccaaaccgttcgttggcgtgctgagcgcaggtattaacgccgccagtccgaacaaagagctggcgaaagagttcctcgaaaactatctgctgactgatgaaggtctggaagcggttaataaagacaaaccgctgggtgccgtagcgctgaagtcttacgaggaagagttggcgaaagatccacgtattgccgccaccatggaaaacgcccagaaaggtgaaatcatgccgaacatcccgcagatgtccgctttctggtatgccgtgcgtactgcggtgatcaacgccgccagcggtcgtcagactgtcgatgaagccctgaaagacgcgcagactggtggttctggtgagaacctgtactttcaaagctcagataatgggcctcaaaaccagcgcaacgctccacgtataaccttcggtggcccgtctgactccacaggcagcaaccagaatggtgagcgtagtggagccaggtctaagcagcgccgtccccagggtctgccgaacaacacggcgagctggtttactgcgcttacccaacacggtaaagaagacttaaaattcccgcgtggccagggcgtcccgatcaacactaactcttccccggatgatcagattggttattaccgcagagcaactcgtcggattcgcggcggcgacggtaaaatgaaagatttgtctccgcgttggtacttttactatcatggcaccggtccggaagctggactgccctacggggcaaacaaggacgggatcatttgggtggctaccgaaggtgccctgaatactccaaaagatcatatcggcacccgtaaccctgctaataacgctgcgatcgttctgcaactgcctcagggtacaactctgccaaaaggcttctatgcagaagggtcgcgtggtggcagccaggcgagtagccgtagcagctcccgctctcgcaactcgtcccgtaactccactccgggctcttctcgcggcacgtccccggctcgtatggcaggtaacggtggtgacgctgctctggcgctgctactgctggacaggctgaaccagctggagtcgaagatgagtggtaaaggccaacagcagcagggccagaccgttaccaaaaagagcgcagctgaagcatctaaaaaaccgcgacagaaacgtaccgcgactaaagcgtacaatgtaacacaggccttcggtcgtcgaggtccggagcaaactcaaggaaactttggcgatcaggaattaatccgccaggggaccgactacaaacactggccgcaaattgcccagttcgccccatccgctagtgcattcttcggtatgagccgcatcggcatggaagtaacgccaagtggtacgtggctgacctacaccggtgctatcaagcttgatgacaaggacccgaactttaaagaccaggttattctgcttaacaaacatattgatgcctataaaactttcccgccgaccgaacccaaaaaggacaaaaagaaaaaagctgatgaaacccaggctctaccgcagcgtcagaaaaaacagcaaactgtgactctgctgccagctgcggacctggatgatttttccaagcagctgcaacagtctatgagctctgcggactctacgcaggctggtggttctggtcaccatcatcaccatcattaa

SEQ ID NO: 3183 - DNA, 2421 bp, Artificial Sequence
  Description of Artificial Sequence: Synthetic polynucleotide
atgaaaatcgaagaaggtaaactggtaatctggattaacggcgataaaggctataacggtctcgctgaagtcggtaagaaattcgagaaagataccggaattaaagtcaccgttgagcatccggataaactggaagagaaattcccacaggttgcggcaactggcgatggccctgacattatcttctgggcacacgaccgctttggtggctacgctcaatctggcctgttggctgaaatcaccccggacaaagcgttccaggacaagctgtatccgtttacctgggatgccgtacgttacaacggcaagctgattgcttacccgatcgctgttgaagcgttatcgctgatttataacaaagatctgctgccgaacccgccaaaaacctgggaagagatcccggcgctggataaagaactgaaagcgaaaggtaagagcgcgctgatgttcaacctgcaagaaccgtacttcacctggccgctgattgctgctgacgggggttatgcgttcaagtatgaaaacggcaagtacgacattaaagacgtgggcgtggataacgctggcgcgaaagcgggtctgaccttcctggttgacctgattaaaaacaaacacatgaatgcagacaccgattactccatcgcagaagctgcctttaataaaggcgaaacagcgatgaccatcaacggcccgtgggcatggtccaacatcgacaccagcaaagtgaattatggtgtaacggtactgccgaccttcaagggtcaaccatccaaaccgttcgttggcgtgctgagcgcaggtattaacgccgccagtccgaacaaagagctggcgaaagagttcctcgaaaactatctgctgactgatgaaggtctggaagcggttaataaagacaaaccgctgggtgccgtagcgctgaagtcttacgaggaagagttggcgaaagatccacgtattgccgccaccatggaaaacgcccagaaaggtgaaatcatgccgaacatcccgcagatgtccgctttctggtatgccgtgcgtactgcggtgatcaacgccgccagcggtcgtcagactgtcgatgaagccctgaaagacgcgcagactggtggttctggtgagaacctgtactttcaaagctcagataatgggcctcaaaaccagcgcaacgctccacgtataaccttcggtggcccgtctgactccacaggcagcaaccagaatggtgagcgtagtggagccaggtctaagcagcgccgtccccagggtctgccgaacaacacggcgagctggtttactgcgcttacccaacacggtaaagaagacttaaaattcccgcgtggccagggcgtcccgatcaacactaactcttccccggatgatcagattggttattaccgcagagcaactcgtcggattcgcggcggcgacggtaaaatgaaagatttgtctccgcgttggtacttttactatctcggcaccggtccggaagctggactgccctacggggcaaacaaggacgggatcatttgggtggctaccgaaggtgccctgaatactccaaaagatcatatcggcacccgtgatcctgctaataacgctgcgatcgttctgcaactgcctcagggtacaactctgccaaaaggcttctatgcagaagggtcgcgtggtggcagccaggcgagtagccgtagcagctcccgctctcgcaactcgtcccgtaactccactccgggctcttctcgcggcacgtccccggctcgtatggcaggtaacggtggtgacgctgctctggcgctgctactgctggacaggctgaaccagctggagtcgaagatgagtggtaaaggccaacagcagcagggccagaccgttaccaaaaagagcgcagctgaagcatctaaaaaaccgcgacagaaacgtaccgcgactaaagcgtacaatgtaacacaggccttcggtcgtcgaggtccggagcaaactcaaggaaactttggcgatcaggaattaatccgccaggggaccgactacaaacactggccgcaaattgcccagttcgccccatccgctagtgcattcttcggtatgagccgcatcggcatggaagtaacgccaagtggtacgtggctgacctacaccggtgctatcaagcttgatgacaaggacccgaactttaaagaccaggttattctgcttaacaaacatattgatgcctataaaactttcccgccgaccgaacccaaaaaggacaaaaagaaaaaagctgatgaaacccaggctctaccgcagcgtcagaaaaaacagcaaactgtgactctgctgccagctgcggacctggatgatttttccaagcagctgcaacagtctatgagctctgcggactctacgcaggctggtggttctggtcaccatcatcaccatcattaa

SEQ ID NO: 3184 - DNA, 2421 bp, Artificial Sequence
  Description of Artificial Sequence: Synthetic polynucleotide
atgaaaatcgaagaaggtaaactggtaatctggattaacggcgataaaggctataacggtctcgctgaagtcggtaagaaattcgagaaagataccggaattaaagtcaccgttgagcatccggataaactggaagagaaattcccacaggttgcggcaactggcgatggccctgacattatcttctgggcacacgaccgctttggtggctacgctcaatctggcctgttggctgaaatcaccccggacaaagcgttccaggacaagctgtatccgtttacctgggatgccgtacgttacaacggcaagctgattgcttacccgatcgctgttgaagcgttatcgctgatttataacaaagatctgctgccgaacccgccaaaaacctgggaagagatcccggcgctggataaagaactgaaagcgaaaggtaagagcgcgctgatgttcaacctgcaagaaccgtacttcacctggccgctgattgctgctgacgggggttatgcgttcaagtatgaaaacggcaagtacgacattaaagacgtgggcgtggataacgctggcgcgaaagcgggtctgaccttcctggttgacctgattaaaaacaaacacatgaatgcagacaccgattactccatcgcagaagctgcctttaataaaggcgaaacagcgatgaccatcaacggcccgtgggcatggtccaacatcgacaccagcaaagtgaattatggtgtaacggtactgccgaccttcaagggtcaaccatccaaaccgttcgttggcgtgctgagcgcaggtattaacgccgccagtccgaacaaagagctggcgaaagagttcctcgaaaactatctgctgactgatgaaggtctggaagcggttaataaagacaaaccgctgggtgccgtagcgctgaagtcttacgaggaagagttggcgaaagatccacgtattgccgccaccatggaaaacgcccagaaaggtgaaatcatgccgaacatcccgcagatgtccgctttctggtatgccgtgcgtactgcggtgatcaacgccgccagcggtcgtcagactgtcgatgaagccctgaaagacgcgcagactggtggttctggtgagaacctgtactttcaaagctcagataatgggcctcaaaaccagcgcaacgctccacgtataaccttcggtggcccgtctgactccacaggcagcaaccagaatggtgagcgtagtggagccaggtctaagcagcgccgtccccagggtctgccgaacaacacggcgagctggtttactgcgcttacccaacacggtaaagaagacttaaaattcccgcgtggccagggcgtcccgatcaacactaactcttccccggatgatcagattggttattaccgcagagcaactcgtcggattcgcggcggcgacggtaaaatgaaagatttgtctccgtattggtacttttactatctcggcaccggtccggaagctggactgccctacggggcaaacaaggacgggatcatttgggtggctaccgaaggtgccctgaatactccaaaagatcatatcggcacccgtaaccctgctaataacgctgcgatcgttctgcaactgcctcagggtacaactctgccaaaaggcttctatgcagaagggtcgcgtggtggcagccaggcgagtagccgtagcagctcccgctctcgcaactcgtcccgtaactccactccgggctcttctcgcggcacgtccccggctcgtatggcaggtaacggtggtgacgctgctctggcgctgctactgctggacaggctgaaccagctggagtcgaagatgagtggtaaaggccaacagcagcagggccagaccgttaccaaaaagagcgcagctgaagcatctaaaaaaccgcgacagaaacgtaccgcgactaaagcgtacaatgtaacacaggccttcggtcgtcgaggtccggagcaaactcaaggaaactttggcgatcaggaattaatccgccaggggaccgactacaaacactggccgcaaattgcccagttcgccccatccgctagtgcattcttcggtatgagccgcatcggcatggaagtaacgccaagtggtacgtggctgacctacaccggtgctatcaagcttgatgacaaggacccgaactttaaagaccaggttattctgcttaacaaacatattgatgcctataaaactttcccgccgaccgaacccaaaaaggacaaaaagaaaaaagctgatgaaacccaggctctaccgcagcgtcagaaaaaacagcaaactgtgactctgctgccagctgcggacctggatgatttttccaagcagctgcaacagtctatgagctctgcggactctacgcaggctggtggttctggtcaccatcatcaccatcattaa

SEQ ID NO: 3185 - DNA, 2421 bp, Artificial Sequence
  Description of Artificial Sequence: Synthetic polynucleotide
atgaaaatcgaagaaggtaaactggtaatctggattaacggcgataaaggctataacggtctcgctgaagtcggtaagaaattcgagaaagataccggaattaaagtcaccgttgagcatccggataaactggaagagaaattcccacaggttgcggcaactggcgatggccctgacattatcttctgggcacacgaccgctttggtggctacgctcaatctggcctgttggctgaaatcaccccggacaaagcgttccaggacaagctgtatccgtttacctgggatgccgtacgttacaacggcaagctgattgcttacccgatcgctgttgaagcgttatcgctgatttataacaaagatctgctgccgaacccgccaaaaacctgggaagagatcccggcgctggataaagaactgaaagcgaaaggtaagagcgcgctgatgttcaacctgcaagaaccgtacttcacctggccgctgattgctgctgacgggggttatgcgttcaagtatgaaaacggcaagtacgacattaaagacgtgggcgtggataacgctggcgcgaaagcgggtctgaccttcctggttgacctgattaaaaacaaacacatgaatgcagacaccgattactccatcgcagaagctgcctttaataaaggcgaaacagcgatgaccatcaacggcccgtgggcatggtccaacatcgacaccagcaaagtgaattatggtgtaacggtactgccgaccttcaagggtcaaccatccaaaccgttcgttggcgtgctgagcgcaggtattaacgccgccagtccgaacaaagagctggcgaaagagttcctcgaaaactatctgctgactgatgaaggtctggaagcggttaataaagacaaaccgctgggtgccgtagcgctgaagtcttacgaggaagagttggcgaaagatccacgtattgccgccaccatggaaaacgcccagaaaggtgaaatcatgccgaacatcccgcagatgtccgctttctggtatgccgtgcgtactgcggtgatcaacgccgccagcggtcgtcagactgtcgatgaagccctgaaagacgcgcagactggtggttctggtgagaacctgtactttcaaagctcagataatgggcctcaaaaccagcgcaacgctccacgtataaccttcggtggcccgtctgactccacaggcagcaaccagaatggtgagcgtagtggagccaggtctaagcagcgccgtccccagggtctgccgaacaacacggcgagctggtttactgcgcttacccaacacggtaaagaagacttaaaattcccgcgtggccagggcgtcccgatcaacactaactcttccccggatgatcagattggttattaccgcagagcaactcgtcggattcgcggcggcgacggtaaaatgaaagatttgtctccgcgttggtacttttactatctcggcaccggtccggaagctggactgccctacggggcaaacaaggacgggatcatttgggtggctgccgaaggtgccctgaatactccaaaagatcatatcggcacccgtaaccctgctaataacgctgcgatcgttctgcaactgcctcagggtacaactctgccaaaaggcttctatgcagaagggtcgcgtggtggcagccaggcgagtagccgtagcagctcccgctctcgcaactcgtcccgtaactccactccgggctcttctcgcggcacgtccccggctcgtatggcaggtaacggtggtgacgctgctctggcgctgctactgctggacaggctgaaccagctggagtcgaagatgagtggtaaaggccaacagcagcagggccagaccgttaccaaaaagagcgcagctgaagcatctaaaaaaccgcgacagaaacgtaccgcgactaaagcgtacaatgtaacacaggccttcggtcgtcgaggtccggagcaaactcaaggaaactttggcgatcaggaattaatccgccaggggaccgactacaaacactggccgcaaattgcccagttcgccccatccgctagtgcattcttcggtatgagccgcatcggcatggaagtaacgccaagtggtacgtggctgacctacaccggtgctatcaagcttgatgacaaggacccgaactttaaagaccaggttattctgcttaacaaacatattgatgcctataaaactttcccgccgaccgaacccaaaaaggacaaaaagaaaaaagctgatgaaacccaggctctaccgcagcgtcagaaaaaacagcaaactgtgactctgctgccagctgcggacctggatgatttttccaagcagctgcaacagtctatgagctctgcggactctacgcaggctggtggttctggtcaccatcatcaccatcattaa

SEQ ID NO: 3186 - DNA, 2421 bp, Artificial Sequence
  Description of Artificial Sequence: Synthetic polynucleotide
atgaaaatcgaagaaggtaaactggtaatctggattaacggcgataaaggctataacggtctcgctgaagtcggtaagaaattcgagaaagataccggaattaaagtcaccgttgagcatccggataaactggaagagaaattcccacaggttgcggcaactggcgatggccctgacattatcttctgggcacacgaccgctttggtggctacgctcaatctggcctgttggctgaaatcaccccggacaaagcgttccaggacaagctgtatccgtttacctgggatgccgtacgttacaacggcaagctgattgcttacccgatcgctgttgaagcgttatcgctgatttataacaaagatctgctgccgaacccgccaaaaacctgggaagagatcccggcgctggataaagaactgaaagcgaaaggtaagagcgcgctgatgttcaacctgcaagaaccgtacttcacctggccgctgattgctgctgacgggggttatgcgttcaagtatgaaaacggcaagtacgacattaaagacgtgggcgtggataacgctggcgcgaaagcgggtctgaccttcctggttgacctgattaaaaacaaacacatgaatgcagacaccgattactccatcgcagaagctgcctttaataaaggcgaaacagcgatgaccatcaacggcccgtgggcatggtccaacatcgacaccagcaaagtgaattatggtgtaacggtactgccgaccttcaagggtcaaccatccaaaccgttcgttggcgtgctgagcgcaggtattaacgccgccagtccgaacaaagagctggcgaaagagttcctcgaaaactatctgctgactgatgaaggtctggaagcggttaataaagacaaaccgctgggtgccgtagcgctgaagtcttacgaggaagagttggcgaaagatccacgtattgccgccaccatggaaaacgcccagaaaggtgaaatcatgccgaacatcccgcagatgtccgctttctggtatgccgtgcgtactgcggtgatcaacgccgccagcggtcgtcagactgtcgatgaagccctgaaagacgcgcagactggtggttctggtgagaacctgtactttcaaagctcagataatgggcctcaaaaccagcgcaacgctccacgtataaccttcggtggcccgtctgactccacaggcagcaaccagaatggtgagcgtagtggagccaggtctaagcagcgccgtccccagggtctgccgaacaacacggcgagctggtttactgcgcttacccaacacggtaaagaagacttaaaattcccgaaaggccagggcgtcccgatcaacactaactctaagccggatgatcagattggttattaccgcagagaagtgcgtcggtatcgcggcggcgacggtcaaatgaaagatttgaatccgcgttggtacttttactatctcggcaccggtccggaagctggactgccctacggggcaaacaaggacgggatcatttgggtggctaccgaaggtgccctgaatactccaaaagatcatatcggcacccgtaaccctgctaataacgctgcgatcgttctgcaactgcctcagggtacaactctgccaaaaggcttctatgcagaagggtcgcgtggtggcagccaggcgagtagccgtagcagctcccgctctcgcaactcgtcccgtaactccactccgggctcttctcgcggcacgtccccggctcgtatggcaggtaacggtggtgacgctgctctggcgctgctactgctggacaggctgaaccagctggagtcgaagatgagtggtaaaggccaacagcagcagggccagaccgttaccaaaaagagcgcagctgaagcatctaaaaaaccgcgacagaaacgtaccgcgactaaagcgtacaatgtaacacaggccttcggtcgtcgaggtccggagcaaactcaaggaaactttggcgatcaggaattaatccgccaggggaccgactacaaacactggccgcaaattgcccagttcgccccatccgctagtgcattcttcggtatgagccgcatcggcatggaagtaacgccaagtggtacgtggctgacctacaccggtgctatcaagcttgatgacaaggacccgaactttaaagaccaggttattctgcttaacaaacatattgatgcctataaaactttcccgccgaccgaacccaaaaaggacaaaaagaaaaaagctgatgaaacccaggctctaccgcagcgtcagaaaaaacagcaaactgtgactctgctgccagctgcggacctggatgatttttccaagcagctgcaacagtctatgagctctgcggactctacgcaggctggtggttctggtcaccatcatcaccatcattaa

SEQ ID NO: 3187 - DNA, 2421 bp, Artificial Sequence
  Description of Artificial Sequence: Synthetic polynucleotide
atgaaaatcgaagaaggtaaactggtaatctggattaacggcgataaaggctataacggtctcgctgaagtcggtaagaaattcgagaaagataccggaattaaagtcaccgttgagcatccggataaactggaagagaaattcccacaggttgcggcaactggcgatggccctgacattatcttctgggcacacgaccgctttggtggctacgctcaatctggcctgttggctgaaatcaccccggacaaagcgttccaggacaagctgtatccgtttacctgggatgccgtacgttacaacggcaagctgattgcttacccgatcgctgttgaagcgttatcgctgatttataacaaagatctgctgccgaacccgccaaaaacctgggaagagatcccggcgctggataaagaactgaaagcgaaaggtaagagcgcgctgatgttcaacctgcaagaaccgtacttcacctggccgctgattgctgctgacgggggttatgcgttcaagtatgaaaacggcaagtacgacattaaagacgtgggcgtggataacgctggcgcgaaagcgggtctgaccttcctggttgacctgattaaaaacaaacacatgaatgcagacaccgattactccatcgcagaagctgcctttaataaaggcgaaacagcgatgaccatcaacggcccgtgggcatggtccaacatcgacaccagcaaagtgaattatggtgtaacggtactgccgaccttcaagggtcaaccatccaaaccgttcgttggcgtgctgagcgcaggtattaacgccgccagtccgaacaaagagctggcgaaagagttcctcgaaaactatctgctgactgatgaaggtctggaagcggttaataaagacaaaccgctgggtgccgtagcgctgaagtcttacgaggaagagttggcgaaagatccacgtattgccgccaccatggaaaacgcccagaaaggtgaaatcatgccgaacatcccgcagatgtccgctttctggtatgccgtgcgtactgcggtgatcaacgccgccagcggtcgtcagactgtcgatgaagccctgaaagacgcgcagactggtggttctggtgagaacctgtactttcaaagctcagataatgggcctcaaaaccagcgcaacgctccacgtataaccttcggtggcccgtctgactccacaggcagcaaccagaatggtgagcgtagtggagccaggtctaagcagcgccgtccccagggtctgccgaacaacacggcgagctggtttactgcgcttacccaacacggtaaagaagacttaaaattcccgcgtggccagggcgtcccgatcaacactaactcttccccggatgatcagattggttattaccgcagagcaactcgtcggattcgcggcggcgacggtaaaatgaaagatttgtctccgcgttggtacttttactatctcggcaccggtccggaagctggactgccctacggggcaaacaaggacgggatcatttgggtggctaccgaaggtgccctgaatactccaaaagatcatatcggcacccgtaaccctgctaataacgctgcgatcgttctgcaactgcctcagggtacaactctgccaaaaggcttctatgcagaagggtcgcgtggtggcagccaggcgagtagccgtagcagctcccgctctcgcaactcgtcccgtaactccactccgggctcttctcgcggcacgtccccggctcgtatggcaggtaacggtggtgacgctgctctggcgctgctactgctggacaggctgaaccagctggagtcgaagatgagtggtaaaggccaacagcagcagggccagaccgttaccaaaaagagcgcagctgaagcatctaaaaaaccgcgacagaaacgtaccgcgactaaagcgtacaatgtaacacaggccttcggtcgtcgaggtccggagcaaactcaaggaaactttggcgatcaggaattaatccgccaggggaccgactacaaacactggccgcaaattgcccagttcgccccatccgctagtgcattcttcggtatgagccgcatcggcatggaagtaacgccaagtggtacgtggctgacctacaccggtgctatcaagcttgatgacaaggacccgaactttaaagaccaggttaaactgcttaacaaacatattgatgcctataaaactttcccgccgaccgaacccaaaaaggacaaaaagaaaaaagctgatgaaacccaggctctaccgcagcgtcagaaaaaacagcaaactgtgactctgctgccagctgcggacctggatgatttttccaagcagctgcaacagtctatgagctctgcggactctacgcaggctggtggttctggtcaccatcatcaccatcattaa

SEQ ID NO: 3188 - DNA, 2421 bp, Artificial Sequence
  Description of Artificial Sequence: Synthetic polynucleotide
atgaaaatcgaagaaggtaaactggtaatctggattaacggcgataaaggctataacggtctcgctgaagtcggtaagaaattcgagaaagataccggaattaaagtcaccgttgagcatccggataaactggaagagaaattcccacaggttgcggcaactggcgatggccctgacattatcttctgggcacacgaccgctttggtggctacgctcaatctggcctgttggctgaaatcaccccggacaaagcgttccaggacaagctgtatccgtttacctgggatgccgtacgttacaacggcaagctgattgcttacccgatcgctgttgaagcgttatcgctgatttataacaaagatctgctgccgaacccgccaaaaacctgggaagagatcccggcgctggataaagaactgaaagcgaaaggtaagagcgcgctgatgttcaacctgcaagaaccgtacttcacctggccgctgattgctgctgacgggggttatgcgttcaagtatgaaaacggcaagtacgacattaaagacgtgggcgtggataacgctggcgcgaaagcgggtctgaccttcctggttgacctgattaaaaacaaacacatgaatgcagacaccgattactccatcgcagaagctgcctttaataaaggcgaaacagcgatgaccatcaacggcccgtgggcatggtccaacatcgacaccagcaaagtgaattatggtgtaacggtactgccgaccttcaagggtcaaccatccaaaccgttcgttggcgtgctgagcgcaggtattaacgccgccagtccgaacaaagagctggcgaaagagttcctcgaaaactatctgctgactgatgaaggtctggaagcggttaataaagacaaaccgctgggtgccgtagcgctgaagtcttacgaggaagagttggcgaaagatccacgtattgccgccaccatggaaaacgcccagaaaggtgaaatcatgccgaacatcccgcagatgtccgctttctggtatgccgtgcgtactgcggtgatcaacgccgccagcggtcgtcagactgtcgatgaagccctgaaagacgcgcagactggtggttctggtgagaacctgtactttcaaagctcagataatgggcctcaaaaccagcgcaacgctccacgtataaccttcggtggcccgtctgactccacaggcagcaaccagaatggtgagcgtagtggagccaggtctaagcagcgccgtccccagggtctgccgaacaacacggcgagctggtttactgcgcttacccaacacggtaaagaagacttaaaattcccgcgtggccagggcgtcccgatcaacactaactcttccccggatgatcagattggttattaccgcagagcaactcgtcggattcgcggcggcgacggtaaaatgaaagatttgtctccgcgttggtacttttactatctcggcaccggtccggaagctggactgccctacggggcaaacaaggacgggatcatttgggtggctaccgaaggtgccctgaatactccaaaagatcatatcggcacccgtaaccctgctaataacgctgcgatcgttctgcaactgcctcagggtacaactctgccaaaaggcttctatgcagaagggtcgcgtggtggcagccaggcgagtagccgtagcagctcccgctctcgcaactcgtcccgtaactccactccgggctcttctcgcggcacgtccccggctcgtatggcaggtaacggtggtgacgctgctctggcgctgctactgctggacaggctgaaccagctggagtcgaagatgagtggtaaaggccaacagcagcagggccagaccgttaccaaaaagagcgcagctgaagcatctaaaaaaccgcgacagaaacgtacccccactaaagcgtacaatgtaacacaggccttcggtcgtcgaggtccggagcaaactcaaggaaactttggcgatcaggaattaatccgccaggggaccgactacaaacactggccgcaaattgcccagttcgccccatccgctagtgcattcttcggtatgagccgcatcggcatggaagtaacgccaagtggtacgtggctgacctacaccggtgctatcaagcttgatgacaaggacccgaactttaaagaccaggttattctgcttaacaaacatattgatgcctataaaactttcccgccgaccgaacccaaaaaggacaaaaagaaaaaagctgatgaaacccaggctctaccgcagcgtcagaaaaaacagcaaactgtgactctgctgccagctgcggacctggatgatttttccaagcagctgcaacagtctatgagctctgcggactctacgcaggctggtggttctggtcaccatcatcaccatcattaa

SEQ ID NO: 3189 - DNA, 2421 bp, Artificial Sequence
  Description of Artificial Sequence: Synthetic polynucleotide
atgaaaatcgaagaaggtaaactggtaatctggattaacggcgataaaggctataacggtctcgctgaagtcggtaagaaattcgagaaagataccggaattaaagtcaccgttgagcatccggataaactggaagagaaattcccacaggttgcggcaactggcgatggccctgacattatcttctgggcacacgaccgctttggtggctacgctcaatctggcctgttggctgaaatcaccccggacaaagcgttccaggacaagctgtatccgtttacctgggatgccgtacgttacaacggcaagctgattgcttacccgatcgctgttgaagcgttatcgctgatttataacaaagatctgctgccgaacccgccaaaaacctgggaagagatcccggcgctggataaagaactgaaagcgaaaggtaagagcgcgctgatgttcaacctgcaagaaccgtacttcacctggccgctgattgctgctgacgggggttatgcgttcaagtatgaaaacggcaagtacgacattaaagacgtgggcgtggataacgctggcgcgaaagcgggtctgaccttcctggttgacctgattaaaaacaaacacatgaatgcagacaccgattactccatcgcagaagctgcctttaataaaggcgaaacagcgatgaccatcaacggcccgtgggcatggtccaacatcgacaccagcaaagtgaattatggtgtaacggtactgccgaccttcaagggtcaaccatccaaaccgttcgttggcgtgctgagcgcaggtattaacgccgccagtccgaacaaagagctggcgaaagagttcctcgaaaactatctgctgactgatgaaggtctggaagcggttaataaagacaaaccgctgggtgccgtagcgctgaagtcttacgaggaagagttggcgaaagatccacgtattgccgccaccatggaaaacgcccagaaaggtgaaatcatgccgaacatcccgcagatgtccgctttctggtatgccgtgcgtactgcggtgatcaacgccgccagcggtcgtcagactgtcgatgaagccctgaaagacgcgcagactggtggttctggtgagaacctgtactttcaaagctcagataatgggcctcaaaaccagcgcaacgctccacgtataaccttcggtggcccgtctgactccacaggcagcaaccagaatggtgagcgtagtggagccaggtctaagcagcgccgtccccagggtctgccgaacaacacggcgagctggtttactgcgcttacccaacacggtaaagaagacttaaaattcccgcgtggccagggcgtcccgatcaacactaactcttccccggatgatcagattggttattaccgcagagcaactcgtcggattcgcggcggcgacggtaaaatgaaagatttgtctccgcgttggtacttttactatctcggcaccggtccggaagctggactgccctacggggcaaacaaggacgggatcatttgggtggctaccgaaggtgccctgaatactccaaaagatcatatcggcacccgtaaccctgctaataacgctgcgatcgttctgcaactgcctcagggtacaactctgccaaaaggcttctatgcagaagggtcgcgtggtggcagccaggcgagtagccgtagcagctcccgctctcgcaactcgtcccgtaactccactccgggctcttctcgcggcacgtccccggctcgtatggcaggtaacggtggtgacgctgctctggcgctgctactgctggacaggctgaaccagctggagtcgaagatgagtggtaaaggccaacagcagcagggccagaccgttaccaaaaagagcgcagctgaagcatctaaaaaaccgcgacagaaacgtaccgcgactaaagcgtacaatgtaacacaggccttcggtcgtcgaggtccggagcaaactcaaggaaactttggcgatcaggaattaatccgccaggggaccgactacaaacactggccgcaaattgcccagttcgccccatccgctagtgcattcttcggtatgagccgcatcggcatggaagtaacgccaagtggtgtgtggctgacctacaccggtgctatcaagcttgatgacaaggacccgaactttaaagaccaggttattctgcttaacaaacatattgatgcctataaaactttcccgccgaccgaacccaaaaaggacaaaaagaaaaaagctgatgaaacccaggctctaccgcagcgtcagaaaaaacagcaaactgtgactctgctgccagctgcggacctggatgatttttccaagcagctgcaacagtctatgagctctgcggactctacgcaggctggtggttctggtcaccatcatcaccatcattaa

SEQ ID NO: 3190 - DNA, 2421 bp, Artificial Sequence
  Description of Artificial Sequence: Synthetic polynucleotide
atgaaaatcgaagaaggtaaactggtaatctggattaacggcgataaaggctataacggtctcgctgaagtcggtaagaaattcgagaaagataccggaattaaagtcaccgttgagcatccggataaactggaagagaaattcccacaggttgcggcaactggcgatggccctgacattatcttctgggcacacgaccgctttggtggctacgctcaatctggcctgttggctgaaatcaccccggacaaagcgttccaggacaagctgtatccgtttacctgggatgccgtacgttacaacggcaagctgattgcttacccgatcgctgttgaagcgttatcgctgatttataacaaagatctgctgccgaacccgccaaaaacctgggaagagatcccggcgctggataaagaactgaaagcgaaaggtaagagcgcgctgatgttcaacctgcaagaaccgtacttcacctggccgctgattgctgctgacgggggttatgcgttcaagtatgaaaacggcaagtacgacattaaagacgtgggcgtggataacgctggcgcgaaagcgggtctgaccttcctggttgacctgattaaaaacaaacacatgaatgcagacaccgattactccatcgcagaagctgcctttaataaaggcgaaacagcgatgaccatcaacggcccgtgggcatggtccaacatcgacaccagcaaagtgaattatggtgtaacggtactgccgaccttcaagggtcaaccatccaaaccgttcgttggcgtgctgagcgcaggtattaacgccgccagtccgaacaaagagctggcgaaagagttcctcgaaaactatctgctgactgatgaaggtctggaagcggttaataaagacaaaccgctgggtgccgtagcgctgaagtcttacgaggaagagttggcgaaagatccacgtattgccgccaccatggaaaacgcccagaaaggtgaaatcatgccgaacatcccgcagatgtccgctttctggtatgccgtgcgtactgcggtgatcaacgccgccagcggtcgtcagactgtcgatgaagccctgaaagacgcgcagactggtggttctggtgagaacctgtactttcaaagctcagataatgggcctcaaaaccagcgcaacgctccacgtataaccttcggtggcccgtctgactccacaggcagcaaccagaatggtgagcgtagtggagccaggtctaagcagcgccgtccccagggtctgccgaacaacacggcgagctggtttactgcgcttacccaaaatggtaaagaagacttaaaattcccgcgtggccagggcgtcccgatcaacactaactcttccccggatgatcagattggttattaccgcagagcaactcgtcggattcgcggcggcgacggtaaaatgaaagatttgtctccgcgttggtacttttactatctcggcaccggtccggaagctggactgccctacggggcaaacaaggacgggatcatttgggtggctaccgaaggtgccctgaatactccaaaagatcatatcggcacccgtaaccctgctaataacgctgcgatcgttctgcaactgcctcagggtacaactctgccaaaaggcttctatgcagaagggtcgcgtggtggcagccaggcgagtagccgtagcagctcccgctctcgcaactcgtcccgtaactccactccgggctcttctcgcggcacgtccccggctcgtatggcaggtaacggtggtgacgctgctctggcgctgctactgctggacaggctgaaccagctggagtcgaagatgagtggtaaaggccaacagcagcagggccagaccgttaccaaaaagagcgcagctgaagcatctaaaaaaccgcgacagaaacgtaccgcgactaaagcgtacaatgtaacacaggccttcggtcgtcgaggtccggagcaaactcaaggaaactttggcgatcaggaattaatccgccaggggaccgactacaaacactggccgcaaattgcccagttcgccccatccgctagtgcattcttcggtatgagccgcatcggcatggaagtaacgccaagtggtacgtggctgacctacaccggtgctatcaagcttgatgacaaggacccgaactttaaagaccaggttattctgcttaacaaacatattgatgcctataaaactttcccgccgaccgaacccaaaaaggacaaaaagaaaaaagctgatgaaacccaggctctaccgcagcgtcagaaaaaacagcaaactgtgactctgctgccagctgcggacctggatgatttttccaagcagctgcaacagtctatgagctctgcggactctacgcaggctggtggttctggtcaccatcatcaccatcattaa

SEQ ID NO: 3191 - DNA, 2421 bp, Artificial Sequence
  Description of Artificial Sequence: Synthetic polynucleotide
atgaaaatcgaagaaggtaaactggtaatctggattaacggcgataaaggctataacggtctcgctgaagtcggtaagaaattcgagaaagataccggaattaaagtcaccgttgagcatccggataaactggaagagaaattcccacaggttgcggcaactggcgatggccctgacattatcttctgggcacacgaccgctttggtggctacgctcaatctggcctgttggctgaaatcaccccggacaaagcgttccaggacaagctgtatccgtttacctgggatgccgtacgttacaacggcaagctgattgcttacccgatcgctgttgaagcgttatcgctgatttataacaaagatctgctgccgaacccgccaaaaacctgggaagagatcccggcgctggataaagaactgaaagcgaaaggtaagagcgcgctgatgttcaacctgcaagaaccgtacttcacctggccgctgattgctgctgacgggggttatgcgttcaagtatgaaaacggcaagtacgacattaaagacgtgggcgtggataacgctggcgcgaaagcgggtctgaccttcctggttgacctgattaaaaacaaacacatgaatgcagacaccgattactccatcgcagaagctgcctttaataaaggcgaaacagcgatgaccatcaacggcccgtgggcatggtccaacatcgacaccagcaaagtgaattatggtgtaacggtactgccgaccttcaagggtcaaccatccaaaccgttcgttggcgtgctgagcgcaggtattaacgccgccagtccgaacaaagagctggcgaaagagttcctcgaaaactatctgctgactgatgaaggtctggaagcggttaataaagacaaaccgctgggtgccgtagcgctgaagtcttacgaggaagagttggcgaaagatccacgtattgccgccaccatggaaaacgcccagaaaggtgaaatcatgccgaacatcccgcagatgtccgctttctggtatgccgtgcgtactgcggtgatcaacgccgccagcggtcgtcagactgtcgatgaagccctgaaagacgcgcagactggtggttctggtgagaacctgtactttcaaagctcagataatgggcctcaaaaccagcgcaacgctccacgtataaccttcggtggcccgtctgactccacaggcagcaaccagaatggtgagcgtagtggagccaggtctaagcagcgccgtccccagggtctgccgaacaacacggcgagctggtttactgcgcttacccaacacggtaaagaagacttaaaattcccgcgtggccagggcgtcccgatcaacactaactcttccccggatgatcagattggttattaccgcagagcaactcgtcggattcgcggcggcgacggtaaaatgaaagatttgtctccgcgttggtacttttactatctcggcaccggtccggaagctggactgccctacggggcaaacaaggacgggatcatttgggtggctaccgaaggtgccctgaatactccaaaagatcatatcggcacccgtaaccctgctaataacgctgcgatcgttctgcaactgcctcagggtacaactctgccaaaaggcttctatgcagaagggtcgcgtggtggcagccaggcgagtagccgtagcagctcccgctctcgcaactcgtcccgtaactccactccgggctcttctcgcggcacgtccccggctcgtatggcaggtaacggtggtgacgctgctctggcgctgctactgctggacaggctgaaccagctggagtcgaagatgagtggtaaaggccaacagcagcagggccagaccgttaccaaaaagagcgcagctgaagcatctaaaaaaccgcgacagaaacgtaccgcgactaaagcgtacaatgtaacacaggccttcggtcgtcgaggtccggagcaaactcaaggaaactttggcgatcaggaattaatccgccaggggaccgactacaaacactggccgcaaattgcccagttcgccccatccgctagtgcattcttcggtatgagccgcatcggcatggaagtaacgccaagtggtacgtggctgacctacaccggtgctatcaagcttgattcgaaggacccgaactttaaagaccaggttattctgcttaacaaacatattgatgcctataaaactttcccgccgaccgaacccaaaaaggacaaaaagaaaaaagctgatgaaacccaggctctaccgcagcgtcagaaaaaacagcaaactgtgactctgctgccagctgcggacctggatgatttttccaagcagctgcaacagtctatgagctctgcggactctacgcaggctggtggttctggtcaccatcatcaccatcattaa

SEQ ID NO: 3192 - DNA, 2421 bp, Artificial Sequence
  Description of Artificial Sequence: Synthetic polynucleotide
atgaaaatcgaagaaggtaaactggtaatctggattaacggcgataaaggctataacggtctcgctgaagtcggtaagaaattcgagaaagataccggaattaaagtcaccgttgagcatccggataaactggaagagaaattcccacaggttgcggcaactggcgatggccctgacattatcttctgggcacacgaccgctttggtggctacgctcaatctggcctgttggctgaaatcaccccggacaaagcgttccaggacaagctgtatccgtttacctgggatgccgtacgttacaacggcaagctgattgcttacccgatcgctgttgaagcgttatcgctgatttataacaaagatctgctgccgaacccgccaaaaacctgggaagagatcccggcgctggataaagaactgaaagcgaaaggtaagagcgcgctgatgttcaacctgcaagaaccgtacttcacctggccgctgattgctgctgacgggggttatgcgttcaagtatgaaaacggcaagtacgacattaaagacgtgggcgtggataacgctggcgcgaaagcgggtctgaccttcctggttgacctgattaaaaacaaacacatgaatgcagacaccgattactccatcgcagaagctgcctttaataaaggcgaaacagcgatgaccatcaacggcccgtgggcatggtccaacatcgacaccagcaaagtgaattatggtgtaacggtactgccgaccttcaagggtcaaccatccaaaccgttcgttggcgtgctgagcgcaggtattaacgccgccagtccgaacaaagagctggcgaaagagttcctcgaaaactatctgctgactgatgaaggtctggaagcggttaataaagacaaaccgctgggtgccgtagcgctgaagtcttacgaggaagagttggcgaaagatccacgtattgccgccaccatggaaaacgcccagaaaggtgaaatcatgccgaacatcccgcagatgtccgctttctggtatgccgtgcgtactgcggtgatcaacgccgccagcggtcgtcagactgtcgatgaagccctgaaagacgcgcagactggtggttctggtgagaacctgtactttcaaagctcagataatgggcctcaaaaccagcgcaacgctccacgtataaccttcggtggcccgtctgactccacaggcagcaaccagaatggtgagcgtagtggagccaggtctaagcagcgccgtccccagggtctgccgaacaacacggcgagctggtttactgcgcttacccaacacggtaaagaagacttaaaattcccgcgtggccagggcgtcccgatcaacactaactcttccccggatgatcagattggttattaccgcagaatcactcgtcggattcgcggcggcgacggtaaaatgaaagatttgtctccgcgttggtacttttactatctcggcaccggtccggaagctggactgccctacggggcaaacaaggacgggatcatttgggtggctaccgaaggtgccctgaatactccaaaagatcatatcggcacccgtaaccctgctaataacgctgcgatcgttctgcaactgcctcagggtacaactctgccaaaaggcttctatgcagaagggtcgcgtggtggcagccaggcgagtagccgtagcagctcccgctctcgcaactcgtcccgtaactccactccgggctcttctcgcggcacgtccccggctcgtatggcaggtaacggtggtgacgctgctctggcgctgctactgctggacaggctgaaccagctggagtcgaagatgagtggtaaaggccaacagcagcagggccagaccgttaccaaaaagagcgcagctgaagcatctaaaaaaccgcgacagaaacgtaccgcgactaaagcgtacaatgtaacacaggccttcggtcgtcgaggtccggagcaaactcaaggaaactttggcgatcaggaattaatccgccaggggaccgactacaaacactggccgcaaattgcccagttcgccccatccgctagtgcattcttcggtatgagccgcatcggcatggaagtaacgccaagtggtacgtggctgacctacaccggtgctatcaagcttgatgacaaggacccgaactttaaagaccaggttattctgcttaacaaacatattgatgcctataaaactttcccgccgaccgaacccaaaaaggacaaaaagaaaaaagctgatgaaacccaggctctaccgcagcgtcagaaaaaacagcaaactgtgactctgctgccagctgcggacctggatgatttttccaagcagctgcaacagtctatgagctctgcggactctacgcaggctggtggttctggtcaccatcatcaccatcattaa

SEQ ID NO: 3193 - DNA, 2421 bp, Artificial Sequence
  Description of Artificial Sequence: Synthetic polynucleotide
atgaaaatcgaagaaggtaaactggtaatctggattaacggcgataaaggctataacggtctcgctgaagtcggtaagaaattcgagaaagataccggaattaaagtcaccgttgagcatccggataaactggaagagaaattcccacaggttgcggcaactggcgatggccctgacattatcttctgggcacacgaccgctttggtggctacgctcaatctggcctgttggctgaaatcaccccggacaaagcgttccaggacaagctgtatccgtttacctgggatgccgtacgttacaacggcaagctgattgcttacccgatcgctgttgaagcgttatcgctgatttataacaaagatctgctgccgaacccgccaaaaacctgggaagagatcccggcgctggataaagaactgaaagcgaaaggtaagagcgcgctgatgttcaacctgcaagaaccgtacttcacctggccgctgattgctgctgacgggggttatgcgttcaagtatgaaaacggcaagtacgacattaaagacgtgggcgtggataacgctggcgcgaaagcgggtctgaccttcctggttgacctgattaaaaacaaacacatgaatgcagacaccgattactccatcgcagaagctgcctttaataaaggcgaaacagcgatgaccatcaacggcccgtgggcatggtccaacatcgacaccagcaaagtgaattatggtgtaacggtactgccgaccttcaagggtcaaccatccaaaccgttcgttggcgtgctgagcgcaggtattaacgccgccagtccgaacaaagagctggcgaaagagttcctcgaaaactatctgctgactgatgaaggtctggaagcggttaataaagacaaaccgctgggtgccgtagcgctgaagtcttacgaggaagagttggcgaaagatccacgtattgccgccaccatggaaaacgcccagaaaggtgaaatcatgccgaacatcccgcagatgtccgctttctggtatgccgtgcgtactgcggtgatcaacgccgccagcggtcgtcagactgtcgatgaagccctgaaagacgcgcagactggtggttctggtgagaacctgtactttcaaagctcagataatgggcctcaaaaccagcgcaacgctccacgtataaccttcggtggcccgtctgactccacaggcagcaaccagaatggtgagcgtagtggagccaggtctaagcagcgccgtccccagggtctgccgaacaacacggcgagctggtttactgcgcttacccaacacggtaaagaagacttaaaattcccgcgtggccagggcgtcccgatcaacactaactcttccccggatgatcagattggttattaccgcagagcaactcgtcggattcgcggcggcgacggtaaaatgaaagatttgtctccgcgttggtacttttactatctcggccatggtccggaagctggactgccctacggggcaaacaaggacgggatcatttgggtggctaccgaaggtgccctgaatactccaaaagatcatatcggcacccgtaaccctgctaataacgctgcgatcgttctgcaactgcctcagggtacaactctgccaaaaggcttctatgcagaagggtcgcgtggtggcagccaggcgagtagccgtagcagctcccgctctcgcaactcgtcccgtaactccactccgggctcttctcgcggcacgtccccggctcgtatggcaggtaacggtggtgacgctgctctggcgctgctactgctggacaggctgaaccagctggagtcgaagatgagtggtaaaggccaacagcagcagggccagaccgttaccaaaaagagcgcagctgaagcatctaaaaaaccgcgacagaaacgtaccgcgactaaagcgtacaatgtaacacaggccttcggtcgtcgaggtccggagcaaactcaaggaaactttggcgatcaggaattaatccgccaggggaccgactacaaacactggccgcaaattgcccagttcgccccatccgctagtgcattcttcggtatgagccgcatcggcatggaagtaacgccaagtggtacgtggctgacctacaccggtgctatcaagcttgatgacaaggacccgaactttaaagaccaggttattctgcttaacaaacatattgatgcctataaaactttcccgccgaccgaacccaaaaaggacaaaaagaaaaaagctgatgaaacccaggctctaccgcagcgtcagaaaaaacagcaaactgtgactctgctgccagctgcggacctggatgatttttccaagcagctgcaacagtctatgagctctgcggactctacgcaggctggtggttctggtcaccatcatcaccatcattaa

SEQ ID NO: 3194 - DNA, 2421 bp, Artificial Sequence
  Description of Artificial Sequence: Synthetic polynucleotide
atgaaaatcgaagaaggtaaactggtaatctggattaacggcgataaaggctataacggtctcgctgaagtcggtaagaaattcgagaaagataccggaattaaagtcaccgttgagcatccggataaactggaagagaaattcccacaggttgcggcaactggcgatggccctgacattatcttctgggcacacgaccgctttggtggctacgctcaatctggcctgttggctgaaatcaccccggacaaagcgttccaggacaagctgtatccgtttacctgggatgccgtacgttacaacggcaagctgattgcttacccgatcgctgttgaagcgttatcgctgatttataacaaagatctgctgccgaacccgccaaaaacctgggaagagatcccggcgctggataaagaactgaaagcgaaaggtaagagcgcgctgatgttcaacctgcaagaaccgtacttcacctggccgctgattgctgctgacgggggttatgcgttcaagtatgaaaacggcaagtacgacattaaagacgtgggcgtggataacgctggcgcgaaagcgggtctgaccttcctggttgacctgattaaaaacaaacacatgaatgcagacaccgattactccatcgcagaagctgcctttaataaaggcgaaacagcgatgaccatcaacggcccgtgggcatggtccaacatcgacaccagcaaagtgaattatggtgtaacggtactgccgaccttcaagggtcaaccatccaaaccgttcgttggcgtgctgagcgcaggtattaacgccgccagtccgaacaaagagctggcgaaagagttcctcgaaaactatctgctgactgatgaaggtctggaagcggttaataaagacaaaccgctgggtgccgtagcgctgaagtcttacgaggaagagttggcgaaagatccacgtattgccgccaccatggaaaacgcccagaaaggtgaaatcatgccgaacatcccgcagatgtccgctttctggtatgccgtgcgtactgcggtgatcaacgccgccagcggtcgtcagactgtcgatgaagccctgaaagacgcgcagactggtggttctggtgagaacctgtactttcaaagctcagataatgggcctcaaaaccagcgcaacgctccacgtataaccttcggtggcccgtctgactccacaggcagcaaccagaatggtgagcgtagtggagccaggtctaagcagcgccgtccccagggtctgccgaacaacacggcgagctggtttactgcgcttacccaacacggtaaagaagacttaaaattcccgcgtggccagggcgtcccgatcaacactaactcttccccggatgatcagattggttattaccgcagagcaactcgtcggattcgcggcggcgacggtaaaatgaaagatttgtctccgcgttggtacttttactatctcggcaccggtccggaagctggactgccctacggggcaaacaaggacgggatcatttgggtggctaccgaaggtgccctgaatactccaaaagatcatatcggcacccgtaaccctgctaataacgctgcgatcaatctgcaactgcctcagggtacaactctgccaaaaggcttctatgcagaagggtcgcgtggtggcagccaggcgagtagccgtagcagctcccgctctcgcaactcgtcccgtaactccactccgggctcttctcgcggcacgtccccggctcgtatggcaggtaacggtggtgacgctgctctggcgctgctactgctggacaggctgaaccagctggagtcgaagatgagtggtaaaggccaacagcagcagggccagaccgttaccaaaaagagcgcagctgaagcatctaaaaaaccgcgacagaaacgtaccgcgactaaagcgtacaatgtaacacaggccttcggtcgtcgaggtccggagcaaactcaaggaaactttggcgatcaggaattaatccgccaggggaccgactacaaacactggccgcaaattgcccagttcgccccatccgctagtgcattcttcggtatgagccgcatcggcatggaagtaacgccaagtggtacgtggctgacctacaccggtgctatcaagcttgatgacaaggacccgaactttaaagaccaggttattctgcttaacaaacatattgatgcctataaaactttcccgccgaccgaacccaaaaaggacaaaaagaaaaaagctgatgaaacccaggctctaccgcagcgtcagaaaaaacagcaaactgtgactctgctgccagctgcggacctggatgatttttccaagcagctgcaacagtctatgagctctgcggactctacgcaggctggtggttctggtcaccatcatcaccatcattaa

SEQ ID NO: 3195 - DNA, 2421 bp, Artificial Sequence
  Description of Artificial Sequence: Synthetic polynucleotide
atgaaaatcgaagaaggtaaactggtaatctggattaacggcgataaaggctataacggtctcgctgaagtcggtaagaaattcgagaaagataccggaattaaagtcaccgttgagcatccggataaactggaagagaaattcccacaggttgcggcaactggcgatggccctgacattatcttctgggcacacgaccgctttggtggctacgctcaatctggcctgttggctgaaatcaccccggacaaagcgttccaggacaagctgtatccgtttacctgggatgccgtacgttacaacggcaagctgattgcttacccgatcgctgttgaagcgttatcgctgatttataacaaagatctgctgccgaacccgccaaaaacctgggaagagatcccggcgctggataaagaactgaaagcgaaaggtaagagcgcgctgatgttcaacctgcaagaaccgtacttcacctggccgctgattgctgctgacgggggttatgcgttcaagtatgaaaacggcaagtacgacattaaagacgtgggcgtggataacgctggcgcgaaagcgggtctgaccttcctggttgacctgattaaaaacaaacacatgaatgcagacaccgattactccatcgcagaagctgcctttaataaaggcgaaacagcgatgaccatcaacggcccgtgggcatggtccaacatcgacaccagcaaagtgaattatggtgtaacggtactgccgaccttcaagggtcaaccatccaaaccgttcgttggcgtgctgagcgcaggtattaacgccgccagtccgaacaaagagctggcgaaagagttcctcgaaaactatctgctgactgatgaaggtctggaagcggttaataaagacaaaccgctgggtgccgtagcgctgaagtcttacgaggaagagttggcgaaagatccacgtattgccgccaccatggaaaacgcccagaaaggtgaaatcatgccgaacatcccgcagatgtccgctttctggtatgccgtgcgtactgcggtgatcaacgccgccagcggtcgtcagactgtcgatgaagccctgaaagacgcgcagactggtggttctggtgagaacctgtactttcaaagctcagataatgggcctcaaaaccagcgcaacgctccacgtataaccttcggtggcccgtctgactccacaggcagcaaccagaatggtgagcgtagtggagccaggtctaagcagcgccgtccccagggtctgccgaacaacacggcgagctggtttactgcgcttacccaacacggtaaagaagacttaaaattcccgcgtggccagggcgtcccgatcaacactaactcttccccggatgatcagattggttattaccgcagagcaatccgtcggattcgcggcggcgacggtaaaatgaaagatttgtctccgcgttggtacttttactatctcggcaccggtccggaagctggactgccctacggggcaaacaaggacgggatcatttgggtggctaccgaaggtgccctgaatactccaaaagatcatatcggcacccgtaaccctgctaataacgctgcgatcgttctgcaactgcctcagggtacaactctgccaaaaggcttctatgcagaagggtcgcgtggtggcagccaggcgagtagccgtagcagctcccgctctcgcaactcgtcccgtaactccactccgggctcttctcgcggcacgtccccggctcgtatggcaggtaacggtggtgacgctgctctggcgctgctactgctggacaggctgaaccagctggagtcgaagatgagtggtaaaggccaacagcagcagggccagaccgttaccaaaaagagcgcagctgaagcatctaaaaaaccgcgacagaaacgtaccgcgactaaagcgtacaatgtaacacaggccttcggtcgtcgaggtccggagcaaactcaaggaaactttggcgatcaggaattaatccgccaggggaccgactacaaacactggccgcaaattgcccagttcgccccatccgctagtgcattcttcggtatgagccgcatcggcatggaagtaacgccaagtggtacgtggctgacctacaccggtgctatcaagcttgatgacaaggacccgaactttaaagaccaggttattctgcttaacaaacatattgatgcctataaaactttcccgccgaccgaacccaaaaaggacaaaaagaaaaaagctgatgaaacccaggctctaccgcagcgtcagaaaaaacagcaaactgtgactctgctgccagctgcggacctggatgatttttccaagcagctgcaacagtctatgagctctgcggactctacgcaggctggtggttctggtcaccatcatcaccatcattaa

SEQ ID NO: 3196 - DNA, 2421 bp, Artificial Sequence
  Description of Artificial Sequence: Synthetic polynucleotide
atgaaaatcgaagaaggtaaactggtaatctggattaacggcgataaaggctataacggtctcgctgaagtcggtaagaaattcgagaaagataccggaattaaagtcaccgttgagcatccggataaactggaagagaaattcccacaggttgcggcaactggcgatggccctgacattatcttctgggcacacgaccgctttggtggctacgctcaatctggcctgttggctgaaatcaccccggacaaagcgttccaggacaagctgtatccgtttacctgggatgccgtacgttacaacggcaagctgattgcttacccgatcgctgttgaagcgttatcgctgatttataacaaagatctgctgccgaacccgccaaaaacctgggaagagatcccggcgctggataaagaactgaaagcgaaaggtaagagcgcgctgatgttcaacctgcaagaaccgtacttcacctggccgctgattgctgctgacgggggttatgcgttcaagtatgaaaacggcaagtacgacattaaagacgtgggcgtggataacgctggcgcgaaagcgggtctgaccttcctggttgacctgattaaaaacaaacacatgaatgcagacaccgattactccatcgcagaagctgcctttaataaaggcgaaacagcgatgaccatcaacggcccgtgggcatggtccaacatcgacaccagcaaagtgaattatggtgtaacggtactgccgaccttcaagggtcaaccatccaaaccgttcgttggcgtgctgagcgcaggtattaacgccgccagtccgaacaaagagctggcgaaagagttcctcgaaaactatctgctgactgatgaaggtctggaagcggttaataaagacaaaccgctgggtgccgtagcgctgaagtcttacgaggaagagttggcgaaagatccacgtattgccgccaccatggaaaacgcccagaaaggtgaaatcatgccgaacatcccgcagatgtccgctttctggtatgccgtgcgtactgcggtgatcaacgccgccagcggtcgtcagactgtcgatgaagccctgaaagacgcgcagactggtggttctggtgagaacctgtactttcaaagctcagataatgggcctcaaaaccagcgcaacgctccacgtataaccttcggtggcccgtctgactccacaggcagcaaccagaatggtgagcgtagtggagccaggtctaagcagcgccgtccccagggtctgccgaacaacacggcgagctggtttactgcgcttacccaacacggtaaagaagacttaaaattcccgcgtggccagggcgtcccgatcaacactaactcttccccggatgatcagattggttattaccgcagagcaactcgtcggattcgcggcggcgacggtaaaatgaaagatttgtctccgcgttggtacttttactatctcggcaccggtccggaagctggactgccctacggggcaaacaaggacggggtaatttgggtggctaccgaaggtgccctgaatactccaaaagatcatatcggcacccgtaaccctgctaataacgctgcgatcgttctgcaactgcctcagggtacaactctgccaaaaggcttctatgcagaagggtcgcgtggtggcagccaggcgagtagccgtagcagctcccgctctcgcaactcgtcccgtaactccactccgggctcttctcgcggcacgtccccggctcgtatggcaggtaacggtggtgacgctgctctggcgctgctactgctggacaggctgaaccagctggagtcgaagatgagtggtaaaggccaacagcagcagggccagaccgttaccaaaaagagcgcagctgaagcatctaaaaaaccgcgacagaaacgtaccgcgactaaagcgtacaatgtaacacaggccttcggtcgtcgaggtccggagcaaactcaaggaaactttggcgatcaggaattaatccgccaggggaccgactacaaacactggccgcaaattgcccagttcgccccatccgctagtgcattcttcggtatgagccgcatcggcatggaagtaacgccaagtggtacgtggctgacctacaccggtgctatcaagcttgatgacaaggacccgaactttaaagaccaggttattctgcttaacaaacatattgatgcctataaaactttcccgccgaccgaacccaaaaaggacaaaaagaaaaaagctgatgaaacccaggctctaccgcagcgtcagaaaaaacagcaaactgtgactctgctgccagctgcggacctggatgatttttccaagcagctgcaacagtctatgagctctgcggactctacgcaggctggtggttctggtcaccatcatcaccatcattaa

SEQ ID NO: 3197 - DNA, 2421 bp, Artificial Sequence
  Description of Artificial Sequence: Synthetic polynucleotide
atgaaaatcgaagaaggtaaactggtaatctggattaacggcgataaaggctataacggtctcgctgaagtcggtaagaaattcgagaaagataccggaattaaagtcaccgttgagcatccggataaactggaagagaaattcccacaggttgcggcaactggcgatggccctgacattatcttctgggcacacgaccgctttggtggctacgctcaatctggcctgttggctgaaatcaccccggacaaagcgttccaggacaagctgtatccgtttacctgggatgccgtacgttacaacggcaagctgattgcttacccgatcgctgttgaagcgttatcgctgatttataacaaagatctgctgccgaacccgccaaaaacctgggaagagatcccggcgctggataaagaactgaaagcgaaaggtaagagcgcgctgatgttcaacctgcaagaaccgtacttcacctggccgctgattgctgctgacgggggttatgcgttcaagtatgaaaacggcaagtacgacattaaagacgtgggcgtggataacgctggcgcgaaagcgggtctgaccttcctggttgacctgattaaaaacaaacacatgaatgcagacaccgattactccatcgcagaagctgcctttaataaaggcgaaacagcgatgaccatcaacggcccgtgggcatggtccaacatcgacaccagcaaagtgaattatggtgtaacggtactgccgaccttcaagggtcaaccatccaaaccgttcgttggcgtgctgagcgcaggtattaacgccgccagtccgaacaaagagctggcgaaagagttcctcgaaaactatctgctgactgatgaaggtctggaagcggttaataaagacaaaccgctgggtgccgtagcgctgaagtcttacgaggaagagttggcgaaagatccacgtattgccgccaccatggaaaacgcccagaaaggtgaaatcatgccgaacatcccgcagatgtccgctttctggtatgccgtgcgtactgcggtgatcaacgccgccagcggtcgtcagactgtcgatgaagccctgaaagacgcgcagactggtggttctggtgagaacctgtactttcaaagctcagataatgggcctcaaaaccagcgcaacgctccacgtataaccttcggtggcccgtctgactccacaggcagcaaccagaatggtgagcgtagtggagccaggtctaagcagcgccgtccccagggtctgccgaacaacacggcgagctggtttactgcgcttacccaacacggtaaagaagacttaaaattcccgcgtggccagggcgtcccgatcaacactaactcttccccggatgatcagattggttattaccgcagagcaactcgtcggattcgcggcggcgacggtaaaatgaaagatttgtctccgcgttggtacttttactatctcggcaccggtccggaagctggactgccctacggggcaaacaaggacgggatcatttgggtggctaccgaaggtgccctgaatactccaaaaagccatatcggcacccgtaaccctgctaataacgctgcgatcgttctgcaactgcctcagggtacaactctgccaaaaggcttctatgcagaagggtcgcgtggtggcagccaggcgagtagccgtagcagctcccgctctcgcaactcgtcccgtaactccactccgggctcttctcgcggcacgtccccggctcgtatggcaggtaacggtggtgacgctgctctggcgctgctactgctggacaggctgaaccagctggagtcgaagatgagtggtaaaggccaacagcagcagggccagaccgttaccaaaaagagcgcagctgaagcatctaaaaaaccgcgacagaaacgtaccgcgactaaagcgtacaatgtaacacaggccttcggtcgtcgaggtccggagcaaactcaaggaaactttggcgatcaggaattaatccgccaggggaccgactacaaacactggccgcaaattgcccagttcgccccatccgctagtgcattcttcggtatgagccgcatcggcatggaagtaacgccaagtggtacgtggctgacctacaccggtgctatcaagcttgatgacaaggacccgaactttaaagaccaggttattctgcttaacaaacatattgatgcctataaaactttcccgccgaccgaacccaaaaaggacaaaaagaaaaaagctgatgaaacccaggctctaccgcagcgtcagaaaaaacagcaaactgtgactctgctgccagctgcggacctggatgatttttccaagcagctgcaacagtctatgagctctgcggactctacgcaggctggtggttctggtcaccatcatcaccatcattaa

SEQ ID NO: 3198 - DNA, 2421 bp, Artificial Sequence
  Description of Artificial Sequence: Synthetic polynucleotide
atgaaaatcgaagaaggtaaactggtaatctggattaacggcgataaaggctataacggtctcgctgaagtcggtaagaaattcgagaaagataccggaattaaagtcaccgttgagcatccggataaactggaagagaaattcccacaggttgcggcaactggcgatggccctgacattatcttctgggcacacgaccgctttggtggctacgctcaatctggcctgttggctgaaatcaccccggacaaagcgttccaggacaagctgtatccgtttacctgggatgccgtacgttacaacggcaagctgattgcttacccgatcgctgttgaagcgttatcgctgatttataacaaagatctgctgccgaacccgccaaaaacctgggaagagatcccggcgctggataaagaactgaaagcgaaaggtaagagcgcgctgatgttcaacctgcaagaaccgtacttcacctggccgctgattgctgctgacgggggttatgcgttcaagtatgaaaacggcaagtacgacattaaagacgtgggcgtggataacgctggcgcgaaagcgggtctgaccttcctggttgacctgattaaaaacaaacacatgaatgcagacaccgattactccatcgcagaagctgcctttaataaaggcgaaacagcgatgaccatcaacggcccgtgggcatggtccaacatcgacaccagcaaagtgaattatggtgtaacggtactgccgaccttcaagggtcaaccatccaaaccgttcgttggcgtgctgagcgcaggtattaacgccgccagtccgaacaaagagctggcgaaagagttcctcgaaaactatctgctgactgatgaaggtctggaagcggttaataaagacaaaccgctgggtgccgtagcgctgaagtcttacgaggaagagttggcgaaagatccacgtattgccgccaccatggaaaacgcccagaaaggtgaaatcatgccgaacatcccgcagatgtccgctttctggtatgccgtgcgtactgcggtgatcaacgccgccagcggtcgtcagactgtcgatgaagccctgaaagacgcgcagactggtggttctggtgagaacctgtactttcaaagctcagataatgggcctcaaaaccagcgcaacgctccacgtataaccttcggtggcccgtctgactccacaggcagcaaccagaatggtgagcgtagtggagccaggtctaagcagcgccgtccccagggtctgccgaacaacacggcgagctggtttactgcgcttacccaacacggtaaagaagacttaaaattcccgcgtggccagggcgtcccgatcaacactaactcttccccggatgatcagattggttattaccgcagagcaactcgtcggattcgcggcggcgacggtaaaatgaaagatttgtctccgcgttggtacttttactatctcggcaccggtccggaagctggactgccctacggggcaaacaaggacgggatcatttgggtggctaccgaaggtgccctgaatactccaaaagatcatatcggcacccgtaaccctgctaataacgctgcgatcgttctgcaactgcctcagggtacaactctgccaaaaggcttctatgcagaagggtcgcgtggtggcagccaggcgagtagccgtagcagctcccgctctcgcaactcgtcccgtaactccactccgggctcttctcgcggcacgtccccggctcgtatggcaggtaacggtggtgacgctgctctggcgctgctactgctggacaggctgaaccagctggagtcgaagatgagtggtaaaggccaacagcagcagggccagaccgttaccaaaaagagcgcagctgaagcatctaaaaaaccgcgacagaaacgtaccgcgactaaacattacaatgtaacacaggccttcggtcgtcgaggtccggagcaaactcaaggaaactttggcgatcaggaattaatccgccaggggaccgactacaaacactggccgcaaattgcccagttcgccccatccgctagtgcattcttcggtatgagccgcatcggcatggaagtaacgccaagtggtacgtggctgacctacaccggtgctatcaagcttgatgacaaggacccgaactttaaagaccaggttattctgcttaacaaacatattgatgcctataaaactttcccgccgaccgaacccaaaaaggacaaaaagaaaaaagctgatgaaacccaggctctaccgcagcgtcagaaaaaacagcaaactgtgactctgctgccagctgcggacctggatgatttttccaagcagctgcaacagtctatgagctctgcggactctacgcaggctggtggttctggtcaccatcatcaccatcattaa

SEQ ID NO: 3199 - DNA, 2421 bp, Artificial Sequence
  Description of Artificial Sequence: Synthetic polynucleotide
atgaaaatcgaagaaggtaaactggtaatctggattaacggcgataaaggctataacggtctcgctgaagtcggtaagaaattcgagaaagataccggaattaaagtcaccgttgagcatccggataaactggaagagaaattcccacaggttgcggcaactggcgatggccctgacattatcttctgggcacacgaccgctttggtggctacgctcaatctggcctgttggctgaaatcaccccggacaaagcgttccaggacaagctgtatccgtttacctgggatgccgtacgttacaacggcaagctgattgcttacccgatcgctgttgaagcgttatcgctgatttataacaaagatctgctgccgaacccgccaaaaacctgggaagagatcccggcgctggataaagaactgaaagcgaaaggtaagagcgcgctgatgttcaacctgcaagaaccgtacttcacctggccgctgattgctgctgacgggggttatgcgttcaagtatgaaaacggcaagtacgacattaaagacgtgggcgtggataacgctggcgcgaaagcgggtctgaccttcctggttgacctgattaaaaacaaacacatgaatgcagacaccgattactccatcgcagaagctgcctttaataaaggcgaaacagcgatgaccatcaacggcccgtgggcatggtccaacatcgacaccagcaaagtgaattatggtgtaacggtactgccgaccttcaagggtcaaccatccaaaccgttcgttggcgtgctgagcgcaggtattaacgccgccagtccgaacaaagagctggcgaaagagttcctcgaaaactatctgctgactgatgaaggtctggaagcggttaataaagacaaaccgctgggtgccgtagcgctgaagtcttacgaggaagagttggcgaaagatccacgtattgccgccaccatggaaaacgcccagaaaggtgaaatcatgccgaacatcccgcagatgtccgctttctggtatgccgtgcgtactgcggtgatcaacgccgccagcggtcgtcagactgtcgatgaagccctgaaagacgcgcagactggtggttctggtgagaacctgtactttcaaagctcagataatgggcctcaaaaccagcgcaacgctccacgtataaccttcggtggcccgtctgactccacaggcagcaaccagaatggtgagcgtagtggagccaggtctaagcagcgccgtccccagggtctgccgaacaacacggcgagctggtttactggccttacccaatttggtaaagaagacttaaaattcccgccgggccagggcgtcccgatcaacactaactcttccccggatgatcagattggttattaccgcagagcaactcgtcggattcgcggcggcgacggtaaaatgaaagatttgccaccgcgttggtacttttactatctcggcaccggtccgcatgctgatctgccctacgggcaaaagcaagacggggttttttgggtggctcgcccaggtgccctgaatactccaaaagatcatatcggcacccgtaaccctgctaataacgctgcgatcccactgcaactgcctccgggtacaaaactgccaaaaggcttctatgcagaagggtcgcgtggtggcagccaggcgagtagccgtagcagctcccgctctcgcaactcgtcccgtaactccactccgggctcttctcgcggcacgtccccggctcgtatggcaggtaacggtggtgacgctgctctggcgctgctactgctggacaggctgaaccagctggagtcgaagatgagtggtaaaggccaacagcagcagggccagaccgttaccaaaaagagcgcagctgaagcatctaaaaaaccgcgacagaaacgtaccgcgactaaagcgtacaatgtaacacaggccttcggtcgtcgaggtccggagcaaactcaaggaaactttggcgatcaggaattaatccgccaggggaccgactacaaacactggccgcaaattgcccagttcgccccatccgctagtgcattcttcggtatgagccgcatcggcatggaagtaacgccaagtggtacgtggctgacctacaccggtgctatcaagcttgatgacaaggacccgaactttaaagaccaggttattctgcttaacaaacatattgatgcctataaaactttcccgccgaccgaacccaaaaaggacaaaaagaaaaaagctgatgaaacccaggctctaccgcagcgtcagaaaaaacagcaaactgtgactctgctgccagctgcggacctggatgatttttccaagcagctgcaacagtctatgagctctgcggactctacgcaggctggtggttctggtcaccatcatcaccatcattaa

SEQ ID NO: 3200 - DNA, 2421 bp, Artificial Sequence
  Description of Artificial Sequence: Synthetic polynucleotide
atgaaaatcgaagaaggtaaactggtaatctggattaacggcgataaaggctataacggtctcgctgaagtcggtaagaaattcgagaaagataccggaattaaagtcaccgttgagcatccggataaactggaagagaaattcccacaggttgcggcaactggcgatggccctgacattatcttctgggcacacgaccgctttggtggctacgctcaatctggcctgttggctgaaatcaccccggacaaagcgttccaggacaagctgtatccgtttacctgggatgccgtacgttacaacggcaagctgattgcttacccgatcgctgttgaagcgttatcgctgatttataacaaagatctgctgccgaacccgccaaaaacctgggaagagatcccggcgctggataaagaactgaaagcgaaaggtaagagcgcgctgatgttcaacctgcaagaaccgtacttcacctggccgctgattgctgctgacgggggttatgcgttcaagtatgaaaacggcaagtacgacattaaagacgtgggcgtggataacgctggcgcgaaagcgggtctgaccttcctggttgacctgattaaaaacaaacacatgaatgcagacaccgattactccatcgcagaagctgcctttaataaaggcgaaacagcgatgaccatcaacggcccgtgggcatggtccaacatcgacaccagcaaagtgaattatggtgtaacggtactgccgaccttcaagggtcaaccatccaaaccgttcgttggcgtgctgagcgcaggtattaacgccgccagtccgaacaaagagctggcgaaagagttcctcgaaaactatctgctgactgatgaaggtctggaagcggttaataaagacaaaccgctgggtgccgtagcgctgaagtcttacgaggaagagttggcgaaagatccacgtattgccgccaccatggaaaacgcccagaaaggtgaaatcatgccgaacatcccgcagatgtccgctttctggtatgccgtgcgtactgcggtgatcaacgccgccagcggtcgtcagactgtcgatgaagccctgaaagacgcgcagactggtggttctggtgagaacctgtactttcaaagctcagataatgggcctcaaaaccagcgcaacgctccacgtataaccttcggtggcccgtctgactccacaggcagcaaccagaatggtgagcgtagtggagccaggtctaagcagcgccgtccccagggtctgccgaacaacacggcgagctggtttactgcgcttacccaacacggtaaagaagacttaaaattcccgcgtggccagggcgtcccgatcaacactaactcttccccggatgatcagattggttattaccgcagagcaactcgtcggaaacgcggcggcgacggtaaaatgaaagatttgtctccgcgttggtacttttactatctcggcaccggtccggaagctggactgccctacggggcaaacaaggacgggatcatttgggtggctaccgaaggtgccctgaatactccaaaagatcatatcggcacccgtaaccctgctaataacgctgcgatcgttctgcaactgcctcagggtacaactctgccaaaaggcttctatgcagaagggtcgcgtggtggcagccaggcgagtagccgtagcagctcccgctctcgcaactcgtcccgtaactccactccgggctcttctcgcggcacgtccccggctcgtatggcaggtaacggtggtgacgctgctctggcgctgctactgctggacaggctgaaccagctggagtcgaagatgagtggtaaaggccaacagcagcagggccagaccgttaccaaaaagagcgcagctgaagcatctaaaaaaccgcgacagaaacgtaccgcgactaaagcgtacaatgtaacacaggccttcggtcgtcgaggtccggagcaaactcaaggaaactttggcgatcaggaattaatccgccaggggaccgactacaaacactggccgcaaattgcccagttcgccccatccgctagtgcattcttcggtatgagccgcatcggcatggaagtaacgccaagtggtacgtggctgacctacaccggtgctatcaagcttgatgacaaggacccgaactttaaagaccaggttattctgcttaacaaacatattgatgcctataaaactttcccgccgaccgaacccaaaaaggacaaaaagaaaaaagctgatgaaacccaggctctaccgcagcgtcagaaaaaacagcaaactgtgactctgctgccagctgcggacctggatgatttttccaagcagctgcaacagtctatgagctctgcggactctacgcaggctggtggttctggtcaccatcatcaccatcattaa

SEQ ID NO: 3201 - DNA, 2421 bp, Artificial Sequence
  Description of Artificial Sequence: Synthetic polynucleotide
atgaaaatcgaagaaggtaaactggtaatctggattaacggcgataaaggctataacggtctcgctgaagtcggtaagaaattcgagaaagataccggaattaaagtcaccgttgagcatccggataaactggaagagaaattcccacaggttgcggcaactggcgatggccctgacattatcttctgggcacacgaccgctttggtggctacgctcaatctggcctgttggctgaaatcaccccggacaaagcgttccaggacaagctgtatccgtttacctgggatgccgtacgttacaacggcaagctgattgcttacccgatcgctgttgaagcgttatcgctgatttataacaaagatctgctgccgaacccgccaaaaacctgggaagagatcccggcgctggataaagaactgaaagcgaaaggtaagagcgcgctgatgttcaacctgcaagaaccgtacttcacctggccgctgattgctgctgacgggggttatgcgttcaagtatgaaaacggcaagtacgacattaaagacgtgggcgtggataacgctggcgcgaaagcgggtctgaccttcctggttgacctgattaaaaacaaacacatgaatgcagacaccgattactccatcgcagaagctgcctttaataaaggcgaaacagcgatgaccatcaacggcccgtgggcatggtccaacatcgacaccagcaaagtgaattatggtgtaacggtactgccgaccttcaagggtcaaccatccaaaccgttcgttggcgtgctgagcgcaggtattaacgccgccagtccgaacaaagagctggcgaaagagttcctcgaaaactatctgctgactgatgaaggtctggaagcggttaataaagacaaaccgctgggtgccgtagcgctgaagtcttacgaggaagagttggcgaaagatccacgtattgccgccaccatggaaaacgcccagaaaggtgaaatcatgccgaacatcccgcagatgtccgctttctggtatgccgtgcgtactgcggtgatcaacgccgccagcggtcgtcagactgtcgatgaagccctgaaagacgcgcagactggtggttctggtgagaacctgtactttcaaagctcagataatgggcctcaaaaccagcgcaacgctccacgtataaccttcggtggcccgtctgactccacaggcagcaaccagaatggtgagcgtagtggagccaggtctaagcagcgccgtccccagggtctgccgaacaacacggcgagctggtttactgcgcttacccaacacggtaaagaagacttaaaattcccgcgtggccagggcgtcccgatcaacactaactcttccccggatgatcagattggttattaccgcagagcaactcgtcggattcgcggcggcgacggtaaaatgaaagatttgtctccgcgttggtacttttactatctcggcaccggtccggaagctggactgccctacggggcaaacaaggacgggatcatttgggtggctaccgaaggtgccctgaatactccaaaagatcatatcggcacccgtaaccctgctaataacgctgcgatcgttctgcaactgcctcagggtacaactctgccaaaaggcttctatgcagaagggtcgcgtggtggcagccaggcgagtagccgtagcagctcccgctctcgcaactcgtcccgtaactccactccgggctcttctcgcggcacgtccccggctcgtatggcaggtaacggtggtgacgctgctctggcgctgctactgctggacaggctgaaccagctggagtcgaagatgagtggtaaaggccaacagcagcagggccagaccgttaccaaaaagagcgcagctgaaatgtctaaaaaaccgcgacagaaacgtaccgcgactaaaggatacaatgtaacacagtgtttcggtccccgaggtccggagcaaactcaaggaaactttggcgatgccgaattaatcaagaaagggaccgactacaaacactggccgcaaattgcccagttcgccccatccgctagtgcattcttcggtatgagccgcatctcgtcaaaagaaacgccaagtggtacgtggctgacctacaccggtgctatcaagcttgataaagatgacccgaactttaaagaccaggttattctgcttaacaaacatattgatgcctataaaactttcccgccgaccgaacccaaaaaggacaaaaagaaaaaagctgatgaaacccaggctctaccgcagcgtcagaaaaaacagcaaactgtgactctgctgccagctgcggacctggatgatttttccaagcagctgcaacagtctatgagctctgcggactctacgcaggctggtggttctggtcaccatcatcaccatcattaa

SEQ ID NO: 3202 - DNA, 2421 bp, Artificial Sequence
  Description of Artificial Sequence: Synthetic polynucleotide
atgaaaatcgaagaaggtaaactggtaatctggattaacggcgataaaggctataacggtctcgctgaagtcggtaagaaattcgagaaagataccggaattaaagtcaccgttgagcatccggataaactggaagagaaattcccacaggttgcggcaactggcgatggccctgacattatcttctgggcacacgaccgctttggtggctacgctcaatctggcctgttggctgaaatcaccccggacaaagcgttccaggacaagctgtatccgtttacctgggatgccgtacgttacaacggcaagctgattgcttacccgatcgctgttgaagcgttatcgctgatttataacaaagatctgctgccgaacccgccaaaaacctgggaagagatcccggcgctggataaagaactgaaagcgaaaggtaagagcgcgctgatgttcaacctgcaagaaccgtacttcacctggccgctgattgctgctgacgggggttatgcgttcaagtatgaaaacggcaagtacgacattaaagacgtgggcgtggataacgctggcgcgaaagcgggtctgaccttcctggttgacctgattaaaaacaaacacatgaatgcagacaccgattactccatcgcagaagctgcctttaataaaggcgaaacagcgatgaccatcaacggcccgtgggcatggtccaacatcgacaccagcaaagtgaattatggtgtaacggtactgccgaccttcaagggtcaaccatccaaaccgttcgttggcgtgctgagcgcaggtattaacgccgccagtccgaacaaagagctggcgaaagagttcctcgaaaactatctgctgactgatgaaggtctggaagcggttaataaagacaaaccgctgggtgccgtagcgctgaagtcttacgaggaagagttggcgaaagatccacgtattgccgccaccatggaaaacgcccagaaaggtgaaatcatgccgaacatcccgcagatgtccgctttctggtatgccgtgcgtactgcggtgatcaacgccgccagcggtcgtcagactgtcgatgaagccctgaaagacgcgcagactggtggttctggtgagaacctgtactttcaaagctcagataatgggcctcaaaaccagcgcaacgctccacgtataaccttcggtggcccgtctgactccacaggcagcaaccagaatggtgagcgtagtggagccaggtctaagcagcgccgtccccagggtctgccgaacaacacggcgagctggtttactggccttacccaacaaggtaaagaagacttaaaattcccgcccggccagggcgtcccgatcaacactaactcttccccggatgatcagattggttattaccgcagagcaactcgtcggattcgcggcggcgacggtaaaatgaaagatttgccaccgaagtggtacttttactatctcggcaccggtccgcatgctgatctgccctacgggcagaaacaagacggggtattttgggtggctcgacctggtgccctgaatactccaaaagatcatatcggcacccgtaaccctgctaataacgctgcgatcccgctgcaactgcctccgggtacaaaactgccaaaaggcttctatgcagaagggtcgcgtggtggcagccaggcgagtagccgtagcagctcccgctctcgcaactcgtcccgtaactccactccgggctcttctcgcggcacgtccccggctcgtatggcaggtaacggtggtgacgctgctctggcgctgctactgctggacaggctgaaccagctggagtcgaagatgagtggtaaaggccaacagcagcagggccagaccgttaccaaaaagagcgcagctgaagcatctaaaaaaccgcgacagaaacgtaccgcgactaaagcgtacaatgtaacacaggccttcggtcgtcgaggtccggagcaaactcaaggaaactttggcgatcaggaattaatccgccaggggaccgactacaaacactggccgcaaattgcccagttcgccccatccgctagtgcattcttcggtatgagccgcatcggcatggaagtaacgccaagtggtacgtggctgacctacaccggtgctatcaagcttgatgacaaggacccgaactttaaagaccaggttattctgcttaacaaacatattgatgcctataaaactttcccgccgaccgaacccaaaaaggacaaaaagaaaaaagctgatgaaacccaggctctaccgcagcgtcagaaaaaacagcaaactgtgactctgctgccagctgcggacctggatgatttttccaagcagctgcaacagtctatgagctctgcggactctacgcaggctggtggttctggtcaccatcatcaccatcattaa

SEQ ID NO: 3203 - protein, 806 aa, Artificial Sequence
  Description of Artificial Sequence: Synthetic polypeptide
MKIEEGKLVIWINGDKGYNGLAEVGKKFEKDTGIKVTVEHPDKLEEKFPQVAATGDGPDIIFWAHDRFGGYAQSGLLAEITPDKAFQDKLYPFTWDAVRYNGKLIAYPIAVEALSLIYNKDLLPNPPKTWEEIPALDKELKAKGKSALMFNLQEPYFTWPLIAADGGYAFKYENGKYDIKDVGVDNAGAKAGLTFLVDLIKNKHMNADTDYSIAEAAFNKGETAMTINGPWAWSNIDTSKVNYGVTVLPTFKGQPSKPFVGVLSAGINAASPNKELAKEFLENYLLTDEGLEAVNKDKPLGAVALKSYEEELAKDPRIAATMENAQKGEIMPNIPQMSAFWYAVRTAVINAASGRQTVDEALKDAQTGGSGENLYFQSSDNGPQNQRNAPRITFGGPSDSTGSNQNGERSGARSKQRRPQGLPNNTASWFTALTQHGKEDLKFPRGQGVPINTNSSPDDQIGYYRRQTRRIRGGDGKMKDLSPRWYFYYLGTGPEAGLPYGANKDGIIWVATEGALNTPKDHIGTRNPANNAAIVLQLPQGTTLPKGFYAEGSRGGSQASSRSSSRSRNSSRNSTPGSSRGTSPARMAGNGGDAALALLLLDRLNQLESKMSGKGQQQQGQTVTKKSAAEASKKPRQKRTATKAYNVTQAFGRRGPEQTQGNFGDQELIRQGTDYKHWPQIAQFAPSASAFFGMSRIGMEVTPSGTWLTYTGAIKLDDKDPNFKDQVILLNKHIDAYKTFPPTEPKKDKKKKADETQALPQRQKKQQTVTLLPAADLDDFSKQLQQSMSSADSTQAGGSGHHHHHH

SEQ ID NO: 3204 - protein, 806 aa, Artificial Sequence
  Description of Artificial Sequence: Synthetic polypeptide
MKIEEGKLVIWINGDKGYNGLAEVGKKFEKDTGIKVTVEHPDKLEEKFPQVAATGDGPDIIFWAHDRFGGYAQSGLLAEITPDKAFQDKLYPFTWDAVRYNGKLIAYPIAVEALSLIYNKDLLPNPPKTWEEIPALDKELKAKGKSALMFNLQEPYFTWPLIAADGGYAFKYENGKYDIKDVGVDNAGAKAGLTFLVDLIKNKHMNADTDYSIAEAAFNKGETAMTINGPWAWSNIDTSKVNYGVTVLPTFKGQPSKPFVGVLSAGINAASPNKELAKEFLENYLLTDEGLEAVNKDKPLGAVALKSYEEELAKDPRIAATMENAQKGEIMPNIPQMSAFWYAVRTAVINAASGRQTVDEALKDAQTGGSGENLYFQSSDNGPQNQRNAPRITFGGPSDSTGSNQNGERSGARSKQRRPQGLPNNTASWFTALTQHGKEDLKFPRGQGVPINTNSSPDDQIGYYRRATRRIRGGDGKMKDLSPRWYFYYLGTGPEAGLPYGANKDGIIWVATEGALNTPKDHIGTRNPANNAAIVLQLPQGTTLPKGFYAEGSRGGSQASSRSSSRSRNSSRNSTPGSSRGTSPARMAGNGGDAALALLLLDRLNQLESKMSGKGQQQQGQTVTKKSAAEMSKKPRWKRTPTKGYNVTQAFGPRGPKDTQGNFGDAELIKQGTDYKHWPQIAQFVPSAAAFFFMSRIGMKETPDGVWLTYTGTIKLDKDDPNFDDQVKLLNKHIDAYKTFPPTEPKKDKKKKADETQALPQRQKKQQTVTLLPAADLDDFSKQLQQSMSSADSTQAGGSGHHHHHH

SEQ ID NO: 3205 - protein, 806 aa, Artificial Sequence
  Description of Artificial Sequence: Synthetic polypeptide
MKIEEGKLVIWINGDKGYNGLAEVGKKFEKDTGIKVTVEHPDKLEEKFPQVAATGDGPDIIFWAHDRFGGYAQSGLLAEITPDKAFQDKLYPFTWDAVRYNGKLIAYPIAVEALSLIYNKDLLPNPPKTWEEIPALDKELKAKGKSALMFNLQEPYFTWPLIAADGGYAFKYENGKYDIKDVGVDNAGAKAGLTFLVDLIKNKHMNADTDYSIAEAAFNKGETAMTINGPWAWSNIDTSKVNYGVTVLPTFKGQPSKPFVGVLSAGINAASPNKELAKEFLENYLLTDEGLEAVNKDKPLGAVALKSYEEELAKDPRIAATMENAQKGEIMPNIPQMSAFWYAVRTAVINAASGRQTVDEALKDAQTGGSGENLYFQSSDNGPQNQRNAPRITFGGPSDSTGSNQNGERSGARSKQRRPQGLPNNTASWFTALTQHGKEDLKFPRGQGVPINTNSSPDDQIGYYRRATRRIRGGDGKMKDLSPRWYFYYLGTGPEAGLPYGANKDGIIWVATEGALNTPKDHIGTRNPANNAAIVLQLPQGTTLPKGFYAEGSRGGSQASSRSSSRSRNSSRNSTPGSSRGTSPARMAGNGGDAALALLLLDRLNQLESKMSGKGQQQQGQTVTKKSAAEASKHPRQKRTATKAYNVTQAFGRRGPEQTQGNFGDQELIRQGTDYKHWPQIAQFAPSASAFFGMSRIGMEVTPSGTWLTYTGAIKLDDKDPNFKDQVILLNKHIDAYKTFPPTEPKKDKKKKADETQALPQRQKKQQTVTLLPAADLDDFSKQLQQSMSSADSTQAGGSGHHHHHH

SEQ ID NO: 3206 - protein, 806 aa, Artificial Sequence
  Description of Artificial Sequence: Synthetic polypeptide
MKIEEGKLVIWINGDKGYNGLAEVGKKFEKDTGIKVTVEHPDKLEEKFPQVAATGDGPDIIFWAHDRFGGYAQSGLLAEITPDKAFQDKLYPFTWDAVRYNGKLIAYPIAVEALSLIYNKDLLPNPPKTWEEIPALDKELKAKGKSALMFNLQEPYFTWPLIAADGGYAFKYENGKYDIKDVGVDNAGAKAGLTFLVDLIKNKHMNADTDYSIAEAAFNKGETAMTINGPWAWSNIDTSKVNYGVTVLPTFKGQPSKPFVGVLSAGINAASPNKELAKEFLENYLLTDEGLEAVNKDKPLGAVALKSYEEELAKDPRIAATMENAQKGEIMPNIPQMSAFWYAVRTAVINAASGRQTVDEALKDAQTGGSGENLYFQSSDNGPQNQRNAPRITFGGPSDSTGSNQNGERSGARSKQRRPQGLPNNTASWFTGLTQNGKEDLKFPPGQGVPINTNSSPDDQIGYYRRATRRIRGGDGKMKDLPPKWYFYYLGTGPHADLPYGQKQDGVFWVARPGALNTPKDHIGTRNPANNAAIPLQLPPGTKLPKGFYAEGSRGGSQASSRSSSRSRNSSRNSTPGSSRGTSPARMAGNGGDAALALLLLDRLNQLESKMSGKGQQQQGQTVTKKSAAEASKKPRQKRTATKAYNVTQAFGRRGPEQTQGNFGDQELIRQGTDYKHWPQIAQFAPSASAFFGMSRIGMEVTPSGTWLTYTGAIKLDDKDPNFKDQVILLNKHIDAYKTFPPTEPKKDKKKKADETQALPQRQKKQQTVTLLPAADLDDFSKQLQQSMSSADSTQAGGSGHHHHHH

SEQ ID NO: 3207 - protein, 806 aa, Artificial Sequence
  Description of Artificial Sequence: Synthetic polypeptide
MKIEEGKLVIWINGDKGYNGLAEVGKKFEKDTGIKVTVEHPDKLEEKFPQVAATGDGPDIIFWAHDRFGGYAQSGLLAEITPDKAFQDKLYPFTWDAVRYNGKLIAYPIAVEALSLIYNKDLLPNPPKTWEEIPALDKELKAKGKSALMFNLQEPYFTWPLIAADGGYAFKYENGKYDIKDVGVDNAGAKAGLTFLVDLIKNKHMNADTDYSIAEAAFNKGETAMTINGPWAWSNIDTSKVNYGVTVLPTFKGQPSKPFVGVLSAGINAASPNKELAKEFLENYLLTDEGLEAVNKDKPLGAVALKSYEEELAKDPRIAATMENAQKGEIMPNIPQMSAFWYAVRTAVINAASGRQTVDEALKDAQTGGSGENLYFQSSDNGPQNQRNAPRITFGGPSDSTGSNQNGERSGARSKQRRPQGLPNNTASWFTALTQHGKEDLKFPRGQGVPINTNSSPDDQIGYYRRATRRIRGGDGKMKDLSPRWYFYYLGTGPEAGLPYGANKDGIIWVATEGALNTPKDHIGTRNPANNAAIVLQLPQGTTLPKGFYAEGSRGGSQASSRSSSRSRNSSRNSTPGSSRGTSPARMAGNGGDAALALLLLDRLNQLESKMSGKGQQQQGQTVTKKSAAEASKKPRQKRTATKAYNVTQAFGRRGPEQTQGNFGDQELIRQGTDYKQWPQIAQFAPSASAFFGMSRIGMEVTPSGTWLTYTGAIKLDDKDPNFKDQVILLNKHIDAYKTFPPTEPKKDKKKKADETQALPQRQKKQQTVTLLPAADLDDFSKQLQQSMSSADSTQAGGSGHHHHHH

SEQ ID NO: 3208 - protein, 806 aa, Artificial Sequence
  Description of Artificial Sequence: Synthetic polypeptide
MKIEEGKLVIWINGDKGYNGLAEVGKKFEKDTGIKVTVEHPDKLEEKFPQVAATGDGPDIIFWAHDRFGGYAQSGLLAEITPDKAFQDKLYPFTWDAVRYNGKLIAYPIAVEALSLIYNKDLLPNPPKTWEEIPALDKELKAKGKSALMFNLQEPYFTWPLIAADGGYAFKYENGKYDIKDVGVDNAGAKAGLTFLVDLIKNKHMNADTDYSIAEAAFNKGETAMTINGPWAWSNIDTSKVNYGVTVLPTFKGQPSKPFVGVLSAGINAASPNKELAKEFLENYLLTDEGLEAVNKDKPLGAVALKSYEEELAKDPRIAATMENAQKGEIMPNIPQMSAFWYAVRTAVINAASGRQTVDEALKDAQTGGSGENLYFQSSDNGPQNQRNAPRITFGGPSDSTGSNQNGERSGARSKQRRPQGLPNNTASWFTPLVQFGKEDLKFPPGQGVPINTNSSPDDQIGYYRRATRRIRGGDGKMKDLPPKWYFYYLGTGPHADLPYGQKQDGVVWVARPGALNTPKDHIGTRNPANNAAIPLQLPPGTKLPKGFYAEGSRGGSQASSRSSSRSRNSSRNSTPGSSRGTSPARMAGNGGDAALALLLLDRLNQLESKMSGKGQQQQGQTVTKKSAAEASKKPRQKRTATKAYNVTQAFGRRGPEQTQGNFGDQELIRQGTDYKHWPQIAQFAPSASAFFGMSRIGMEVTPSGTWLTYTGAIKLDDKDPNFKDQVILLNKHIDAYKTFPPTEPKKDKKKKADETQALPQRQKKQQTVTLLPAADLDDFSKQLQQSMSSADSTQAGGSGHHHHHH

SEQ ID NO: 3209 - protein, 806 aa, Artificial Sequence
  Description of Artificial Sequence: Synthetic polypeptide
MKIEEGKLVIWINGDKGYNGLAEVGKKFEKDTGIKVTVEHPDKLEEKFPQVAATGDGPDIIFWAHDRFGGYAQSGLLAEITPDKAFQDKLYPFTWDAVRYNGKLIAYPIAVEALSLIYNKDLLPNPPKTWEEIPALDKELKAKGKSALMFNLQEPYFTWPLIAADGGYAFKYENGKYDIKDVGVDNAGAKAGLTFLVDLIKNKHMNADTDYSIAEAAFNKGETAMTINGPWAWSNIDTSKVNYGVTVLPTFKGQPSKPFVGVLSAGINAASPNKELAKEFLENYLLTDEGLEAVNKDKPLGAVALKSYEEELAKDPRIAATMENAQKGEIMPNIPQMSAFWYAVRTAVINAASGRQTVDEALKDAQTGGSGENLYFQSSDNGPQNQRNAPRITFGGPSDSTGSNQNGERSGARSKQRRPQGLPNNTASWFTALTQHGKEDLKFPRGQGVPINTNSSPDDQIGYYRRATRRIRGGDGKMKDLSPRWYFYYLGTGPEAGLPYGANKDGIIWVATEGALNTPKDHIGTRNPANNAAPVLQLPQGTTLPKGFYAEGSRGGSQASSRSSSRSRNSSRNSTPGSSRGTSPARMAGNGGDAALALLLLDRLNQLESKMSGKGQQQQGQTVTKKSAAEASKKPRQKRTATKAYNVTQAFGRRGPEQTQGNFGDQELIRQGTDYKHWPQIAQFAPSASAFFGMSRIGMEVTPSGTWLTYTGAIKLDDKDPNFKDQVILLNKHIDAYKTFPPTEPKKDKKKKADETQALPQRQKKQQTVTLLPAADLDDFSKQLQQSMSSADSTQAGGSGHHHHHH

SEQ ID NO: 3210 - protein, 806 aa, Artificial Sequence
  Description of Artificial Sequence: Synthetic polypeptide
MKIEEGKLVIWINGDKGYNGLAEVGKKFEKDTGIKVTVEHPDKLEEKFPQVAATGDGPDIIFWAHDRFGGYAQSGLLAEITPDKAFQDKLYPFTWDAVRYNGKLIAYPIAVEALSLIYNKDLLPNPPKTWEEIPALDKELKAKGKSALMFNLQEPYFTWPLIAADGGYAFKYENGKYDIKDVGVDNAGAKAGLTFLVDLIKNKHMNADTDYSIAEAAFNKGETAMTINGPWAWSNIDTSKVNYGVTVLPTFKGQPSKPFVGVLSAGINAASPNKELAKEFLENYLLTDEGLEAVNKDKPLGAVALKSYEEELAKDPRIAATMENAQKGEIMPNIPQMSAFWYAVRTAVINAASGRQTVDEALKDAQTGGSGENLYFQSSDNGPQNQRNAPRITFGGPSDSTGSNQNGERSGARSKQRRPQGLPNNTASWFTALTQHGKEDLKFPRGQGVPINTNSSPDDQIGYYRRATRRIRGGDGKMKDLSPRWYFYYLGTGPEAGLPYGANKDGIIWVATEGALNTPKDHIGTRNPANNAAIVLQLPQGTTLPKGFYAEGSRGGSQASSRSSSRSRNSSRNSTPGSSRGTSPARMAGNGGDAALALLLLDRLNQLESKMSGKGQQQQGQTVTKKSAAEASKKPRQKRTATKAYNVTQAFGRRGPEQTQGNFGDQELIRKGTDYKHWPQIAQFAPSASAFFGMSRIGMEVTPSGTWLTYTGAIKLDDKDPNFKDQVILLNKHIDAYKTFPPTEPKKDKKKKADETQALPQRQKKQQTVTLLPAADLDDFSKQLQQSMSSADSTQAGGSGHHHHHH

SEQ ID NO: 3211 - protein, 806 aa, Artificial Sequence
  Description of Artificial Sequence: Synthetic polypeptide
MKIEEGKLVIWINGDKGYNGLAEVGKKFEKDTGIKVTVEHPDKLEEKFPQVAATGDGPDIIFWAHDRFGGYAQSGLLAEITPDKAFQDKLYPFTWDAVRYNGKLIAYPIAVEALSLIYNKDLLPNPPKTWEEIPALDKELKAKGKSALMFNLQEPYFTWPLIAADGGYAFKYENGKYDIKDVGVDNAGAKAGLTFLVDLIKNKHMNADTDYSIAEAAFNKGETAMTINGPWAWSNIDTSKVNYGVTVLPTFKGQPSKPFVGVLSAGINAASPNKELAKEFLENYLLTDEGLEAVNKDKPLGAVALKSYEEELAKDPRIAATMENAQKGEIMPNIPQMSAFWYAVRTAVINAASGRQTVDEALKDAQTGGSGENLYFQSSDNGPQNQRNAPRITFGGPSDSTGSNQNGERSGARSKQRRPQGLPNNTASWFTALTQHGKEDLKFPRGQGVPINTNSSPDDQIGYYRRATRRIRGGDGKMKDLSPRWYFYYLGTGPEAGLPYGANKDGIIWVATEGALNTPKDHIGTRNPANNAAIVLQLPDGTTLPKGFYAEGSRGGSQASSRSSSRSRNSSRNSTPGSSRGTSPARMAGNGGDAALALLLLDRLNQLESKMSGKGQQQQGQTVTKKSAAEASKKPRQKRTATKAYNVTQAFGRRGPEQTQGNFGDQELIRQGTDYKHWPQIAQFAPSASAFFGMSRIGMEVTPSGTWLTYTGAIKLDDKDPNFKDQVILLNKHIDAYKTFPPTEPKKDKKKKADETQALPQRQKKQQTVTLLPAADLDDFSKQLQQSMSSADSTQAGGSGHHHHHH

SEQ ID NO: 3212 - protein, 806 aa, Artificial Sequence
  Description of Artificial Sequence: Synthetic polypeptide
MKIEEGKLVIWINGDKGYNGLAEVGKKFEKDTGIKVTVEHPDKLEEKFPQVAATGDGPDIIFWAHDRFGGYAQSGLLAEITPDKAFQDKLYPFTWDAVRYNGKLIAYPIAVEALSLIYNKDLLPNPPKTWEEIPALDKELKAKGKSALMFNLQEPYFTWPLIAADGGYAFKYENGKYDIKDVGVDNAGAKAGLTFLVDLIKNKHMNADTDYSIAEAAFNKGETAMTINGPWAWSNIDTSKVNYGVTVLPTFKGQPSKPFVGVLSAGINAASPNKELAKEFLENYLLTDEGLEAVNKDKPLGAVALKSYEEELAKDPRIAATMENAQKGEIMPNIPQMSAFWYAVRTAVINAASGRQTVDEALKDAQTGGSGENLYFQSSDNGPQNQRNAPRITFGGPSDSTGSNQNGERSGARSKQRRPQGLPNNTASWFTALTQHGKEDLKFPRGQGVPINTNSSPDDQIGYYRRATRRIRGGDGKMKDLSPRWYFYYLGTGPEAGLPYGANKDGIIWVATEGALNTPKDHIGTRNPANNAAIVLQLPQGTKLPKGFYAEGSRGGSQASSRSSSRSRNSSRNSTPGSSRGTSPARMAGNGGDAALALLLLDRLNQLESKMSGKGQQQQGQTVTKKSAAEASKKPRQKRTATKAYNVTQAFGRRGPEQTQGNFGDQELIRQGTDYKHWPQIAQFAPSASAFFGMSRIGMEVTPSGTWLTYTGAIKLDDKDPNFKDQVILLNKHIDAYKTFPPTEPKKDKKKKADETQALPQRQKKQQTVTLLPAADLDDFSKQLQQSMSSADSTQAGGSGHHHHHH

SEQ ID NO: 3213 - protein, 806 aa, Artificial Sequence
  Description of Artificial Sequence: Synthetic polypeptide
MKIEEGKLVIWINGDKGYNGLAEVGKKFEKDTGIKVTVEHPDKLEEKFPQVAATGDGPDIIFWAHDRFGGYAQSGLLAEITPDKAFQDKLYPFTWDAVRYNGKLIAYPIAVEALSLIYNKDLLPNPPKTWEEIPALDKELKAKGKSALMFNLQEPYFTWPLIAADGGYAFKYENGKYDIKDVGVDNAGAKAGLTFLVDLIKNKHMNADTDYSIAEAAFNKGETAMTINGPWAWSNIDTSKVNYGVTVLPTFKGQPSKPFVGVLSAGINAASPNKELAKEFLENYLLTDEGLEAVNKDKPLGAVALKSYEEELAKDPRIAATMENAQKGEIMPNIPQMSAFWYAVRTAVINAASGRQTVDEALKDAQTGGSGENLYFQSSDNGPQNQRNAPRITFGGPSDSTGSNQNGERSGARSKQRRPQGLPNNTASWFTALTQHGKEDLKFPRGQGVPINTNSSPDDQIGYYRRATRRIRGGDGKMKDLSPRWYFYYLGTGPEAGLPYGANKDGIIWVATEGALNTPKDHIGTRNPANNAAIVLQLPQGTTLPKGFYAEGSRGGSQASSRSSSRSRNSSRNSTPGSSRGTSPARMAGNGGDAALALLLLDRLNQLESKMSGKGQQQQGQTVTKKSAAEASKKPRQKRTATKDYNVTQAFGRRGPEQTQGNFGDQDLIKLGTDYKHWPQIAQFAPSASAFFGMSRIGTEETPSGTWLTYTGAIKLDKKDPNFKDQVILLNKHIDAYKTFPPTEPKKDKKKKADETQALPQRQKKQQTVTLLPAADLDDFSKQLQQSMSSADSTQAGGSGHHHHHH

SEQ ID NO: 3214 - protein, 806 aa, Artificial Sequence
  Description of Artificial Sequence: Synthetic polypeptide
MKIEEGKLVIWINGDKGYNGLAEVGKKFEKDTGIKVTVEHPDKLEEKFPQVAATGDGPDIIFWAHDRFGGYAQSGLLAEITPDKAFQDKLYPFTWDAVRYNGKLIAYPIAVEALSLIYNKDLLPNPPKTWEEIPALDKELKAKGKSALMFNLQEPYFTWPLIAADGGYAFKYENGKYDIKDVGVDNAGAKAGLTFLVDLIKNKHMNADTDYSIAEAAFNKGETAMTINGPWAWSNIDTSKVNYGVTVLPTFKGQPSKPFVGVLSAGINAASPNKELAKEFLENYLLTDEGLEAVNKDKPLGAVALKSYEEELAKDPRIAATMENAQKGEIMPNIPQMSAFWYAVRTAVINAASGRQTVDEALKDAQTGGSGENLYFQSSDNGPQNQRNAPRITFGGPSDSTGSNQNGERSGARSKQRRPQGLPNNTASWFTPLTQNGKEDLKFPPGQGVPINTNSSPDDQIGYYRRATRRIRGGDGKMKDLPPKWYFYYLGTGPHADLPYGQKHDGVFWVARPGALNTPKDHIGTRNPANNAAIPNQLPPGTKLPKGFYAEGSRGGSQASSRSSSRSRNSSRNSTPGSSRGTSPARMAGNGGDAALALLLLDRLNQLESKMSGKGQQQQGQTVTKKSAAEASKKPRQKRTATKAYNVTQAFGRRGPEQTQGNFGDQELIRQGTDYKHWPQIAQFAPSASAFFGMSRIGMEVTPSGTWLTYTGAIKLDDKDPNFKDQVILLNKHIDAYKTFPPTEPKKDKKKKADETQALPQRQKKQQTVTLLPAADLDDFSKQLQQSMSSADSTQAGGSGHHHHHH

SEQ ID NO: 3215 - protein, 806 aa, Artificial Sequence
  Description of Artificial Sequence: Synthetic polypeptide
MKIEEGKLVIWINGDKGYNGLAEVGKKFEKDTGIKVTVEHPDKLEEKFPQVAATGDGPDIIFWAHDRFGGYAQSGLLAEITPDKAFQDKLYPFTWDAVRYNGKLIAYPIAVEALSLIYNKDLLPNPPKTWEEIPALDKELKAKGKSALMFNLQEPYFTWPLIAADGGYAFKYENGKYDIKDVGVDNAGAKAGLTFLVDLIKNKHMNADTDYSIAEAAFNKGETAMTINGPWAWSNIDTSKVNYGVTVLPTFKGQPSKPFVGVLSAGINAASPNKELAKEFLENYLLTDEGLEAVNKDKPLGAVALKSYEEELAKDPRIAATMENAQKGEIMPNIPQMSAFWYAVRTAVINAASGRQTVDEALKDAQTGGSGENLYFQSSDNGPQNQRNAPRITFGGPSDSTGSNQNGERSGARSKQRRPQGLPNNTASWFTALTQHGKEDLKFPRGQGVPINTNSSPDDQIGYYRRATRRIRGGDGKMKDLSPRWYFYYLGTGPEAGLPYGANKDGIIWVATEGALNTPKDHIGTRNPANNAAIVLQLPQGTTLPKGFYAEGSRGGSQASSRSSSRSRNSSRNSTPGSSRGTSPARMAGNGGDAALALLLLDRLNQLESKMSGKGQQQQGQTVTKKSAAEASKKPRQKRTATKACNVTQAFGRRGPEQTQGNFGDQELIRQGTDYKHWPQIAQFAPSASAFFGMSRIGMEVTPSGTWLTYTGAIKLDDKDPNFKDQVILLNKHIDAYKTFPPTEPKKDKKKKADETQALPQRQKKQQTVTLLPAADLDDFSKQLQQSMSSADSTQAGGSGHHHHHH

SEQ ID NO: 3216 - protein, 806 aa, Artificial Sequence
  Description of Artificial Sequence: Synthetic polypeptide
MKIEEGKLVIWINGDKGYNGLAEVGKKFEKDTGIKVTVEHPDKLEEKFPQVAATGDGPDIIFWAHDRFGGYAQSGLLAEITPDKAFQDKLYPFTWDAVRYNGKLIAYPIAVEALSLIYNKDLLPNPPKTWEEIPALDKELKAKGKSALMFNLQEPYFTWPLIAADGGYAFKYENGKYDIKDVGVDNAGAKAGLTFLVDLIKNKHMNADTDYSIAEAAFNKGETAMTINGPWAWSNIDTSKVNYGVTVLPTFKGQPSKPFVGVLSAGINAASPNKELAKEFLENYLLTDEGLEAVNKDKPLGAVALKSYEEELAKDPRIAATMENAQKGEIMPNIPQMSAFWYAVRTAVINAASGRQTVDEALKDAQTGGSGENLYFQSSDNGPQNQRNAPRITFGGPSDSTGSNQNGERSGARSKQRRPQGLPNNTASWFTALTQHGKEDLKFPPGQGVPINPNSKPDDQIGYYRREVRRYRGGDGQMKDLPPRWYFYYLGTGPEAGLPYGANKDGIIWVATEGALNTPKDHIGTRNPANNAAIVLQLPQGTTLPKGFYAEGSRGGSQASSRSSSRSRNSSRNSTPGSSRGTSPARMAGNGGDAALALLLLDRLNQLESKMSGKGQQQQGQTVTKKSAAEASKKPRQKRTATKAYNVTQAFGRRGPEQTQGNFGDQELIRQGTDYKHWPQIAQFAPSASAFFGMSRIGMEVTPSGTWLTYTGAIKLDDKDPNFKDQVILLNKHIDAYKTFPPTEPKKDKKKKADETQALPQRQKKQQTVTLLPAADLDDFSKQLQQSMSSADSTQAGGSGHHHHHH

SEQ ID NO: 3217 - protein, 806 aa, Artificial Sequence
  Description of Artificial Sequence: Synthetic polypeptide
MKIEEGKLVIWINGDKGYNGLAEVGKKFEKDTGIKVTVEHPDKLEEKFPQVAATGDGPDIIFWAHDRFGGYAQSGLLAEITPDKAFQDKLYPFTWDAVRYNGKLIAYPIAVEALSLIYNKDLLPNPPKTWEEIPALDKELKAKGKSALMFNLQEPYFTWPLIAADGGYAFKYENGKYDIKDVGVDNAGAKAGLTFLVDLIKNKHMNADTDYSIAEAAFNKGETAMTINGPWAWSNIDTSKVNYGVTVLPTFKGQPSKPFVGVLSAGINAASPNKELAKEFLENYLLTDEGLEAVNKDKPLGAVALKSYEEELAKDPRIAATMENAQKGEIMPNIPQMSAFWYAVRTAVINAASGRQTVDEALKDAQTGGSGENLYFQSSDNGPQNQRNAPRITFGGPSDSTGSNQNGERSGARSKQRRPQGLPNNTASWFTALTQHGKEDLKFPRGQGVPINTNSSPDDQIGYYRRATRRIRGGDGKMKDLSPLWYFYYLGTGPEAGLPYGANKDGIIWVATEGALNTPKDHIGTRNPANNAAIVLQLPQGTTLPKGFYAEGSRGGSQASSRSSSRSRNSSRNSTPGSSRGTSPARMAGNGGDAALALLLLDRLNQLESKMSGKGQQQQGQTVTKKSAAEASKKPRQKRTATKAYNVTQAFGRRGPEQTQGNFGDQELIRQGTDYKHWPQIAQFAPSASAFFGMSRIGMEVTPSGTWLTYTGAIKLDDKDPNFKDQVILLNKHIDAYKTFPPTEPKKDKKKKADETQALPQRQKKQQTVTLLPAADLDDFSKQLQQSMSSADSTQAGGSGHHHHHH

SEQ ID NO: 3218 - protein, 806 aa, Artificial Sequence
  Description of Artificial Sequence: Synthetic polypeptide
MKIEEGKLVIWINGDKGYNGLAEVGKKFEKDTGIKVTVEHPDKLEEKFPQVAATGDGPDIIFWAHDRFGGYAQSGLLAEITPDKAFQDKLYPFTWDAVRYNGKLIAYPIAVEALSLIYNKDLLPNPPKTWEEIPALDKELKAKGKSALMFNLQEPYFTWPLIAADGGYAFKYENGKYDIKDVGVDNAGAKAGLTFLVDLIKNKHMNADTDYSIAEAAFNKGETAMTINGPWAWSNIDTSKVNYGVTVLPTFKGQPSKPFVGVLSAGINAASPNKELAKEFLENYLLTDEGLEAVNKDKPLGAVALKSYEEELAKDPRIAATMENAQKGEIMPNIPQMSAFWYAVRTAVINAASGRQTVDEALKDAQTGGSGENLYFQSSDNGPQNQRNAPRITFGGPSDSTGSNQNGERSGARSKQRRPQGLPNNTASWFTPLTQHGKEDLKFPPGQGVPINTNSSPDDQIGYYRRATRRIRGGDGKMKDLPPRWYFYYLGTGPEADLPYGQVKDGIFWVAEEGALNTPKDHIGTRNPANNAAIPLQLPPGTTLPKGFYAEGSRGGSQASSRSSSRSRNSSRNSTPGSSRGTSPARMAGNGGDAALALLLLDRLNQLESKMSGKGQQQQGQTVTKKSAAEASKKPRQKRTATKAYNVTQAFGRRGPEQTQGNFGDQELIRQGTDYKHWPQIAQFAPSASAFFGMSRIGMEVTPSGTWLTYTGAIKLDDKDPNFKDQVILLNKHIDAYKTFPPTEPKKDKKKKADETQALPQRQKKQQTVTLLPAADLDDFSKQLQQSMSSADSTQAGGSGHHHHHH

SEQ ID NO: 3219 - protein, 806 aa, Artificial Sequence
  Description of Artificial Sequence: Synthetic polypeptide
MKIEEGKLVIWINGDKGYNGLAEVGKKFEKDTGIKVTVEHPDKLEEKFPQVAATGDGPDIIFWAHDRFGGYAQSGLLAEITPDKAFQDKLYPFTWDAVRYNGKLIAYPIAVEALSLIYNKDLLPNPPKTWEEIPALDKELKAKGKSALMFNLQEPYFTWPLIAADGGYAFKYENGKYDIKDVGVDNAGAKAGLTFLVDLIKNKHMNADTDYSIAEAAFNKGETAMTINGPWAWSNIDTSKVNYGVTVLPTFKGQPSKPFVGVLSAGINAASPNKELAKEFLENYLLTDEGLEAVNKDKPLGAVALKSYEEELAKDPRIAATMENAQKGEIMPNIPQMSAFWYAVRTAVINAASGRQTVDEALKDAQTGGSGENLYFQSSDNGPQNQRNAPRITFGGPSDSTGSNQNGERSGARSKQRRPQGLPNNTASWFTALTQHGKEDLKFPRGQGVPINTNSSPDDQIGYYRRATRRIRGGDGKMKDLSPRWYFYYLGTGPEAGLPYGANKDGIIWVATEGALNTPKDHIGTRNPANNAAIVLQLPQGTTLPKGFYAEGSRGGSQASSRSSSRSRNSSRNSTPGSSRGTSPARMAGNGGDAALALLLLDRLNQLESKMSGKGQQQQGQTVTKKSAAEMSKKPRQKRTATKGCNVTQCFGPRGPEQTQGNFGDAELVKKGTDYKHWPQIAQFAPSASAFFGMSRISSKETPSGTWLTYTGAIKLDKDDPNFKDQVILLNKHIDAYKTFPPTEPKKDKKKKADETQALPQRQKKQQTVTLLPAADLDDFSKQLQQSMSSADSTQAGGSGHHHHHH

SEQ ID NO: 3220 - protein, 806 aa, Artificial Sequence
  Description of Artificial Sequence: Synthetic polypeptide
MKIEEGKLVIWINGDKGYNGLAEVGKKFEKDTGIKVTVEHPDKLEEKFPQVAATGDGPDIIFWAHDRFGGYAQSGLLAEITPDKAFQDKLYPFTWDAVRYNGKLIAYPIAVEALSLIYNKDLLPNPPKTWEEIPALDKELKAKGKSALMFNLQEPYFTWPLIAADGGYAFKYENGKYDIKDVGVDNAGAKAGLTFLVDLIKNKHMNADTDYSIAEAAFNKGETAMTINGPWAWSNIDTSKVNYGVTVLPTFKGQPSKPFVGVLSAGINAASPNKELAKEFLENYLLTDEGLEAVNKDKPLGAVALKSYEEELAKDPRIAATMENAQKGEIMPNIPQMSAFWYAVRTAVINAASGRQTVDEALKDAQTGGSGENLYFQSSDNGPQNQRNAPRITFGGPSDSTGSNQNGERSGARSKQRRPQGLPNNTASWFTALTQHGKEDLKFPRGQGVPINTNSSPDDQIGYYRRATRRIRGGDGKMKDLSPRWYFYYLGTGPEAGLPYGANKDGIIWVATEGALNTPKDHIGTRNPANNAAIVLQLPQGTTLPKGFYAEGSRGGSQASSRSSSRSRNSSRNSTPGSSRGTSPARMAGNGGDAALALLLLDRLNQLESKMSGKGQQQQGQTVTKKSAAEMSKKPRWKRTATKEYNVTQAFGKRGPKDTQGNFGDAELIKQGTDYKHWPQIAQFVPSAAAFFFMSRISMKETPDGVWLTYTGTIKLDKDDPNFDDQVKLLNKHIDAYKTFPPTEPKKDKKKKADETQALPQRQKKQQTVTLLPAADLDDFSKQLQQSMSSADSTQAGGSGHHHHHH

SEQ ID NO: 3221 - protein, 806 aa, Artificial Sequence
  Description of Artificial Sequence: Synthetic polypeptide
MKIEEGKLVIWINGDKGYNGLAEVGKKFEKDTGIKVTVEHPDKLEEKFPQVAATGDGPDIIFWAHDRFGGYAQSGLLAEITPDKAFQDKLYPFTWDAVRYNGKLIAYPIAVEALSLIYNKDLLPNPPKTWEEIPALDKELKAKGKSALMFNLQEPYFTWPLIAADGGYAFKYENGKYDIKDVGVDNAGAKAGLTFLVDLIKNKHMNADTDYSIAEAAFNKGETAMTINGPWAWSNIDTSKVNYGVTVLPTFKGQPSKPFVGVLSAGINAASPNKELAKEFLENYLLTDEGLEAVNKDKPLGAVALKSYEEELAKDPRIAATMENAQKGEIMPNIPQMSAFWYAVRTAVINAASGRQTVDEALKDAQTGGSGENLYFQSSDNGPQNQRNAPRITFGGPSDSTGSNQNGERSGARSKQRRPQGLPNNTASWFTALTQHGKEDLKFPRGQGVPINTNSSPDDQIGYYRRATRRIRGGDGKMKDLSPVWYFYYLGTGPEAGLPYGANKDGIIWVATEGALNTPKDHIGTRNPANNAAIVLQLPQGTTLPKGFYAEGSRGGSQASSRSSSRSRNSSRNSTPGSSRGTSPARMAGNGGDAALALLLLDRLNQLESKMSGKGQQQQGQTVTKKSAAEASKKPRQKRTATKAYNVTQAFGRRGPEQTQGNFGDQELIRQGTDYKHWPQIAQFAPSASAFFGMSRIGMEVTPSGTWLTYTGAIKLDDKDPNFKDQVILLNKHIDAYKTFPPTEPKKDKKKKADETQALPQRQKKQQTVTLLPAADLDDFSKQLQQSMSSADSTQAGGSGHHHHHH

SEQ ID NO: 3222 - protein, 806 aa, Artificial Sequence
  Description of Artificial Sequence: Synthetic polypeptide
MKIEEGKLVIWINGDKGYNGLAEVGKKFEKDTGIKVTVEHPDKLEEKFPQVAATGDGPDIIFWAHDRFGGYAQSGLLAEITPDKAFQDKLYPFTWDAVRYNGKLIAYPIAVEALSLIYNKDLLPNPPKTWEEIPALDKELKAKGKSALMFNLQEPYFTWPLIAADGGYAFKYENGKYDIKDVGVDNAGAKAGLTFLVDLIKNKHMNADTDYSIAEAAFNKGETAMTINGPWAWSNIDTSKVNYGVTVLPTFKGQPSKPFVGVLSAGINAASPNKELAKEFLENYLLTDEGLEAVNKDKPLGAVALKSYEEELAKDPRIAATMENAQKGEIMPNIPQMSAFWYAVRTAVINAASGRQTVDEALKDAQTGGSGENLYFQSSDNGPQNQRNAPRITFGGPSDSTGSNQNGERSGARSKQRRPQGLPNNTASWFTPLTQNGKEDLKFPPGQGVPINTNSSPDDQIGYYRRATRRIRGGDGKMKDLPPKWYFYYLGTGPHADLPYGQKHDGVFWVARPGALNTPKDHIGTRNPANNAAIPLQLPPGTKLPKGFYAEGSRGGSQASSRSSSRSRNSSRNSTPGSSRGTSPARMAGNGGDAALALLLLDRLNQLESKMSGKGQQQQGQTVTKKSAAEASKKPRQKRTATKAYNVTQAFGRRGPEQTQGNFGDQELIRQGTDYKHWPQIAQFAPSASAFFGMSRIGMEVTPSGTWLTYTGAIKLDDKDPNFKDQVILLNKHIDAYKTFPPTEPKKDKKKKADETQALPQRQKKQQTVTLLPAADLDDFSKQLQQSMSSADSTQAGGSGHHHHHH

SEQ ID NO: 3223 - protein, 806 aa, Artificial Sequence
  Description of Artificial Sequence: Synthetic polypeptide
MKIEEGKLVIWINGDKGYNGLAEVGKKFEKDTGIKVTVEHPDKLEEKFPQVAATGDGPDIIFWAHDRFGGYAQSGLLAEITPDKAFQDKLYPFTWDAVRYNGKLIAYPIAVEALSLIYNKDLLPNPPKTWEEIPALDKELKAKGKSALMFNLQEPYFTWPLIAADGGYAFKYENGKYDIKDVGVDNAGAKAGLTFLVDLIKNKHMNADTDYSIAEAAFNKGETAMTINGPWAWSNIDTSKVNYGVTVLPTFKGQPSKPFVGVLSAGINAASPNKELAKEFLENYLLTDEGLEAVNKDKPLGAVALKSYEEELAKDPRIAATMENAQKGEIMPNIPQMSAFWYAVRTAVINAASGRQTVDEALKDAQTGGSGENLYFQSSDNGPQNQRNAPRITFGGPSDSTGSNQNGERSGARSKQRRPQGLPNNTASWFTALTQHGKEDLKFPRGQGVPINTNSSPDDQIGYYRRATRRIRGGDGKMKDLSPRWYFYYLGTGPEAGLPYGATKDGIIWVATEGALNTPKDHIGTRNPANNAAIVLQLPQGTTLPKGFYAEGSRGGSQASSRSSSRSRNSSRNSTPGSSRGTSPARMAGNGGDAALALLLLDRLNQLESKMSGKGQQQQGQTVTKKSAAEASKKPRQKRTATKAYNVTQAFGRRGPEQTQGNFGDQELIRQGTDYKHWPQIAQFAPSASAFFGMSRIGMEVTPSGTWLTYTGAIKLDDKDPNFKDQVILLNKHIDAYKTFPPTEPKKDKKKKADETQALPQRQKKQQTVTLLPAADLDDFSKQLQQSMSSADSTQAGGSGHHHHHH

SEQ ID NO: 3224 - protein, 806 aa, Artificial Sequence
  Description of Artificial Sequence: Synthetic polypeptide
MKIEEGKLVIWINGDKGYNGLAEVGKKFEKDTGIKVTVEHPDKLEEKFPQVAATGDGPDIIFWAHDRFGGYAQSGLLAEITPDKAFQDKLYPFTWDAVRYNGKLIAYPIAVEALSLIYNKDLLPNPPKTWEEIPALDKELKAKGKSALMFNLQEPYFTWPLIAADGGYAFKYENGKYDIKDVGVDNAGAKAGLTFLVDLIKNKHMNADTDYSIAEAAFNKGETAMTINGPWAWSNIDTSKVNYGVTVLPTFKGQPSKPFVGVLSAGINAASPNKELAKEFLENYLLTDEGLEAVNKDKPLGAVALKSYEEELAKDPRIAATMENAQKGEIMPNIPQMSAFWYAVRTAVINAASGRQTVDEALKDAQTGGSGENLYFQSSDNGPQNQRNAPRITFGGPSDSTGSNQNGERSGARSKQRRPQGLPNNTASWFTALTQHGKEDLKFPRGQGVPINTNSSPDDQIGYYRRATRRIRGGDGKMKDLSPRWYFYYLGTGPEAGLPYGQNKDGIIWVATEGALNTPKDHIGTRNPANNAAIVLQLPQGTTLPKGFYAEGSRGGSQASSRSSSRSRNSSRNSTPGSSRGTSPARMAGNGGDAALALLLLDRLNQLESKMSGKGQQQQGQTVTKKSAAEASKKPRQKRTATKAYNVTQAFGRRGPEQTQGNFGDQELIRQGTDYKHWPQIAQFAPSASAFFGMSRIGMEVTPSGTWLTYTGAIKLDDKDPNFKDQVILLNKHIDAYKTFPPTEPKKDKKKKADETQALPQRQKKQQTVTLLPAADLDDFSKQLQQSMSSADSTQAGGSGHHHHHH

SEQ ID NO: 3225 - protein, 806 aa, Artificial Sequence
  Description of Artificial Sequence: Synthetic polypeptide
MKIEEGKLVIWINGDKGYNGLAEVGKKFEKDTGIKVTVEHPDKLEEKFPQVAATGDGPDIIFWAHDRFGGYAQSGLLAEITPDKAFQDKLYPFTWDAVRYNGKLIAYPIAVEALSLIYNKDLLPNPPKTWEEIPALDKELKAKGKSALMFNLQEPYFTWPLIAADGGYAFKYENGKYDIKDVGVDNAGAKAGLTFLVDLIKNKHMNADTDYSIAEAAFNKGETAMTINGPWAWSNIDTSKVNYGVTVLPTFKGQPSKPFVGVLSAGINAASPNKELAKEFLENYLLTDEGLEAVNKDKPLGAVALKSYEEELAKDPRIAATMENAQKGEIMPNIPQMSAFWYAVRTAVINAASGRQTVDEALKDAQTGGSGENLYFQSSDNGPQNQRNAPRITFGGPSDSTGSNQNGERSGARSKQRRPQGLPNNTASWFTALTQHGKEDLKFPRGQGVPINTNSSPDDQIGYYRRATRRIRGGDGKMKDLSPRWYFYYLGTGPEAGLPYGANKDGIIWVATEGALNTPKDHIGTRNPANNAAHVLQLPQGTTLPKGFYAEGSRGGSQASSRSSSRSRNSSRNSTPGSSRGTSPARMAGNGGDAALALLLLDRLNQLESKMSGKGQQQQGQTVTKKSAAEASKKPRQKRTATKAYNVTQAFGRRGPEQTQGNFGDQELIRQGTDYKHWPQIAQFAPSASAFFGMSRIGMEVTPSGTWLTYTGAIKLDDKDPNFKDQVILLNKHIDAYKTFPPTEPKKDKKKKADETQALPQRQKKQQTVTLLPAADLDDFSKQLQQSMSSADSTQAGGSGHHHHHH

SEQ ID NO: 3226 - protein, 806 aa, Artificial Sequence
  Description of Artificial Sequence: Synthetic polypeptide
MKIEEGKLVIWINGDKGYNGLAEVGKKFEKDTGIKVTVEHPDKLEEKFPQVAATGDGPDIIFWAHDRFGGYAQSGLLAEITPDKAFQDKLYPFTWDAVRYNGKLIAYPIAVEALSLIYNKDLLPNPPKTWEEIPALDKELKAKGKSALMFNLQEPYFTWPLIAADGGYAFKYENGKYDIKDVGVDNAGAKAGLTFLVDLIKNKHMNADTDYSIAEAAFNKGETAMTINGPWAWSNIDTSKVNYGVTVLPTFKGQPSKPFVGVLSAGINAASPNKELAKEFLENYLLTDEGLEAVNKDKPLGAVALKSYEEELAKDPRIAATMENAQKGEIMPNIPQMSAFWYAVRTAVINAASGRQTVDEALKDAQTGGSGENLYFQSSDNGPQNQRNAPRITFGGPSDSTGSNQNGERSGARSKQRRPQGLPNNTASWFTGLTQHGKEDLKFPPGQGVPINTNSSPDDQIGYYRRATRRIRGGDGKMKDLPPRWYFYYLGTGPEADLPYGAVKPGIFWVAAEGALNTPKDHIGTRNPANNAAIPLQLPPGTTLPKGFYAEGSRGGSQASSRSSSRSRNSSRNSTPGSSRGTSPARMAGNGGDAALALLLLDRLNQLESKMSGKGQQQQGQTVTKKSAAEASKKPRQKRTATKAYNVTQAFGRRGPEQTQGNFGDQELIRQGTDYKHWPQIAQFAPSASAFFGMSRIGMEVTPSGTWLTYTGAIKLDDKDPNFKDQVILLNKHIDAYKTFPPTEPKKDKKKKADETQALPQRQKKQQTVTLLPAADLDDFSKQLQQSMSSADSTQAGGSGHHHHHH

SEQ ID NO: 3227 - protein, 806 aa, Artificial Sequence
  Description of Artificial Sequence: Synthetic polypeptide
MKIEEGKLVIWINGDKGYNGLAEVGKKFEKDTGIKVTVEHPDKLEEKFPQVAATGDGPDIIFWAHDRFGGYAQSGLLAEITPDKAFQDKLYPFTWDAVRYNGKLIAYPIAVEALSLIYNKDLLPNPPKTWEEIPALDKELKAKGKSALMFNLQEPYFTWPLIAADGGYAFKYENGKYDIKDVGVDNAGAKAGLTFLVDLIKNKHMNADTDYSIAEAAFNKGETAMTINGPWAWSNIDTSKVNYGVTVLPTFKGQPSKPFVGVLSAGINAASPNKELAKEFLENYLLTDEGLEAVNKDKPLGAVALKSYEEELAKDPRIAATMENAQKGEIMPNIPQMSAFWYAVRTAVINAASGRQTVDEALKDAQTGGSGENLYFQSSDNGPQNQRNAPRITFGGPSDSTGSNQNGERSGARSKQRRPQGLPNNTASWFTPLTQFGKEDLKFPPGQGVPINTNSSPDDQIGYYRRATRRIRGGDGKMKDLPPKWYFYYLGTGPHADLPYGQKKDGVFWVARPGALNTPKDHIGTRNPANNAAIPLQLPPGTKLPKGFYAEGSRGGSQASSRSSSRSRNSSRNSTPGSSRGTSPARMAGNGGDAALALLLLDRLNQLESKMSGKGQQQQGQTVTKKSAAEASKKPRQKRTATKAYNVTQAFGRRGPEQTQGNFGDQELIRQGTDYKHWPQIAQFAPSASAFFGMSRIGMEVTPSGTWLTYTGAIKLDDKDPNFKDQVILLNKHIDAYKTFPPTEPKKDKKKKADETQALPQRQKKQQTVTLLPAADLDDFSKQLQQSMSSADSTQAGGSGHHHHHH

SEQ ID NO: 3228 - protein, 806 aa, Artificial Sequence
  Description of Artificial Sequence: Synthetic polypeptide
MKIEEGKLVIWINGDKGYNGLAEVGKKFEKDTGIKVTVEHPDKLEEKFPQVAATGDGPDIIFWAHDRFGGYAQSGLLAEITPDKAFQDKLYPFTWDAVRYNGKLIAYPIAVEALSLIYNKDLLPNPPKTWEEIPALDKELKAKGKSALMFNLQEPYFTWPLIAADGGYAFKYENGKYDIKDVGVDNAGAKAGLTFLVDLIKNKHMNADTDYSIAEAAFNKGETAMTINGPWAWSNIDTSKVNYGVTVLPTFKGQPSKPFVGVLSAGINAASPNKELAKEFLENYLLTDEGLEAVNKDKPLGAVALKSYEEELAKDPRIAATMENAQKGEIMPNIPQMSAFWYAVRTAVINAASGRQTVDEALKDAQTGGSGENLYFQSSDNGPQNQRNAPRITFGGPSDSTGSNQNGERSGARSKQRRPQGLPNNTASWFTALTQHGKEDLKFPRGQGVPINTNSSPDDQIGYYRRATRRIRGGDGKMKDLSPRWYFYYLGTGPEAGLPYGAKKDGIIWVATEGALNTPKDHIGTRNPANNAAIVLQLPQGTTLPKGFYAEGSRGGSQASSRSSSRSRNSSRNSTPGSSRGTSPARMAGNGGDAALALLLLDRLNQLESKMSGKGQQQQGQTVTKKSAAEASKKPRQKRTATKAYNVTQAFGRRGPEQTQGNFGDQELIRQGTDYKHWPQIAQFAPSASAFFGMSRIGMEVTPSGTWLTYTGAIKLDDKDPNFKDQVILLNKHIDAYKTFPPTEPKKDKKKKADETQALPQRQKKQQTVTLLPAADLDDFSKQLQQSMSSADSTQAGGSGHHHHHH

SEQ ID NO: 3229 - protein, 806 aa, Artificial Sequence
  Description of Artificial Sequence: Synthetic polypeptide
MKIEEGKLVIWINGDKGYNGLAEVGKKFEKDTGIKVTVEHPDKLEEKFPQVAATGDGPDIIFWAHDRFGGYAQSGLLAEITPDKAFQDKLYPFTWDAVRYNGKLIAYPIAVEALSLIYNKDLLPNPPKTWEEIPALDKELKAKGKSALMFNLQEPYFTWPLIAADGGYAFKYENGKYDIKDVGVDNAGAKAGLTFLVDLIKNKHMNADTDYSIAEAAFNKGETAMTINGPWAWSNIDTSKVNYGVTVLPTFKGQPSKPFVGVLSAGINAASPNKELAKEFLENYLLTDEGLEAVNKDKPLGAVALKSYEEELAKDPRIAATMENAQKGEIMPNIPQMSAFWYAVRTAVINAASGRQTVDEALKDAQTGGSGENLYFQSSDNGPQNQRNAPRITFGGPSDSTGSNQNGERSGARSKQRRPQGLPNNTASWFTGLTQHGKEDLKFPPGQGVPINTNSSPDDQIGYYRRATRRIRGGDGKMKDLPPRWYFYYLGTGPEADLPYGAVKDGIVWVAEEGALNTPKDHIGTRNPANNAAIPLQLPPGTTLPKGFYAEGSRGGSQASSRSSSRSRNSSRNSTPGSSRGTSPARMAGNGGDAALALLLLDRLNQLESKMSGKGQQQQGQTVTKKSAAEASKKPRQKRTATKAYNVTQAFGRRGPEQTQGNFGDQELIRQGTDYKHWPQIAQFAPSASAFFGMSRIGMEVTPSGTWLTYTGAIKLDDKDPNFKDQVILLNKHIDAYKTFPPTEPKKDKKKKADETQALPQRQKKQQTVTLLPAADLDDFSKQLQQSMSSADSTQAGGSGHHHHHH

SEQ ID NO: 3230 - protein, 806 aa, Artificial Sequence
  Description of Artificial Sequence: Synthetic polypeptide
MKIEEGKLVIWINGDKGYNGLAEVGKKFEKDTGIKVTVEHPDKLEEKFPQVAATGDGPDIIFWAHDRFGGYAQSGLLAEITPDKAFQDKLYPFTWDAVRYNGKLIAYPIAVEALSLIYNKDLLPNPPKTWEEIPALDKELKAKGKSALMFNLQEPYFTWPLIAADGGYAFKYENGKYDIKDVGVDNAGAKAGLTFLVDLIKNKHMNADTDYSIAEAAFNKGETAMTINGPWAWSNIDTSKVNYGVTVLPTFKGQPSKPFVGVLSAGINAASPNKELAKEFLENYLLTDEGLEAVNKDKPLGAVALKSYEEELAKDPRIAATMENAQKGEIMPNIPQMSAFWYAVRTAVINAASGRQTVDEALKDAQTGGSGENLYFQSSDNGPQNQRNAPRITFGGPSDSTGSNQNGERSGARSKQRRPQGLPNNTASWFTALTQHGKEDLKFPRGQGVPINTNSSPDDQIGSYRRATRRIRGGDGKMKDLSPRWYFYYLGTGPEAGLPYGANKDGIIWVATEGALNTPKDHIGTRNPANNAAIVLQLPQGTTLPKGFYAEGSRGGSQASSRSSSRSRNSSRNSTPGSSRGTSPARMAGNGGDAALALLLLDRLNQLESKMSGKGQQQQGQTVTKKSAAEASKKPRQKRTATKAYNVTQAFGRRGPEQTQGNFGDQELIRQGTDYKHWPQIAQFAPSASAFFGMSRIGMEVTPSGTWLTYTGAIKLDDKDPNFKDQVILLNKHIDAYKTFPPTEPKKDKKKKADETQALPQRQKKQQTVTLLPAADLDDFSKQLQQSMSSADSTQAGGSGHHHHHH

SEQ ID NO: 3231 - protein, 806 aa, Artificial Sequence
  Description of Artificial Sequence: Synthetic polypeptide
MKIEEGKLVIWINGDKGYNGLAEVGKKFEKDTGIKVTVEHPDKLEEKFPQVAATGDGPDIIFWAHDRFGGYAQSGLLAEITPDKAFQDKLYPFTWDAVRYNGKLIAYPIAVEALSLIYNKDLLPNPPKTWEEIPALDKELKAKGKSALMFNLQEPYFTWPLIAADGGYAFKYENGKYDIKDVGVDNAGAKAGLTFLVDLIKNKHMNADTDYSIAEAAFNKGETAMTINGPWAWSNIDTSKVNYGVTVLPTFKGQPSKPFVGVLSAGINAASPNKELAKEFLENYLLTDEGLEAVNKDKPLGAVALKSYEEELAKDPRIAATMENAQKGEIMPNIPQMSAFWYAVRTAVINAASGRQTVDEALKDAQTGGSGENLYFQSSDNGPQNQRNAPRITFGGPSDSTGSNQNGERSGARSKQRRPQGLPNNTASWFTALTQHGKEDLKFPRGQGVPINTNSSPDDQIGAYRRATRRIRGGDGKMKDLSPRWYFYYLGTGPEAGLPYGANKDGIIWVATEGALNTPKDHIGTRNPANNAAIVLQLPQGTTLPKGFYAEGSRGGSQASSRSSSRSRNSSRNSTPGSSRGTSPARMAGNGGDAALALLLLDRLNQLESKMSGKGQQQQGQTVTKKSAAEASKKPRQKRTATKAYNVTQAFGRRGPEQTQGNFGDQELIRQGTDYKHWPQIAQFAPSASAFFGMSRIGMEVTPSGTWLTYTGAIKLDDKDPNFKDQVILLNKHIDAYKTFPPTEPKKDKKKKADETQALPQRQKKQQTVTLLPAADLDDFSKQLQQSMSSADSTQAGGSGHHHHHH

SEQ ID NO: 3232 - protein, 806 aa, Artificial Sequence
  Description of Artificial Sequence: Synthetic polypeptide
MKIEEGKLVIWINGDKGYNGLAEVGKKFEKDTGIKVTVEHPDKLEEKFPQVAATGDGPDIIFWAHDRFGGYAQSGLLAEITPDKAFQDKLYPFTWDAVRYNGKLIAYPIAVEALSLIYNKDLLPNPPKTWEEIPALDKELKAKGKSALMFNLQEPYFTWPLIAADGGYAFKYENGKYDIKDVGVDNAGAKAGLTFLVDLIKNKHMNADTDYSIAEAAFNKGETAMTINGPWAWSNIDTSKVNYGVTVLPTFKGQPSKPFVGVLSAGINAASPNKELAKEFLENYLLTDEGLEAVNKDKPLGAVALKSYEEELAKDPRIAATMENAQKGEIMPNIPQMSAFWYAVRTAVINAASGRQTVDEALKDAQTGGSGENLYFQSSDNGPQNQRNAPRITFGGPSDSTGSNQNGERSGARSKQRRPQGLPNNTASWFTALTQHGKEDLKFPRGQGVPINTNSSPDDQIGYYRRATRRIRGGDGKMKDLSPRWYFYYLGTGPEAGLPYGANKDGIIWVATEGALNTPKDHIGTRNPANNAAIVLQLPQGTTLPKGFYAEGSRGGSQASSRSSSRSRNSSRNSTPGSSRGTSPARMAGNGGDAALALLLLDRLNQLESKMSGKGQQQQGQTVTKKSAAEASKKPRQKRTATKAYNVTQAFGRRGPEQTQGNFGDQELIRQGTDYSHWPQIAQFAPSASAFFGMSRIGMEVTPSGTWLTYTGAIKLDDKDPNFKDQVILLNKHIDAYKTFPPTEPKKDKKKKADETQALPQRQKKQQTVTLLPAADLDDFSKQLQQSMSSADSTQAGGSGHHHHHH

SEQ ID NO: 3233 - protein, 806 aa, Artificial Sequence
  Description of Artificial Sequence: Synthetic polypeptide
MKIEEGKLVIWINGDKGYNGLAEVGKKFEKDTGIKVTVEHPDKLEEKFPQVAATGDGPDIIFWAHDRFGGYAQSGLLAEITPDKAFQDKLYPFTWDAVRYNGKLIAYPIAVEALSLIYNKDLLPNPPKTWEEIPALDKELKAKGKSALMFNLQEPYFTWPLIAADGGYAFKYENGKYDIKDVGVDNAGAKAGLTFLVDLIKNKHMNADTDYSIAEAAFNKGETAMTINGPWAWSNIDTSKVNYGVTVLPTFKGQPSKPFVGVLSAGINAASPNKELAKEFLENYLLTDEGLEAVNKDKPLGAVALKSYEEELAKDPRIAATMENAQKGEIMPNIPQMSAFWYAVRTAVINAASGRQTVDEALKDAQTGGSGENLYFQSSDNGPQNQRNAPRITFGGPSDSTGSNQNGERSGARSKQRRPQGLPNNTASWFTALTQHGKEDLKFPKGQGVPINTNSKPDDQIGYWRRQTRRYRGGDGQMKDLDPRWYFYYLGTGPEAGLPYGANKDGIIWVATEGALNTPKDHIGTRNPANNAAIVLQLPQGTTLPKGFYAEGSRGGSQASSRSSSRSRNSSRNSTPGSSRGTSPARMAGNGGDAALALLLLDRLNQLESKMSGKGQQQQGQTVTKKSAAEASKKPRQKRTATKAYNVTQAFGRRGPEQTQGNFGDQELIRQGTDYKHWPQIAQFAPSASAFFGMSRIGMEVTPSGTWLTYTGAIKLDDKDPNFKDQVILLNKHIDAYKTFPPTEPKKDKKKKADETQALPQRQKKQQTVTLLPAADLDDFSKQLQQSMSSADSTQAGGSGHHHHHH

SEQ ID NO: 3234 - protein, 806 aa, Artificial Sequence
  Description of Artificial Sequence: Synthetic polypeptide
MKIEEGKLVIWINGDKGYNGLAEVGKKFEKDTGIKVTVEHPDKLEEKFPQVAATGDGPDIIFWAHDRFGGYAQSGLLAEITPDKAFQDKLYPFTWDAVRYNGKLIAYPIAVEALSLIYNKDLLPNPPKTWEEIPALDKELKAKGKSALMFNLQEPYFTWPLIAADGGYAFKYENGKYDIKDVGVDNAGAKAGLTFLVDLIKNKHMNADTDYSIAEAAFNKGETAMTINGPWAWSNIDTSKVNYGVTVLPTFKGQPSKPFVGVLSAGINAASPNKELAKEFLENYLLTDEGLEAVNKDKPLGAVALKSYEEELAKDPRIAATMENAQKGEIMPNIPQMSAFWYAVRTAVINAASGRQTVDEALKDAQTGGSGENLYFQSSDNGPQNQRNAPRITFGGPSDSTGSNQNGERSGARSKQRRPQGLPNNTASWFTALTQHGKEDLKFPRGQGVPINTNSSPDDQIGYYRRATRRIRGGDGKMKDLSPRWYFYYLGTGPEAGLPYGANKDGIHWVATEGALNTPKDHIGTRNPANNAAIVLQLPQGTTLPKGFYAEGSRGGSQASSRSSSRSRNSSRNSTPGSSRGTSPARMAGNGGDAALALLLLDRLNQLESKMSGKGQQQQGQTVTKKSAAEASKKPRQKRTATKAYNVTQAFGRRGPEQTQGNFGDQELIRQGTDYKHWPQIAQFAPSASAFFGMSRIGMEVTPSGTWLTYTGAIKLDDKDPNFKDQVILLNKHIDAYKTFPPTEPKKDKKKKADETQALPQRQKKQQTVTLLPAADLDDFSKQLQQSMSSADSTQAGGSGHHHHHH

SEQ ID NO: 3235 - protein, 806 aa, Artificial Sequence
  Description of Artificial Sequence: Synthetic polypeptide
MKIEEGKLVIWINGDKGYNGLAEVGKKFEKDTGIKVTVEHPDKLEEKFPQVAATGDGPDIIFWAHDRFGGYAQSGLLAEITPDKAFQDKLYPFTWDAVRYNGKLIAYPIAVEALSLIYNKDLLPNPPKTWEEIPALDKELKAKGKSALMFNLQEPYFTWPLIAADGGYAFKYENGKYDIKDVGVDNAGAKAGLTFLVDLIKNKHMNADTDYSIAEAAFNKGETAMTINGPWAWSNIDTSKVNYGVTVLPTFKGQPSKPFVGVLSAGINAASPNKELAKEFLENYLLTDEGLEAVNKDKPLGAVALKSYEEELAKDPRIAATMENAQKGEIMPNIPQMSAFWYAVRTAVINAASGRQTVDEALKDAQTGGSGENLYFQSSDNGPQNQRNAPRITFGGPSDSTGSNQNGERSGARSKQRRPQGLPNNTASWFTALTQHGKEDLKFPRGQGVPINTNSSPDDQIGYYRRATRRIRGGDGKMKDLSPRWYFYYLGTGPEAGLPYGANKDGIIWVATEGALNTPKDHIGTRNPANNAAIVLQLPQGTTLPKGFYAEGSRGGSQASSRSSSRSRNSSRNSTPGSSRGTSPARMAGNGGDAALALLLLDRLNQLESKMSGKGQQQQGQTVTKKSAAEASKKPRQKRTATKAFNVTQAFGRRGPEQTQGNFGDQELIRQGTDYKHWPQIAQFAPSASAFFGMSRIGMEVTPSGTWLTYTGAIKLDDKDPNFKDQVILLNKHIDAYKTFPPTEPKKDKKKKADETQALPQRQKKQQTVTLLPAADLDDFSKQLQQSMSSADSTQAGGSGHHHHHH

SEQ ID NO: 3236 - protein, 806 aa, Artificial Sequence
  Description of Artificial Sequence: Synthetic polypeptide
MKIEEGKLVIWINGDKGYNGLAEVGKKFEKDTGIKVTVEHPDKLEEKFPQVAATGDGPDIIFWAHDRFGGYAQSGLLAEITPDKAFQDKLYPFTWDAVRYNGKLIAYPIAVEALSLIYNKDLLPNPPKTWEEIPALDKELKAKGKSALMFNLQEPYFTWPLIAADGGYAFKYENGKYDIKDVGVDNAGAKAGLTFLVDLIKNKHMNADTDYSIAEAAFNKGETAMTINGPWAWSNIDTSKVNYGVTVLPTFKGQPSKPFVGVLSAGINAASPNKELAKEFLENYLLTDEGLEAVNKDKPLGAVALKSYEEELAKDPRIAATMENAQKGEIMPNIPQMSAFWYAVRTAVINAASGRQTVDEALKDAQTGGSGENLYFQSSDNGPQNQRNAPRITFGGPSDSTGSNQNGERSGARSKQRRPQGLPNNTASWFTALTQHGKEDLKFPRGQGVPINTNSSPDDQIGYYRRATRRIRGGDGKMKDLSPRWYFYYLGTGPEAGLPYGANKDGIIWVATEGANNTPKDHIGTRNPANNAAIVLQLPQGTTLPKGFYAEGSRGGSQASSRSSSRSRNSSRNSTPGSSRGTSPARMAGNGGDAALALLLLDRLNQLESKMSGKGQQQQGQTVTKKSAAEASKKPRQKRTATKAYNVTQAFGRRGPEQTQGNFGDQELIRQGTDYKHWPQIAQFAPSASAFFGMSRIGMEVTPSGTWLTYTGAIKLDDKDPNFKDQVILLNKHIDAYKTFPPTEPKKDKKKKADETQALPQRQKKQQTVTLLPAADLDDFSKQLQQSMSSADSTQAGGSGHHHHHH

SEQ ID NO: 3237 - protein, 806 aa, Artificial Sequence
  Description of Artificial Sequence: Synthetic polypeptide
MKIEEGKLVIWINGDKGYNGLAEVGKKFEKDTGIKVTVEHPDKLEEKFPQVAATGDGPDIIFWAHDRFGGYAQSGLLAEITPDKAFQDKLYPFTWDAVRYNGKLIAYPIAVEALSLIYNKDLLPNPPKTWEEIPALDKELKAKGKSALMFNLQEPYFTWPLIAADGGYAFKYENGKYDIKDVGVDNAGAKAGLTFLVDLIKNKHMNADTDYSIAEAAFNKGETAMTINGPWAWSNIDTSKVNYGVTVLPTFKGQPSKPFVGVLSAGINAASPNKELAKEFLENYLLTDEGLEAVNKDKPLGAVALKSYEEELAKDPRIAATMENAQKGEIMPNIPQMSAFWYAVRTAVINAASGRQTVDEALKDAQTGGSGENLYFQSSDNGPQNQRNAPRITFGGPSDSTGSNQNGERSGARSKQRRPQGLPNNTASWFTALTQHGKEDLKFPRGQGVPINTNSSPDDQIGYYRRATRRIRGGDGKMKDLSPRWYFYYLGTGPEAGLPYGANKDGIIWVATEGALNTPKDHIGTRNPANNAAIVLQLPQGTTLPKGFYAEGSRGGSQASSRSSSRSRNSSRNSTPGSSRGTSPARMAGNGGDAALALLLLDRLNQLESKMSGKGQQQQGQTVTKKSAAEASKKPRQKRTATKAYNVTQAFGRRGPEQTQGNFGDQQLIRQGTDYKHWPQIAQFAPSASAFFGMSRIGMEVTPSGTWLTYTGAIKLDDKDPNFKDQVILLNKHIDAYKTFPPTEPKKDKKKKADETQALPQRQKKQQTVTLLPAADLDDFSKQLQQSMSSADSTQAGGSGHHHHHH

SEQ ID NO: 3238 - protein, 806 aa, Artificial Sequence
  Description of Artificial Sequence: Synthetic polypeptide
MKIEEGKLVIWINGDKGYNGLAEVGKKFEKDTGIKVTVEHPDKLEEKFPQVAATGDGPDIIFWAHDRFGGYAQSGLLAEITPDKAFQDKLYPFTWDAVRYNGKLIAYPIAVEALSLIYNKDLLPNPPKTWEEIPALDKELKAKGKSALMFNLQEPYFTWPLIAADGGYAFKYENGKYDIKDVGVDNAGAKAGLTFLVDLIKNKHMNADTDYSIAEAAFNKGETAMTINGPWAWSNIDTSKVNYGVTVLPTFKGQPSKPFVGVLSAGINAASPNKELAKEFLENYLLTDEGLEAVNKDKPLGAVALKSYEEELAKDPRIAATMENAQKGEIMPNIPQMSAFWYAVRTAVINAASGRQTVDEALKDAQTGGSGENLYFQSSDNGPQNQRNAPRITFGGPSDSTGSNQNGERSGARSKQRRPQGLPNNTASWFTALTQHGKEDLKFPRGQGVPINTNSSPDDQIGYYRRATRRIRGGDGKMKDLSPRWYFYYLGTGPEAGLPYGANKDGIIWVATEGALNTPKDHIGTRNPANNAAIVLQLPQGTTLPKGFYAEGSRGGSQASSRSSERSRNSSRNSTPGSERGTSPARMAGNGGDAALALLLLDRLNQLESKMSGKGQQQQGQTVTKKSAAEASKKPRQKRTATKAYNVTQAFGRRGPEQTQGNFGDQELIRQGTDYKHWPQIAQFAPSASAFFGMSRIGMEVTPSGTWLTYTGAIKLDDKDPNFKDQVILLNKHIDAYKTFPPTEPKKDKKKKADETQALPQRQKKQQTVTLLPAADLDDFSKQLQQSMSSADSTQAGGSGHHHHHH

SEQ ID NO: 3239 - protein, 806 aa, Artificial Sequence
  Description of Artificial Sequence: Synthetic polypeptide
MKIEEGKLVIWINGDKGYNGLAEVGKKFEKDTGIKVTVEHPDKLEEKFPQVAATGDGPDIIFWAHDRFGGYAQSGLLAEITPDKAFQDKLYPFTWDAVRYNGKLIAYPIAVEALSLIYNKDLLPNPPKTWEEIPALDKELKAKGKSALMFNLQEPYFTWPLIAADGGYAFKYENGKYDIKDVGVDNAGAKAGLTFLVDLIKNKHMNADTDYSIAEAAFNKGETAMTINGPWAWSNIDTSKVNYGVTVLPTFKGQPSKPFVGVLSAGINAASPNKELAKEFLENYLLTDEGLEAVNKDKPLGAVALKSYEEELAKDPRIAATMENAQKGEIMPNIPQMSAFWYAVRTAVINAASGRQTVDEALKDAQTGGSGENLYFQSSDNGPQNQRNAPRITFGGPSDSTGSNQNGERSGARSKQRRPQGLPNNTASWFTALTQHGKEDLKFPRGQGVPINTNSSPDDQIGYYRRATRRIRGGDGKMKDLSPRWYFYYLGTGPEAGLPYGANKDGIIWVATEGALNTPKDHIGTRNPANNAAIVLQLPQGTTLPKGFYAEGSRGGSQASSRSSSRSRNSSRNSTPGSSRGTSPARMAGNGGDAALALLLLDRLNQLESKMSGKGQQQQGQTVTKKSAAEASKKPRQKRTATKAYNVTQAFGRRGPEQTQGNFGDQELIRQGTDYKHWPQIAQFAPSASAFFGMSRIGMEVTPSGIWLTYTGAIKLDDKDPNFKDQVILLNKHIDAYKTFPPTEPKKDKKKKADETQALPQRQKKQQTVTLLPAADLDDFSKQLQQSMSSADSTQAGGSGHHHHHH

SEQ ID NO: 3240 - protein, 806 aa, Artificial Sequence
  Description of Artificial Sequence: Synthetic polypeptide
MKIEEGKLVIWINGDKGYNGLAEVGKKFEKDTGIKVTVEHPDKLEEKFPQVAATGDGPDIIFWAHDRFGGYAQSGLLAEITPDKAFQDKLYPFTWDAVRYNGKLIAYPIAVEALSLIYNKDLLPNPPKTWEEIPALDKELKAKGKSALMFNLQEPYFTWPLIAADGGYAFKYENGKYDIKDVGVDNAGAKAGLTFLVDLIKNKHMNADTDYSIAEAAFNKGETAMTINGPWAWSNIDTSKVNYGVTVLPTFKGQPSKPFVGVLSAGINAASPNKELAKEFLENYLLTDEGLEAVNKDKPLGAVALKSYEEELAKDPRIAATMENAQKGEIMPNIPQMSAFWYAVRTAVINAASGRQTVDEALKDAQTGGSGENLYFQSSDNGPQNQRNAPRITFGGPSDSTGSNQNGERSGARSKQRRPQGLPNNTASWFTALTQHGKEDLKFPRGQGVPINTNSSPDDQIGYYRRATRRIRGGDGKMKDLNPRWYFYYLGTGPEAGLPYGANKDGIIWVATEGALNTPKDHIGTRNPANNAAIVLQLPQGTTLPKGFYAEGSRGGSQASSRSSSRSRNSSRNSTPGSSRGTSPARMAGNGGDAALALLLLDRLNQLESKMSGKGQQQQGQTVTKKSAAEASKKPRQKRTATKAYNVTQAFGRRGPEQTQGNFGDQELIRQGTDYKHWPQIAQFAPSASAFFGMSRIGMEVTPSGTWLTYTGAIKLDDKDPNFKDQVILLNKHIDAYKTFPPTEPKKDKKKKADETQALPQRQKKQQTVTLLPAADLDDFSKQLQQSMSSADSTQAGGSGHHHHHH

SEQ ID NO: 3241 - protein, 806 aa, Artificial Sequence
  Description of Artificial Sequence: Synthetic polypeptide
MKIEEGKLVIWINGDKGYNGLAEVGKKFEKDTGIKVTVEHPDKLEEKFPQVAATGDGPDIIFWAHDRFGGYAQSGLLAEITPDKAFQDKLYPFTWDAVRYNGKLIAYPIAVEALSLIYNKDLLPNPPKTWEEIPALDKELKAKGKSALMFNLQEPYFTWPLIAADGGYAFKYENGKYDIKDVGVDNAGAKAGLTFLVDLIKNKHMNADTDYSIAEAAFNKGETAMTINGPWAWSNIDTSKVNYGVTVLPTFKGQPSKPFVGVLSAGINAASPNKELAKEFLENYLLTDEGLEAVNKDKPLGAVALKSYEEELAKDPRIAATMENAQKGEIMPNIPQMSAFWYAVRTAVINAASGRQTVDEALKDAQTGGSGENLYFQSSDNGPQNQRNAPRITFGGPSDSTGSNQNGERSGARSKQRRPQGLPNNTASWFTALTQHGKEDLKFPRGQGVPINTNSSPDDQIGYYRRATRRIRGGDGKMKDLSPRWYFYYLGTGPEAGLPYGANKDGIIWVATEGALNTPKDHIGTRNPANNAAIVLQLPTGTTLPKGFYAEGSRGGSQASSRSSSRSRNSSRNSTPGSSRGTSPARMAGNGGDAALALLLLDRLNQLESKMSGKGQQQQGQTVTKKSAAEASKKPRQKRTATKAYNVTQAFGRRGPEQTQGNFGDQELIRQGTDYKHWPQIAQFAPSASAFFGMSRIGMEVTPSGTWLTYTGAIKLDDKDPNFKDQVILLNKHIDAYKTFPPTEPKKDKKKKADETQALPQRQKKQQTVTLLPAADLDDFSKQLQQSMSSADSTQAGGSGHHHHHH

SEQ ID NO: 3242 - protein, 806 aa, Artificial Sequence
  Description of Artificial Sequence: Synthetic polypeptide
MKIEEGKLVIWINGDKGYNGLAEVGKKFEKDTGIKVTVEHPDKLEEKFPQVAATGDGPDIIFWAHDRFGGYAQSGLLAEITPDKAFQDKLYPFTWDAVRYNGKLIAYPIAVEALSLIYNKDLLPNPPKTWEEIPALDKELKAKGKSALMFNLQEPYFTWPLIAADGGYAFKYENGKYDIKDVGVDNAGAKAGLTFLVDLIKNKHMNADTDYSIAEAAFNKGETAMTINGPWAWSNIDTSKVNYGVTVLPTFKGQPSKPFVGVLSAGINAASPNKELAKEFLENYLLTDEGLEAVNKDKPLGAVALKSYEEELAKDPRIAATMENAQKGEIMPNIPQMSAFWYAVRTAVINAASGRQTVDEALKDAQTGGSGENLYFQSSDNGPQNQRNAPRITFGGPSDSTGSNQNGERSGARSKQRRPQGLPNNTASWFTALTQHGKEDLKFPRGQGVPINTNSSPDDQIGYYRRATRRIRGGDGKMKDLSPRWYFYYLGTGPEAGLPYGANKDGIIWVATEGALNTPKDHIGTRNPANNAAIVLQLPQGTTLPKGFYAEGSRGGSQASSRSSSRSRNSSRNSTPGSSRGTSPARMAGNGGDAALALLLLDRLNQLESKMSGKGQQQQGQTVTKKSAAEMSKKPRQKRTATKECNVTQCFGPRGPEQTQGNFGDAELVKKGTDYKHWPQIAQFAPSASAFFGMSRISSKETPSGTWLTYTGAIKLDKDDPNFKDQVILLNKHIDAYKTFPPTEPKKDKKKKADETQALPQRQKKQQTVTLLPAADLDDFSKQLQQSMSSADSTQAGGSGHHHHHH

SEQ ID NO: 3243 - protein, 806 aa, Artificial Sequence
  Description of Artificial Sequence: Synthetic polypeptide
MKIEEGKLVIWINGDKGYNGLAEVGKKFEKDTGIKVTVEHPDKLEEKFPQVAATGDGPDIIFWAHDRFGGYAQSGLLAEITPDKAFQDKLYPFTWDAVRYNGKLIAYPIAVEALSLIYNKDLLPNPPKTWEEIPALDKELKAKGKSALMFNLQEPYFTWPLIAADGGYAFKYENGKYDIKDVGVDNAGAKAGLTFLVDLIKNKHMNADTDYSIAEAAFNKGETAMTINGPWAWSNIDTSKVNYGVTVLPTFKGQPSKPFVGVLSAGINAASPNKELAKEFLENYLLTDEGLEAVNKDKPLGAVALKSYEEELAKDPRIAATMENAQKGEIMPNIPQMSAFWYAVRTAVINAASGRQTVDEALKDAQTGGSGENLYFQSSDNGPQNQRNAPRITFGGPSDSTGSNQNGERSGARSKQRRPQGLPNNTASWFTALTQHGKEDLKFPRGQGVPINTNSSPDDQIGYYRRATRRIRGGDGKMKDLSPRWYFYYLGTGPEAGLPYGANKDGIIWVATEGALNTPKDHIGTRNPANNAAIVLQLPQGTTLPKGFYAEGSRGGSQASSRSSSRSRNSSRNSTPGSSRGTSPARMAGNGGDAALALLLLDRLNQLESKMSGKGQQQQGQTVTKKSAAEASKKPRQKRTATKAYNVTQAFGRRGPEQTQGNFGDQELIRQGTDYKHWPQIAQFAPSASAFFGMSRIGMEATPSGTWLTYTGAIKLDDKDPNFKDQVILLNKHIDAYKTFPPTEPKKDKKKKADETQALPQRQKKQQTVTLLPAADLDDFSKQLQQSMSSADSTQAGGSGHHHHHH

SEQ ID NO: 3244 - protein, 806 aa, Artificial Sequence
  Description of Artificial Sequence: Synthetic polypeptide
MKIEEGKLVIWINGDKGYNGLAEVGKKFEKDTGIKVTVEHPDKLEEKFPQVAATGDGPDIIFWAHDRFGGYAQSGLLAEITPDKAFQDKLYPFTWDAVRYNGKLIAYPIAVEALSLIYNKDLLPNPPKTWEEIPALDKELKAKGKSALMFNLQEPYFTWPLIAADGGYAFKYENGKYDIKDVGVDNAGAKAGLTFLVDLIKNKHMNADTDYSIAEAAFNKGETAMTINGPWAWSNIDTSKVNYGVTVLPTFKGQPSKPFVGVLSAGINAASPNKELAKEFLENYLLTDEGLEAVNKDKPLGAVALKSYEEELAKDPRIAATMENAQKGEIMPNIPQMSAFWYAVRTAVINAASGRQTVDEALKDAQTGGSGENLYFQSSDNGPQNQRNAPRITFGGPSDSTGSNQNGERSGARSKQRRPQGLPNNTASWFTALTQHGKEDLKFPRGQGVPINTNSSPDDQIGYYRRETRRIRGGDGKMKDLSPRWYFYYLGTGPEAGLPYGANKDGIIWVATEGALNTPKDHIGTRNPANNAAIVLQLPQGTTLPKGFYAEGSRGGSQASSRSSSRSRNSSRNSTPGSSRGTSPARMAGNGGDAALALLLLDRLNQLESKMSGKGQQQQGQTVTKKSAAEASKKPRQKRTATKAYNVTQAFGRRGPEQTQGNFGDQELIRQGTDYKHWPQIAQFAPSASAFFGMSRIGMEVTPSGTWLTYTGAIKLDDKDPNFKDQVILLNKHIDAYKTFPPTEPKKDKKKKADETQALPQRQKKQQTVTLLPAADLDDFSKQLQQSMSSADSTQAGGSGHHHHHH

SEQ ID NO: 3245 - protein, 806 aa, Artificial Sequence
  Description of Artificial Sequence: Synthetic polypeptide
MKIEEGKLVIWINGDKGYNGLAEVGKKFEKDTGIKVTVEHPDKLEEKFPQVAATGDGPDIIFWAHDRFGGYAQSGLLAEITPDKAFQDKLYPFTWDAVRYNGKLIAYPIAVEALSLIYNKDLLPNPPKTWEEIPALDKELKAKGKSALMFNLQEPYFTWPLIAADGGYAFKYENGKYDIKDVGVDNAGAKAGLTFLVDLIKNKHMNADTDYSIAEAAFNKGETAMTINGPWAWSNIDTSKVNYGVTVLPTFKGQPSKPFVGVLSAGINAASPNKELAKEFLENYLLTDEGLEAVNKDKPLGAVALKSYEEELAKDPRIAATMENAQKGEIMPNIPQMSAFWYAVRTAVINAASGRQTVDEALKDAQTGGSGENLYFQSSDNGPQNQRNAPRITFGGPSDSTGSNQNGERSGARSKQRRPQGLPNNTASWFTALTQHGKEDLKFPRGQGVPINTNSSPDDQIGKYRRATRRIRGGDGKMKDLSPRWYFYYLGTGPEAGLPYGANKDGIIWVATEGALNTPKDHIGTRNPANNAAIVLQLPQGTTLPKGFYAEGSRGGSQASSRSSSRSRNSSRNSTPGSSRGTSPARMAGNGGDAALALLLLDRLNQLESKMSGKGQQQQGQTVTKKSAAEASKKPRQKRTATKAYNVTQAFGRRGPEQTQGNFGDQELIRQGTDYKHWPQIAQFAPSASAFFGMSRIGMEVTPSGTWLTYTGAIKLDDKDPNFKDQVILLNKHIDAYKTFPPTEPKKDKKKKADETQALPQRQKKQQTVTLLPAADLDDFSKQLQQSMSSADSTQAGGSGHHHHHH

SEQ ID NO: 3246 - protein, 806 aa, Artificial Sequence
  Description of Artificial Sequence: Synthetic polypeptide
MKIEEGKLVIWINGDKGYNGLAEVGKKFEKDTGIKVTVEHPDKLEEKFPQVAATGDGPDIIFWAHDRFGGYAQSGLLAEITPDKAFQDKLYPFTWDAVRYNGKLIAYPIAVEALSLIYNKDLLPNPPKTWEEIPALDKELKAKGKSALMFNLQEPYFTWPLIAADGGYAFKYENGKYDIKDVGVDNAGAKAGLTFLVDLIKNKHMNADTDYSIAEAAFNKGETAMTINGPWAWSNIDTSKVNYGVTVLPTFKGQPSKPFVGVLSAGINAASPNKELAKEFLENYLLTDEGLEAVNKDKPLGAVALKSYEEELAKDPRIAATMENAQKGEIMPNIPQMSAFWYAVRTAVINAASGRQTVDEALKDAQTGGSGENLYFQSSDNGPQNQRNAPRITFGGPSDSTGSNQNGERSGARSKQRRPQGLPNNTASWFTALTQHGKEDLKFPRGQGVPINTNSSPDDQIGYYRRATRRIRGGDGKMKDLSPRWYFYYLGTGPEAGLPYGANKDGIIWVATEGALNTPKDHIGTRNPANNAAIVLQLPQGTTLPKGFYAEGSRGGSQASSRSSSRSRNSSRNSTPGSSRGTSPARMAGNGGDAALALLLLDRLNQLESKMSGKGQQQQGQTVTKKSAAEASKKPRQKRTATKAYNVTQAFGRRGPEQTQGNFGDQELIRQGTDYKHWPQIAQFAPSASAFFGMSQIGMEVTPSGTWLTYTGAIKLDDKDPNFKDQVILLNKHIDAYKTFPPTEPKKDKKKKADETQALPQRQKKQQTVTLLPAADLDDFSKQLQQSMSSADSTQAGGSGHHHHHH

SEQ ID NO: 3247 - protein, 806 aa, Artificial Sequence
  Description of Artificial Sequence: Synthetic polypeptide
MKIEEGKLVIWINGDKGYNGLAEVGKKFEKDTGIKVTVEHPDKLEEKFPQVAATGDGPDIIFWAHDRFGGYAQSGLLAEITPDKAFQDKLYPFTWDAVRYNGKLIAYPIAVEALSLIYNKDLLPNPPKTWEEIPALDKELKAKGKSALMFNLQEPYFTWPLIAADGGYAFKYENGKYDIKDVGVDNAGAKAGLTFLVDLIKNKHMNADTDYSIAEAAFNKGETAMTINGPWAWSNIDTSKVNYGVTVLPTFKGQPSKPFVGVLSAGINAASPNKELAKEFLENYLLTDEGLEAVNKDKPLGAVALKSYEEELAKDPRIAATMENAQKGEIMPNIPQMSAFWYAVRTAVINAASGRQTVDEALKDAQTGGSGENLYFQSSDNGPQNQRNAPRITFGGPSDSTGSNQNGERSGARSKQRRPQGLPNNTASWFTALTQHGKEDLKFPRGQGVPINTNSSPDDQIGYYRRATRRIRGGDGKMKDLSPRWYFYYLGTGPEAGLPYGANKDGIIWVATEGALNTPKDHIGTRNPANNAAIVLQLPQGTSLPKGFYAEGSRGGSQASSRSSSRSRNSSRNSTPGSSRGTSPARMAGNGGDAALALLLLDRLNQLESKMSGKGQQQQGQTVTKKSAAEASKKPRQKRTATKAYNVTQAFGRRGPEQTQGNFGDQELIRQGTDYKHWPQIAQFAPSASAFFGMSRIGMEVTPSGTWLTYTGAIKLDDKDPNFKDQVILLNKHIDAYKTFPPTEPKKDKKKKADETQALPQRQKKQQTVTLLPAADLDDFSKQLQQSMSSADSTQAGGSGHHHHHH

SEQ ID NO: 3248 - protein, 806 aa, Artificial Sequence
  Description of Artificial Sequence: Synthetic polypeptide
MKIEEGKLVIWINGDKGYNGLAEVGKKFEKDTGIKVTVEHPDKLEEKFPQVAATGDGPDIIFWAHDRFGGYAQSGLLAEITPDKAFQDKLYPFTWDAVRYNGKLIAYPIAVEALSLIYNKDLLPNPPKTWEEIPALDKELKAKGKSALMFNLQEPYFTWPLIAADGGYAFKYENGKYDIKDVGVDNAGAKAGLTFLVDLIKNKHMNADTDYSIAEAAFNKGETAMTINGPWAWSNIDTSKVNYGVTVLPTFKGQPSKPFVGVLSAGINAASPNKELAKEFLENYLLTDEGLEAVNKDKPLGAVALKSYEEELAKDPRIAATMENAQKGEIMPNIPQMSAFWYAVRTAVINAASGRQTVDEALKDAQTGGSGENLYFQSSDNGPQNQRNAPRITFGGPSDSTGSNQNGERSGARSKQRRPQGLPNNTASWFTALTQHGKEDLKFPRGQGVPINTNSSPDDQIGYYRRATRRIRGGDGKMKDLSPRWYFYYLGTGPEAGLPYGANKDGIIWVATEGALNTPKDHIGTRNPANNAAIVLQLPQGTTLPKGFYAEGSRGGSQASSRSSSRSRNSSRNSTPGSSRGTSPARMAGNGGDAALALLLLDRLNQLESKMSGKGQQQQGQTVTKKSAAEASKKPRQKRTATKAYNVTQAFGRRGPEQTQGNFGDQELIRQGTDYKHWPQIAQFAPSASAFFGMSRIGMEGTPSGTWLTYTGAIKLDDKDPNFKDQVILLNKHIDAYKTFPPTEPKKDKKKKADETQALPQRQKKQQTVTLLPAADLDDFSKQLQQSMSSADSTQAGGSGHHHHHH

SEQ ID NO: 3249 - protein, 806 aa, Artificial Sequence
  Description of Artificial Sequence: Synthetic polypeptide
MKIEEGKLVIWINGDKGYNGLAEVGKKFEKDTGIKVTVEHPDKLEEKFPQVAATGDGPDIIFWAHDRFGGYAQSGLLAEITPDKAFQDKLYPFTWDAVRYNGKLIAYPIAVEALSLIYNKDLLPNPPKTWEEIPALDKELKAKGKSALMFNLQEPYFTWPLIAADGGYAFKYENGKYDIKDVGVDNAGAKAGLTFLVDLIKNKHMNADTDYSIAEAAFNKGETAMTINGPWAWSNIDTSKVNYGVTVLPTFKGQPSKPFVGVLSAGINAASPNKELAKEFLENYLLTDEGLEAVNKDKPLGAVALKSYEEELAKDPRIAATMENAQKGEIMPNIPQMSAFWYAVRTAVINAASGRQTVDEALKDAQTGGSGENLYFQSSDNGPQNQRNAPRITFGGPSDSTGSNQNGERSGARSKQRRPQGLPNNTASWFTALTQHGKEDLKFPRGQGVPINTNSSPDDQIGYYRRATRRIRGGDGKMKDLSPRWYFYYLGTGPEAGLPYGANKPGIIWVATEGALNTPKDHIGTRNPANNAAIVLQLPQGTTLPKGFYAEGSRGGSQASSRSSSRSRNSSRNSTPGSSRGTSPARMAGNGGDAALALLLLDRLNQLESKMSGKGQQQQGQTVTKKSAAEASKKPRQKRTATKAYNVTQAFGRRGPEQTQGNFGDQELIRQGTDYKHWPQIAQFAPSASAFFGMSRIGMEVTPSGTWLTYTGAIKLDDKDPNFKDQVILLNKHIDAYKTFPPTEPKKDKKKKADETQALPQRQKKQQTVTLLPAADLDDFSKQLQQSMSSADSTQAGGSGHHHHHH

SEQ ID NO: 3250 - protein, 806 aa, Artificial Sequence
  Description of Artificial Sequence: Synthetic polypeptide
MKIEEGKLVIWINGDKGYNGLAEVGKKFEKDTGIKVTVEHPDKLEEKFPQVAATGDGPDIIFWAHDRFGGYAQSGLLAEITPDKAFQDKLYPFTWDAVRYNGKLIAYPIAVEALSLIYNKDLLPNPPKTWEEIPALDKELKAKGKSALMFNLQEPYFTWPLIAADGGYAFKYENGKYDIKDVGVDNAGAKAGLTFLVDLIKNKHMNADTDYSIAEAAFNKGETAMTINGPWAWSNIDTSKVNYGVTVLPTFKGQPSKPFVGVLSAGINAASPNKELAKEFLENYLLTDEGLEAVNKDKPLGAVALKSYEEELAKDPRIAATMENAQKGEIMPNIPQMSAFWYAVRTAVINAASGRQTVDEALKDAQTGGSGENLYFQSSDNGPQNQRNAPRITFGGPSDSTGSNQNGERSGARSKQRRPQGLPNNTASWFTGLTQHGKEDLKFPPGQGVPINTNSSPDDQIGYYRRATRRIRGGDGKMKDLPPRWYFYYLGTGPEADLPYGAVKPGIFWVAEEGALNTPKDHIGTRNPANNAAIPLQLPPGTTLPKGFYAEGSRGGSQASSRSSSRSRNSSRNSTPGSSRGTSPARMAGNGGDAALALLLLDRLNQLESKMSGKGQQQQGQTVTKKSAAEASKKPRQKRTATKAYNVTQAFGRRGPEQTQGNFGDQELIRQGTDYKHWPQIAQFAPSASAFFGMSRIGMEVTPSGTWLTYTGAIKLDDKDPNFKDQVILLNKHIDAYKTFPPTEPKKDKKKKADETQALPQRQKKQQTVTLLPAADLDDFSKQLQQSMSSADSTQAGGSGHHHHHH

SEQ ID NO: 3251 - protein, 806 aa, Artificial Sequence
  Description of Artificial Sequence: Synthetic polypeptide
MKIEEGKLVIWINGDKGYNGLAEVGKKFEKDTGIKVTVEHPDKLEEKFPQVAATGDGPDIIFWAHDRFGGYAQSGLLAEITPDKAFQDKLYPFTWDAVRYNGKLIAYPIAVEALSLIYNKDLLPNPPKTWEEIPALDKELKAKGKSALMFNLQEPYFTWPLIAADGGYAFKYENGKYDIKDVGVDNAGAKAGLTFLVDLIKNKHMNADTDYSIAEAAFNKGETAMTINGPWAWSNIDTSKVNYGVTVLPTFKGQPSKPFVGVLSAGINAASPNKELAKEFLENYLLTDEGLEAVNKDKPLGAVALKSYEEELAKDPRIAATMENAQKGEIMPNIPQMSAFWYAVRTAVINAASGRQTVDEALKDAQTGGSGENLYFQSSDNGPQNQRNAPRITFGGPSDSTGSNQNGERSGARSKQRRPQGLPNNTASWFTALTQHGKEDLKFPRGQGVPINTNSSPDDQIGYYRRATRRIRGGDGKMKDLSPRWYFYYLGTGPEAGLPYGANKDGIIWVATEGALNTPKDHIGTRNPANNAAIVLQLPQGTTLPKGFYAEGSRGGSQASSRSSSRSRNSSRNSTPGSSRGTSPARMAGNGGDAALALLLLDRLNQLESKMSGKGQQQQGQTVTKKSAAEMSKKPRWKRTATKEYNVTQAFGKRGPKDTQGNFGDAELIKQGTDYKHWPQIAQFVPSAAAFFFMSRIGMKETPDGVWLTYTGTIKLDKDDPNFDDQVKLLNKHIDAYKTFPPTEPKKDKKKKADETQALPQRQKKQQTVTLLPAADLDDFSKQLQQSMSSADSTQAGGSGHHHHHH

SEQ ID NO: 3252 - protein, 806 aa, Artificial Sequence
  Description of Artificial Sequence: Synthetic polypeptide
MKIEEGKLVIWINGDKGYNGLAEVGKKFEKDTGIKVTVEHPDKLEEKFPQVAATGDGPDIIFWAHDRFGGYAQSGLLAEITPDKAFQDKLYPFTWDAVRYNGKLIAYPIAVEALSLIYNKDLLPNPPKTWEEIPALDKELKAKGKSALMFNLQEPYFTWPLIAADGGYAFKYENGKYDIKDVGVDNAGAKAGLTFLVDLIKNKHMNADTDYSIAEAAFNKGETAMTINGPWAWSNIDTSKVNYGVTVLPTFKGQPSKPFVGVLSAGINAASPNKELAKEFLENYLLTDEGLEAVNKDKPLGAVALKSYEEELAKDPRIAATMENAQKGEIMPNIPQMSAFWYAVRTAVINAASGRQTVDEALKDAQTGGSGENLYFQSSDNGPQNQRNAPRITFGGPSDSTGSNQNGERSGARSKQRRPQGLPNNTASWFTALTQHGKEDLKFPRGQGVPINTNSSPDDQIGYYRRATRRIRGGDGKMKDLSPRWYFYYLGTGPEAGLPYGANKDGIIWVATEGALNTPKDHIGTRNPANNAAIVLQLPQGTTLPKGFYAEGSRGGSQASSRSSSRSRNSSRNSTPGSSRGTSPARMAGNGGDAALALLLLDRLNQLESKMSGKGQQQQGQTVTKKSAAEMSKKPRQKRTATKGFNVTQAFGPRGPEQTQGNFGDAELIKKGTDYKHWPQIAQFAPSASAFFGMSRISSKETPSGTWLTYTGAIKLDKDDPNFKDQVILLNKHIDAYKTFPPTEPKKDKKKKADETQALPQRQKKQQTVTLLPAADLDDFSKQLQQSMSSADSTQAGGSGHHHHHH

SEQ ID NO: 3253 - protein, 806 aa, Artificial Sequence
  Description of Artificial Sequence: Synthetic polypeptide
MKIEEGKLVIWINGDKGYNGLAEVGKKFEKDTGIKVTVEHPDKLEEKFPQVAATGDGPDIIFWAHDRFGGYAQSGLLAEITPDKAFQDKLYPFTWDAVRYNGKLIAYPIAVEALSLIYNKDLLPNPPKTWEEIPALDKELKAKGKSALMFNLQEPYFTWPLIAADGGYAFKYENGKYDIKDVGVDNAGAKAGLTFLVDLIKNKHMNADTDYSIAEAAFNKGETAMTINGPWAWSNIDTSKVNYGVTVLPTFKGQPSKPFVGVLSAGINAASPNKELAKEFLENYLLTDEGLEAVNKDKPLGAVALKSYEEELAKDPRIAATMENAQKGEIMPNIPQMSAFWYAVRTAVINAASGRQTVDEALKDAQTGGSGENLYFQSSDNGPQNQRNAPRITFGGPSDSTGSNQNGERSGARSKQRRPQGLPNNTASWFTALTQHGKEDLKFPRGQGVPKNTNSSPDDQIGYYRRATRRIRGGDGKMKDLSPRWYFYYLGTGPEAGLPYGANKDGIIWVATEGALNTPKDHIGTRNPANNAAIVLQLPQGTTLPKGFYAEGSRGGSQASSRSSSRSRNSSRNSTPGSSRGTSPARMAGNGGDAALALLLLDRLNQLESKMSGKGQQQQGQTVTKKSAAEASKKPRQKRTATKAYNVTQAFGRRGPEQTQGNFGDQELIRQGTDYKHWPQIAQFAPSASAFFGMSRIGMEVTPSGTWLTYTGAIKLDDKDPNFKDQVILLNKHIDAYKTFPPTEPKKDKKKKADETQALPQRQKKQQTVTLLPAADLDDFSKQLQQSMSSADSTQAGGSGHHHHHH

SEQ ID NO: 3254 - protein, 806 aa, Artificial Sequence
  Description of Artificial Sequence: Synthetic polypeptide
MKIEEGKLVIWINGDKGYNGLAEVGKKFEKDTGIKVTVEHPDKLEEKFPQVAATGDGPDIIFWAHDRFGGYAQSGLLAEITPDKAFQDKLYPFTWDAVRYNGKLIAYPIAVEALSLIYNKDLLPNPPKTWEEIPALDKELKAKGKSALMFNLQEPYFTWPLIAADGGYAFKYENGKYDIKDVGVDNAGAKAGLTFLVDLIKNKHMNADTDYSIAEAAFNKGETAMTINGPWAWSNIDTSKVNYGVTVLPTFKGQPSKPFVGVLSAGINAASPNKELAKEFLENYLLTDEGLEAVNKDKPLGAVALKSYEEELAKDPRIAATMENAQKGEIMPNIPQMSAFWYAVRTAVINAASGRQTVDEALKDAQTGGSGENLYFQSSDNGPQNQRNAPRITFGGPSDSTGSNQNGERSGARSKQRRPQGLPNNTASWFTALTQHGKEDLKFPRGQGVPINTNSSPDDQIGYYRRATRRIRGGDGKMKDLSPRWYFYYLGTGPEAGLPYGANKDGIIWVATEGADNTPKDHIGTRNPANNAAIVLQLPQGTTLPKGFYAEGSRGGSQASSRSSSRSRNSSRNSTPGSSRGTSPARMAGNGGDAALALLLLDRLNQLESKMSGKGQQQQGQTVTKKSAAEASKKPRQKRTATKAYNVTQAFGRRGPEQTQGNFGDQELIRQGTDYKHWPQIAQFAPSASAFFGMSRIGMEVTPSGTWLTYTGAIKLDDKDPNFKDQVILLNKHIDAYKTFPPTEPKKDKKKKADETQALPQRQKKQQTVTLLPAADLDDFSKQLQQSMSSADSTQAGGSGHHHHHH

SEQ ID NO: 3255 - protein, 806 aa, Artificial Sequence
  Description of Artificial Sequence: Synthetic polypeptide
MKIEEGKLVIWINGDKGYNGLAEVGKKFEKDTGIKVTVEHPDKLEEKFPQVAATGDGPDIIFWAHDRFGGYAQSGLLAEITPDKAFQDKLYPFTWDAVRYNGKLIAYPIAVEALSLIYNKDLLPNPPKTWEEIPALDKELKAKGKSALMFNLQEPYFTWPLIAADGGYAFKYENGKYDIKDVGVDNAGAKAGLTFLVDLIKNKHMNADTDYSIAEAAFNKGETAMTINGPWAWSNIDTSKVNYGVTVLPTFKGQPSKPFVGVLSAGINAASPNKELAKEFLENYLLTDEGLEAVNKDKPLGAVALKSYEEELAKDPRIAATMENAQKGEIMPNIPQMSAFWYAVRTAVINAASGRQTVDEALKDAQTGGSGENLYFQSSDNGPQNQRNAPRITFGGPSDSTGSNQNGERSGARSKQRRPQGLPNNTASWFTALTQHGKEDLKFPRGQGVPINTNSSPDDQIGYYRRFTRRIRGGDGKMKDLSPRWYFYYLGTGPEAGLPYGANKDGIIWVATEGALNTPKDHIGTRNPANNAAIVLQLPQGTTLPKGFYAEGSRGGSQASSRSSSRSRNSSRNSTPGSSRGTSPARMAGNGGDAALALLLLDRLNQLESKMSGKGQQQQGQTVTKKSAAEASKKPRQKRTATKAYNVTQAFGRRGPEQTQGNFGDQELIRQGTDYKHWPQIAQFAPSASAFFGMSRIGMEVTPSGTWLTYTGAIKLDDKDPNFKDQVILLNKHIDAYKTFPPTEPKKDKKKKADETQALPQRQKKQQTVTLLPAADLDDFSKQLQQSMSSADSTQAGGSGHHHHHH

SEQ ID NO: 3256 - protein, 806 aa, Artificial Sequence
  Description of Artificial Sequence: Synthetic polypeptide
MKIEEGKLVIWINGDKGYNGLAEVGKKFEKDTGIKVTVEHPDKLEEKFPQVAATGDGPDIIFWAHDRFGGYAQSGLLAEITPDKAFQDKLYPFTWDAVRYNGKLIAYPIAVEALSLIYNKDLLPNPPKTWEEIPALDKELKAKGKSALMFNLQEPYFTWPLIAADGGYAFKYENGKYDIKDVGVDNAGAKAGLTFLVDLIKNKHMNADTDYSIAEAAFNKGETAMTINGPWAWSNIDTSKVNYGVTVLPTFKGQPSKPFVGVLSAGINAASPNKELAKEFLENYLLTDEGLEAVNKDKPLGAVALKSYEEELAKDPRIAATMENAQKGEIMPNIPQMSAFWYAVRTAVINAASGRQTVDEALKDAQTGGSGENLYFQSSDNGPQNQRNAPRITFGGPSDSTGSNQNGERSGARSKQRRPQGLPNNTASWFTALTQHGKEDLKFPRGQGVPINTNSSPDDQIGYYRRATRRIRGGDGKMKDLSPRWYFYYLGTGPEAGLPYGANKDGIIWVATEGALNTPKDHIGTRNPANNAAIVLQLPQGTTLPKGFYAEGSRGGSQASSRSSSRSRNSSRNSTPGSSRGTSPARMAGNGGDAALALLLLDRLNQLESKMSGKGQQQQGQTVTKKSAAEASKKPRQKRTATKAYNVTQAFGRRGPEQTQGNFGDQELIRQGTDYKHWPQIAQFAPSASAFFGMSRIGMEVTPSGTWLTYTGAIKLDQKDPNFKDQVILLNKHIDAYKTFPPTEPKKDKKKKADETQALPQRQKKQQTVTLLPAADLDDFSKQLQQSMSSADSTQAGGSGHHHHHH

SEQ ID NO: 3257 - protein, 806 aa, Artificial Sequence
  Description of Artificial Sequence: Synthetic polypeptide
MKIEEGKLVIWINGDKGYNGLAEVGKKFEKDTGIKVTVEHPDKLEEKFPQVAATGDGPDIIFWAHDRFGGYAQSGLLAEITPDKAFQDKLYPFTWDAVRYNGKLIAYPIAVEALSLIYNKDLLPNPPKTWEEIPALDKELKAKGKSALMFNLQEPYFTWPLIAADGGYAFKYENGKYDIKDVGVDNAGAKAGLTFLVDLIKNKHMNADTDYSIAEAAFNKGETAMTINGPWAWSNIDTSKVNYGVTVLPTFKGQPSKPFVGVLSAGINAASPNKELAKEFLENYLLTDEGLEAVNKDKPLGAVALKSYEEELAKDPRIAATMENAQKGEIMPNIPQMSAFWYAVRTAVINAASGRQTVDEALKDAQTGGSGENLYFQSSDNGPQNQRNAPRITFGGPSDSTGSNQNGERSGARSKQRRPQGLPNNTASWFTPLTQNGKEDLKFPPGQGVPINTNSSPDDQIGYYRRATRRIRGGDGKMKDLPPKWYFYYLGTGPHADLPYGQKKDGVFWVARPGALNTPKDHIGTRNPANNAAIPLQLPPGTKLPKGFYAEGSRGGSQASSRSSSRSRNSSRNSTPGSSRGTSPARMAGNGGDAALALLLLDRLNQLESKMSGKGQQQQGQTVTKKSAAEASKKPRQKRTATKAYNVTQAFGRRGPEQTQGNFGDQELIRQGTDYKHWPQIAQFAPSASAFFGMSRIGMEVTPSGTWLTYTGAIKLDDKDPNFKDQVILLNKHIDAYKTFPPTEPKKDKKKKADETQALPQRQKKQQTVTLLPAADLDDFSKQLQQSMSSADSTQAGGSGHHHHHH

SEQ ID NO: 3258 - protein, 806 aa, Artificial Sequence
  Description of Artificial Sequence: Synthetic polypeptide
MKIEEGKLVIWINGDKGYNGLAEVGKKFEKDTGIKVTVEHPDKLEEKFPQVAATGDGPDIIFWAHDRFGGYAQSGLLAEITPDKAFQDKLYPFTWDAVRYNGKLIAYPIAVEALSLIYNKDLLPNPPKTWEEIPALDKELKAKGKSALMFNLQEPYFTWPLIAADGGYAFKYENGKYDIKDVGVDNAGAKAGLTFLVDLIKNKHMNADTDYSIAEAAFNKGETAMTINGPWAWSNIDTSKVNYGVTVLPTFKGQPSKPFVGVLSAGINAASPNKELAKEFLENYLLTDEGLEAVNKDKPLGAVALKSYEEELAKDPRIAATMENAQKGEIMPNIPQMSAFWYAVRTAVINAASGRQTVDEALKDAQTGGSGENLYFQSSDNGPQNQRNAPRITFGGPSDSTGSNQNGERSGARSKQRRPQGLPNNTASWFTALTQHGKEDLKFPKGQGVPINTNSKPDDQIGYWRRQVRRYRGGDGQMKDLNPRWYFYYLGTGPEAGLPYGANKDGIIWVATEGALNTPKDHIGTRNPANNAAIVLQLPQGTTLPKGFYAEGSRGGSQASSRSSSRSRNSSRNSTPGSSRGTSPARMAGNGGDAALALLLLDRLNQLESKMSGKGQQQQGQTVTKKSAAEASKKPRQKRTATKAYNVTQAFGRRGPEQTQGNFGDQELIRQGTDYKHWPQIAQFAPSASAFFGMSRIGMEVTPSGTWLTYTGAIKLDDKDPNFKDQVILLNKHIDAYKTFPPTEPKKDKKKKADETQALPQRQKKQQTVTLLPAADLDDFSKQLQQSMSSADSTQAGGSGHHHHHH

SEQ ID NO: 3259 - protein, 806 aa, Artificial Sequence
  Description of Artificial Sequence: Synthetic polypeptide
MKIEEGKLVIWINGDKGYNGLAEVGKKFEKDTGIKVTVEHPDKLEEKFPQVAATGDGPDIIFWAHDRFGGYAQSGLLAEITPDKAFQDKLYPFTWDAVRYNGKLIAYPIAVEALSLIYNKDLLPNPPKTWEEIPALDKELKAKGKSALMFNLQEPYFTWPLIAADGGYAFKYENGKYDIKDVGVDNAGAKAGLTFLVDLIKNKHMNADTDYSIAEAAFNKGETAMTINGPWAWSNIDTSKVNYGVTVLPTFKGQPSKPFVGVLSAGINAASPNKELAKEFLENYLLTDEGLEAVNKDKPLGAVALKSYEEELAKDPRIAATMENAQKGEIMPNIPQMSAFWYAVRTAVINAASGRQTVDEALKDAQTGGSGENLYFQSSDNGPQNQRNAPRITFGGPSDSTGSNQNGERSGARSKQRRPQGLPNNTASWFTALTQHGKEDLKFPRGQGVPINTNSSPDDQIGYYRRATRRIRGGDGKMKDLSPRWYFYYLGTGPEAGLPYGANQDGIIWVATEGALNTPKDHIGTRNPANNAAIVLQLPQGTTLPKGFYAEGSRGGSQASSRSSSRSRNSSRNSTPGSSRGTSPARMAGNGGDAALALLLLDRLNQLESKMSGKGQQQQGQTVTKKSAAEASKKPRQKRTATKAYNVTQAFGRRGPEQTQGNFGDQELIRQGTDYKHWPQIAQFAPSASAFFGMSRIGMEVTPSGTWLTYTGAIKLDDKDPNFKDQVILLNKHIDAYKTFPPTEPKKDKKKKADETQALPQRQKKQQTVTLLPAADLDDFSKQLQQSMSSADSTQAGGSGHHHHHH

SEQ ID NO: 3260 - protein, 806 aa, Artificial Sequence
  Description of Artificial Sequence: Synthetic polypeptide
MKIEEGKLVIWINGDKGYNGLAEVGKKFEKDTGIKVTVEHPDKLEEKFPQVAATGDGPDIIFWAHDRFGGYAQSGLLAEITPDKAFQDKLYPFTWDAVRYNGKLIAYPIAVEALSLIYNKDLLPNPPKTWEEIPALDKELKAKGKSALMFNLQEPYFTWPLIAADGGYAFKYENGKYDIKDVGVDNAGAKAGLTFLVDLIKNKHMNADTDYSIAEAAFNKGETAMTINGPWAWSNIDTSKVNYGVTVLPTFKGQPSKPFVGVLSAGINAASPNKELAKEFLENYLLTDEGLEAVNKDKPLGAVALKSYEEELAKDPRIAATMENAQKGEIMPNIPQMSAFWYAVRTAVINAASGRQTVDEALKDAQTGGSGENLYFQSSDNGPQNQRNAPRITFGGPSDSTGSNQNGERSGARSKQRRPQGLPNNTASWFTALTQHGKEDLKFPRGQGVPINTNSSPDDQIGYYRRATRRIRGGDGKMKDLSPRWYFYYLGTGPEAGLPYGANKDGIIWVATEGALNTPKDHIGTRNPANNAAIVLRLPQGTTLPKGFYAEGSRGGSQASSRSSSRSRNSSRNSTPGSSRGTSPARMAGNGGDAALALLLLDRLNQLESKMSGKGQQQQGQTVTKKSAAEASKKPRQKRTATKAYNVTQAFGRRGPEQTQGNFGDQELIRQGTDYKHWPQIAQFAPSASAFFGMSRIGMEVTPSGTWLTYTGAIKLDDKDPNFKDQVILLNKHIDAYKTFPPTEPKKDKKKKADETQALPQRQKKQQTVTLLPAADLDDFSKQLQQSMSSADSTQAGGSGHHHHHH

SEQ ID NO: 3261 - protein, 806 aa, Artificial Sequence
  Description of Artificial Sequence: Synthetic polypeptide
MKIEEGKLVIWINGDKGYNGLAEVGKKFEKDTGIKVTVEHPDKLEEKFPQVAATGDGPDIIFWAHDRFGGYAQSGLLAEITPDKAFQDKLYPFTWDAVRYNGKLIAYPIAVEALSLIYNKDLLPNPPKTWEEIPALDKELKAKGKSALMFNLQEPYFTWPLIAADGGYAFKYENGKYDIKDVGVDNAGAKAGLTFLVDLIKNKHMNADTDYSIAEAAFNKGETAMTINGPWAWSNIDTSKVNYGVTVLPTFKGQPSKPFVGVLSAGINAASPNKELAKEFLENYLLTDEGLEAVNKDKPLGAVALKSYEEELAKDPRIAATMENAQKGEIMPNIPQMSAFWYAVRTAVINAASGRQTVDEALKDAQTGGSGENLYFQSSDNGPQNQRNAPRITFGGPSDSTGSNQNGERSGARSKQRRPQGLPNNTASWFTALTQHGKEDLKFPRGQGVPINTNSSPDDQIGYYRRATRRIRGGDGKMKDLSPRWYFYYLGTGPEAGLPYGANKDGIIWVATPGALNTPKDHIGTRNPANNAAIVLQLPQGTTLPKGFYAEGSRGGSQASSRSSSRSRNSSRNSTPGSSRGTSPARMAGNGGDAALALLLLDRLNQLESKMSGKGQQQQGQTVTKKSAAEASKKPRQKRTATKAYNVTQAFGRRGPEQTQGNFGDQELIRQGTDYKHWPQIAQFAPSASAFFGMSRIGMEVTPSGTWLTYTGAIKLDDKDPNFKDQVILLNKHIDAYKTFPPTEPKKDKKKKADETQALPQRQKKQQTVTLLPAADLDDFSKQLQQSMSSADSTQAGGSGHHHHHH

SEQ ID NO: 3262 - protein, 806 aa, Artificial Sequence
  Description of Artificial Sequence: Synthetic polypeptide
MKIEEGKLVIWINGDKGYNGLAEVGKKFEKDTGIKVTVEHPDKLEEKFPQVAATGDGPDIIFWAHDRFGGYAQSGLLAEITPDKAFQDKLYPFTWDAVRYNGKLIAYPIAVEALSLIYNKDLLPNPPKTWEEIPALDKELKAKGKSALMFNLQEPYFTWPLIAADGGYAFKYENGKYDIKDVGVDNAGAKAGLTFLVDLIKNKHMNADTDYSIAEAAFNKGETAMTINGPWAWSNIDTSKVNYGVTVLPTFKGQPSKPFVGVLSAGINAASPNKELAKEFLENYLLTDEGLEAVNKDKPLGAVALKSYEEELAKDPRIAATMENAQKGEIMPNIPQMSAFWYAVRTAVINAASGRQTVDEALKDAQTGGSGENLYFQSSDNGPQNQRNAPRITFGGPSDSTGSNQNGERSGARSKQRRPQGLPNNTASWFTALTQHGKEDLKFPRGQGVPINTNSSPDDQIGYYRRATRRIRGGDGKMKDLSPRWYFYYLGTGPEAGLPYGANKDGIIWVATEGALNTPKDHIGTRNPANNAAIVLQLPQGTTLPKGFYAEGSRGGSQASSRSSSRSRNSSRNSTPGSSRGTSPARMAGNGGDAALALLLLDRLNQLESKMSGKGQQQQGQTVTKKSAAEASKKPRQKRTATKAYNVTQAFGRRGPEQTQGNFGDQELIRQGTDYKHWPQIAQFAPSASAFFGMSRIGMTVTPSGTWLTYTGAIKLDDKDPNFKDQVILLNKHIDAYKTFPPTEPKKDKKKKADETQALPQRQKKQQTVTLLPAADLDDFSKQLQQSMSSADSTQAGGSGHHHHHH

SEQ ID NO: 3263 - protein, 806 aa, Artificial Sequence
  Description of Artificial Sequence: Synthetic polypeptide
MKIEEGKLVIWINGDKGYNGLAEVGKKFEKDTGIKVTVEHPDKLEEKFPQVAATGDGPDIIFWAHDRFGGYAQSGLLAEITPDKAFQDKLYPFTWDAVRYNGKLIAYPIAVEALSLIYNKDLLPNPPKTWEEIPALDKELKAKGKSALMFNLQEPYFTWPLIAADGGYAFKYENGKYDIKDVGVDNAGAKAGLTFLVDLIKNKHMNADTDYSIAEAAFNKGETAMTINGPWAWSNIDTSKVNYGVTVLPTFKGQPSKPFVGVLSAGINAASPNKELAKEFLENYLLTDEGLEAVNKDKPLGAVALKSYEEELAKDPRIAATMENAQKGEIMPNIPQMSAFWYAVRTAVINAASGRQTVDEALKDAQTGGSGENLYFQSSDNGPQNQRNAPRITFGGPSDSTGSNQNGERSGARSKQRRPQGLPNNTASWFTALTQHGKEDLKFPRGQGVPINTNSSPDDQIGYYRRATRRIRGGDGKMKDLSPRWYFYYLGTGPEAGLPYGANKDGIIWVATEGALNTPKDHIGTRNPANNAAIVLQLPQGTTLPKGFYAEGSRGGSQASSRSSSRSRNSSRNSTPGSSRGTSPARMAGNGGDAALALLLLDRLNQLESKMSGKGQQQQGQTVTKKSAAEMSKKPRWKRTPTKEYNVTQAFGPRGPKDTQGNFGDAELIKQGTDYKHWPQIAQFVPSAAAFFFMSRISMKETPDGVWLTYTGTIKLDKDDPNFDDQVKLLNKHIDAYKTFPPTEPKKDKKKKADETQALPQRQKKQQTVTLLPAADLDDFSKQLQQSMSSADSTQAGGSGHHHHHH

SEQ ID NO: 3264 - protein, 806 aa, Artificial Sequence
  Description of Artificial Sequence: Synthetic polypeptide
MKIEEGKLVIWINGDKGYNGLAEVGKKFEKDTGIKVTVEHPDKLEEKFPQVAATGDGPDIIFWAHDRFGGYAQSGLLAEITPDKAFQDKLYPFTWDAVRYNGKLIAYPIAVEALSLIYNKDLLPNPPKTWEEIPALDKELKAKGKSALMFNLQEPYFTWPLIAADGGYAFKYENGKYDIKDVGVDNAGAKAGLTFLVDLIKNKHMNADTDYSIAEAAFNKGETAMTINGPWAWSNIDTSKVNYGVTVLPTFKGQPSKPFVGVLSAGINAASPNKELAKEFLENYLLTDEGLEAVNKDKPLGAVALKSYEEELAKDPRIAATMENAQKGEIMPNIPQMSAFWYAVRTAVINAASGRQTVDEALKDAQTGGSGENLYFQSSDNGPQNQRNAPRITFGGPSDSTGSNQNGERSGARSKQRRPQGLPNNTASWFTALTQHGKEDLKFPRGQGVPINTNSSPDDQIGYYRRATRRIRGGDGKMKDLSPRWYFYYLGTGPEAGLPYGANKDGIIWVATEGALNTPKDHIGTRNPANNDAIVLQLPQGTTLPKGFYAEGSRGGSQASSRSSSRSRNSSRNSTPGSSRGTSPARMAGNGGDAALALLLLDRLNQLESKMSGKGQQQQGQTVTKKSAAEASKKPRQKRTATKAYNVTQAFGRRGPEQTQGNFGDQELIRQGTDYKHWPQIAQFAPSASAFFGMSRIGMEVTPSGTWLTYTGAIKLDDKDPNFKDQVILLNKHIDAYKTFPPTEPKKDKKKKADETQALPQRQKKQQTVTLLPAADLDDFSKQLQQSMSSADSTQAGGSGHHHHHH

SEQ ID NO: 3265 - protein, 806 aa, Artificial Sequence
  Description of Artificial Sequence: Synthetic polypeptide
MKIEEGKLVIWINGDKGYNGLAEVGKKFEKDTGIKVTVEHPDKLEEKFPQVAATGDGPDIIFWAHDRFGGYAQSGLLAEITPDKAFQDKLYPFTWDAVRYNGKLIAYPIAVEALSLIYNKDLLPNPPKTWEEIPALDKELKAKGKSALMFNLQEPYFTWPLIAADGGYAFKYENGKYDIKDVGVDNAGAKAGLTFLVDLIKNKHMNADTDYSIAEAAFNKGETAMTINGPWAWSNIDTSKVNYGVTVLPTFKGQPSKPFVGVLSAGINAASPNKELAKEFLENYLLTDEGLEAVNKDKPLGAVALKSYEEELAKDPRIAATMENAQKGEIMPNIPQMSAFWYAVRTAVINAASGRQTVDEALKDAQTGGSGENLYFQSSDNGPQNQRNAPRITFGGPSDSTGSNQNGERSGARSKQRRPQGLPNNTASWFTALTQHGKEDLKFPRGQGVPINTNSSPDDQIGYYRRSTRRIRGGDGKMKDLSPRWYFYYLGTGPEAGLPYGANKDGIIWVATEGALNTPKDHIGTRNPANNAAIVLQLPQGTTLPKGFYAEGSRGGSQASSRSSSRSRNSSRNSTPGSSRGTSPARMAGNGGDAALALLLLDRLNQLESKMSGKGQQQQGQTVTKKSAAEASKKPRQKRTATKAYNVTQAFGRRGPEQTQGNFGDQELIRQGTDYKHWPQIAQFAPSASAFFGMSRIGMEVTPSGTWLTYTGAIKLDDKDPNFKDQVILLNKHIDAYKTFPPTEPKKDKKKKADETQALPQRQKKQQTVTLLPAADLDDFSKQLQQSMSSADSTQAGGSGHHHHHH

SEQ ID NO: 3266 - protein, 806 aa, Artificial Sequence
  Description of Artificial Sequence: Synthetic polypeptide
MKIEEGKLVIWINGDKGYNGLAEVGKKFEKDTGIKVTVEHPDKLEEKFPQVAATGDGPDIIFWAHDRFGGYAQSGLLAEITPDKAFQDKLYPFTWDAVRYNGKLIAYPIAVEALSLIYNKDLLPNPPKTWEEIPALDKELKAKGKSALMFNLQEPYFTWPLIAADGGYAFKYENGKYDIKDVGVDNAGAKAGLTFLVDLIKNKHMNADTDYSIAEAAFNKGETAMTINGPWAWSNIDTSKVNYGVTVLPTFKGQPSKPFVGVLSAGINAASPNKELAKEFLENYLLTDEGLEAVNKDKPLGAVALKSYEEELAKDPRIAATMENAQKGEIMPNIPQMSAFWYAVRTAVINAASGRQTVDEALKDAQTGGSGENLYFQSSDNGPQNQRNAPRITFGGPSDSTGSNQNGERSGARSKQRRPQGLPNNTASWFTGLTQFGKEDLKFPPGQGVPINTNSSPDDQIGYYRRATRRIRGGDGKMKDLPPKWYFYYLGTGPHADLPYGQKQDGVFWVARPGALNTPKDHIGTRNPANNAAIPLQLPPGTKLPKGFYAEGSRGGSQASSRSSSRSRNSSRNSTPGSSRGTSPARMAGNGGDAALALLLLDRLNQLESKMSGKGQQQQGQTVTKKSAAEASKKPRQKRTATKAYNVTQAFGRRGPEQTQGNFGDQELIRQGTDYKHWPQIAQFAPSASAFFGMSRIGMEVTPSGTWLTYTGAIKLDDKDPNFKDQVILLNKHIDAYKTFPPTEPKKDKKKKADETQALPQRQKKQQTVTLLPAADLDDFSKQLQQSMSSADSTQAGGSGHHHHHH

SEQ ID NO: 3267 - protein, 806 aa, Artificial Sequence
  Description of Artificial Sequence: Synthetic polypeptide
MKIEEGKLVIWINGDKGYNGLAEVGKKFEKDTGIKVTVEHPDKLEEKFPQVAATGDGPDIIFWAHDRFGGYAQSGLLAEITPDKAFQDKLYPFTWDAVRYNGKLIAYPIAVEALSLIYNKDLLPNPPKTWEEIPALDKELKAKGKSALMFNLQEPYFTWPLIAADGGYAFKYENGKYDIKDVGVDNAGAKAGLTFLVDLIKNKHMNADTDYSIAEAAFNKGETAMTINGPWAWSNIDTSKVNYGVTVLPTFKGQPSKPFVGVLSAGINAASPNKELAKEFLENYLLTDEGLEAVNKDKPLGAVALKSYEEELAKDPRIAATMENAQKGEIMPNIPQMSAFWYAVRTAVINAASGRQTVDEALKDAQTGGSGENLYFQSSDNGPQNQRNAPRITFGGPSDSTGSNQNGERSGARSKQRRPQGLPNNTASWFTALTQHGKEDLKFPRGQGVPINTNSSPDDQIGYYRRATRRIRGGDGKMKDLLPRWYFYYLGTGPEAGLPYGANKDGIIWVATEGALNTPKDHIGTRNPANNAAIVLQLPQGTTLPKGFYAEGSRGGSQASSRSSSRSRNSSRNSTPGSSRGTSPARMAGNGGDAALALLLLDRLNQLESKMSGKGQQQQGQTVTKKSAAEASKKPRQKRTATKAYNVTQAFGRRGPEQTQGNFGDQELIRQGTDYKHWPQIAQFAPSASAFFGMSRIGMEVTPSGTWLTYTGAIKLDDKDPNFKDQVILLNKHIDAYKTFPPTEPKKDKKKKADETQALPQRQKKQQTVTLLPAADLDDFSKQLQQSMSSADSTQAGGSGHHHHHH

SEQ ID NO: 3268 - protein, 806 aa, Artificial Sequence
  Description of Artificial Sequence: Synthetic polypeptide
MKIEEGKLVIWINGDKGYNGLAEVGKKFEKDTGIKVTVEHPDKLEEKFPQVAATGDGPDIIFWAHDRFGGYAQSGLLAEITPDKAFQDKLYPFTWDAVRYNGKLIAYPIAVEALSLIYNKDLLPNPPKTWEEIPALDKELKAKGKSALMFNLQEPYFTWPLIAADGGYAFKYENGKYDIKDVGVDNAGAKAGLTFLVDLIKNKHMNADTDYSIAEAAFNKGETAMTINGPWAWSNIDTSKVNYGVTVLPTFKGQPSKPFVGVLSAGINAASPNKELAKEFLENYLLTDEGLEAVNKDKPLGAVALKSYEEELAKDPRIAATMENAQKGEIMPNIPQMSAFWYAVRTAVINAASGRQTVDEALKDAQTGGSGENLYFQSSDNGPQNQRNAPRITFGGPSDSTGSNQNGERSGARSKQRRPQGLPNNTASWFTALTQHGKEDLKFPRGQGVPINTNSSPDDQIGYYRRATRRIRGGDGKMKDLSPRWYFYYLGTGPEAGLPYGANKDGIIWVATEGALNTPKDHIGSRNPANNAAIVLQLPQGTTLPKGFYAEGSRGGSQASSRSSSRSRNSSRNSTPGSSRGTSPARMAGNGGDAALALLLLDRLNQLESKMSGKGQQQQGQTVTKKSAAEASKKPRQKRTATKAYNVTQAFGRRGPEQTQGNFGDQELIRQGTDYKHWPQIAQFAPSASAFFGMSRIGMEVTPSGTWLTYTGAIKLDDKDPNFKDQVILLNKHIDAYKTFPPTEPKKDKKKKADETQALPQRQKKQQTVTLLPAADLDDFSKQLQQSMSSADSTQAGGSGHHHHHH

SEQ ID NO: 3269 - protein, 806 aa, Artificial Sequence
  Description of Artificial Sequence: Synthetic polypeptide
MKIEEGKLVIWINGDKGYNGLAEVGKKFEKDTGIKVTVEHPDKLEEKFPQVAATGDGPDIIFWAHDRFGGYAQSGLLAEITPDKAFQDKLYPFTWDAVRYNGKLIAYPIAVEALSLIYNKDLLPNPPKTWEEIPALDKELKAKGKSALMFNLQEPYFTWPLIAADGGYAFKYENGKYDIKDVGVDNAGAKAGLTFLVDLIKNKHMNADTDYSIAEAAFNKGETAMTINGPWAWSNIDTSKVNYGVTVLPTFKGQPSKPFVGVLSAGINAASPNKELAKEFLENYLLTDEGLEAVNKDKPLGAVALKSYEEELAKDPRIAATMENAQKGEIMPNIPQMSAFWYAVRTAVINAASGRQTVDEALKDAQTGGSGENLYFQSSDNGPQNQRNAPRITFGGPSDSTGSNQNGERSGARSKQRRPQGLPNNTASWFTALTQHGKEDLKFPRGQGVPINTNSSPDDQIGYYRRATRRIRGGDGKMKDLSPRWYFYYLGTGPEAGLPYGANKDGIIWVATEGALNTPKDHIGTRNPANNQAIVLQLPQGTTLPKGFYAEGSRGGSQASSRSSSRSRNSSRNSTPGSSRGTSPARMAGNGGDAALALLLLDRLNQLESKMSGKGQQQQGQTVTKKSAAEASKKPRQKRTATKAYNVTQAFGRRGPEQTQGNFGDQELIRQGTDYKHWPQIAQFAPSASAFFGMSRIGMEVTPSGTWLTYTGAIKLDDKDPNFKDQVILLNKHIDAYKTFPPTEPKKDKKKKADETQALPQRQKKQQTVTLLPAADLDDFSKQLQQSMSSADSTQAGGSGHHHHHH

SEQ ID NO: 3270 - protein, 806 aa, Artificial Sequence
  Description of Artificial Sequence: Synthetic polypeptide
MKIEEGKLVIWINGDKGYNGLAEVGKKFEKDTGIKVTVEHPDKLEEKFPQVAATGDGPDIIFWAHDRFGGYAQSGLLAEITPDKAFQDKLYPFTWDAVRYNGKLIAYPIAVEALSLIYNKDLLPNPPKTWEEIPALDKELKAKGKSALMFNLQEPYFTWPLIAADGGYAFKYENGKYDIKDVGVDNAGAKAGLTFLVDLIKNKHMNADTDYSIAEAAFNKGETAMTINGPWAWSNIDTSKVNYGVTVLPTFKGQPSKPFVGVLSAGINAASPNKELAKEFLENYLLTDEGLEAVNKDKPLGAVALKSYEEELAKDPRIAATMENAQKGEIMPNIPQMSAFWYAVRTAVINAASGRQTVDEALKDAQTGGSGENLYFQSSDNGPQNQRNAPRITFGGPSDSTGSNQNGERSGARSKQRRPQGLPNNTASWFTALTQHGKEDLKFPRGQGVPINTNSSPDDQIGYYRRATRRIRGGDGKMKDLSPFWYFYYLGTGPEAGLPYGANKDGIIWVATEGALNTPKDHIGTRNPANNAAIVLQLPQGTTLPKGFYAEGSRGGSQASSRSSSRSRNSSRNSTPGSSRGTSPARMAGNGGDAALALLLLDRLNQLESKMSGKGQQQQGQTVTKKSAAEASKKPRQKRTATKAYNVTQAFGRRGPEQTQGNFGDQELIRQGTDYKHWPQIAQFAPSASAFFGMSRIGMEVTPSGTWLTYTGAIKLDDKDPNFKDQVILLNKHIDAYKTFPPTEPKKDKKKKADETQALPQRQKKQQTVTLLPAADLDDFSKQLQQSMSSADSTQAGGSGHHHHHH

SEQ ID NO: 3271 - protein, 806 aa, Artificial Sequence
  Description of Artificial Sequence: Synthetic polypeptide
MKIEEGKLVIWINGDKGYNGLAEVGKKFEKDTGIKVTVEHPDKLEEKFPQVAATGDGPDIIFWAHDRFGGYAQSGLLAEITPDKAFQDKLYPFTWDAVRYNGKLIAYPIAVEALSLIYNKDLLPNPPKTWEEIPALDKELKAKGKSALMFNLQEPYFTWPLIAADGGYAFKYENGKYDIKDVGVDNAGAKAGLTFLVDLIKNKHMNADTDYSIAEAAFNKGETAMTINGPWAWSNIDTSKVNYGVTVLPTFKGQPSKPFVGVLSAGINAASPNKELAKEFLENYLLTDEGLEAVNKDKPLGAVALKSYEEELAKDPRIAATMENAQKGEIMPNIPQMSAFWYAVRTAVINAASGRQTVDEALKDAQTGGSGENLYFQSSDNGPQNQRNAPRITFGGPSDSTGSNQNGERSGARSKQRRPQGLPNNTASWFTALTQHGKEDLKFPRGQGVPINTNSSPDDQIGYYRRATRRIRGGDGKMKDLSPRWYFYYLGTGPEAGLPYGANKQGIIWVATEGALNTPKDHIGTRNPANNAAIVLQLPQGTTLPKGFYAEGSRGGSQASSRSSSRSRNSSRNSTPGSSRGTSPARMAGNGGDAALALLLLDRLNQLESKMSGKGQQQQGQTVTKKSAAEASKKPRQKRTATKAYNVTQAFGRRGPEQTQGNFGDQELIRQGTDYKHWPQIAQFAPSASAFFGMSRIGMEVTPSGTWLTYTGAIKLDDKDPNFKDQVILLNKHIDAYKTFPPTEPKKDKKKKADETQALPQRQKKQQTVTLLPAADLDDFSKQLQQSMSSADSTQAGGSGHHHHHH

SEQ ID NO: 3272 - protein, 806 aa, Artificial Sequence
  Description of Artificial Sequence: Synthetic polypeptide
MKIEEGKLVIWINGDKGYNGLAEVGKKFEKDTGIKVTVEHPDKLEEKFPQVAATGDGPDIIFWAHDRFGGYAQSGLLAEITPDKAFQDKLYPFTWDAVRYNGKLIAYPIAVEALSLIYNKDLLPNPPKTWEEIPALDKELKAKGKSALMFNLQEPYFTWPLIAADGGYAFKYENGKYDIKDVGVDNAGAKAGLTFLVDLIKNKHMNADTDYSIAEAAFNKGETAMTINGPWAWSNIDTSKVNYGVTVLPTFKGQPSKPFVGVLSAGINAASPNKELAKEFLENYLLTDEGLEAVNKDKPLGAVALKSYEEELAKDPRIAATMENAQKGEIMPNIPQMSAFWYAVRTAVINAASGRQTVDEALKDAQTGGSGENLYFQSSDNGPQNQRNAPRITFGGPSDSTGSNQNGERSGARSKQRRPQGLPNNTASWFTALTQHGKEDLKFPRGQGVPINTNSSPDDQIGYYRRATRRIRGGDGKMKDLSPRWYFYYLGTGPEAGLPYGANKDGIIWVATEGALNTPKDHIGTRNPANNAAIVLQLPQGTTLPKGFYAEGSRGGSQASSRSSSRSRNSSRNSTPGSSRGTSPARMAGNGGDAALALLLLDRLNQLESKMSGKGQQQQGQTVTKKSAAEASKKPRQKRTATKAYNVTQAFGRRGPEQTQGNFGDQELIRQGTDYKHWPQIAQFAPSASAFFGMSRIGMRVTPSGTWLTYTGAIKLDDKDPNFKDQVILLNKHIDAYKTFPPTEPKKDKKKKADETQALPQRQKKQQTVTLLPAADLDDFSKQLQQSMSSADSTQAGGSGHHHHHH

SEQ ID NO: 3273 - protein, 806 aa, Artificial Sequence
  Description of Artificial Sequence: Synthetic polypeptide
MKIEEGKLVIWINGDKGYNGLAEVGKKFEKDTGIKVTVEHPDKLEEKFPQVAATGDGPDIIFWAHDRFGGYAQSGLLAEITPDKAFQDKLYPFTWDAVRYNGKLIAYPIAVEALSLIYNKDLLPNPPKTWEEIPALDKELKAKGKSALMFNLQEPYFTWPLIAADGGYAFKYENGKYDIKDVGVDNAGAKAGLTFLVDLIKNKHMNADTDYSIAEAAFNKGETAMTINGPWAWSNIDTSKVNYGVTVLPTFKGQPSKPFVGVLSAGINAASPNKELAKEFLENYLLTDEGLEAVNKDKPLGAVALKSYEEELAKDPRIAATMENAQKGEIMPNIPQMSAFWYAVRTAVINAASGRQTVDEALKDAQTGGSGENLYFQSSDNGPQNQRNAPRITFGGPSDSTGSNQNGERSGARSKQRRPQGLPNNTASWFTALTQHGKEDLKFPRGQGVPINTNSSPDDQIGYYRRATRRIRGGDGKMKDLSPRWYFYYLGTGPEAALPYGANKDGIIWVATEGALNTPKDHIGTRNPANNAAIVLQLPQGTTLPKGFYAEGSRGGSQASSRSSSRSRNSSRNSTPGSSRGTSPARMAGNGGDAALALLLLDRLNQLESKMSGKGQQQQGQTVTKKSAAEASKKPRQKRTATKAYNVTQAFGRRGPEQTQGNFGDQELIRQGTDYKHWPQIAQFAPSASAFFGMSRIGMEVTPSGTWLTYTGAIKLDDKDPNFKDQVILLNKHIDAYKTFPPTEPKKDKKKKADETQALPQRQKKQQTVTLLPAADLDDFSKQLQQSMSSADSTQAGGSGHHHHHH

SEQ ID NO: 3274 - protein, 806 aa, Artificial Sequence
  Description of Artificial Sequence: Synthetic polypeptide
MKIEEGKLVIWINGDKGYNGLAEVGKKFEKDTGIKVTVEHPDKLEEKFPQVAATGDGPDIIFWAHDRFGGYAQSGLLAEITPDKAFQDKLYPFTWDAVRYNGKLIAYPIAVEALSLIYNKDLLPNPPKTWEEIPALDKELKAKGKSALMFNLQEPYFTWPLIAADGGYAFKYENGKYDIKDVGVDNAGAKAGLTFLVDLIKNKHMNADTDYSIAEAAFNKGETAMTINGPWAWSNIDTSKVNYGVTVLPTFKGQPSKPFVGVLSAGINAASPNKELAKEFLENYLLTDEGLEAVNKDKPLGAVALKSYEEELAKDPRIAATMENAQKGEIMPNIPQMSAFWYAVRTAVINAASGRQTVDEALKDAQTGGSGENLYFQSSDNGPQNQRNAPRITFGGPSDSTGSNQNGERSGARSKQRRPQGLPNNTASWFTALTQHGKEDLKFPRGQGVPINTNSSPDDQIGYYRRATRRIRGGDGKMKDLSPRWYFYYLGTGPEAGLPYGANKDGIIWVATEGALNTPKDHIGTRNPANNAAIVLQLPQGTTLPKGFYAEGSRGGSQASSRSSSRSRNSSRNSTPGSSRGTSPARMAGNGGDAALALLLLDRLNQLESKMSGKGQQQQGQTVTKKSAAEASKKPRQKRTATKAYNVTQAFGRRGPEQTQGNFGDQELIRQGTDDKHWPQIAQFAPSASAFFGMSRIGMEVTPSGTWLTYTGAIKLDDKDPNFKDQVILLNKHIDAYKTFPPTEPKKDKKKKADETQALPQRQKKQQTVTLLPAADLDDFSKQLQQSMSSADSTQAGGSGHHHHHH

SEQ ID NO: 3275 - protein, 806 aa, Artificial Sequence
  Description of Artificial Sequence: Synthetic polypeptide
MKIEEGKLVIWINGDKGYNGLAEVGKKFEKDTGIKVTVEHPDKLEEKFPQVAATGDGPDIIFWAHDRFGGYAQSGLLAEITPDKAFQDKLYPFTWDAVRYNGKLIAYPIAVEALSLIYNKDLLPNPPKTWEEIPALDKELKAKGKSALMFNLQEPYFTWPLIAADGGYAFKYENGKYDIKDVGVDNAGAKAGLTFLVDLIKNKHMNADTDYSIAEAAFNKGETAMTINGPWAWSNIDTSKVNYGVTVLPTFKGQPSKPFVGVLSAGINAASPNKELAKEFLENYLLTDEGLEAVNKDKPLGAVALKSYEEELAKDPRIAATMENAQKGEIMPNIPQMSAFWYAVRTAVINAASGRQTVDEALKDAQTGGSGENLYFQSSDNGPQNQRNAPRITFGGPSDSTGSNQNGERSGARSKQRRPQGLPNNTASWFTALTQHGKEDLKFPRGQGVPINTNSSPDDQIGYYRRATRRIRGGDGKMKDLSPRWYFYYLGTGPEAGLPYGANKDGIIWVATEGALNTPKDHIGTRNPANNAAIVLQLPQGTTLPKGFYAEGSRGGSQASSRSSSRSRNSSRNSTPGSSRGTSPARMAGNGGDAALALLLLDRLNQLESKMSGKGQQQQGQTVTKKSAAEMSKKPRWKRTPTKGYNVTQAFGPRGPKDTQGNFGDAELIKQGTDYKHWPQIAQFVPSAAAFFFMSRISMKETPDGVWLTYTGTIKLDKDDPNFDDQVKLLNKHIDAYKTFPPTEPKKDKKKKADETQALPQRQKKQQTVTLLPAADLDDFSKQLQQSMSSADSTQAGGSGHHHHHH

SEQ ID NO: 3276 - protein, 806 aa, Artificial Sequence
  Description of Artificial Sequence: Synthetic polypeptide
MKIEEGKLVIWINGDKGYNGLAEVGKKFEKDTGIKVTVEHPDKLEEKFPQVAATGDGPDIIFWAHDRFGGYAQSGLLAEITPDKAFQDKLYPFTWDAVRYNGKLIAYPIAVEALSLIYNKDLLPNPPKTWEEIPALDKELKAKGKSALMFNLQEPYFTWPLIAADGGYAFKYENGKYDIKDVGVDNAGAKAGLTFLVDLIKNKHMNADTDYSIAEAAFNKGETAMTINGPWAWSNIDTSKVNYGVTVLPTFKGQPSKPFVGVLSAGINAASPNKELAKEFLENYLLTDEGLEAVNKDKPLGAVALKSYEEELAKDPRIAATMENAQKGEIMPNIPQMSAFWYAVRTAVINAASGRQTVDEALKDAQTGGSGENLYFQSSDNGPQNQRNAPRITFGGPSDSTGSNQNGERSGARSKQRRPQGLPNNTASWFTALTQHGKEDLKFPRGQGVPINTNSSPDDQIGYYRRATRRIRGGDGKMKDLSPRWYFYYLGTGPEAGLPYGANKDGIIWVATEGALNTPKDHIGTRNPANNAAIVLQLPQGTTLPKGFYAEGSRGGSQASSRSSSRSRNSSRNSTPGSSRGTSPARMAGNGGDAALALLLLDRLNQLESKMSGKGQQQQGQTVTKKSAAEMSKKPRQKRTATKGYNVTQCFGPRGPEQTQGNFGDAELVKKGTDYKHWPQIAQFAPSASAFFGMSRISSKETPSGTWLTYTGAIKLDKDDPNFKDQVILLNKHIDAYKTFPPTEPKKDKKKKADETQALPQRQKKQQTVTLLPAADLDDFSKQLQQSMSSADSTQAGGSGHHHHHH

SEQ ID NO: 3277 - protein, 806 aa, Artificial Sequence
  Description of Artificial Sequence: Synthetic polypeptide
MKIEEGKLVIWINGDKGYNGLAEVGKKFEKDTGIKVTVEHPDKLEEKFPQVAATGDGPDIIFWAHDRFGGYAQSGLLAEITPDKAFQDKLYPFTWDAVRYNGKLIAYPIAVEALSLIYNKDLLPNPPKTWEEIPALDKELKAKGKSALMFNLQEPYFTWPLIAADGGYAFKYENGKYDIKDVGVDNAGAKAGLTFLVDLIKNKHMNADTDYSIAEAAFNKGETAMTINGPWAWSNIDTSKVNYGVTVLPTFKGQPSKPFVGVLSAGINAASPNKELAKEFLENYLLTDEGLEAVNKDKPLGAVALKSYEEELAKDPRIAATMENAQKGEIMPNIPQMSAFWYAVRTAVINAASGRQTVDEALKDAQTGGSGENLYFQSSDNGPQNQRNAPRITFGGPSDSTGSNQNGERSGARSKQRRPQGLPNNTASWFTALTQHGKEDLKFPRGQGVPINTNSSPDDQIGYYRRATRRIRGGDGKMKDLSPRWYFYYLGTGPEAGLPYGANKDGIIWVATEGALNTPKDHIGTRNPANNAALVLQLPQGTTLPKGFYAEGSRGGSQASSRSSSRSRNSSRNSTPGSSRGTSPARMAGNGGDAALALLLLDRLNQLESKMSGKGQQQQGQTVTKKSAAEASKKPRQKRTATKAYNVTQAFGRRGPEQTQGNFGDQELIRQGTDYKHWPQIAQFAPSASAFFGMSRIGMEVTPSGTWLTYTGAIKLDDKDPNFKDQVILLNKHIDAYKTFPPTEPKKDKKKKADETQALPQRQKKQQTVTLLPAADLDDFSKQLQQSMSSADSTQAGGSGHHHHHH

SEQ ID NO: 3278 - protein, 806 aa, Artificial Sequence
  Description of Artificial Sequence: Synthetic polypeptide
MKIEEGKLVIWINGDKGYNGLAEVGKKFEKDTGIKVTVEHPDKLEEKFPQVAATGDGPDIIFWAHDRFGGYAQSGLLAEITPDKAFQDKLYPFTWDAVRYNGKLIAYPIAVEALSLIYNKDLLPNPPKTWEEIPALDKELKAKGKSALMFNLQEPYFTWPLIAADGGYAFKYENGKYDIKDVGVDNAGAKAGLTFLVDLIKNKHMNADTDYSIAEAAFNKGETAMTINGPWAWSNIDTSKVNYGVTVLPTFKGQPSKPFVGVLSAGINAASPNKELAKEFLENYLLTDEGLEAVNKDKPLGAVALKSYEEELAKDPRIAATMENAQKGEIMPNIPQMSAFWYAVRTAVINAASGRQTVDEALKDAQTGGSGENLYFQSSDNGPQNQRNAPRITFGGPSDSTGSNQNGERSGARSKQRRPQGLPNNTASWFTALTQHGKEDLKFPRGQGVPINTNSSPDDQIGYYRRATRRIRGGDGKMKDLSPRWYFYYLGTGPEAGLPYGANKDGIIWVATEGALNTPKDHIGTRNPANNAAIVLQLPQGTTLPKGFYAEGSRGGSQASSRSSSRSRNSSRNSTPGSSRGTSPARMAGNGGDAALALLLLDRLNQLESKMSGKGQQQQGQTVTKKSAAEASKKPRQKRTATKAYNVTQAFGRRGPEQTQGNFGDQELIRQGTDYKHWPQIAQFAPSASAFFGMSRIGMEVTPSGTWLTYTGAIKLDDKDPNFNDQVILLNKHIDAYKTFPPTEPKKDKKKKADETQALPQRQKKQQTVTLLPAADLDDFSKQLQQSMSSADSTQAGGSGHHHHHH

SEQ ID NO: 3279 - protein, 806 aa, Artificial Sequence
  Description of Artificial Sequence: Synthetic polypeptide
MKIEEGKLVIWINGDKGYNGLAEVGKKFEKDTGIKVTVEHPDKLEEKFPQVAATGDGPDIIFWAHDRFGGYAQSGLLAEITPDKAFQDKLYPFTWDAVRYNGKLIAYPIAVEALSLIYNKDLLPNPPKTWEEIPALDKELKAKGKSALMFNLQEPYFTWPLIAADGGYAFKYENGKYDIKDVGVDNAGAKAGLTFLVDLIKNKHMNADTDYSIAEAAFNKGETAMTINGPWAWSNIDTSKVNYGVTVLPTFKGQPSKPFVGVLSAGINAASPNKELAKEFLENYLLTDEGLEAVNKDKPLGAVALKSYEEELAKDPRIAATMENAQKGEIMPNIPQMSAFWYAVRTAVINAASGRQTVDEALKDAQTGGSGENLYFQSSDNGPQNQRNAPRITFGGPSDSTGSNQNGERSGARSKQRRPQGLPNNTASWFTALTQHGKEDLKFPRGQGVPINTNSSPDDQIGYYRRATRRFRGGDGKMKDLSPRWYFYYLGTGPEAGLPYGANKDGIIWVATEGALNTPKDHIGTRNPANNAAIVLQLPQGTTLPKGFYAEGSRGGSQASSRSSSRSRNSSRNSTPGSSRGTSPARMAGNGGDAALALLLLDRLNQLESKMSGKGQQQQGQTVTKKSAAEASKKPRQKRTATKAYNVTQAFGRRGPEQTQGNFGDQELIRQGTDYKHWPQIAQFAPSASAFFGMSRIGMEVTPSGTWLTYTGAIKLDDKDPNFKDQVILLNKHIDAYKTFPPTEPKKDKKKKADETQALPQRQKKQQTVTLLPAADLDDFSKQLQQSMSSADSTQAGGSGHHHHHH

SEQ ID NO: 3280 - protein, 806 aa, Artificial Sequence
  Description of Artificial Sequence: Synthetic polypeptide
MKIEEGKLVIWINGDKGYNGLAEVGKKFEKDTGIKVTVEHPDKLEEKFPQVAATGDGPDIIFWAHDRFGGYAQSGLLAEITPDKAFQDKLYPFTWDAVRYNGKLIAYPIAVEALSLIYNKDLLPNPPKTWEEIPALDKELKAKGKSALMFNLQEPYFTWPLIAADGGYAFKYENGKYDIKDVGVDNAGAKAGLTFLVDLIKNKHMNADTDYSIAEAAFNKGETAMTINGPWAWSNIDTSKVNYGVTVLPTFKGQPSKPFVGVLSAGINAASPNKELAKEFLENYLLTDEGLEAVNKDKPLGAVALKSYEEELAKDPRIAATMENAQKGEIMPNIPQMSAFWYAVRTAVINAASGRQTVDEALKDAQTGGSGENLYFQSSDNGPQNQRNAPRITFGGPSDSTGSNQNGERSGARSKQRRPQGLPNNTASWFTALTQHGKEDLKFPRGQGVPINTNSSPDDQIGYYRRATRRIRGGDGKMKDLSPRWYFYYLGTGPEAGLPYGANKDGIIWVATEGALNTPKDHIGTRNPANNAAIVLQLPQGTTLPKGFYAEGSRGGSQASSRSSSRSRNSSRNSTPGSSRGTSPARMAGNGGDAALALLLLDRLNQLESKMSGKGQQQQGQTVTKKSAAEASKKPRQKRTATKAYNVTQCFGRRGPEQTQGNFGDQELIRQGTDYKHWPQIAQFAPSASAFFGMSRIGMEVTPSGTWLTYTGAIKLDDKDPNFKDQVILLNKHIDAYKTFPPTEPKKDKKKKADETQALPQRQKKQQTVTLLPAADLDDFSKQLQQSMSSADSTQAGGSGHHHHHH

SEQ ID NO: 3281 - protein, 806 aa, Artificial Sequence
  Description of Artificial Sequence: Synthetic polypeptide
MKIEEGKLVIWINGDKGYNGLAEVGKKFEKDTGIKVTVEHPDKLEEKFPQVAATGDGPDIIFWAHDRFGGYAQSGLLAEITPDKAFQDKLYPFTWDAVRYNGKLIAYPIAVEALSLIYNKDLLPNPPKTWEEIPALDKELKAKGKSALMFNLQEPYFTWPLIAADGGYAFKYENGKYDIKDVGVDNAGAKAGLTFLVDLIKNKHMNADTDYSIAEAAFNKGETAMTINGPWAWSNIDTSKVNYGVTVLPTFKGQPSKPFVGVLSAGINAASPNKELAKEFLENYLLTDEGLEAVNKDKPLGAVALKSYEEELAKDPRIAATMENAQKGEIMPNIPQMSAFWYAVRTAVINAASGRQTVDEALKDAQTGGSGENLYFQSSDNGPQNQRNAPRITFGGPSDSTGSNQNGERSGARSKQRRPQGLPNNTASWFTALTQHGKEDLKFPRGQGVPINTNSSPDDQIGYYRRATRRIRGGDGKMKDLSPRWYFYYLGTGPEAGLPYGANKDGIIWVATEGALNTPKDHIGTRNPANNAAIVLQLPQGTTLPKGFYAEGSRGGSQASSRSSSRSRNSSRNSTPGSSRGTSPARMAGNGGDAALALLLLDRLNQLESKMSGKGQQQQGQTVTKKSAAEASKKPRQKRTATKAYNVTQAFGRRGPEQTQGNFGDQELIRQGTDYKHWPQIAQFAPSASAFFGMSRIGMEVTPSGTWLTYTGAIKLDDKDPNFRDQVILLNKHIDAYKTFPPTEPKKDKKKKADETQALPQRQKKQQTVTLLPAADLDDFSKQLQQSMSSADSTQAGGSGHHHHHH

SEQ ID NO: 3282 - protein, 806 aa, Artificial Sequence
  Description of Artificial Sequence: Synthetic polypeptide
MKIEEGKLVIWINGDKGYNGLAEVGKKFEKDTGIKVTVEHPDKLEEKFPQVAATGDGPDIIFWAHDRFGGYAQSGLLAEITPDKAFQDKLYPFTWDAVRYNGKLIAYPIAVEALSLIYNKDLLPNPPKTWEEIPALDKELKAKGKSALMFNLQEPYFTWPLIAADGGYAFKYENGKYDIKDVGVDNAGAKAGLTFLVDLIKNKHMNADTDYSIAEAAFNKGETAMTINGPWAWSNIDTSKVNYGVTVLPTFKGQPSKPFVGVLSAGINAASPNKELAKEFLENYLLTDEGLEAVNKDKPLGAVALKSYEEELAKDPRIAATMENAQKGEIMPNIPQMSAFWYAVRTAVINAASGRQTVDEALKDAQTGGSGENLYFQSSDNGPQNQRNAPRITFGGPSDSTGSNQNGERSGARSKQRRPQGLPNNTASWFTALTQHGKEDLKFPRGQGVPINTNSSPDDQIGYYRRATRRIRGGDGKMKDLSPRWYFYYSGTGPEAGLPYGANKDGIIWVATEGALNTPKDHIGTRNPANNAAIVLQLPQGTTLPKGFYAEGSRGGSQASSRSSSRSRNSSRNSTPGSSRGTSPARMAGNGGDAALALLLLDRLNQLESKMSGKGQQQQGQTVTKKSAAEASKKPRQKRTATKAYNVTQAFGRRGPEQTQGNFGDQELIRQGTDYKHWPQIAQFAPSASAFFGMSRIGMEVTPSGTWLTYTGAIKLDDKDPNFKDQVILLNKHIDAYKTFPPTEPKKDKKKKADETQALPQRQKKQQTVTLLPAADLDDFSKQLQQSMSSADSTQAGGSGHHHHHH

SEQ ID NO: 3283 - protein, 806 aa, Artificial Sequence
  Description of Artificial Sequence: Synthetic polypeptide
MKIEEGKLVIWINGDKGYNGLAEVGKKFEKDTGIKVTVEHPDKLEEKFPQVAATGDGPDIIFWAHDRFGGYAQSGLLAEITPDKAFQDKLYPFTWDAVRYNGKLIAYPIAVEALSLIYNKDLLPNPPKTWEEIPALDKELKAKGKSALMFNLQEPYFTWPLIAADGGYAFKYENGKYDIKDVGVDNAGAKAGLTFLVDLIKNKHMNADTDYSIAEAAFNKGETAMTINGPWAWSNIDTSKVNYGVTVLPTFKGQPSKPFVGVLSAGINAASPNKELAKEFLENYLLTDEGLEAVNKDKPLGAVALKSYEEELAKDPRIAATMENAQKGEIMPNIPQMSAFWYAVRTAVINAASGRQTVDEALKDAQTGGSGENLYFQSSDNGPQNQRNAPRITFGGPSDSTGSNQNGERSGARSKQRRPQGLPNNTASWFTALTQHGKEDLKFPKGQGVPINTNSKPDDQIGYYRRQTRRYRGGDGQMKDLDPRWYFYYLGTGPEAGLPYGANKDGIIWVATEGALNTPKDHIGTRNPANNAAIVLQLPQGTTLPKGFYAEGSRGGSQASSRSSSRSRNSSRNSTPGSSRGTSPARMAGNGGDAALALLLLDRLNQLESKMSGKGQQQQGQTVTKKSAAEASKKPRQKRTATKAYNVTQAFGRRGPEQTQGNFGDQELIRQGTDYKHWPQIAQFAPSASAFFGMSRIGMEVTPSGTWLTYTGAIKLDDKDPNFKDQVILLNKHIDAYKTFPPTEPKKDKKKKADETQALPQRQKKQQTVTLLPAADLDDFSKQLQQSMSSADSTQAGGSGHHHHHH

SEQ ID NO: 3284 - protein, 806 aa, Artificial Sequence
  Description of Artificial Sequence: Synthetic polypeptide
MKIEEGKLVIWINGDKGYNGLAEVGKKFEKDTGIKVTVEHPDKLEEKFPQVAATGDGPDIIFWAHDRFGGYAQSGLLAEITPDKAFQDKLYPFTWDAVRYNGKLIAYPIAVEALSLIYNKDLLPNPPKTWEEIPALDKELKAKGKSALMFNLQEPYFTWPLIAADGGYAFKYENGKYDIKDVGVDNAGAKAGLTFLVDLIKNKHMNADTDYSIAEAAFNKGETAMTINGPWAWSNIDTSKVNYGVTVLPTFKGQPSKPFVGVLSAGINAASPNKELAKEFLENYLLTDEGLEAVNKDKPLGAVALKSYEEELAKDPRIAATMENAQKGEIMPNIPQMSAFWYAVRTAVINAASGRQTVDEALKDAQTGGSGENLYFQSSDNGPQNQRNAPRITFGGPSDSTGSNQNGERSGARSKQRRPQGLPNNTASWFTALTQHGKEDLKFPRGQGVPINTNSSPDDQIGYYRRATRRIRGGDGKMKDLSPRWYFYYLGTGPEAGLPYGANKDGIIWVATEGALNTPKDHIGTRNPANNAAIVLQLPQGTTLPKGFYAEGSRGGSQASSRSSSRSRNSSRNSTPGSSRGTSPARMAGNGGDAALALLLLDRLNQLESKMSGKGQQQQGQTVTKKSAAEASKKPRQKRTATKAYNVTQAFGRRGPEQTQGNFGDQELIRQGTDYKHWPQIAQFAPSASAFFGMSRIGMEPTPSGTWLTYTGAIKLDDKDPNFKDQVILLNKHIDAYKTFPPTEPKKDKKKKADETQALPQRQKKQQTVTLLPAADLDDFSKQLQQSMSSADSTQAGGSGHHHHHH

SEQ ID NO: 3285 - protein, 806 aa, Artificial Sequence
  Description of Artificial Sequence: Synthetic polypeptide
MKIEEGKLVIWINGDKGYNGLAEVGKKFEKDTGIKVTVEHPDKLEEKFPQVAATGDGPDIIFWAHDRFGGYAQSGLLAEITPDKAFQDKLYPFTWDAVRYNGKLIAYPIAVEALSLIYNKDLLPNPPKTWEEIPALDKELKAKGKSALMFNLQEPYFTWPLIAADGGYAFKYENGKYDIKDVGVDNAGAKAGLTFLVDLIKNKHMNADTDYSIAEAAFNKGETAMTINGPWAWSNIDTSKVNYGVTVLPTFKGQPSKPFVGVLSAGINAASPNKELAKEFLENYLLTDEGLEAVNKDKPLGAVALKSYEEELAKDPRIAATMENAQKGEIMPNIPQMSAFWYAVRTAVINAASGRQTVDEALKDAQTGGSGENLYFQSSDNGPQNQRNAPRITFGGPSDSTGSNQNGERSGARSKQRRPQGLPNNTASWFTALTQHGKEDLKFPRGQGVPINTNSSPDDQIGYYRRATRRIRGGDGKMKDLSPRWYFYYLGTGPEAGLPYGANKDGIIWVATEGALNTPKDHIGTRNPANNAAIVLQLPQGTTLPKGFYAEGSRGGSQASSRSSSRSRNSSRNSTPGSSRGTSPARMAGNGGDAALALLLLDRLNQLESKMSGKGQQQQGQTVTKKSAAEASKKPRQKRTATKAYNVTQAFGRRGPEPTQGNFGDQELIRQGTDYKHWPQIAQFAPSASAFFGMSRIGMEVTPSGTWLTYTGAIKLDDKDPNFKDQVILLNKHIDAYKTFPPTEPKKDKKKKADETQALPQRQKKQQTVTLLPAADLDDFSKQLQQSMSSADSTQAGGSGHHHHHH

SEQ ID NO: 3286 - protein, 806 aa, Artificial Sequence
  Description of Artificial Sequence: Synthetic polypeptide
MKIEEGKLVIWINGDKGYNGLAEVGKKFEKDTGIKVTVEHPDKLEEKFPQVAATGDGPDIIFWAHDRFGGYAQSGLLAEITPDKAFQDKLYPFTWDAVRYNGKLIAYPIAVEALSLIYNKDLLPNPPKTWEEIPALDKELKAKGKSALMFNLQEPYFTWPLIAADGGYAFKYENGKYDIKDVGVDNAGAKAGLTFLVDLIKNKHMNADTDYSIAEAAFNKGETAMTINGPWAWSNIDTSKVNYGVTVLPTFKGQPSKPFVGVLSAGINAASPNKELAKEFLENYLLTDEGLEAVNKDKPLGAVALKSYEEELAKDPRIAATMENAQKGEIMPNIPQMSAFWYAVRTAVINAASGRQTVDEALKDAQTGGSGENLYFQSSDNGPQNQRNAPRITFGGPSDSTGSNQNGERSGARSKQRRPQGLPNNTASWFTALTQHGKEDLKFPRGQGVPINTNSSPDDQIGYYRRATRRIRGGDGKMKDLSPRWYFYYLGTGPEAGLPYGARKDGIIWVATEGALNTPKDHIGTRNPANNAAIVLQLPQGTTLPKGFYAEGSRGGSQASSRSSSRSRNSSRNSTPGSSRGTSPARMAGNGGDAALALLLLDRLNQLESKMSGKGQQQQGQTVTKKSAAEASKKPRQKRTATKAYNVTQAFGRRGPEQTQGNFGDQELIRQGTDYKHWPQIAQFAPSASAFFGMSRIGMEVTPSGTWLTYTGAIKLDDKDPNFKDQVILLNKHIDAYKTFPPTEPKKDKKKKADETQALPQRQKKQQTVTLLPAADLDDFSKQLQQSMSSADSTQAGGSGHHHHHH

SEQ ID NO: 3287 - protein, 806 aa, Artificial Sequence
  Description of Artificial Sequence: Synthetic polypeptide
MKIEEGKLVIWINGDKGYNGLAEVGKKFEKDTGIKVTVEHPDKLEEKFPQVAATGDGPDIIFWAHDRFGGYAQSGLLAEITPDKAFQDKLYPFTWDAVRYNGKLIAYPIAVEALSLIYNKDLLPNPPKTWEEIPALDKELKAKGKSALMFNLQEPYFTWPLIAADGGYAFKYENGKYDIKDVGVDNAGAKAGLTFLVDLIKNKHMNADTDYSIAEAAFNKGETAMTINGPWAWSNIDTSKVNYGVTVLPTFKGQPSKPFVGVLSAGINAASPNKELAKEFLENYLLTDEGLEAVNKDKPLGAVALKSYEEELAKDPRIAATMENAQKGEIMPNIPQMSAFWYAVRTAVINAASGRQTVDEALKDAQTGGSGENLYFQSSDNGPQNQRNAPRITFGGPSDSTGSNQNGERSGARSKQRRPQGLPNNTASWFTPLTQFGKEDLKFPPGQGVPINTNSSPDDQIGYYRRATRRIRGGDGKMKDLPPKWYFYYLGTGPHADLPYGQKHPGVVWVARPGALNTPKDHIGTRNPANNAAIPLQLPPGTKLPKGFYAEGSRGGSQASSRSSSRSRNSSRNSTPGSSRGTSPARMAGNGGDAALALLLLDRLNQLESKMSGKGQQQQGQTVTKKSAAEASKKPRQKRTATKAYNVTQAFGRRGPEQTQGNFGDQELIRQGTDYKHWPQIAQFAPSASAFFGMSRIGMEVTPSGTWLTYTGAIKLDDKDPNFKDQVILLNKHIDAYKTFPPTEPKKDKKKKADETQALPQRQKKQQTVTLLPAADLDDFSKQLQQSMSSADSTQAGGSGHHHHHH

SEQ ID NO: 3288 - protein, 806 aa, Artificial Sequence
  Description of Artificial Sequence: Synthetic polypeptide
MKIEEGKLVIWINGDKGYNGLAEVGKKFEKDTGIKVTVEHPDKLEEKFPQVAATGDGPDIIFWAHDRFGGYAQSGLLAEITPDKAFQDKLYPFTWDAVRYNGKLIAYPIAVEALSLIYNKDLLPNPPKTWEEIPALDKELKAKGKSALMFNLQEPYFTWPLIAADGGYAFKYENGKYDIKDVGVDNAGAKAGLTFLVDLIKNKHMNADTDYSIAEAAFNKGETAMTINGPWAWSNIDTSKVNYGVTVLPTFKGQPSKPFVGVLSAGINAASPNKELAKEFLENYLLTDEGLEAVNKDKPLGAVALKSYEEELAKDPRIAATMENAQKGEIMPNIPQMSAFWYAVRTAVINAASGRQTVDEALKDAQTGGSGENLYFQSSDNGPQNQRNAPRITFGGPSDSTGSNQNGERSGARSKQRRPQGLPNNTASWFTPLTQHGKEDLKFPRGQGVPINTNSSPDDQIGYYRRATRRIRGGDGKMKDLSPRWYFYYLGTGPEAGLPYGANKDGIIWVATEGALNTPKDHIGTRNPANNAAIVLQLPQGTTLPKGFYAEGSRGGSQASSRSSSRSRNSSRNSTPGSSRGTSPARMAGNGGDAALALLLLDRLNQLESKMSGKGQQQQGQTVTKKSAAEASKKPRQKRTATKAYNVTQAFGRRGPEQTQGNFGDQELIRQGTDYKHWPQIAQFAPSASAFFGMSRIGMEVTPSGTWLTYTGAIKLDDKDPNFKDQVILLNKHIDAYKTFPPTEPKKDKKKKADETQALPQRQKKQQTVTLLPAADLDDFSKQLQQSMSSADSTQAGGSGHHHHHH

SEQ ID NO: 3289 - protein, 806 aa, Artificial Sequence
  Description of Artificial Sequence: Synthetic polypeptide
MKIEEGKLVIWINGDKGYNGLAEVGKKFEKDTGIKVTVEHPDKLEEKFPQVAATGDGPDIIFWAHDRFGGYAQSGLLAEITPDKAFQDKLYPFTWDAVRYNGKLIAYPIAVEALSLIYNKDLLPNPPKTWEEIPALDKELKAKGKSALMFNLQEPYFTWPLIAADGGYAFKYENGKYDIKDVGVDNAGAKAGLTFLVDLIKNKHMNADTDYSIAEAAFNKGETAMTINGPWAWSNIDTSKVNYGVTVLPTFKGQPSKPFVGVLSAGINAASPNKELAKEFLENYLLTDEGLEAVNKDKPLGAVALKSYEEELAKDPRIAATMENAQKGEIMPNIPQMSAFWYAVRTAVINAASGRQTVDEALKDAQTGGSGENLYFQSSDNGPQNQRNAPRITFGGPSDSTGSNQNGERSGARSKQRRPQGLPNNTASWFTALTQHGKEDLKFPRGQGVPINTNSSPDDQIGYYRRATRRIRGGDGKMKDLSPRWYFYYLGTGPEAGLPYGANKDGIIWVATEGALNTPKDHIGTRNPANNAAIVLQLPQGTTLPKGFYAEGSRGGSQASSRSSSRSRNSSRNSTPGSSRGTSPARMAGNGGDAALALLLLDRLNQLESKMSGKGQQQQGQTVTKKSAAEASKKPRQKRTATKAYNVTQAFGRRGPEQTQGNFGDQELIRQGTDYKHWPQIAQFAPSASAFFGMSRIGMEVTPSGTWLTYTGAIKLDPKDPNFKDQVILLNKHIDAYKTFPPTEPKKDKKKKADETQALPQRQKKQQTVTLLPAADLDDFSKQLQQSMSSADSTQAGGSGHHHHHH

SEQ ID NO: 3290 - protein, 806 aa, Artificial Sequence
  Description of Artificial Sequence: Synthetic polypeptide
MKIEEGKLVIWINGDKGYNGLAEVGKKFEKDTGIKVTVEHPDKLEEKFPQVAATGDGPDIIFWAHDRFGGYAQSGLLAEITPDKAFQDKLYPFTWDAVRYNGKLIAYPIAVEALSLIYNKDLLPNPPKTWEEIPALDKELKAKGKSALMFNLQEPYFTWPLIAADGGYAFKYENGKYDIKDVGVDNAGAKAGLTFLVDLIKNKHMNADTDYSIAEAAFNKGETAMTINGPWAWSNIDTSKVNYGVTVLPTFKGQPSKPFVGVLSAGINAASPNKELAKEFLENYLLTDEGLEAVNKDKPLGAVALKSYEEELAKDPRIAATMENAQKGEIMPNIPQMSAFWYAVRTAVINAASGRQTVDEALKDAQTGGSGENLYFQSSDNGPQNQRNAPRITFGGPSDSTGSNQNGERSGARSKQRRPQGLPNNTASWFTALTQHGKEDLKFPRGQGVPINTNSSPDDQIGYYRRATRRIRGGDGKMKDLSPRWYFYYLGTGPEAGLPYGANKDGIIWVATEGALNTPKDHIGTRNPANNAAIDLQLPQGTTLPKGFYAEGSRGGSQASSRSSSRSRNSSRNSTPGSSRGTSPARMAGNGGDAALALLLLDRLNQLESKMSGKGQQQQGQTVTKKSAAEASKKPRQKRTATKAYNVTQAFGRRGPEQTQGNFGDQELIRQGTDYKHWPQIAQFAPSASAFFGMSRIGMEVTPSGTWLTYTGAIKLDDKDPNFKDQVILLNKHIDAYKTFPPTEPKKDKKKKADETQALPQRQKKQQTVTLLPAADLDDFSKQLQQSMSSADSTQAGGSGHHHHHH

SEQ ID NO: 3291 - protein, 806 aa, Artificial Sequence
  Description of Artificial Sequence: Synthetic polypeptide
MKIEEGKLVIWINGDKGYNGLAEVGKKFEKDTGIKVTVEHPDKLEEKFPQVAATGDGPDIIFWAHDRFGGYAQSGLLAEITPDKAFQDKLYPFTWDAVRYNGKLIAYPIAVEALSLIYNKDLLPNPPKTWEEIPALDKELKAKGKSALMFNLQEPYFTWPLIAADGGYAFKYENGKYDIKDVGVDNAGAKAGLTFLVDLIKNKHMNADTDYSIAEAAFNKGETAMTINGPWAWSNIDTSKVNYGVTVLPTFKGQPSKPFVGVLSAGINAASPNKELAKEFLENYLLTDEGLEAVNKDKPLGAVALKSYEEELAKDPRIAATMENAQKGEIMPNIPQMSAFWYAVRTAVINAASGRQTVDEALKDAQTGGSGENLYFQSSDNGPQNQRNAPRITFGGPSDSTGSNQNGERSGARSKQRRPQGLPNNTASWFTGLTQHGKEDLKFPPGQGVPINTNSSPDDQIGYYRRATRRIRGGDGKMKDLPPRWYFYYLGTGPEADLPYGAVKDGIFWVAAEGALNTPKDHIGTRNPANNAAIPLQLPPGTTLPKGFYAEGSRGGSQASSRSSSRSRNSSRNSTPGSSRGTSPARMAGNGGDAALALLLLDRLNQLESKMSGKGQQQQGQTVTKKSAAEASKKPRQKRTATKAYNVTQAFGRRGPEQTQGNFGDQELIRQGTDYKHWPQIAQFAPSASAFFGMSRIGMEVTPSGTWLTYTGAIKLDDKDPNFKDQVILLNKHIDAYKTFPPTEPKKDKKKKADETQALPQRQKKQQTVTLLPAADLDDFSKQLQQSMSSADSTQAGGSGHHHHHH

SEQ ID NO: 3292 - protein, 806 aa, Artificial Sequence
  Description of Artificial Sequence: Synthetic polypeptide
MKIEEGKLVIWINGDKGYNGLAEVGKKFEKDTGIKVTVEHPDKLEEKFPQVAATGDGPDIIFWAHDRFGGYAQSGLLAEITPDKAFQDKLYPFTWDAVRYNGKLIAYPIAVEALSLIYNKDLLPNPPKTWEEIPALDKELKAKGKSALMFNLQEPYFTWPLIAADGGYAFKYENGKYDIKDVGVDNAGAKAGLTFLVDLIKNKHMNADTDYSIAEAAFNKGETAMTINGPWAWSNIDTSKVNYGVTVLPTFKGQPSKPFVGVLSAGINAASPNKELAKEFLENYLLTDEGLEAVNKDKPLGAVALKSYEEELAKDPRIAATMENAQKGEIMPNIPQMSAFWYAVRTAVINAASGRQTVDEALKDAQTGGSGENLYFQSSDNGPQNQRNAPRITFGGPSDSTGSNQNGERSGARSKQRRPQGLPNNTASWFTALTQHGKEDLKFPRGQGVPINTNSSPDDQIGYYRRATRRIRGGDGKMKDLSPRWYFYYLGTGPEAGLPYGANKDGIIWVATEGALNTPKDHIGTRNPANNAAIVLQLPQGTTLPKGFYAEGSRGGSQASSRSSSRSRNSSRNSTPGSSRGTSPARMAGNGGDAALALLLLDRLNQLESKMSGKGQQQQGQTVTKKSAAEASKKPRQKRTATKAYNVTQAFGKRGPEQTQGNFGDQELIRQGTDYKHWPQIAQFAPSASAFFGMSRIGMEVTPSGTWLTYTGAIKLDDKDPNFKDQVILLNKHIDAYKTFPPTEPKKDKKKKADETQALPQRQKKQQTVTLLPAADLDDFSKQLQQSMSSADSTQAGGSGHHHHHH

SEQ ID NO: 3293 - protein, 806 aa, Artificial Sequence
  Description of Artificial Sequence: Synthetic polypeptide
MKIEEGKLVIWINGDKGYNGLAEVGKKFEKDTGIKVTVEHPDKLEEKFPQVAATGDGPDIIFWAHDRFGGYAQSGLLAEITPDKAFQDKLYPFTWDAVRYNGKLIAYPIAVEALSLIYNKDLLPNPPKTWEEIPALDKELKAKGKSALMFNLQEPYFTWPLIAADGGYAFKYENGKYDIKDVGVDNAGAKAGLTFLVDLIKNKHMNADTDYSIAEAAFNKGETAMTINGPWAWSNIDTSKVNYGVTVLPTFKGQPSKPFVGVLSAGINAASPNKELAKEFLENYLLTDEGLEAVNKDKPLGAVALKSYEEELAKDPRIAATMENAQKGEIMPNIPQMSAFWYAVRTAVINAASGRQTVDEALKDAQTGGSGENLYFQSSDNGPQNQRNAPRITFGGPSDSTGSNQNGERSGARSKQRRPQGLPNNTASWFTALTQHGKEDLKFPRGQGVPINTNSSPDDQIGYYRRATRRIRGGDGKMKDLSPRWYFYYLGTGPEAGLPYGANKDGIIWVATEGALNTPKDHIGTRNPANNAAIVLQLPQGTTLPKGFYAEGSRGGSQASSRSSSRSRNSSRNSTPGSSRGTSPARMAGNGGDAALALLLLDRLNQLESKMSGKGQQQQGQTVTKKSAAEMSKKPRQKRTATKGCNVTQCFGPRGPEQTQGNFGDAELIKKGTDYKHWPQIAQFAPSASAFFGMSRISSKEQPSGTWLTYTGAIKLDKDDPNFKDQVILLNKHIDAYKTFPPTEPKKDKKKKADETQALPQRQKKQQTVTLLPAADLDDFSKQLQQSMSSADSTQAGGSGHHHHHH

SEQ ID NO: 3294 - protein, 806 aa, Artificial Sequence
  Description of Artificial Sequence: Synthetic polypeptide
MKIEEGKLVIWINGDKGYNGLAEVGKKFEKDTGIKVTVEHPDKLEEKFPQVAATGDGPDIIFWAHDRFGGYAQSGLLAEITPDKAFQDKLYPFTWDAVRYNGKLIAYPIAVEALSLIYNKDLLPNPPKTWEEIPALDKELKAKGKSALMFNLQEPYFTWPLIAADGGYAFKYENGKYDIKDVGVDNAGAKAGLTFLVDLIKNKHMNADTDYSIAEAAFNKGETAMTINGPWAWSNIDTSKVNYGVTVLPTFKGQPSKPFVGVLSAGINAASPNKELAKEFLENYLLTDEGLEAVNKDKPLGAVALKSYEEELAKDPRIAATMENAQKGEIMPNIPQMSAFWYAVRTAVINAASGRQTVDEALKDAQTGGSGENLYFQSSDNGPQNQRNAPRITFGGPSDSTGSNQNGERSGARSKQRRPQGLPNNTASWFTALTQHGKEDLKFPRGQGVPINTNSSPDDQIGYYRRATRRIRGGDGKMKDLSPRWYFYYLGTGPEAGLPYGANKDGIIWVATEGALNTPKDHIGTRNPANNAAIVLQLPQGTTLPKGFYAEGSRGGSQASSRSSSRSRNSSRNSTPGSSRGTSPARMAGNGGDAALALLLLDRLNQLESKMSGKGQQQQGQTVTKKSAAEASKKPRQKRTATKAYNVTQAFGRRGPEQTQGNFGDQELIRQGTDYKHWPQIAQFAPSASAFFGMSRIGTEVTPSGTWLTYTGAIKLDDKDPNFKDQVILLNKHIDAYKTFPPTEPKKDKKKKADETQALPQRQKKQQTVTLLPAADLDDFSKQLQQSMSSADSTQAGGSGHHHHHH

SEQ ID NO: 3295 - protein, 806 aa, Artificial Sequence
  Description of Artificial Sequence: Synthetic polypeptide
MKIEEGKLVIWINGDKGYNGLAEVGKKFEKDTGIKVTVEHPDKLEEKFPQVAATGDGPDIIFWAHDRFGGYAQSGLLAEITPDKAFQDKLYPFTWDAVRYNGKLIAYPIAVEALSLIYNKDLLPNPPKTWEEIPALDKELKAKGKSALMFNLQEPYFTWPLIAADGGYAFKYENGKYDIKDVGVDNAGAKAGLTFLVDLIKNKHMNADTDYSIAEAAFNKGETAMTINGPWAWSNIDTSKVNYGVTVLPTFKGQPSKPFVGVLSAGINAASPNKELAKEFLENYLLTDEGLEAVNKDKPLGAVALKSYEEELAKDPRIAATMENAQKGEIMPNIPQMSAFWYAVRTAVINAASGRQTVDEALKDAQTGGSGENLYFQSSDNGPQNQRNAPRITFGGPSDSTGSNQNGERSGARSKQRRPQGLPNNTASWFTALTQHGKEDLKFPRGQGVPINTNSSPDDQIGYYRRDTRRIRGGDGKMKDLSPRWYFYYLGTGPEAGLPYGANKDGIIWVATEGALNTPKDHIGTRNPANNAAIVLQLPQGTTLPKGFYAEGSRGGSQASSRSSSRSRNSSRNSTPGSSRGTSPARMAGNGGDAALALLLLDRLNQLESKMSGKGQQQQGQTVTKKSAAEASKKPRQKRTATKAYNVTQAFGRRGPEQTQGNFGDQELIRQGTDYKHWPQIAQFAPSASAFFGMSRIGMEVTPSGTWLTYTGAIKLDDKDPNFKDQVILLNKHIDAYKTFPPTEPKKDKKKKADETQALPQRQKKQQTVTLLPAADLDDFSKQLQQSMSSADSTQAGGSGHHHHHH

SEQ ID NO: 3296 - protein, 806 aa, Artificial Sequence
  Description of Artificial Sequence: Synthetic polypeptide
MKIEEGKLVIWINGDKGYNGLAEVGKKFEKDTGIKVTVEHPDKLEEKFPQVAATGDGPDIIFWAHDRFGGYAQSGLLAEITPDKAFQDKLYPFTWDAVRYNGKLIAYPIAVEALSLIYNKDLLPNPPKTWEEIPALDKELKAKGKSALMFNLQEPYFTWPLIAADGGYAFKYENGKYDIKDVGVDNAGAKAGLTFLVDLIKNKHMNADTDYSIAEAAFNKGETAMTINGPWAWSNIDTSKVNYGVTVLPTFKGQPSKPFVGVLSAGINAASPNKELAKEFLENYLLTDEGLEAVNKDKPLGAVALKSYEEELAKDPRIAATMENAQKGEIMPNIPQMSAFWYAVRTAVINAASGRQTVDEALKDAQTGGSGENLYFQSSDNGPQNQRNAPRITFGGPSDSTGSNQNGERSGARSKQRRPQGLPNNTASWFTALTQHGKEDLKFPRGQGVPINTNSSPDDQIGYYRRATRRWRGGDGKMKDLSPRWYFYYLGTGPEAGLPYGANKDGIIWVATEGALNTPKDHIGTRNPANNAAIVLQLPQGTTLPKGFYAEGSRGGSQASSRSSSRSRNSSRNSTPGSSRGTSPARMAGNGGDAALALLLLDRLNQLESKMSGKGQQQQGQTVTKKSAAEASKKPRQKRTATKAYNVTQAFGRRGPEQTQGNFGDQELIRQGTDYKHWPQIAQFAPSASAFFGMSRIGMEVTPSGTWLTYTGAIKLDDKDPNFKDQVILLNKHIDAYKTFPPTEPKKDKKKKADETQALPQRQKKQQTVTLLPAADLDDFSKQLQQSMSSADSTQAGGSGHHHHHH

SEQ ID NO: 3297 - protein, 806 aa, Artificial Sequence
  Description of Artificial Sequence: Synthetic polypeptide
MKIEEGKLVIWINGDKGYNGLAEVGKKFEKDTGIKVTVEHPDKLEEKFPQVAATGDGPDIIFWAHDRFGGYAQSGLLAEITPDKAFQDKLYPFTWDAVRYNGKLIAYPIAVEALSLIYNKDLLPNPPKTWEEIPALDKELKAKGKSALMFNLQEPYFTWPLIAADGGYAFKYENGKYDIKDVGVDNAGAKAGLTFLVDLIKNKHMNADTDYSIAEAAFNKGETAMTINGPWAWSNIDTSKVNYGVTVLPTFKGQPSKPFVGVLSAGINAASPNKELAKEFLENYLLTDEGLEAVNKDKPLGAVALKSYEEELAKDPRIAATMENAQKGEIMPNIPQMSAFWYAVRTAVINAASGRQTVDEALKDAQTGGSGENLYFQSSDNGPQNQRNAPRITFGGPSDSTGSNQNGERSGARSKQRRPQGLPNNTASWFTALTQHGKEDLKFPRGQGVPINTNSSPDDQIGYYRRATRRIRGGDGKMKDLSPRWYFYYLGTGPEAGLPYGANKDGIIWVATEGALNTPKDHIGTRNPANNAAIVLQLPQGTTLPKGFYAEGSRGGSQASSRSSSRSRNSSRNSTPGSSRGTSPARMAGNGGDAALALLLLDRLNQLESKMSGKGQQQQGQTVTKKSAAEASKKPRCKRTATKAYNVTQAFGRRGPEQTQGNFGDQELIRQGTDYKHWPQIAQFAPSASAFFGMSRIGMEVTPSGTWLTYTGAIKLDDKDPNFKDQVILLNKHIDAYKTFPPTEPKKDKKKKADETQALPQRQKKQQTVTLLPAADLDDFSKQLQQSMSSADSTQAGGSGHHHHHH

SEQ ID NO: 3298 - protein, 806 aa, Artificial Sequence
  Description of Artificial Sequence: Synthetic polypeptide
MKIEEGKLVIWINGDKGYNGLAEVGKKFEKDTGIKVTVEHPDKLEEKFPQVAATGDGPDIIFWAHDRFGGYAQSGLLAEITPDKAFQDKLYPFTWDAVRYNGKLIAYPIAVEALSLIYNKDLLPNPPKTWEEIPALDKELKAKGKSALMFNLQEPYFTWPLIAADGGYAFKYENGKYDIKDVGVDNAGAKAGLTFLVDLIKNKHMNADTDYSIAEAAFNKGETAMTINGPWAWSNIDTSKVNYGVTVLPTFKGQPSKPFVGVLSAGINAASPNKELAKEFLENYLLTDEGLEAVNKDKPLGAVALKSYEEELAKDPRIAATMENAQKGEIMPNIPQMSAFWYAVRTAVINAASGRQTVDEALKDAQTGGSGENLYFQSSDNGPQNQRNAPRITFGGPSDSTGSNQNGERSGARSKQRRPQGLPNNTASWFTALTQHGKEDLKFPRGQGVPINTNSSPDDQIGYYRRATRRIRGGDGKMKDLSPRWYFYYLGTGPEAGLPYGANKDGIIWVATEGALNTPKDHIGTRNPANNAAIQLQLPQGTTLPKGFYAEGSRGGSQASSRSSSRSRNSSRNSTPGSSRGTSPARMAGNGGDAALALLLLDRLNQLESKMSGKGQQQQGQTVTKKSAAEASKKPRQKRTATKAYNVTQAFGRRGPEQTQGNFGDQELIRQGTDYKHWPQIAQFAPSASAFFGMSRIGMEVTPSGTWLTYTGAIKLDDKDPNFKDQVILLNKHIDAYKTFPPTEPKKDKKKKADETQALPQRQKKQQTVTLLPAADLDDFSKQLQQSMSSADSTQAGGSGHHHHHH

SEQ ID NO: 3299 - protein, 806 aa, Artificial Sequence
  Description of Artificial Sequence: Synthetic polypeptide
MKIEEGKLVIWINGDKGYNGLAEVGKKFEKDTGIKVTVEHPDKLEEKFPQVAATGDGPDIIFWAHDRFGGYAQSGLLAEITPDKAFQDKLYPFTWDAVRYNGKLIAYPIAVEALSLIYNKDLLPNPPKTWEEIPALDKELKAKGKSALMFNLQEPYFTWPLIAADGGYAFKYENGKYDIKDVGVDNAGAKAGLTFLVDLIKNKHMNADTDYSIAEAAFNKGETAMTINGPWAWSNIDTSKVNYGVTVLPTFKGQPSKPFVGVLSAGINAASPNKELAKEFLENYLLTDEGLEAVNKDKPLGAVALKSYEEELAKDPRIAATMENAQKGEIMPNIPQMSAFWYAVRTAVINAASGRQTVDEALKDAQTGGSGENLYFQSSDNGPQNQRNAPRITFGGPSDSTGSNQNGERSGARSKQRRPQGLPNNTASWFTALTQHGKEDLKFPRGQGVPINTNSSPDDQIGYYRRATRRIRGGDGKMKDLSPRWAFYYLGTGPEAGLPYGANKDGIIWVATEGALNTPKDHIGTRNPANNAAIVLQLPQGTTLPKGFYAEGSRGGSQASSRSSSRSRNSSRNSTPGSSRGTSPARMAGNGGDAALALLLLDRLNQLESKMSGKGQQQQGQTVTKKSAAEASKKPRQKRTATKAYNVTQAFGRRGPEQTQGNFGDQELIRQGTDYKHWPQIAQFAPSASAFFGMSRIGMEVTPSGTWLTYTGAIKLDDKDPNFKDQVILLNKHIDAYKTFPPTEPKKDKKKKADETQALPQRQKKQQTVTLLPAADLDDFSKQLQQSMSSADSTQAGGSGHHHHHH

SEQ ID NO: 3300 - protein, 806 aa, Artificial Sequence
  Description of Artificial Sequence: Synthetic polypeptide
MKIEEGKLVIWINGDKGYNGLAEVGKKFEKDTGIKVTVEHPDKLEEKFPQVAATGDGPDIIFWAHDRFGGYAQSGLLAEITPDKAFQDKLYPFTWDAVRYNGKLIAYPIAVEALSLIYNKDLLPNPPKTWEEIPALDKELKAKGKSALMFNLQEPYFTWPLIAADGGYAFKYENGKYDIKDVGVDNAGAKAGLTFLVDLIKNKHMNADTDYSIAEAAFNKGETAMTINGPWAWSNIDTSKVNYGVTVLPTFKGQPSKPFVGVLSAGINAASPNKELAKEFLENYLLTDEGLEAVNKDKPLGAVALKSYEEELAKDPRIAATMENAQKGEIMPNIPQMSAFWYAVRTAVINAASGRQTVDEALKDAQTGGSGENLYFQSSDNGPQNQRNAPRITFGGPSDSTGSNQNGERSGARSKQRRPQGLPNNTASWFTALTQHGKEDLKFPRGQGVPINTNSSPDDQIGYYRRATRRIRGGDGKMKDLSPRWYFYYLGTGPEANLPYGANKDGIIWVATEGALNTPKDHIGTRNPANNAAIVLQLPQGTTLPKGFYAEGSRGGSQASSRSSSRSRNSSRNSTPGSSRGTSPARMAGNGGDAALALLLLDRLNQLESKMSGKGQQQQGQTVTKKSAAEASKKPRQKRTATKAYNVTQAFGRRGPEQTQGNFGDQELIRQGTDYKHWPQIAQFAPSASAFFGMSRIGMEVTPSGTWLTYTGAIKLDDKDPNFKDQVILLNKHIDAYKTFPPTEPKKDKKKKADETQALPQRQKKQQTVTLLPAADLDDFSKQLQQSMSSADSTQAGGSGHHHHHH

SEQ ID NO: 3301 - protein, 806 aa, Artificial Sequence
  Description of Artificial Sequence: Synthetic polypeptide
MKIEEGKLVIWINGDKGYNGLAEVGKKFEKDTGIKVTVEHPDKLEEKFPQVAATGDGPDIIFWAHDRFGGYAQSGLLAEITPDKAFQDKLYPFTWDAVRYNGKLIAYPIAVEALSLIYNKDLLPNPPKTWEEIPALDKELKAKGKSALMFNLQEPYFTWPLIAADGGYAFKYENGKYDIKDVGVDNAGAKAGLTFLVDLIKNKHMNADTDYSIAEAAFNKGETAMTINGPWAWSNIDTSKVNYGVTVLPTFKGQPSKPFVGVLSAGINAASPNKELAKEFLENYLLTDEGLEAVNKDKPLGAVALKSYEEELAKDPRIAATMENAQKGEIMPNIPQMSAFWYAVRTAVINAASGRQTVDEALKDAQTGGSGENLYFQSSDNGPQNQRNAPRITFGGPSDSTGSNQNGERSGARSKQRRPQGLPNNTASWFTALTQHGKEDLKFPRGQGVPINTNSSPDDQIGYYRRATRRIRGGDGKMKDLSPRWYFYYLGTGPEAGLPYGANKDGIIWVATEGALNTPKDHIGTRNPANNAAIVLQLPQGTTLPKGFYAEGSRGGSQASSRSSSRSRNSSRNSTPGSSRGTSPARMAGNGGDAALALLLLDRLNQLESKMSGKGQQQQGQTVTKKSAAEASKKPRQKRTATKAYNVTQAFGRRGPEQTQGNFGDQELIRQGTEYKHWPQIAQFAPSASAFFGMSRIGMEVTPSGTWLTYTGAIKLDDKDPNFKDQVILLNKHIDAYKTFPPTEPKKDKKKKADETQALPQRQKKQQTVTLLPAADLDDFSKQLQQSMSSADSTQAGGSGHHHHHH

SEQ ID NO: 3302 - protein, 806 aa, Artificial Sequence
  Description of Artificial Sequence: Synthetic polypeptide
MKIEEGKLVIWINGDKGYNGLAEVGKKFEKDTGIKVTVEHPDKLEEKFPQVAATGDGPDIIFWAHDRFGGYAQSGLLAEITPDKAFQDKLYPFTWDAVRYNGKLIAYPIAVEALSLIYNKDLLPNPPKTWEEIPALDKELKAKGKSALMFNLQEPYFTWPLIAADGGYAFKYENGKYDIKDVGVDNAGAKAGLTFLVDLIKNKHMNADTDYSIAEAAFNKGETAMTINGPWAWSNIDTSKVNYGVTVLPTFKGQPSKPFVGVLSAGINAASPNKELAKEFLENYLLTDEGLEAVNKDKPLGAVALKSYEEELAKDPRIAATMENAQKGEIMPNIPQMSAFWYAVRTAVINAASGRQTVDEALKDAQTGGSGENLYFQSSDNGPQNQRNAPRITFGGPSDSTGSNQNGERSGARSKQRRPQGLPNNTASWFTALTQHGKEDLKFPRGQGVPINTNSSPDDQIGYYRRATRRIRGGDGKMKDLSPRWYFYYLGTGPEAGLPYGANKDGIVWVATEGALNTPKDHIGTRNPANNAAIVLQLPQGTTLPKGFYAEGSRGGSQASSRSSSRSRNSSRNSTPGSSRGTSPARMAGNGGDAALALLLLDRLNQLESKMSGKGQQQQGQTVTKKSAAEASKKPRQKRTATKAYNVTQAFGRRGPEQTQGNFGDQELIRQGTDYKHWPQIAQFAPSASAFFGMSRIGMEVTPSGTWLTYTGAIKLDDKDPNFKDQVILLNKHIDAYKTFPPTEPKKDKKKKADETQALPQRQKKQQTVTLLPAADLDDFSKQLQQSMSSADSTQAGGSGHHHHHH

SEQ ID NO: 3303 - protein, 806 aa, Artificial Sequence
  Description of Artificial Sequence: Synthetic polypeptide
MKIEEGKLVIWINGDKGYNGLAEVGKKFEKDTGIKVTVEHPDKLEEKFPQVAATGDGPDIIFWAHDRFGGYAQSGLLAEITPDKAFQDKLYPFTWDAVRYNGKLIAYPIAVEALSLIYNKDLLPNPPKTWEEIPALDKELKAKGKSALMFNLQEPYFTWPLIAADGGYAFKYENGKYDIKDVGVDNAGAKAGLTFLVDLIKNKHMNADTDYSIAEAAFNKGETAMTINGPWAWSNIDTSKVNYGVTVLPTFKGQPSKPFVGVLSAGINAASPNKELAKEFLENYLLTDEGLEAVNKDKPLGAVALKSYEEELAKDPRIAATMENAQKGEIMPNIPQMSAFWYAVRTAVINAASGRQTVDEALKDAQTGGSGENLYFQSSDNGPQNQRNAPRITFGGPSDSTGSNQNGERSGARSKQRRPQGLPNNTASWFTALTQHGKEDLKFPRGQGVPINTNSSPDDQIGYYRRATRRIRGGDGKMKDLSPRWYFYYLGTGPEAKLPYGANKDGIIWVATEGALNTPKDHIGTRNPANNAAIVLQLPQGTTLPKGFYAEGSRGGSQASSRSSSRSRNSSRNSTPGSSRGTSPARMAGNGGDAALALLLLDRLNQLESKMSGKGQQQQGQTVTKKSAAEASKKPRQKRTATKAYNVTQAFGRRGPEQTQGNFGDQELIRQGTDYKHWPQIAQFAPSASAFFGMSRIGMEVTPSGTWLTYTGAIKLDDKDPNFKDQVILLNKHIDAYKTFPPTEPKKDKKKKADETQALPQRQKKQQTVTLLPAADLDDFSKQLQQSMSSADSTQAGGSGHHHHHH

SEQ ID NO: 3304 - protein, 806 aa, Artificial Sequence
  Description of Artificial Sequence: Synthetic polypeptide
MKIEEGKLVIWINGDKGYNGLAEVGKKFEKDTGIKVTVEHPDKLEEKFPQVAATGDGPDIIFWAHDRFGGYAQSGLLAEITPDKAFQDKLYPFTWDAVRYNGKLIAYPIAVEALSLIYNKDLLPNPPKTWEEIPALDKELKAKGKSALMFNLQEPYFTWPLIAADGGYAFKYENGKYDIKDVGVDNAGAKAGLTFLVDLIKNKHMNADTDYSIAEAAFNKGETAMTINGPWAWSNIDTSKVNYGVTVLPTFKGQPSKPFVGVLSAGINAASPNKELAKEFLENYLLTDEGLEAVNKDKPLGAVALKSYEEELAKDPRIAATMENAQKGEIMPNIPQMSAFWYAVRTAVINAASGRQTVDEALKDAQTGGSGENLYFQSSDNGPQNQRNAPRITFGGPSDSTGSNQNGERSGARSKQRRPQGLPNNTASWFTALTQHGKEDLKFPRGQGVPINTNSSPDDQIGYYRRATRRIRGGDGKMKDLSPRWYFYYLGTGPEAGLPYGANKDGIIWVATEGALNTPKDHIGTRNPANNAAIVLQLPQGTTLPKGFYAEGSRGGSQASSRSSSRSRNSSRNSTPGSSRGTSPARMAGNGGDAALALLLLDRLNQLESKMSGKGQQQQGQTVTKKSAAEASKKPRQKRTATKAYNVTQAFGRRGPEQTQGNFGDQELIRQGTDYKHWPQIAQFAPSASAFFGMSRIGMEVTPSGTWLTYTGAIKLDDKDPNFKDQVILLNKHIDAWKTFPPTEPKKDKKKKADETQALPQRQKKQQTVTLLPAADLDDFSKQLQQSMSSADSTQAGGSGHHHHHH

SEQ ID NO: 3305 - protein, 806 aa, Artificial Sequence
  Description of Artificial Sequence: Synthetic polypeptide
MKIEEGKLVIWINGDKGYNGLAEVGKKFEKDTGIKVTVEHPDKLEEKFPQVAATGDGPDIIFWAHDRFGGYAQSGLLAEITPDKAFQDKLYPFTWDAVRYNGKLIAYPIAVEALSLIYNKDLLPNPPKTWEEIPALDKELKAKGKSALMFNLQEPYFTWPLIAADGGYAFKYENGKYDIKDVGVDNAGAKAGLTFLVDLIKNKHMNADTDYSIAEAAFNKGETAMTINGPWAWSNIDTSKVNYGVTVLPTFKGQPSKPFVGVLSAGINAASPNKELAKEFLENYLLTDEGLEAVNKDKPLGAVALKSYEEELAKDPRIAATMENAQKGEIMPNIPQMSAFWYAVRTAVINAASGRQTVDEALKDAQTGGSGENLYFQSSDNGPQNQRNAPRITFGGPSDSTGSNQNGERSGARSKQRRPQGLPNNTASWFTALTQHGKEDLKFPPGQGVPINTNSSPDDQIGYYRRATRRIRGGDGKMKDLSPRWYFYYLGTGPEAGLPYGANKDGIIWVATEGALNTPKDHIGTRNPANNAAIVLQLPQGTTLPKGFYAEGSRGGSQASSRSSSRSRNSSRNSTPGSSRGTSPARMAGNGGDAALALLLLDRLNQLESKMSGKGQQQQGQTVTKKSAAEASKKPRQKRTATKAYNVTQAFGRRGPEQTQGNFGDQELIRQGTDYKHWPQIAQFAPSASAFFGMSRIGMEVTPSGTWLTYTGAIKLDDKDPNFKDQVILLNKHIDAYKTFPPTEPKKDKKKKADETQALPQRQKKQQTVTLLPAADLDDFSKQLQQSMSSADSTQAGGSGHHHHHH

SEQ ID NO: 3306 - protein, 806 aa, Artificial Sequence
  Description of Artificial Sequence: Synthetic polypeptide
MKIEEGKLVIWINGDKGYNGLAEVGKKFEKDTGIKVTVEHPDKLEEKFPQVAATGDGPDIIFWAHDRFGGYAQSGLLAEITPDKAFQDKLYPFTWDAVRYNGKLIAYPIAVEALSLIYNKDLLPNPPKTWEEIPALDKELKAKGKSALMFNLQEPYFTWPLIAADGGYAFKYENGKYDIKDVGVDNAGAKAGLTFLVDLIKNKHMNADTDYSIAEAAFNKGETAMTINGPWAWSNIDTSKVNYGVTVLPTFKGQPSKPFVGVLSAGINAASPNKELAKEFLENYLLTDEGLEAVNKDKPLGAVALKSYEEELAKDPRIAATMENAQKGEIMPNIPQMSAFWYAVRTAVINAASGRQTVDEALKDAQTGGSGENLYFQSSDNGPQNQRNAPRITFGGPSDSTGSNQNGERSGARSKQRRPQGLPNNTASWFTALTQHGKEDLKFPRGQGVPINTNSSPDDQIGYYRRATRRIRGGDGKMKDLSPRWYFYYLGTGPEAGLPYGANKDGIIWVATDGALNTPKDHIGTRNPANNAAIVLQLPQGTTLPKGFYAEGSRGGSQASSRSSSRSRNSSRNSTPGSSRGTSPARMAGNGGDAALALLLLDRLNQLESKMSGKGQQQQGQTVTKKSAAEASKKPRQKRTATKAYNVTQAFGRRGPEQTQGNFGDQELIRQGTDYKHWPQIAQFAPSASAFFGMSRIGMEVTPSGTWLTYTGAIKLDDKDPNFKDQVILLNKHIDAYKTFPPTEPKKDKKKKADETQALPQRQKKQQTVTLLPAADLDDFSKQLQQSMSSADSTQAGGSGHHHHHH

SEQ ID NO: 3307 - protein, 806 aa, Artificial Sequence
  Description of Artificial Sequence: Synthetic polypeptide
MKIEEGKLVIWINGDKGYNGLAEVGKKFEKDTGIKVTVEHPDKLEEKFPQVAATGDGPDIIFWAHDRFGGYAQSGLLAEITPDKAFQDKLYPFTWDAVRYNGKLIAYPIAVEALSLIYNKDLLPNPPKTWEEIPALDKELKAKGKSALMFNLQEPYFTWPLIAADGGYAFKYENGKYDIKDVGVDNAGAKAGLTFLVDLIKNKHMNADTDYSIAEAAFNKGETAMTINGPWAWSNIDTSKVNYGVTVLPTFKGQPSKPFVGVLSAGINAASPNKELAKEFLENYLLTDEGLEAVNKDKPLGAVALKSYEEELAKDPRIAATMENAQKGEIMPNIPQMSAFWYAVRTAVINAASGRQTVDEALKDAQTGGSGENLYFQSSDNGPQNQRNAPRITFGGPSDSTGSNQNGERSGARSKQRRPQGLPNNTASWFTALTQHGKEDLKFPRGQGVPINTNSSPDDQIGYYRRATRRIRGGDGKMKDLSPRWYFYYLGTGPEAGLPYGANKDGIIWVATEGALNTPKDHIGTRNPANNAAIVLQLPQGTTLPKGFYAEGSRGGSQASSRSSSRSRNSSRNSTPGSSRGTSPARMAGNGGDAALALLLLDRLNQLESKMSGKGQQQQGQTVTKKSAAEMSKKPRQKRTATKGCNVTQCFGPRGPEQTQGNFGDDDLIKLGTDYKHWPQIAQFAPSASAFFGMSRISSKEQPSGTWLTYTGAIKLDKDDPNFKDQVILLNKHIDAYKTFPPTEPKKDKKKKADETQALPQRQKKQQTVTLLPAADLDDFSKQLQQSMSSADSTQAGGSGHHHHHH

SEQ ID NO: 3308 - protein, 806 aa, Artificial Sequence
  Description of Artificial Sequence: Synthetic polypeptide
MKIEEGKLVIWINGDKGYNGLAEVGKKFEKDTGIKVTVEHPDKLEEKFPQVAATGDGPDIIFWAHDRFGGYAQSGLLAEITPDKAFQDKLYPFTWDAVRYNGKLIAYPIAVEALSLIYNKDLLPNPPKTWEEIPALDKELKAKGKSALMFNLQEPYFTWPLIAADGGYAFKYENGKYDIKDVGVDNAGAKAGLTFLVDLIKNKHMNADTDYSIAEAAFNKGETAMTINGPWAWSNIDTSKVNYGVTVLPTFKGQPSKPFVGVLSAGINAASPNKELAKEFLENYLLTDEGLEAVNKDKPLGAVALKSYEEELAKDPRIAATMENAQKGEIMPNIPQMSAFWYAVRTAVINAASGRQTVDEALKDAQTGGSGENLYFQSSDNGPQNQRNAPRITFGGPSDSTGSNQNGERSGARSKQRRPQGLPNNTASWFTALTQHGKEDLKFPRGQGVPINTNSSPDDQIGYYRRATRRIRGGDGKMKDLSPRWYFYYLGTGPEAGLPYGANKDGIIWVATEGALNTPKDHIGTRNPANNAAIPLQLPQGTTLPKGFYAEGSRGGSQASSRSSSRSRNSSRNSTPGSSRGTSPARMAGNGGDAALALLLLDRLNQLESKMSGKGQQQQGQTVTKKSAAEASKKPRQKRTATKAYNVTQAFGRRGPEQTQGNFGDQELIRQGTDYKHWPQIAQFAPSASAFFGMSRIGMEVTPSGTWLTYTGAIKLDDKDPNFKDQVILLNKHIDAYKTFPPTEPKKDKKKKADETQALPQRQKKQQTVTLLPAADLDDFSKQLQQSMSSADSTQAGGSGHHHHHH

SEQ ID NO: 3309 - protein, 806 aa, Artificial Sequence
  Description of Artificial Sequence: Synthetic polypeptide
MKIEEGKLVIWINGDKGYNGLAEVGKKFEKDTGIKVTVEHPDKLEEKFPQVAATGDGPDIIFWAHDRFGGYAQSGLLAEITPDKAFQDKLYPFTWDAVRYNGKLIAYPIAVEALSLIYNKDLLPNPPKTWEEIPALDKELKAKGKSALMFNLQEPYFTWPLIAADGGYAFKYENGKYDIKDVGVDNAGAKAGLTFLVDLIKNKHMNADTDYSIAEAAFNKGETAMTINGPWAWSNIDTSKVNYGVTVLPTFKGQPSKPFVGVLSAGINAASPNKELAKEFLENYLLTDEGLEAVNKDKPLGAVALKSYEEELAKDPRIAATMENAQKGEIMPNIPQMSAFWYAVRTAVINAASGRQTVDEALKDAQTGGSGENLYFQSSDNGPQNQRNAPRITFGGPSDSTGSNQNGERSGARSKQRRPQGLPNNTASWFTALTQHGKEDLKFPRGQGVPINTNSSPDDQIGYYRRATRRIRGGDGKMKDLSPRWYFYYLGTGPEAGLPYGANKDGIIWVATEGALNTPKDHIGTRNPANNAAIVLQLPQGTTLPKGFYAEGSRGGSQASSRSSSRSRNSSRNSTPGSSRGTSPARMAGNGGDAALALLLLDRLNQLESKMSGKGQQQQGQTVTKKSAAEASKKPRQKRTATKAYNVTQAFGRRGPEQTQGNFGDQELIRQGTDYKHWPQIAQFAPSASAFFGMSRIGMEVTPSGTWLTYTGAIKLDDKDPNFQDQVILLNKHIDAYKTFPPTEPKKDKKKKADETQALPQRQKKQQTVTLLPAADLDDFSKQLQQSMSSADSTQAGGSGHHHHHH

SEQ ID NO: 3310 - protein, 806 aa, Artificial Sequence
  Description of Artificial Sequence: Synthetic polypeptide
MKIEEGKLVIWINGDKGYNGLAEVGKKFEKDTGIKVTVEHPDKLEEKFPQVAATGDGPDIIFWAHDRFGGYAQSGLLAEITPDKAFQDKLYPFTWDAVRYNGKLIAYPIAVEALSLIYNKDLLPNPPKTWEEIPALDKELKAKGKSALMFNLQEPYFTWPLIAADGGYAFKYENGKYDIKDVGVDNAGAKAGLTFLVDLIKNKHMNADTDYSIAEAAFNKGETAMTINGPWAWSNIDTSKVNYGVTVLPTFKGQPSKPFVGVLSAGINAASPNKELAKEFLENYLLTDEGLEAVNKDKPLGAVALKSYEEELAKDPRIAATMENAQKGEIMPNIPQMSAFWYAVRTAVINAASGRQTVDEALKDAQTGGSGENLYFQSSDNGPQNQRNAPRITFGGPSDSTGSNQNGERSGARSKQRRPQGLPNNTASWFTALTQHGKEDLKFPRGQGVPINTNSSPDDQIGYYRRATRRIRGGDGKMKDLSPRWSFYYLGTGPEAGLPYGANKDGIIWVATEGALNTPKDHIGTRNPANNAAIVLQLPQGTTLPKGFYAEGSRGGSQASSRSSSRSRNSSRNSTPGSSRGTSPARMAGNGGDAALALLLLDRLNQLESKMSGKGQQQQGQTVTKKSAAEASKKPRQKRTATKAYNVTQAFGRRGPEQTQGNFGDQELIRQGTDYKHWPQIAQFAPSASAFFGMSRIGMEVTPSGTWLTYTGAIKLDDKDPNFKDQVILLNKHIDAYKTFPPTEPKKDKKKKADETQALPQRQKKQQTVTLLPAADLDDFSKQLQQSMSSADSTQAGGSGHHHHHH

SEQ ID NO: 3311 - protein, 806 aa, Artificial Sequence
  Description of Artificial Sequence: Synthetic polypeptide
MKIEEGKLVIWINGDKGYNGLAEVGKKFEKDTGIKVTVEHPDKLEEKFPQVAATGDGPDIIFWAHDRFGGYAQSGLLAEITPDKAFQDKLYPFTWDAVRYNGKLIAYPIAVEALSLIYNKDLLPNPPKTWEEIPALDKELKAKGKSALMFNLQEPYFTWPLIAADGGYAFKYENGKYDIKDVGVDNAGAKAGLTFLVDLIKNKHMNADTDYSIAEAAFNKGETAMTINGPWAWSNIDTSKVNYGVTVLPTFKGQPSKPFVGVLSAGINAASPNKELAKEFLENYLLTDEGLEAVNKDKPLGAVALKSYEEELAKDPRIAATMENAQKGEIMPNIPQMSAFWYAVRTAVINAASGRQTVDEALKDAQTGGSGENLYFQSSDNGPQNQRNAPRITFGGPSDSTGSNQNGERSGARSKQRRPQGLPNNTASWFTALTQHGKEDLKFPRGQGVPINTNSSPDDQIGYYRRATRRIRGGDGKMKDLSPRWYFYYLGTGPEAGLPYGANKDGIIWVATEGALNTPKDHIGTRNPANNAAIVLQLPQGTTLPKGFYAEGSRGGSQASSRSSSRSRNSSRNSTPGSSRGTSPARMAGNGGDAALALLLLDRLNQLESKMSGKGQQQQGQTVTKKSAAEASKKPRQKRTATKKYNVTQAFGRRGPEQTQGNFGDQELIRQGTDYKHWPQIAQFAPSASAFFGMSRIGMEVTPSGTWLTYTGAIKLDDKDPNFKDQVILLNKHIDAYKTFPPTEPKKDKKKKADETQALPQRQKKQQTVTLLPAADLDDFSKQLQQSMSSADSTQAGGSGHHHHHH

SEQ ID NO: 3312 - protein, 806 aa, Artificial Sequence
  Description of Artificial Sequence: Synthetic polypeptide
MKIEEGKLVIWINGDKGYNGLAEVGKKFEKDTGIKVTVEHPDKLEEKFPQVAATGDGPDIIFWAHDRFGGYAQSGLLAEITPDKAFQDKLYPFTWDAVRYNGKLIAYPIAVEALSLIYNKDLLPNPPKTWEEIPALDKELKAKGKSALMFNLQEPYFTWPLIAADGGYAFKYENGKYDIKDVGVDNAGAKAGLTFLVDLIKNKHMNADTDYSIAEAAFNKGETAMTINGPWAWSNIDTSKVNYGVTVLPTFKGQPSKPFVGVLSAGINAASPNKELAKEFLENYLLTDEGLEAVNKDKPLGAVALKSYEEELAKDPRIAATMENAQKGEIMPNIPQMSAFWYAVRTAVINAASGRQTVDEALKDAQTGGSGENLYFQSSDNGPQNQRNAPRITFGGPSDSTGSNQNGERSGARSKQRRPQGLPNNTASWFTALTQHGKEDLKFPRGQGVPINTNSSPDDQIGYYRRATRRIRGGDGKMKDLSPRWYFYYLGTGPEAGLPYGADKDGIIWVATEGALNTPKDHIGTRNPANNAAIVLQLPQGTTLPKGFYAEGSRGGSQASSRSSSRSRNSSRNSTPGSSRGTSPARMAGNGGDAALALLLLDRLNQLESKMSGKGQQQQGQTVTKKSAAEASKKPRQKRTATKAYNVTQAFGRRGPEQTQGNFGDQELIRQGTDYKHWPQIAQFAPSASAFFGMSRIGMEVTPSGTWLTYTGAIKLDDKDPNFKDQVILLNKHIDAYKTFPPTEPKKDKKKKADETQALPQRQKKQQTVTLLPAADLDDFSKQLQQSMSSADSTQAGGSGHHHHHH

SEQ ID NO: 3313 - protein, 806 aa, Artificial Sequence
  Description of Artificial Sequence: Synthetic polypeptide
MKIEEGKLVIWINGDKGYNGLAEVGKKFEKDTGIKVTVEHPDKLEEKFPQVAATGDGPDIIFWAHDRFGGYAQSGLLAEITPDKAFQDKLYPFTWDAVRYNGKLIAYPIAVEALSLIYNKDLLPNPPKTWEEIPALDKELKAKGKSALMFNLQEPYFTWPLIAADGGYAFKYENGKYDIKDVGVDNAGAKAGLTFLVDLIKNKHMNADTDYSIAEAAFNKGETAMTINGPWAWSNIDTSKVNYGVTVLPTFKGQPSKPFVGVLSAGINAASPNKELAKEFLENYLLTDEGLEAVNKDKPLGAVALKSYEEELAKDPRIAATMENAQKGEIMPNIPQMSAFWYAVRTAVINAASGRQTVDEALKDAQTGGSGENLYFQSSDNGPQNQRNAPRITFGGPSDSTGSNQNGERSGARSKQRRPQGLPNNTASWFTALTQHGKEDLKFPRGQGVPINTNSSPDDQIGQYRRATRRIRGGDGKMKDLSPRWYFYYLGTGPEAGLPYGANKDGIIWVATEGALNTPKDHIGTRNPANNAAIVLQLPQGTTLPKGFYAEGSRGGSQASSRSSSRSRNSSRNSTPGSSRGTSPARMAGNGGDAALALLLLDRLNQLESKMSGKGQQQQGQTVTKKSAAEASKKPRQKRTATKAYNVTQAFGRRGPEQTQGNFGDQELIRQGTDYKHWPQIAQFAPSASAFFGMSRIGMEVTPSGTWLTYTGAIKLDDKDPNFKDQVILLNKHIDAYKTFPPTEPKKDKKKKADETQALPQRQKKQQTVTLLPAADLDDFSKQLQQSMSSADSTQAGGSGHHHHHH

SEQ ID NO: 3314 - protein, 806 aa, Artificial Sequence
  Description of Artificial Sequence: Synthetic polypeptide
MKIEEGKLVIWINGDKGYNGLAEVGKKFEKDTGIKVTVEHPDKLEEKFPQVAATGDGPDIIFWAHDRFGGYAQSGLLAEITPDKAFQDKLYPFTWDAVRYNGKLIAYPIAVEALSLIYNKDLLPNPPKTWEEIPALDKELKAKGKSALMFNLQEPYFTWPLIAADGGYAFKYENGKYDIKDVGVDNAGAKAGLTFLVDLIKNKHMNADTDYSIAEAAFNKGETAMTINGPWAWSNIDTSKVNYGVTVLPTFKGQPSKPFVGVLSAGINAASPNKELAKEFLENYLLTDEGLEAVNKDKPLGAVALKSYEEELAKDPRIAATMENAQKGEIMPNIPQMSAFWYAVRTAVINAASGRQTVDEALKDAQTGGSGENLYFQSSDNGPQNQRNAPRITFGGPSDSTGSNQNGERSGARSKQRRPQGLPNNTASWFTALTQHGKEDLKFPRGQGVPINTNSSPDDQIGYYRRATRRIRGGDGKMKDLSPRWYFYYLGTGPEAGLPYGANKDGIIWVATEGALNTPKDHIGTRNPANNAAIVLQLPQGTTLPKGFYAEGSRGGSQASSRSSSRSRNSSRNSTPGSSRGTSPARMAGNGGDAALALLLLDRLNQLESKMSGKGQQQQGQTVTKKSAAEASKKPRQKRTATKAYNVTQAFGRRGPEQTQGNFGDQELIRQGTDYKHWPQIAQFAPSASAFFGMSRIGMEVTPSGTWLTYTGAIKLDDKDPNFEDQVILLNKHIDAYKTFPPTEPKKDKKKKADETQALPQRQKKQQTVTLLPAADLDDFSKQLQQSMSSADSTQAGGSGHHHHHH

SEQ ID NO: 3315 - protein, 806 aa, Artificial Sequence
  Description of Artificial Sequence: Synthetic polypeptide
MKIEEGKLVIWINGDKGYNGLAEVGKKFEKDTGIKVTVEHPDKLEEKFPQVAATGDGPDIIFWAHDRFGGYAQSGLLAEITPDKAFQDKLYPFTWDAVRYNGKLIAYPIAVEALSLIYNKDLLPNPPKTWEEIPALDKELKAKGKSALMFNLQEPYFTWPLIAADGGYAFKYENGKYDIKDVGVDNAGAKAGLTFLVDLIKNKHMNADTDYSIAEAAFNKGETAMTINGPWAWSNIDTSKVNYGVTVLPTFKGQPSKPFVGVLSAGINAASPNKELAKEFLENYLLTDEGLEAVNKDKPLGAVALKSYEEELAKDPRIAATMENAQKGEIMPNIPQMSAFWYAVRTAVINAASGRQTVDEALKDAQTGGSGENLYFQSSDNGPQNQRNAPRITFGGPSDSTGSNQNGERSGARSKQRRPQGLPNNTASWFTALTQHGKEDLKFPRGQGVPINTNSSPDDQIGYYRRATRRIRGGDGKMKDLSPRWYFYYLGTGPEAGLPYGANKDGIIWVAIEGALNTPKDHIGTRNPANNAAIVLQLPQGTTLPKGFYAEGSRGGSQASSRSSSRSRNSSRNSTPGSSRGTSPARMAGNGGDAALALLLLDRLNQLESKMSGKGQQQQGQTVTKKSAAEASKKPRQKRTATKAYNVTQAFGRRGPEQTQGNFGDQELIRQGTDYKHWPQIAQFAPSASAFFGMSRIGMEVTPSGTWLTYTGAIKLDDKDPNFKDQVILLNKHIDAYKTFPPTEPKKDKKKKADETQALPQRQKKQQTVTLLPAADLDDFSKQLQQSMSSADSTQAGGSGHHHHHH

SEQ ID NO: 3316 - protein, 806 aa, Artificial Sequence
  Description of Artificial Sequence: Synthetic polypeptide
MKIEEGKLVIWINGDKGYNGLAEVGKKFEKDTGIKVTVEHPDKLEEKFPQVAATGDGPDIIFWAHDRFGGYAQSGLLAEITPDKAFQDKLYPFTWDAVRYNGKLIAYPIAVEALSLIYNKDLLPNPPKTWEEIPALDKELKAKGKSALMFNLQEPYFTWPLIAADGGYAFKYENGKYDIKDVGVDNAGAKAGLTFLVDLIKNKHMNADTDYSIAEAAFNKGETAMTINGPWAWSNIDTSKVNYGVTVLPTFKGQPSKPFVGVLSAGINAASPNKELAKEFLENYLLTDEGLEAVNKDKPLGAVALKSYEEELAKDPRIAATMENAQKGEIMPNIPQMSAFWYAVRTAVINAASGRQTVDEALKDAQTGGSGENLYFQSSDNGPQNQRNAPRITFGGPSDSTGSNQNGERSGARSKQRRPQGLPNNTASWFTALTQHGKEDLKFPRGQGVPINTNSSPDDQIGYYRRATRRIRGGDGKMKDLSPRWYFYYLGTGPEAGLPYGANKDGIIWVATEGALNTPKDHIGTRNPANNAAIVLQLPQGTTLPKGFYAEGSRGGSQASSRSSSRSRNSSRNSTPGSSRGTSPARMAGNGGDAALALLLLDRLNQLESKMSGKGQQQQGQTVTKKDAAEASKKPRQKRTATKAYNVTQAFGRRGPEQTQGNFGDQELIRQGTDYKHWPQIAQFAPSASAFFGMSRIGMEVTPSGTWLTYTGAIKLDDKDPNFKDQVILLNKHIDAYKTFPPTEPKKDKKKKADETQALPQRQKKQQTVTLLPAADLDDFSKQLQQSMSSADSTQAGGSGHHHHHH

SEQ ID NO: 3317 - protein, 806 aa, Artificial Sequence
  Description of Artificial Sequence: Synthetic polypeptide
MKIEEGKLVIWINGDKGYNGLAEVGKKFEKDTGIKVTVEHPDKLEEKFPQVAATGDGPDIIFWAHDRFGGYAQSGLLAEITPDKAFQDKLYPFTWDAVRYNGKLIAYPIAVEALSLIYNKDLLPNPPKTWEEIPALDKELKAKGKSALMFNLQEPYFTWPLIAADGGYAFKYENGKYDIKDVGVDNAGAKAGLTFLVDLIKNKHMNADTDYSIAEAAFNKGETAMTINGPWAWSNIDTSKVNYGVTVLPTFKGQPSKPFVGVLSAGINAASPNKELAKEFLENYLLTDEGLEAVNKDKPLGAVALKSYEEELAKDPRIAATMENAQKGEIMPNIPQMSAFWYAVRTAVINAASGRQTVDEALKDAQTGGSGENLYFQSSDNGPQNQRNAPRITFGGPSDSTGSNQNGERSGARSKQRRPQGLPNNTASWFTALTQHGKEDLKFPRGQGVPINTNSSPDDQIGYYRRATRRIRGGDGKMKDLKPRWYFYYLGTGPEAGLPYGANKDGIIWVATEGALNTPKDHIGTRNPANNAAIVLQLPQGTTLPKGFYAEGSRGGSQASSRSSSRSRNSSRNSTPGSSRGTSPARMAGNGGDAALALLLLDRLNQLESKMSGKGQQQQGQTVTKKSAAEASKKPRQKRTATKAYNVTQAFGRRGPEQTQGNFGDQELIRQGTDYKHWPQIAQFAPSASAFFGMSRIGMEVTPSGTWLTYTGAIKLDDKDPNFKDQVILLNKHIDAYKTFPPTEPKKDKKKKADETQALPQRQKKQQTVTLLPAADLDDFSKQLQQSMSSADSTQAGGSGHHHHHH

SEQ ID NO: 3318 - protein, 806 aa, Artificial Sequence
  Description of Artificial Sequence: Synthetic polypeptide
MKIEEGKLVIWINGDKGYNGLAEVGKKFEKDTGIKVTVEHPDKLEEKFPQVAATGDGPDIIFWAHDRFGGYAQSGLLAEITPDKAFQDKLYPFTWDAVRYNGKLIAYPIAVEALSLIYNKDLLPNPPKTWEEIPALDKELKAKGKSALMFNLQEPYFTWPLIAADGGYAFKYENGKYDIKDVGVDNAGAKAGLTFLVDLIKNKHMNADTDYSIAEAAFNKGETAMTINGPWAWSNIDTSKVNYGVTVLPTFKGQPSKPFVGVLSAGINAASPNKELAKEFLENYLLTDEGLEAVNKDKPLGAVALKSYEEELAKDPRIAATMENAQKGEIMPNIPQMSAFWYAVRTAVINAASGRQTVDEALKDAQTGGSGENLYFQSSDNGPQNQRNAPRITFGGPSDSTGSNQNGERSGARSKQRRPQGLPNNTASWFTALTQHGKEDLKFPRGQGVPINTNSSPDDQIGYYRRATRRIRGGDGKMKDLSPRWYFYYLGTGPEAGLPYGANKDGIIWVATEGALNTPKDHIGTRNPANNAAIVLQLPQGTTLPKGFYAEGSRGGSQASSRSSSRSRNSSRNSTPGSSRGTSPARMAGNGGDAALALLLLDRLNQLESKMSGKGQQQQGQTVTKKSAAEASKKPRQKRTATKGYNVTQAFGRRGPEQTQGNFGDQDLIKLGTDYKHWPQIAQFAPSASAFFGMSRISTRETPSGTWLTYTGAIKLDKKDPNFKDQVILLNKHIDAYKTFPPTEPKKDKKKKADETQALPQRQKKQQTVTLLPAADLDDFSKQLQQSMSSADSTQAGGSGHHHHHH

SEQ ID NO: 3319 - protein, 806 aa, Artificial Sequence
  Description of Artificial Sequence: Synthetic polypeptide
MKIEEGKLVIWINGDKGYNGLAEVGKKFEKDTGIKVTVEHPDKLEEKFPQVAATGDGPDIIFWAHDRFGGYAQSGLLAEITPDKAFQDKLYPFTWDAVRYNGKLIAYPIAVEALSLIYNKDLLPNPPKTWEEIPALDKELKAKGKSALMFNLQEPYFTWPLIAADGGYAFKYENGKYDIKDVGVDNAGAKAGLTFLVDLIKNKHMNADTDYSIAEAAFNKGETAMTINGPWAWSNIDTSKVNYGVTVLPTFKGQPSKPFVGVLSAGINAASPNKELAKEFLENYLLTDEGLEAVNKDKPLGAVALKSYEEELAKDPRIAATMENAQKGEIMPNIPQMSAFWYAVRTAVINAASGRQTVDEALKDAQTGGSGENLYFQSSDNGPQNQRNAPRITFGGPSDSTGSNQNGERSGARSKQRRPQGLPNNTASWFTALTQHGKEDLKFPKGQGVPINTNSKPDDQIGYYRRQVRRYRGGDGQMKDLNPRWYFYYLGTGPEAGLPYGANKDGIIWVATEGALNTPKDHIGTRNPANNAAIVLQLPQGTTLPKGFYAEGSRGGSQASSRSSSRSRNSSRNSTPGSSRGTSPARMAGNGGDAALALLLLDRLNQLESKMSGKGQQQQGQTVTKKSAAEASKKPRQKRTATKAYNVTQAFGRRGPEQTQGNFGDQELIRQGTDYKHWPQIAQFAPSASAFFGMSRIGMEVTPSGTWLTYTGAIKLDDKDPNFKDQVILLNKHIDAYKTFPPTEPKKDKKKKADETQALPQRQKKQQTVTLLPAADLDDFSKQLQQSMSSADSTQAGGSGHHHHHH

SEQ ID NO: 3320 - protein, 806 aa, Artificial Sequence
  Description of Artificial Sequence: Synthetic polypeptide
MKIEEGKLVIWINGDKGYNGLAEVGKKFEKDTGIKVTVEHPDKLEEKFPQVAATGDGPDIIFWAHDRFGGYAQSGLLAEITPDKAFQDKLYPFTWDAVRYNGKLIAYPIAVEALSLIYNKDLLPNPPKTWEEIPALDKELKAKGKSALMFNLQEPYFTWPLIAADGGYAFKYENGKYDIKDVGVDNAGAKAGLTFLVDLIKNKHMNADTDYSIAEAAFNKGETAMTINGPWAWSNIDTSKVNYGVTVLPTFKGQPSKPFVGVLSAGINAASPNKELAKEFLENYLLTDEGLEAVNKDKPLGAVALKSYEEELAKDPRIAATMENAQKGEIMPNIPQMSAFWYAVRTAVINAASGRQTVDEALKDAQTGGSGENLYFQSSDNGPQNQRNAPRITFGGPSDSTGSNQNGERSGARSKQRRPQGLPNNTASWFTALTQHGKEDLKFPRGQGVPINTNSSPDDQIGYYRRATRRIRGGDGKMKDLSPRWYFYYLGTGPEAGLPYGANKDGIIWVATEGALNTPKDHIGTRNPANNAAIRLQLPQGTTLPKGFYAEGSRGGSQASSRSSSRSRNSSRNSTPGSSRGTSPARMAGNGGDAALALLLLDRLNQLESKMSGKGQQQQGQTVTKKSAAEASKKPRQKRTATKAYNVTQAFGRRGPEQTQGNFGDQELIRQGTDYKHWPQIAQFAPSASAFFGMSRIGMEVTPSGTWLTYTGAIKLDDKDPNFKDQVILLNKHIDAYKTFPPTEPKKDKKKKADETQALPQRQKKQQTVTLLPAADLDDFSKQLQQSMSSADSTQAGGSGHHHHHH

SEQ ID NO: 3321 - protein, 806 aa, Artificial Sequence
  Description of Artificial Sequence: Synthetic polypeptide
MKIEEGKLVIWINGDKGYNGLAEVGKKFEKDTGIKVTVEHPDKLEEKFPQVAATGDGPDIIFWAHDRFGGYAQSGLLAEITPDKAFQDKLYPFTWDAVRYNGKLIAYPIAVEALSLIYNKDLLPNPPKTWEEIPALDKELKAKGKSALMFNLQEPYFTWPLIAADGGYAFKYENGKYDIKDVGVDNAGAKAGLTFLVDLIKNKHMNADTDYSIAEAAFNKGETAMTINGPWAWSNIDTSKVNYGVTVLPTFKGQPSKPFVGVLSAGINAASPNKELAKEFLENYLLTDEGLEAVNKDKPLGAVALKSYEEELAKDPRIAATMENAQKGEIMPNIPQMSAFWYAVRTAVINAASGRQTVDEALKDAQTGGSGENLYFQSSDNGPQNQRNAPRITFGGPSDSTGSNQNGERSGARSKQRRPQGLPNNTASWFTALTQHGKEDLKFPRGQGVPINTNSSPDDQIGYYRRATRRIRGGDGKMKDLSPRWYFYYLGTGPEAGLPYGANKDGIIWVATEGALNTPKDHIGTRNPANNAAIVLQLPQGTTLPKGFYAEGSRGGSQASSRSSSRSRNSSRNSTPGSSRGTSPARMAGNGGDAALALLLLDRLNQLESKMSGKGQQQQGQTVTKKSAAEMSKKPRWKRTATKGYNVTQAFGKRGPKDTQGNFGDAELIKQGTDYKHWPQIAQFVPSAAAFFFMSRIGMKETPDGVWLTYTGTIKLDKDDPNFDDQVKLLNKHIDAYKTFPPTEPKKDKKKKADETQALPQRQKKQQTVTLLPAADLDDFSKQLQQSMSSADSTQAGGSGHHHHHH

SEQ ID NO: 3322 - protein, 806 aa, Artificial Sequence
  Description of Artificial Sequence: Synthetic polypeptide
MKIEEGKLVIWINGDKGYNGLAEVGKKFEKDTGIKVTVEHPDKLEEKFPQVAATGDGPDIIFWAHDRFGGYAQSGLLAEITPDKAFQDKLYPFTWDAVRYNGKLIAYPIAVEALSLIYNKDLLPNPPKTWEEIPALDKELKAKGKSALMFNLQEPYFTWPLIAADGGYAFKYENGKYDIKDVGVDNAGAKAGLTFLVDLIKNKHMNADTDYSIAEAAFNKGETAMTINGPWAWSNIDTSKVNYGVTVLPTFKGQPSKPFVGVLSAGINAASPNKELAKEFLENYLLTDEGLEAVNKDKPLGAVALKSYEEELAKDPRIAATMENAQKGEIMPNIPQMSAFWYAVRTAVINAASGRQTVDEALKDAQTGGSGENLYFQSSDNGPQNQRNAPRITFGGPSDSTGSNQNGERSGARSKQRRPQGLPNNTASWFTALTQHGKEDLKFPRGQGVPINTNSSPDDQIGYYRRATRRIRGGDGKMKDLSPRWYFYYLGTGPEAGLPYGANKDGIIWVATEGALNTPKDHIGTRNPANNAAIVLQLPQGTTLPKGFYAEGSRGGSQASSRSSSRSRNSSRNSTPGSSRGTSPARMAGNGGDAALALLLLDRLNQLESKMSGKGQQQQGQTVTKKSAAEASKKPRQKRTATKAYNVTQAFGRRGPEQTQGNFGDQELIRQGTDYKHWPQIAQFAPSASAFFGMSHIGMEVTPSGTWLTYTGAIKLDDKDPNFKDQVILLNKHIDAYKTFPPTEPKKDKKKKADETQALPQRQKKQQTVTLLPAADLDDFSKQLQQSMSSADSTQAGGSGHHHHHH

SEQ ID NO: 3323 - protein, 806 aa, Artificial Sequence
  Description of Artificial Sequence: Synthetic polypeptide
MKIEEGKLVIWINGDKGYNGLAEVGKKFEKDTGIKVTVEHPDKLEEKFPQVAATGDGPDIIFWAHDRFGGYAQSGLLAEITPDKAFQDKLYPFTWDAVRYNGKLIAYPIAVEALSLIYNKDLLPNPPKTWEEIPALDKELKAKGKSALMFNLQEPYFTWPLIAADGGYAFKYENGKYDIKDVGVDNAGAKAGLTFLVDLIKNKHMNADTDYSIAEAAFNKGETAMTINGPWAWSNIDTSKVNYGVTVLPTFKGQPSKPFVGVLSAGINAASPNKELAKEFLENYLLTDEGLEAVNKDKPLGAVALKSYEEELAKDPRIAATMENAQKGEIMPNIPQMSAFWYAVRTAVINAASGRQTVDEALKDAQTGGSGENLYFQSSDNGPQNQRNAPRITFGGPSDSTGSNQNGERSGARSKQRRPQGLPNNTASWFTGLTQKGKEDLKFPPGQGVPINTNSSPDDQIGYYRRATRRIRGGDGKMKDLPPRWYFYYLGTGPHADLPYGQKQDGVFWVARPGALNTPKDHIGTRNPANNAAIPLQLPPGTKLPKGFYAEGSRGGSQASSRSSSRSRNSSRNSTPGSSRGTSPARMAGNGGDAALALLLLDRLNQLESKMSGKGQQQQGQTVTKKSAAEASKKPRQKRTATKAYNVTQAFGRRGPEQTQGNFGDQELIRQGTDYKHWPQIAQFAPSASAFFGMSRIGMEVTPSGTWLTYTGAIKLDDKDPNFKDQVILLNKHIDAYKTFPPTEPKKDKKKKADETQALPQRQKKQQTVTLLPAADLDDFSKQLQQSMSSADSTQAGGSGHHHHHH

SEQ ID NO: 3324 - protein, 806 aa, Artificial Sequence
  Description of Artificial Sequence: Synthetic polypeptide
MKIEEGKLVIWINGDKGYNGLAEVGKKFEKDTGIKVTVEHPDKLEEKFPQVAATGDGPDIIFWAHDRFGGYAQSGLLAEITPDKAFQDKLYPFTWDAVRYNGKLIAYPIAVEALSLIYNKDLLPNPPKTWEEIPALDKELKAKGKSALMFNLQEPYFTWPLIAADGGYAFKYENGKYDIKDVGVDNAGAKAGLTFLVDLIKNKHMNADTDYSIAEAAFNKGETAMTINGPWAWSNIDTSKVNYGVTVLPTFKGQPSKPFVGVLSAGINAASPNKELAKEFLENYLLTDEGLEAVNKDKPLGAVALKSYEEELAKDPRIAATMENAQKGEIMPNIPQMSAFWYAVRTAVINAASGRQTVDEALKDAQTGGSGENLYFQSSDNGPQNQRNAPRITFGGPSDSTGSNQNGERSGARSKQRRPQGLPNNTASWFTALTQHGKEDLKFPRGQGVPINTNSSPDDQIGYYRRATRRIRGGDGKMKDLSPRWYFYYLGTGPEAGLPYGANKDGIIWVATEGALNTPKDHIGTRNPANNAAIVLQLAQGTTLPKGFYAEGSRGGSQASSRSSSRSRNSSRNSTPGSSRGTSPARMAGNGGDAALALLLLDRLNQLESKMSGKGQQQQGQTVTKKSAAEASKKPRQKRTATKAYNVTQAFGRRGPEQTQGNFGDQELIRQGTDYKHWPQIAQFAPSASAFFGMSRIGMEVTPSGTWLTYTGAIKLDDKDPNFKDQVILLNKHIDAYKTFPPTEPKKDKKKKADETQALPQRQKKQQTVTLLPAADLDDFSKQLQQSMSSADSTQAGGSGHHHHHH

SEQ ID NO: 3325 - protein, 806 aa, Artificial Sequence
  Description of Artificial Sequence: Synthetic polypeptide
MKIEEGKLVIWINGDKGYNGLAEVGKKFEKDTGIKVTVEHPDKLEEKFPQVAATGDGPDIIFWAHDRFGGYAQSGLLAEITPDKAFQDKLYPFTWDAVRYNGKLIAYPIAVEALSLIYNKDLLPNPPKTWEEIPALDKELKAKGKSALMFNLQEPYFTWPLIAADGGYAFKYENGKYDIKDVGVDNAGAKAGLTFLVDLIKNKHMNADTDYSIAEAAFNKGETAMTINGPWAWSNIDTSKVNYGVTVLPTFKGQPSKPFVGVLSAGINAASPNKELAKEFLENYLLTDEGLEAVNKDKPLGAVALKSYEEELAKDPRIAATMENAQKGEIMPNIPQMSAFWYAVRTAVINAASGRQTVDEALKDAQTGGSGENLYFQSSDNGPQNQRNAPRITFGGPSDSTGSNQNGERSGARSKQRRPQGLPNNTASWFTALTQHGKEDLKFPKGQGVPINTNSKPDDQIGYYRREVRRYRGGDGQMKDLDPRWYFYYLGTGPEAGLPYGANKDGIIWVATEGALNTPKDHIGTRNPANNAAIVLQLPQGTTLPKGFYAEGSRGGSQASSRSSSRSRNSSRNSTPGSSRGTSPARMAGNGGDAALALLLLDRLNQLESKMSGKGQQQQGQTVTKKSAAEASKKPRQKRTATKAYNVTQAFGRRGPEQTQGNFGDQELIRQGTDYKHWPQIAQFAPSASAFFGMSRIGMEVTPSGTWLTYTGAIKLDDKDPNFKDQVILLNKHIDAYKTFPPTEPKKDKKKKADETQALPQRQKKQQTVTLLPAADLDDFSKQLQQSMSSADSTQAGGSGHHHHHH

SEQ ID NO: 3326 - protein, 806 aa, Artificial Sequence
  Description of Artificial Sequence: Synthetic polypeptide
MKIEEGKLVIWINGDKGYNGLAEVGKKFEKDTGIKVTVEHPDKLEEKFPQVAATGDGPDIIFWAHDRFGGYAQSGLLAEITPDKAFQDKLYPFTWDAVRYNGKLIAYPIAVEALSLIYNKDLLPNPPKTWEEIPALDKELKAKGKSALMFNLQEPYFTWPLIAADGGYAFKYENGKYDIKDVGVDNAGAKAGLTFLVDLIKNKHMNADTDYSIAEAAFNKGETAMTINGPWAWSNIDTSKVNYGVTVLPTFKGQPSKPFVGVLSAGINAASPNKELAKEFLENYLLTDEGLEAVNKDKPLGAVALKSYEEELAKDPRIAATMENAQKGEIMPNIPQMSAFWYAVRTAVINAASGRQTVDEALKDAQTGGSGENLYFQSSDNGPQNQRNAPRITFGGPSDSTGSNQNGERSGARSKQRRPQGLPNNTASWFTALTQHGKEDLKFPRGQGVPINTNSSPDDQIGYYRRATRRIRGGDGKMKDLSPRWYFYYLGTGPEAGLPYGANKDGIIWVATEGALNTPKDHIGTRNPANNAAIVLQLPQGTTLPKGFYAEGSRGGSQASSRSSSRSRNSSRNSTPGESRGTEPARMAGNGGDAALALLLLDRLNQLESKMSGKGQQQQGQTVTKKSAAEASKKPRQKRTATKAYNVTQAFGRRGPEQTQGNFGDQELIRQGTDYKHWPQIAQFAPSASAFFGMSRIGMEVTPSGTWLTYTGAIKLDDKDPNFKDQVILLNKHIDAYKTFPPTEPKKDKKKKADETQALPQRQKKQQTVTLLPAADLDDFSKQLQQSMSSADSTQAGGSGHHHHHH

SEQ ID NO: 3327 - protein, 806 aa, Artificial Sequence
  Description of Artificial Sequence: Synthetic polypeptide
MKIEEGKLVIWINGDKGYNGLAEVGKKFEKDTGIKVTVEHPDKLEEKFPQVAATGDGPDIIFWAHDRFGGYAQSGLLAEITPDKAFQDKLYPFTWDAVRYNGKLIAYPIAVEALSLIYNKDLLPNPPKTWEEIPALDKELKAKGKSALMFNLQEPYFTWPLIAADGGYAFKYENGKYDIKDVGVDNAGAKAGLTFLVDLIKNKHMNADTDYSIAEAAFNKGETAMTINGPWAWSNIDTSKVNYGVTVLPTFKGQPSKPFVGVLSAGINAASPNKELAKEFLENYLLTDEGLEAVNKDKPLGAVALKSYEEELAKDPRIAATMENAQKGEIMPNIPQMSAFWYAVRTAVINAASGRQTVDEALKDAQTGGSGENLYFQSSDNGPQNQRNAPRITFGGPSDSTGSNQNGERSGARSKQRRPQGLPNNTASWFTALTQHGKEDLKFPRGQGVPINTNSSPDDQIGYYRRATRRIRGGDGKMKDLSPRWYFYYLGTGPEAGLPYGANKDGIIWVATEGALNTPKDHIGTRNPANNAAIVLQLPQGTTLPKGFYAEGSRGGSQASSRSSSRSRNSSRNSTPGSSRGTSPARMAGNGGDAALALLLLDRLNQLESKMSGKGQQQQGQTVTKKSAAEASKKPRQKRTATKAYNVTQAFGRRGPEQTQGNFGDQELIRQGTDYKNWPQIAQFAPSASAFFGMSRIGMEVTPSGTWLTYTGAIKLDDKDPNFKDQVILLNKHIDAYKTFPPTEPKKDKKKKADETQALPQRQKKQQTVTLLPAADLDDFSKQLQQSMSSADSTQAGGSGHHHHHH

SEQ ID NO: 3328 - protein, 806 aa, Artificial Sequence
  Description of Artificial Sequence: Synthetic polypeptide
MKIEEGKLVIWINGDKGYNGLAEVGKKFEKDTGIKVTVEHPDKLEEKFPQVAATGDGPDIIFWAHDRFGGYAQSGLLAEITPDKAFQDKLYPFTWDAVRYNGKLIAYPIAVEALSLIYNKDLLPNPPKTWEEIPALDKELKAKGKSALMFNLQEPYFTWPLIAADGGYAFKYENGKYDIKDVGVDNAGAKAGLTFLVDLIKNKHMNADTDYSIAEAAFNKGETAMTINGPWAWSNIDTSKVNYGVTVLPTFKGQPSKPFVGVLSAGINAASPNKELAKEFLENYLLTDEGLEAVNKDKPLGAVALKSYEEELAKDPRIAATMENAQKGEIMPNIPQMSAFWYAVRTAVINAASGRQTVDEALKDAQTGGSGENLYFQSSDNGPQNQRNAPRITFGGPSDSTGSNQNGERSGARSKQRRPQGLPNNTASWFTALTQHGKEDLKFPRGQGVPINTNSTPDDQIGYYRRATRRIRGGDGKMKDLSPRWYFYYLGTGPEAGLPYGANKDGIIWVATEGALNTPKDHIGTRNPANNAAIVLQLPQGTTLPKGFYAEGSRGGSQASSRSSSRSRNSSRNSTPGSSRGTSPARMAGNGGDAALALLLLDRLNQLESKMSGKGQQQQGQTVTKKSAAEASKKPRQKRTATKAYNVTQAFGRRGPEQTQGNFGDQELIRQGTDYKHWPQIAQFAPSASAFFGMSRIGMEVTPSGTWLTYTGAIKLDDKDPNFKDQVILLNKHIDAYKTFPPTEPKKDKKKKADETQALPQRQKKQQTVTLLPAADLDDFSKQLQQSMSSADSTQAGGSGHHHHHH

SEQ ID NO: 3329 - protein, 806 aa, Artificial Sequence
  Description of Artificial Sequence: Synthetic polypeptide
MKIEEGKLVIWINGDKGYNGLAEVGKKFEKDTGIKVTVEHPDKLEEKFPQVAATGDGPDIIFWAHDRFGGYAQSGLLAEITPDKAFQDKLYPFTWDAVRYNGKLIAYPIAVEALSLIYNKDLLPNPPKTWEEIPALDKELKAKGKSALMFNLQEPYFTWPLIAADGGYAFKYENGKYDIKDVGVDNAGAKAGLTFLVDLIKNKHMNADTDYSIAEAAFNKGETAMTINGPWAWSNIDTSKVNYGVTVLPTFKGQPSKPFVGVLSAGINAASPNKELAKEFLENYLLTDEGLEAVNKDKPLGAVALKSYEEELAKDPRIAATMENAQKGEIMPNIPQMSAFWYAVRTAVINAASGRQTVDEALKDAQTGGSGENLYFQSSDNGPQNQRNAPRITFGGPSDSTGSNQNGERSGARSKQRRPQGLPNNTASWFTALTQHGKEDLKFPRGQGVPINTNSSPDDQIGYYRRATRRIRGGDGKMKDLSPRWYFYYLGTGPEAGLPYGANKDGIIWVATEGALNTPKDHIGTRNPANNAAIVLQLPQGTTLPKGFYAEGSRGGSQASSRSSSRSRNSSRNSTPGSSRGTSPARMAGNGGDAALALLLLDRLNQLESKMSGKGQQQQGQTVTKKSAAEASKKPRQKRTATKAYNVTQAFGRRGPEQTQGNFGDQELIRQGTDYKHWPQIAQFAPSASAFFGMSRIGMEVTPSGTWLTYTGAIKLDDKNPNFKDQVILLNKHIDAYKTFPPTEPKKDKKKKADETQALPQRQKKQQTVTLLPAADLDDFSKQLQQSMSSADSTQAGGSGHHHHHH

SEQ ID NO: 3330 - protein, 806 aa, Artificial Sequence
  Description of Artificial Sequence: Synthetic polypeptide
MKIEEGKLVIWINGDKGYNGLAEVGKKFEKDTGIKVTVEHPDKLEEKFPQVAATGDGPDIIFWAHDRFGGYAQSGLLAEITPDKAFQDKLYPFTWDAVRYNGKLIAYPIAVEALSLIYNKDLLPNPPKTWEEIPALDKELKAKGKSALMFNLQEPYFTWPLIAADGGYAFKYENGKYDIKDVGVDNAGAKAGLTFLVDLIKNKHMNADTDYSIAEAAFNKGETAMTINGPWAWSNIDTSKVNYGVTVLPTFKGQPSKPFVGVLSAGINAASPNKELAKEFLENYLLTDEGLEAVNKDKPLGAVALKSYEEELAKDPRIAATMENAQKGEIMPNIPQMSAFWYAVRTAVINAASGRQTVDEALKDAQTGGSGENLYFQSSDNGPQNQRNAPRITFGGPSDSTGSNQNGERSGARSKQRRPQGLPNNTASWFTALTQHGKEDLKFPQGQGVPINTNSSPDDQIGYYRRATRRIRGGDGKMKDLSPRWYFYYLGTGPEAGLPYGANKDGIIWVATEGALNTPKDHIGTRNPANNAAIVLQLPQGTTLPKGFYAEGSRGGSQASSRSSSRSRNSSRNSTPGSSRGTSPARMAGNGGDAALALLLLDRLNQLESKMSGKGQQQQGQTVTKKSAAEASKKPRQKRTATKAYNVTQAFGRRGPEQTQGNFGDQELIRQGTDYKHWPQIAQFAPSASAFFGMSRIGMEVTPSGTWLTYTGAIKLDDKDPNFKDQVILLNKHIDAYKTFPPTEPKKDKKKKADETQALPQRQKKQQTVTLLPAADLDDFSKQLQQSMSSADSTQAGGSGHHHHHH

SEQ ID NO: 3331 - protein, 806 aa, Artificial Sequence
  Description of Artificial Sequence: Synthetic polypeptide
MKIEEGKLVIWINGDKGYNGLAEVGKKFEKDTGIKVTVEHPDKLEEKFPQVAATGDGPDIIFWAHDRFGGYAQSGLLAEITPDKAFQDKLYPFTWDAVRYNGKLIAYPIAVEALSLIYNKDLLPNPPKTWEEIPALDKELKAKGKSALMFNLQEPYFTWPLIAADGGYAFKYENGKYDIKDVGVDNAGAKAGLTFLVDLIKNKHMNADTDYSIAEAAFNKGETAMTINGPWAWSNIDTSKVNYGVTVLPTFKGQPSKPFVGVLSAGINAASPNKELAKEFLENYLLTDEGLEAVNKDKPLGAVALKSYEEELAKDPRIAATMENAQKGEIMPNIPQMSAFWYAVRTAVINAASGRQTVDEALKDAQTGGSGENLYFQSSDNGPQNQRNAPRITFGGPSDSTGSNQNGERSGARSKQRRPQGLPNNTASWFTALTQHGKEDLKFPRGQGVPINTNSSPDDQIGYYRRATRRIRGGDGKMKDLSPRWYFYYLGTGPEAGLPYGANKDGIIWVATEGALNTPKDHIGTRNPANNAAIVLQLPKGTTLPKGFYAEGSRGGSQASSRSSSRSRNSSRNSTPGSSRGTSPARMAGNGGDAALALLLLDRLNQLESKMSGKGQQQQGQTVTKKSAAEASKKPRQKRTATKAYNVTQAFGRRGPEQTQGNFGDQELIRQGTDYKHWPQIAQFAPSASAFFGMSRIGMEVTPSGTWLTYTGAIKLDDKDPNFKDQVILLNKHIDAYKTFPPTEPKKDKKKKADETQALPQRQKKQQTVTLLPAADLDDFSKQLQQSMSSADSTQAGGSGHHHHHH

SEQ ID NO: 3332 - protein, 806 aa, Artificial Sequence
  Description of Artificial Sequence: Synthetic polypeptide
MKIEEGKLVIWINGDKGYNGLAEVGKKFEKDTGIKVTVEHPDKLEEKFPQVAATGDGPDIIFWAHDRFGGYAQSGLLAEITPDKAFQDKLYPFTWDAVRYNGKLIAYPIAVEALSLIYNKDLLPNPPKTWEEIPALDKELKAKGKSALMFNLQEPYFTWPLIAADGGYAFKYENGKYDIKDVGVDNAGAKAGLTFLVDLIKNKHMNADTDYSIAEAAFNKGETAMTINGPWAWSNIDTSKVNYGVTVLPTFKGQPSKPFVGVLSAGINAASPNKELAKEFLENYLLTDEGLEAVNKDKPLGAVALKSYEEELAKDPRIAATMENAQKGEIMPNIPQMSAFWYAVRTAVINAASGRQTVDEALKDAQTGGSGENLYFQSSDNGPQNQRNAPRITFGGPSDSTGSNQNGERSGARSKQRRPQGLPNNTASWFTALTQKGKEDLKFPRGQGVPINTNSSPDDQIGYYRRATRRIRGGDGKMKDLSPRWYFYYLGTGPEAGLPYGANKDGIIWVATEGALNTPKDHIGTRNPANNAAIVLQLPQGTTLPKGFYAEGSRGGSQASSRSSSRSRNSSRNSTPGSSRGTSPARMAGNGGDAALALLLLDRLNQLESKMSGKGQQQQGQTVTKKSAAEASKKPRQKRTATKAYNVTQAFGRRGPEQTQGNFGDQELIRQGTDYKHWPQIAQFAPSASAFFGMSRIGMEVTPSGTWLTYTGAIKLDDKDPNFKDQVILLNKHIDAYKTFPPTEPKKDKKKKADETQALPQRQKKQQTVTLLPAADLDDFSKQLQQSMSSADSTQAGGSGHHHHHH

SEQ ID NO: 3333 - protein, 806 aa, Artificial Sequence
  Description of Artificial Sequence: Synthetic polypeptide
MKIEEGKLVIWINGDKGYNGLAEVGKKFEKDTGIKVTVEHPDKLEEKFPQVAATGDGPDIIFWAHDRFGGYAQSGLLAEITPDKAFQDKLYPFTWDAVRYNGKLIAYPIAVEALSLIYNKDLLPNPPKTWEEIPALDKELKAKGKSALMFNLQEPYFTWPLIAADGGYAFKYENGKYDIKDVGVDNAGAKAGLTFLVDLIKNKHMNADTDYSIAEAAFNKGETAMTINGPWAWSNIDTSKVNYGVTVLPTFKGQPSKPFVGVLSAGINAASPNKELAKEFLENYLLTDEGLEAVNKDKPLGAVALKSYEEELAKDPRIAATMENAQKGEIMPNIPQMSAFWYAVRTAVINAASGRQTVDEALKDAQTGGSGENLYFQSSDNGPQNQRNAPRITFGGPSDSTGSNQNGERSGARSKQRRPQGLPNNTASWFTPLTQFGKEDLKFPPGQGVPINTNSSPDDQIGYYRRATRRIRGGDGKMKDLPPKWYFYYLGTGPHADLPYGQKQDGVVWVARPGALNTPKDHIGTRNPANNAAIPLQLPPGTKLPKGFYAEGSRGGSQASSRSSSRSRNSSRNSTPGSSRGTSPARMAGNGGDAALALLLLDRLNQLESKMSGKGQQQQGQTVTKKSAAEASKKPRQKRTATKAYNVTQAFGRRGPEQTQGNFGDQELIRQGTDYKHWPQIAQFAPSASAFFGMSRIGMEVTPSGTWLTYTGAIKLDDKDPNFKDQVILLNKHIDAYKTFPPTEPKKDKKKKADETQALPQRQKKQQTVTLLPAADLDDFSKQLQQSMSSADSTQAGGSGHHHHHH

SEQ ID NO: 3334 - protein, 806 aa, Artificial Sequence
  Description of Artificial Sequence: Synthetic polypeptide
MKIEEGKLVIWINGDKGYNGLAEVGKKFEKDTGIKVTVEHPDKLEEKFPQVAATGDGPDIIFWAHDRFGGYAQSGLLAEITPDKAFQDKLYPFTWDAVRYNGKLIAYPIAVEALSLIYNKDLLPNPPKTWEEIPALDKELKAKGKSALMFNLQEPYFTWPLIAADGGYAFKYENGKYDIKDVGVDNAGAKAGLTFLVDLIKNKHMNADTDYSIAEAAFNKGETAMTINGPWAWSNIDTSKVNYGVTVLPTFKGQPSKPFVGVLSAGINAASPNKELAKEFLENYLLTDEGLEAVNKDKPLGAVALKSYEEELAKDPRIAATMENAQKGEIMPNIPQMSAFWYAVRTAVINAASGRQTVDEALKDAQTGGSGENLYFQSSDNGPQNQRNAPRITFGGPSDSTGSNQNGERSGARSKQRRPQGLPNNTASWFTPLVQFGKEDLKFPPGQGVPINTNSSPDDQIGYYRRATRRIRGGDGKMKDLPPKWYFYYLGTGPHADLPYGQKQDGVFWVARPGALNTPKDHIGTRNPANNAAIPLQLPPGTKLPKGFYAEGSRGGSQASSRSSSRSRNSSRNSTPGSSRGTSPARMAGNGGDAALALLLLDRLNQLESKMSGKGQQQQGQTVTKKSAAEASKKPRQKRTATKAYNVTQAFGRRGPEQTQGNFGDQELIRQGTDYKHWPQIAQFAPSASAFFGMSRIGMEVTPSGTWLTYTGAIKLDDKDPNFKDQVILLNKHIDAYKTFPPTEPKKDKKKKADETQALPQRQKKQQTVTLLPAADLDDFSKQLQQSMSSADSTQAGGSGHHHHHH

SEQ ID NO: 3335 - protein, 806 aa, Artificial Sequence
  Description of Artificial Sequence: Synthetic polypeptide
MKIEEGKLVIWINGDKGYNGLAEVGKKFEKDTGIKVTVEHPDKLEEKFPQVAATGDGPDIIFWAHDRFGGYAQSGLLAEITPDKAFQDKLYPFTWDAVRYNGKLIAYPIAVEALSLIYNKDLLPNPPKTWEEIPALDKELKAKGKSALMFNLQEPYFTWPLIAADGGYAFKYENGKYDIKDVGVDNAGAKAGLTFLVDLIKNKHMNADTDYSIAEAAFNKGETAMTINGPWAWSNIDTSKVNYGVTVLPTFKGQPSKPFVGVLSAGINAASPNKELAKEFLENYLLTDEGLEAVNKDKPLGAVALKSYEEELAKDPRIAATMENAQKGEIMPNIPQMSAFWYAVRTAVINAASGRQTVDEALKDAQTGGSGENLYFQSSDNGPQNQRNAPRITFGGPSDSTGSNQNGERSGARSKQRRPQGLPNNTASWFTALTQHGKEDLKFPRGQGVPINTNSSPDDQIGYYRRATRRIRGGDGKMKDLSPRWYFYYLGTGPEAGLPYGANKDGIIWVAMEGALNTPKDHIGTRNPANNAAIVLQLPQGTTLPKGFYAEGSRGGSQASSRSSSRSRNSSRNSTPGSSRGTSPARMAGNGGDAALALLLLDRLNQLESKMSGKGQQQQGQTVTKKSAAEASKKPRQKRTATKAYNVTQAFGRRGPEQTQGNFGDQELIRQGTDYKHWPQIAQFAPSASAFFGMSRIGMEVTPSGTWLTYTGAIKLDDKDPNFKDQVILLNKHIDAYKTFPPTEPKKDKKKKADETQALPQRQKKQQTVTLLPAADLDDFSKQLQQSMSSADSTQAGGSGHHHHHH

SEQ ID NO: 3336 - protein, 806 aa, Artificial Sequence
  Description of Artificial Sequence: Synthetic polypeptide
MKIEEGKLVIWINGDKGYNGLAEVGKKFEKDTGIKVTVEHPDKLEEKFPQVAATGDGPDIIFWAHDRFGGYAQSGLLAEITPDKAFQDKLYPFTWDAVRYNGKLIAYPIAVEALSLIYNKDLLPNPPKTWEEIPALDKELKAKGKSALMFNLQEPYFTWPLIAADGGYAFKYENGKYDIKDVGVDNAGAKAGLTFLVDLIKNKHMNADTDYSIAEAAFNKGETAMTINGPWAWSNIDTSKVNYGVTVLPTFKGQPSKPFVGVLSAGINAASPNKELAKEFLENYLLTDEGLEAVNKDKPLGAVALKSYEEELAKDPRIAATMENAQKGEIMPNIPQMSAFWYAVRTAVINAASGRQTVDEALKDAQTGGSGENLYFQSSDNGPQNQRNAPRITFGGPSDSTGSNQNGERSGARSKQRRPQGLPNNTASWFTALTQHGKEDLKFPRGQGVPINTNSSPDDQIGYYRRATRRIRGGDGKMKDLSPRWYFYYLGTGPEAGLPYGANKDGIIWVATEGALNTPKDHIGTRNPANNAAIVLQLPQGTTLPKGFYAEGSRGGSQASSRSSSRSRNSSRNSTPGSSRGTSPARMAGNGGDAALALLLLDRLNQLESKMSGKGQQQQGQTVTKKSAAEASKKPRQKRTATKAYNVTQAFGRRGPEQTQGNFGDQELIRQGTDYKHWPQIAQFAPSASAFFGMSRIGMECTPSGTWLTYTGAIKLDDKDPNFKDQVILLNKHIDAYKTFPPTEPKKDKKKKADETQALPQRQKKQQTVTLLPAADLDDFSKQLQQSMSSADSTQAGGSGHHHHHH

SEQ ID NO: 3337 - protein, 806 aa, Artificial Sequence
  Description of Artificial Sequence: Synthetic polypeptide
MKIEEGKLVIWINGDKGYNGLAEVGKKFEKDTGIKVTVEHPDKLEEKFPQVAATGDGPDIIFWAHDRFGGYAQSGLLAEITPDKAFQDKLYPFTWDAVRYNGKLIAYPIAVEALSLIYNKDLLPNPPKTWEEIPALDKELKAKGKSALMFNLQEPYFTWPLIAADGGYAFKYENGKYDIKDVGVDNAGAKAGLTFLVDLIKNKHMNADTDYSIAEAAFNKGETAMTINGPWAWSNIDTSKVNYGVTVLPTFKGQPSKPFVGVLSAGINAASPNKELAKEFLENYLLTDEGLEAVNKDKPLGAVALKSYEEELAKDPRIAATMENAQKGEIMPNIPQMSAFWYAVRTAVINAASGRQTVDEALKDAQTGGSGENLYFQSSDNGPQNQRNAPRITFGGPSDSTGSNQNGERSGARSKQRRPQGLPNNTASWFTALTQHGKEDLKFPRGQGVPINTNSSPDDQIGYYRRATRRIRGGDGKMKDLSPRWYFYYLGTGPEAGLPYGANKDGIIWVATEGALNTPKDHIGTRNPANNAAIVLQLPQGTTLPKGFYAEGSRGGSQASSRSSSRSRNSSRNSTPGSSRGTSPARMAGNGGDAALALLLLDRLNQLESKMSGKGQQQQGQTVTKKSAAEASKKPRQKRTATKAYNVTQAFGRRGPEQTQGNFGDQELIRQGTDYKHWPQIAQFAPSASAFFGMSRIGMEVTPSGTWLTYTGAIKLDDKDPNFLDQVILLNKHIDAYKTFPPTEPKKDKKKKADETQALPQRQKKQQTVTLLPAADLDDFSKQLQQSMSSADSTQAGGSGHHHHHH

SEQ ID NO: 3338 - protein, 806 aa, Artificial Sequence
  Description of Artificial Sequence: Synthetic polypeptide
MKIEEGKLVIWINGDKGYNGLAEVGKKFEKDTGIKVTVEHPDKLEEKFPQVAATGDGPDIIFWAHDRFGGYAQSGLLAEITPDKAFQDKLYPFTWDAVRYNGKLIAYPIAVEALSLIYNKDLLPNPPKTWEEIPALDKELKAKGKSALMFNLQEPYFTWPLIAADGGYAFKYENGKYDIKDVGVDNAGAKAGLTFLVDLIKNKHMNADTDYSIAEAAFNKGETAMTINGPWAWSNIDTSKVNYGVTVLPTFKGQPSKPFVGVLSAGINAASPNKELAKEFLENYLLTDEGLEAVNKDKPLGAVALKSYEEELAKDPRIAATMENAQKGEIMPNIPQMSAFWYAVRTAVINAASGRQTVDEALKDAQTGGSGENLYFQSSDNGPQNQRNAPRITFGGPSDSTGSNQNGERSGARSKQRRPQGLPNNTASWFTALTQHGKEDLKFPRGQGVPINTNSSPDDQIGYYRRATRRIRGGDGKMKDLSPRWYFYYLGTGPEAGLPYGAVKDGIIWVATEGALNTPKDHIGTRNPANNAAIVLQLPQGTTLPKGFYAEGSRGGSQASSRSSSRSRNSSRNSTPGSSRGTSPARMAGNGGDAALALLLLDRLNQLESKMSGKGQQQQGQTVTKKSAAEASKKPRQKRTATKAYNVTQAFGRRGPEQTQGNFGDQELIRQGTDYKHWPQIAQFAPSASAFFGMSRIGMEVTPSGTWLTYTGAIKLDDKDPNFKDQVILLNKHIDAYKTFPPTEPKKDKKKKADETQALPQRQKKQQTVTLLPAADLDDFSKQLQQSMSSADSTQAGGSGHHHHHH

SEQ ID NO: 3339 - protein, 806 aa, Artificial Sequence
  Description of Artificial Sequence: Synthetic polypeptide
MKIEEGKLVIWINGDKGYNGLAEVGKKFEKDTGIKVTVEHPDKLEEKFPQVAATGDGPDIIFWAHDRFGGYAQSGLLAEITPDKAFQDKLYPFTWDAVRYNGKLIAYPIAVEALSLIYNKDLLPNPPKTWEEIPALDKELKAKGKSALMFNLQEPYFTWPLIAADGGYAFKYENGKYDIKDVGVDNAGAKAGLTFLVDLIKNKHMNADTDYSIAEAAFNKGETAMTINGPWAWSNIDTSKVNYGVTVLPTFKGQPSKPFVGVLSAGINAASPNKELAKEFLENYLLTDEGLEAVNKDKPLGAVALKSYEEELAKDPRIAATMENAQKGEIMPNIPQMSAFWYAVRTAVINAASGRQTVDEALKDAQTGGSGENLYFQSSDNGPQNQRNAPRITFGGPSDSTGSNQNGERSGARSKQRRPQGLPNNTASWFTALTQHGKEDLKFPRGQGVPINTNSSPDDQIGYYRRATRRIRGGDGKMKDLSPAWYFYYLGTGPEAGLPYGANKDGIIWVATEGALNTPKDHIGTRNPANNAAIVLQLPQGTTLPKGFYAEGSRGGSQASSRSSSRSRNSSRNSTPGSSRGTSPARMAGNGGDAALALLLLDRLNQLESKMSGKGQQQQGQTVTKKSAAEASKKPRQKRTATKAYNVTQAFGRRGPEQTQGNFGDQELIRQGTDYKHWPQIAQFAPSASAFFGMSRIGMEVTPSGTWLTYTGAIKLDDKDPNFKDQVILLNKHIDAYKTFPPTEPKKDKKKKADETQALPQRQKKQQTVTLLPAADLDDFSKQLQQSMSSADSTQAGGSGHHHHHH

SEQ ID NO: 3340 - protein, 806 aa, Artificial Sequence
  Description of Artificial Sequence: Synthetic polypeptide
MKIEEGKLVIWINGDKGYNGLAEVGKKFEKDTGIKVTVEHPDKLEEKFPQVAATGDGPDIIFWAHDRFGGYAQSGLLAEITPDKAFQDKLYPFTWDAVRYNGKLIAYPIAVEALSLIYNKDLLPNPPKTWEEIPALDKELKAKGKSALMFNLQEPYFTWPLIAADGGYAFKYENGKYDIKDVGVDNAGAKAGLTFLVDLIKNKHMNADTDYSIAEAAFNKGETAMTINGPWAWSNIDTSKVNYGVTVLPTFKGQPSKPFVGVLSAGINAASPNKELAKEFLENYLLTDEGLEAVNKDKPLGAVALKSYEEELAKDPRIAATMENAQKGEIMPNIPQMSAFWYAVRTAVINAASGRQTVDEALKDAQTGGSGENLYFQSSDNGPQNQRNAPRITFGGPSDSTGSNQNGERSGARSKQRRPQGLPNNTASWFTALTQHGKEDLKFPRGQGVPINTNSSPDDQIGYYRRATRRIRGGDGKMKDLSPRWYFYYLGTGPEAGLPYGANKDGIIWVATEGALNTPKDHIGTRNPANNAACVLQLPQGTTLPKGFYAEGSRGGSQASSRSSSRSRNSSRNSTPGSSRGTSPARMAGNGGDAALALLLLDRLNQLESKMSGKGQQQQGQTVTKKSAAEASKKPRQKRTATKAYNVTQAFGRRGPEQTQGNFGDQELIRQGTDYKHWPQIAQFAPSASAFFGMSRIGMEVTPSGTWLTYTGAIKLDDKDPNFKDQVILLNKHIDAYKTFPPTEPKKDKKKKADETQALPQRQKKQQTVTLLPAADLDDFSKQLQQSMSSADSTQAGGSGHHHHHH

SEQ ID NO: 3341 - protein, 806 aa, Artificial Sequence
  Description of Artificial Sequence: Synthetic polypeptide
MKIEEGKLVIWINGDKGYNGLAEVGKKFEKDTGIKVTVEHPDKLEEKFPQVAATGDGPDIIFWAHDRFGGYAQSGLLAEITPDKAFQDKLYPFTWDAVRYNGKLIAYPIAVEALSLIYNKDLLPNPPKTWEEIPALDKELKAKGKSALMFNLQEPYFTWPLIAADGGYAFKYENGKYDIKDVGVDNAGAKAGLTFLVDLIKNKHMNADTDYSIAEAAFNKGETAMTINGPWAWSNIDTSKVNYGVTVLPTFKGQPSKPFVGVLSAGINAASPNKELAKEFLENYLLTDEGLEAVNKDKPLGAVALKSYEEELAKDPRIAATMENAQKGEIMPNIPQMSAFWYAVRTAVINAASGRQTVDEALKDAQTGGSGENLYFQSSDNGPQNQRNAPRITFGGPSDSTGSNQNGERSGARSKQRRPQGLPNNTASWFTGLVQFGKEDLKFPPGQGVPINTNSSPDDQIGYYRRATRRIRGGDGKMKDLPPKWYFYYLGTGPHADLPYGQKQDGVFWVARPGALNTPKDHIGTRNPANNAAIPLQLPPGTKLPKGFYAEGSRGGSQASSRSSSRSRNSSRNSTPGSSRGTSPARMAGNGGDAALALLLLDRLNQLESKMSGKGQQQQGQTVTKKSAAEASKKPRQKRTATKAYNVTQAFGRRGPEQTQGNFGDQELIRQGTDYKHWPQIAQFAPSASAFFGMSRIGMEVTPSGTWLTYTGAIKLDDKDPNFKDQVILLNKHIDAYKTFPPTEPKKDKKKKADETQALPQRQKKQQTVTLLPAADLDDFSKQLQQSMSSADSTQAGGSGHHHHHH

SEQ ID NO: 3342 - protein, 806 aa, Artificial Sequence
  Description of Artificial Sequence: Synthetic polypeptide
MKIEEGKLVIWINGDKGYNGLAEVGKKFEKDTGIKVTVEHPDKLEEKFPQVAATGDGPDIIFWAHDRFGGYAQSGLLAEITPDKAFQDKLYPFTWDAVRYNGKLIAYPIAVEALSLIYNKDLLPNPPKTWEEIPALDKELKAKGKSALMFNLQEPYFTWPLIAADGGYAFKYENGKYDIKDVGVDNAGAKAGLTFLVDLIKNKHMNADTDYSIAEAAFNKGETAMTINGPWAWSNIDTSKVNYGVTVLPTFKGQPSKPFVGVLSAGINAASPNKELAKEFLENYLLTDEGLEAVNKDKPLGAVALKSYEEELAKDPRIAATMENAQKGEIMPNIPQMSAFWYAVRTAVINAASGRQTVDEALKDAQTGGSGENLYFQSSDNGPQNQRNAPRITFGGPSDSTGSNQNGERSGARSKQRRPQGLPNNTASWFTALTQHGKEDLKFPRGQGVPINTNSSPDDQIGYYRRATRRIRGGDGKMKDLSPRWYFYYLGTGPEAGLPYGANKDGIIWVATEGALNTPKDHIGTRNPANNAAMVLQLPQGTTLPKGFYAEGSRGGSQASSRSSSRSRNSSRNSTPGSSRGTSPARMAGNGGDAALALLLLDRLNQLESKMSGKGQQQQGQTVTKKSAAEASKKPRQKRTATKAYNVTQAFGRRGPEQTQGNFGDQELIRQGTDYKHWPQIAQFAPSASAFFGMSRIGMEVTPSGTWLTYTGAIKLDDKDPNFKDQVILLNKHIDAYKTFPPTEPKKDKKKKADETQALPQRQKKQQTVTLLPAADLDDFSKQLQQSMSSADSTQAGGSGHHHHHH

SEQ ID NO: 3343 - protein, 806 aa, Artificial Sequence
  Description of Artificial Sequence: Synthetic polypeptide
MKIEEGKLVIWINGDKGYNGLAEVGKKFEKDTGIKVTVEHPDKLEEKFPQVAATGDGPDIIFWAHDRFGGYAQSGLLAEITPDKAFQDKLYPFTWDAVRYNGKLIAYPIAVEALSLIYNKDLLPNPPKTWEEIPALDKELKAKGKSALMFNLQEPYFTWPLIAADGGYAFKYENGKYDIKDVGVDNAGAKAGLTFLVDLIKNKHMNADTDYSIAEAAFNKGETAMTINGPWAWSNIDTSKVNYGVTVLPTFKGQPSKPFVGVLSAGINAASPNKELAKEFLENYLLTDEGLEAVNKDKPLGAVALKSYEEELAKDPRIAATMENAQKGEIMPNIPQMSAFWYAVRTAVINAASGRQTVDEALKDAQTGGSGENLYFQSSDNGPQNQRNAPRITFGGPSDSTGSNQNGERSGARSKQRRPQGLPNNTASWFTALTQHGKEDLKFPRGQGVPINTNSSPDDQIGYYRRATRRIRGGDGKMKDLSPRWYFYYLGTGPEAGLPYGANKDGIIWVATEGALNTPKGHIGTRNPANNAAIVLQLPQGTTLPKGFYAEGSRGGSQASSRSSSRSRNSSRNSTPGSSRGTSPARMAGNGGDAALALLLLDRLNQLESKMSGKGQQQQGQTVTKKSAAEASKKPRQKRTATKAYNVTQAFGRRGPEQTQGNFGDQELIRQGTDYKHWPQIAQFAPSASAFFGMSRIGMEVTPSGTWLTYTGAIKLDDKDPNFKDQVILLNKHIDAYKTFPPTEPKKDKKKKADETQALPQRQKKQQTVTLLPAADLDDFSKQLQQSMSSADSTQAGGSGHHHHHH

SEQ ID NO: 3344 - protein, 806 aa, Artificial Sequence
  Description of Artificial Sequence: Synthetic polypeptide
MKIEEGKLVIWINGDKGYNGLAEVGKKFEKDTGIKVTVEHPDKLEEKFPQVAATGDGPDIIFWAHDRFGGYAQSGLLAEITPDKAFQDKLYPFTWDAVRYNGKLIAYPIAVEALSLIYNKDLLPNPPKTWEEIPALDKELKAKGKSALMFNLQEPYFTWPLIAADGGYAFKYENGKYDIKDVGVDNAGAKAGLTFLVDLIKNKHMNADTDYSIAEAAFNKGETAMTINGPWAWSNIDTSKVNYGVTVLPTFKGQPSKPFVGVLSAGINAASPNKELAKEFLENYLLTDEGLEAVNKDKPLGAVALKSYEEELAKDPRIAATMENAQKGEIMPNIPQMSAFWYAVRTAVINAASGRQTVDEALKDAQTGGSGENLYFQSSDNGPQNQRNAPRITFGGPSDSTGSNQNGERSGARSKQRRPQGLPNNTASWFTALTQHGKEDLKFPRGQGVPINTNSSPDDQIGYYRRRTRRIRGGDGKMKDLSPRWYFYYLGTGPEAGLPYGANKDGIIWVATEGALNTPKDHIGTRNPANNAAIVLQLPQGTTLPKGFYAEGSRGGSQASSRSSSRSRNSSRNSTPGSSRGTSPARMAGNGGDAALALLLLDRLNQLESKMSGKGQQQQGQTVTKKSAAEASKKPRQKRTATKAYNVTQAFGRRGPEQTQGNFGDQELIRQGTDYKHWPQIAQFAPSASAFFGMSRIGMEVTPSGTWLTYTGAIKLDDKDPNFKDQVILLNKHIDAYKTFPPTEPKKDKKKKADETQALPQRQKKQQTVTLLPAADLDDFSKQLQQSMSSADSTQAGGSGHHHHHH

SEQ ID NO: 3345 - protein, 806 aa, Artificial Sequence
  Description of Artificial Sequence: Synthetic polypeptide
MKIEEGKLVIWINGDKGYNGLAEVGKKFEKDTGIKVTVEHPDKLEEKFPQVAATGDGPDIIFWAHDRFGGYAQSGLLAEITPDKAFQDKLYPFTWDAVRYNGKLIAYPIAVEALSLIYNKDLLPNPPKTWEEIPALDKELKAKGKSALMFNLQEPYFTWPLIAADGGYAFKYENGKYDIKDVGVDNAGAKAGLTFLVDLIKNKHMNADTDYSIAEAAFNKGETAMTINGPWAWSNIDTSKVNYGVTVLPTFKGQPSKPFVGVLSAGINAASPNKELAKEFLENYLLTDEGLEAVNKDKPLGAVALKSYEEELAKDPRIAATMENAQKGEIMPNIPQMSAFWYAVRTAVINAASGRQTVDEALKDAQTGGSGENLYFQSSDNGPQNQRNAPRITFGGPSDSTGSNQNGERSGARSKQRRPQGLPNNTASWFTALTQHGKEDLKFPRGQGVPINTNSSPDDQIGYYRRATRRIRGGDGKMKDLSPRWYFYYLGTGPEAGLPYGANKDGIIWVATEGALNTPKDHIGVRNPANNAAIVLQLPQGTTLPKGFYAEGSRGGSQASSRSSSRSRNSSRNSTPGSSRGTSPARMAGNGGDAALALLLLDRLNQLESKMSGKGQQQQGQTVTKKSAAEASKKPRQKRTATKAYNVTQAFGRRGPEQTQGNFGDQELIRQGTDYKHWPQIAQFAPSASAFFGMSRIGMEVTPSGTWLTYTGAIKLDDKDPNFKDQVILLNKHIDAYKTFPPTEPKKDKKKKADETQALPQRQKKQQTVTLLPAADLDDFSKQLQQSMSSADSTQAGGSGHHHHHH

SEQ ID NO: 3346 - protein, 806 aa, Artificial Sequence
  Description of Artificial Sequence: Synthetic polypeptide
MKIEEGKLVIWINGDKGYNGLAEVGKKFEKDTGIKVTVEHPDKLEEKFPQVAATGDGPDIIFWAHDRFGGYAQSGLLAEITPDKAFQDKLYPFTWDAVRYNGKLIAYPIAVEALSLIYNKDLLPNPPKTWEEIPALDKELKAKGKSALMFNLQEPYFTWPLIAADGGYAFKYENGKYDIKDVGVDNAGAKAGLTFLVDLIKNKHMNADTDYSIAEAAFNKGETAMTINGPWAWSNIDTSKVNYGVTVLPTFKGQPSKPFVGVLSAGINAASPNKELAKEFLENYLLTDEGLEAVNKDKPLGAVALKSYEEELAKDPRIAATMENAQKGEIMPNIPQMSAFWYAVRTAVINAASGRQTVDEALKDAQTGGSGENLYFQSSDNGPQNQRNAPRITFGGPSDSTGSNQNGERSGARSKQRRPQGLPNNTASWFTALTQHGKEDLKFPRGQGVPINTNSSPDDQIGYYRRATRRIRGGDGKMKDLSPRWYFYYLGTGPEAGLPYGANKDGIIWVATEGALNTPKDHIGTRNPANNAAIVLQLPQGTTLPKGFYAEGSRGGSQASSRSSSRSRNSSRNSTPGSSRGTSPARMAGNGGDAALALLLLDRLNQLESKMSGKGQQQQGQTVTKKSAAEASKKPRQKRTATKAYNVTQAFGRRGPEQTQGNFGDQELIRQGTDYKHWPQIAQFAPSASAFFGMSRIGSEVTPSGTWLTYTGAIKLDDKDPNFKDQVILLNKHIDAYKTFPPTEPKKDKKKKADETQALPQRQKKQQTVTLLPAADLDDFSKQLQQSMSSADSTQAGGSGHHHHHH

SEQ ID NO: 3347 - protein, 806 aa, Artificial Sequence
  Description of Artificial Sequence: Synthetic polypeptide
MKIEEGKLVIWINGDKGYNGLAEVGKKFEKDTGIKVTVEHPDKLEEKFPQVAATGDGPDIIFWAHDRFGGYAQSGLLAEITPDKAFQDKLYPFTWDAVRYNGKLIAYPIAVEALSLIYNKDLLPNPPKTWEEIPALDKELKAKGKSALMFNLQEPYFTWPLIAADGGYAFKYENGKYDIKDVGVDNAGAKAGLTFLVDLIKNKHMNADTDYSIAEAAFNKGETAMTINGPWAWSNIDTSKVNYGVTVLPTFKGQPSKPFVGVLSAGINAASPNKELAKEFLENYLLTDEGLEAVNKDKPLGAVALKSYEEELAKDPRIAATMENAQKGEIMPNIPQMSAFWYAVRTAVINAASGRQTVDEALKDAQTGGSGENLYFQSSDNGPQNQRNAPRITFGGPSDSTGSNQNGERSGARSKQRRPQGLPNNTASWFTALTQHGKEDLKFPRGQGVPINTNSSPDDQIGYYRRATRRIRGGDGKMKDLSPRWYFYYLGTGPEAGLPYGANKDGIIWVATEGALNTPKDHIGTRNPANNAAIVLQLPQGTTLPKGFYAEGSRGGSQASSRSSSRSRNSSRNSTPGSSRGTSPARMAGNGGDAALALLLLDRLNQLESKMSGKGQQQQGQTVTKKSAAEASKKPRQKRTATKAYNVTQAFGRRGPHQTQGNFGDQELIRQGTDYKHWPQIAQFAPSASAFFGMSRIGMEVTPSGTWLTYTGAIKLDDKDPNFKDQVILLNKHIDAYKTFPPTEPKKDKKKKADETQALPQRQKKQQTVTLLPAADLDDFSKQLQQSMSSADSTQAGGSGHHHHHH

SEQ ID NO: 3348 - protein, 806 aa, Artificial Sequence
  Description of Artificial Sequence: Synthetic polypeptide
MKIEEGKLVIWINGDKGYNGLAEVGKKFEKDTGIKVTVEHPDKLEEKFPQVAATGDGPDIIFWAHDRFGGYAQSGLLAEITPDKAFQDKLYPFTWDAVRYNGKLIAYPIAVEALSLIYNKDLLPNPPKTWEEIPALDKELKAKGKSALMFNLQEPYFTWPLIAADGGYAFKYENGKYDIKDVGVDNAGAKAGLTFLVDLIKNKHMNADTDYSIAEAAFNKGETAMTINGPWAWSNIDTSKVNYGVTVLPTFKGQPSKPFVGVLSAGINAASPNKELAKEFLENYLLTDEGLEAVNKDKPLGAVALKSYEEELAKDPRIAATMENAQKGEIMPNIPQMSAFWYAVRTAVINAASGRQTVDEALKDAQTGGSGENLYFQSSDNGPQNQRNAPRITFGGPSDSTGSNQNGERSGARSKQRRPQGLPNNTASWFTALTQHGKEDLKFPRGQGVPINTNSSPDDQIGYYRRATRRIRGGDGKMKDLSPRWYFYYLGTGPEAGLPYGANKDGIIWVATKGALNTPKDHIGTRNPANNAAIVLQLPQGTTLPKGFYAEGSRGGSQASSRSSSRSRNSSRNSTPGSSRGTSPARMAGNGGDAALALLLLDRLNQLESKMSGKGQQQQGQTVTKKSAAEASKKPRQKRTATKAYNVTQAFGRRGPEQTQGNFGDQELIRQGTDYKHWPQIAQFAPSASAFFGMSRIGMEVTPSGTWLTYTGAIKLDDKDPNFKDQVILLNKHIDAYKTFPPTEPKKDKKKKADETQALPQRQKKQQTVTLLPAADLDDFSKQLQQSMSSADSTQAGGSGHHHHHH

SEQ ID NO: 3349 - protein, 806 aa, Artificial Sequence
  Description of Artificial Sequence: Synthetic polypeptide
MKIEEGKLVIWINGDKGYNGLAEVGKKFEKDTGIKVTVEHPDKLEEKFPQVAATGDGPDIIFWAHDRFGGYAQSGLLAEITPDKAFQDKLYPFTWDAVRYNGKLIAYPIAVEALSLIYNKDLLPNPPKTWEEIPALDKELKAKGKSALMFNLQEPYFTWPLIAADGGYAFKYENGKYDIKDVGVDNAGAKAGLTFLVDLIKNKHMNADTDYSIAEAAFNKGETAMTINGPWAWSNIDTSKVNYGVTVLPTFKGQPSKPFVGVLSAGINAASPNKELAKEFLENYLLTDEGLEAVNKDKPLGAVALKSYEEELAKDPRIAATMENAQKGEIMPNIPQMSAFWYAVRTAVINAASGRQTVDEALKDAQTGGSGENLYFQSSDNGPQNQRNAPRITFGGPSDSTGSNQNGERSGARSKQRRPQGLPNNTASWFTALTQHGKEDLKFPRGQGVPINTNSSPDDQIGYYRRATRRIRGGDGKMKDLSPRWYFYYLGTGPEAGLPYGANKDGIIWVATEGALNTPKDHIGTRNPANNAAIVLQLPQGTTLPKGFYAEGSRGGSQASSRSSSRSRNSSRNSTPGSSRGTSPARMAGNGGDAALALLLLDRLNQLESKMSGKGQQQQGQTVTKKSAAEMSKKPRQKRTATKGYNVTQCFGPRGPEQTQGNFGDADLIKKGTDYKHWPQIAQFAPSASAFFGMSRISSKETPSGTWLTYTGAIKLDKDDPNFKDQVILLNKHIDAYKTFPPTEPKKDKKKKADETQALPQRQKKQQTVTLLPAADLDDFSKQLQQSMSSADSTQAGGSGHHHHHH

SEQ ID NO: 3350 - protein, 806 aa, Artificial Sequence
  Description of Artificial Sequence: Synthetic polypeptide
MKIEEGKLVIWINGDKGYNGLAEVGKKFEKDTGIKVTVEHPDKLEEKFPQVAATGDGPDIIFWAHDRFGGYAQSGLLAEITPDKAFQDKLYPFTWDAVRYNGKLIAYPIAVEALSLIYNKDLLPNPPKTWEEIPALDKELKAKGKSALMFNLQEPYFTWPLIAADGGYAFKYENGKYDIKDVGVDNAGAKAGLTFLVDLIKNKHMNADTDYSIAEAAFNKGETAMTINGPWAWSNIDTSKVNYGVTVLPTFKGQPSKPFVGVLSAGINAASPNKELAKEFLENYLLTDEGLEAVNKDKPLGAVALKSYEEELAKDPRIAATMENAQKGEIMPNIPQMSAFWYAVRTAVINAASGRQTVDEALKDAQTGGSGENLYFQSSDNGPQNQRNAPRITFGGPSDSTGSNQNGERSGARSKQRRPQGLPNNTASWFTALTQHGKEDLKFPRGQGVPINTNSSPDDQIGYYRRATRRIRGGDGKMKDLSPRWYFYYLGTGPEAGLPYGANKDGIIWVATEGALNTPKDHIGTRNPANNAAIVLQLPQGTTLPKGFYAEGSRGGSQASSRSSSRSRNSSRNSTPGSSRGTSPARMAGNGGDAALALLLLDRLNQLESKMSGKGQQQQGQTVTKKSAAEASKKPRQKRTATKEYNVTQAFGRRGPEQTQGNFGDQDLIKLGTDYKHWPQIAQFAPSASAFFGMSRISTEETPSGTWLTYTGAIKLDKKDPNFKDQVILLNKHIDAYKTFPPTEPKKDKKKKADETQALPQRQKKQQTVTLLPAADLDDFSKQLQQSMSSADSTQAGGSGHHHHHH

SEQ ID NO: 3351 - protein, 806 aa, Artificial Sequence
  Description of Artificial Sequence: Synthetic polypeptide
MKIEEGKLVIWINGDKGYNGLAEVGKKFEKDTGIKVTVEHPDKLEEKFPQVAATGDGPDIIFWAHDRFGGYAQSGLLAEITPDKAFQDKLYPFTWDAVRYNGKLIAYPIAVEALSLIYNKDLLPNPPKTWEEIPALDKELKAKGKSALMFNLQEPYFTWPLIAADGGYAFKYENGKYDIKDVGVDNAGAKAGLTFLVDLIKNKHMNADTDYSIAEAAFNKGETAMTINGPWAWSNIDTSKVNYGVTVLPTFKGQPSKPFVGVLSAGINAASPNKELAKEFLENYLLTDEGLEAVNKDKPLGAVALKSYEEELAKDPRIAATMENAQKGEIMPNIPQMSAFWYAVRTAVINAASGRQTVDEALKDAQTGGSGENLYFQSSDNGPQNQRNAPRITFGGPSDSTGSNQNGERSGARSKQRRPQGLPNNTASWFTALTQHGKEDLKFPRGQGVPINTNSSPDDQIGYYRRATRRIRGGDGKMKDLSPRWYFYYLGTGPEAGLPYGANKDGIIWVATEGALNTPKDHIGTRNPANNAAIVLQLPQGTTLPKGFYAEGSRGGSQASSRSSSRSRNSSRNSTPGSSRGTSPARMAGNGGDAALALLLLDRLNQLESKMSGKGQQQQGQTVTKKSAAEASKKPRQKRTATKDYNVTQAFGRRGPEQTQGNFGDQELIRQGTDYKHWPQIAQFAPSASAFFGMSRIGMEVTPSGTWLTYTGAIKLDDKDPNFKDQVILLNKHIDAYKTFPPTEPKKDKKKKADETQALPQRQKKQQTVTLLPAADLDDFSKQLQQSMSSADSTQAGGSGHHHHHH

SEQ ID NO: 3352 - protein, 806 aa, Artificial Sequence
  Description of Artificial Sequence: Synthetic polypeptide
MKIEEGKLVIWINGDKGYNGLAEVGKKFEKDTGIKVTVEHPDKLEEKFPQVAATGDGPDIIFWAHDRFGGYAQSGLLAEITPDKAFQDKLYPFTWDAVRYNGKLIAYPIAVEALSLIYNKDLLPNPPKTWEEIPALDKELKAKGKSALMFNLQEPYFTWPLIAADGGYAFKYENGKYDIKDVGVDNAGAKAGLTFLVDLIKNKHMNADTDYSIAEAAFNKGETAMTINGPWAWSNIDTSKVNYGVTVLPTFKGQPSKPFVGVLSAGINAASPNKELAKEFLENYLLTDEGLEAVNKDKPLGAVALKSYEEELAKDPRIAATMENAQKGEIMPNIPQMSAFWYAVRTAVINAASGRQTVDEALKDAQTGGSGENLYFQSSDNGPQNQRNAPRITFGGPSDSTGSNQNGERSGARSKQRRPQGLPNNTASWFTALTQHGKEDLKFPRGQGVPINTNSSPDDQIGYYRRATRRIRGGDGKMKDLSPRWYFYYLGTGPEAGLPYGAQKDGIIWVATEGALNTPKDHIGTRNPANNAAIVLQLPQGTTLPKGFYAEGSRGGSQASSRSSSRSRNSSRNSTPGSSRGTSPARMAGNGGDAALALLLLDRLNQLESKMSGKGQQQQGQTVTKKSAAEASKKPRQKRTATKAYNVTQAFGRRGPEQTQGNFGDQELIRQGTDYKHWPQIAQFAPSASAFFGMSRIGMEVTPSGTWLTYTGAIKLDDKDPNFKDQVILLNKHIDAYKTFPPTEPKKDKKKKADETQALPQRQKKQQTVTLLPAADLDDFSKQLQQSMSSADSTQAGGSGHHHHHH

SEQ ID NO: 3353 - protein, 806 aa, Artificial Sequence
  Description of Artificial Sequence: Synthetic polypeptide
MKIEEGKLVIWINGDKGYNGLAEVGKKFEKDTGIKVTVEHPDKLEEKFPQVAATGDGPDIIFWAHDRFGGYAQSGLLAEITPDKAFQDKLYPFTWDAVRYNGKLIAYPIAVEALSLIYNKDLLPNPPKTWEEIPALDKELKAKGKSALMFNLQEPYFTWPLIAADGGYAFKYENGKYDIKDVGVDNAGAKAGLTFLVDLIKNKHMNADTDYSIAEAAFNKGETAMTINGPWAWSNIDTSKVNYGVTVLPTFKGQPSKPFVGVLSAGINAASPNKELAKEFLENYLLTDEGLEAVNKDKPLGAVALKSYEEELAKDPRIAATMENAQKGEIMPNIPQMSAFWYAVRTAVINAASGRQTVDEALKDAQTGGSGENLYFQSSDNGPQNQRNAPRITFGGPSDSTGSNQNGERSGARSKQRRPQGLPNNTASWFTALTQHGKEDLKFPRGQGVPINTNSSPDDQIGYYRRATRRIRGGDGKMKDLSPRWYFYYLGTGPEAGLPYGANKDGIIWVATEGALNTPKDHIGTRNPANNAAIVLQFPQGTTLPKGFYAEGSRGGSQASSRSSSRSRNSSRNSTPGSSRGTSPARMAGNGGDAALALLLLDRLNQLESKMSGKGQQQQGQTVTKKSAAEASKKPRQKRTATKAYNVTQAFGRRGPEQTQGNFGDQELIRQGTDYKHWPQIAQFAPSASAFFGMSRIGMEVTPSGTWLTYTGAIKLDDKDPNFKDQVILLNKHIDAYKTFPPTEPKKDKKKKADETQALPQRQKKQQTVTLLPAADLDDFSKQLQQSMSSADSTQAGGSGHHHHHH

SEQ ID NO: 3354 - protein, 806 aa, Artificial Sequence
  Description of Artificial Sequence: Synthetic polypeptide
MKIEEGKLVIWINGDKGYNGLAEVGKKFEKDTGIKVTVEHPDKLEEKFPQVAATGDGPDIIFWAHDRFGGYAQSGLLAEITPDKAFQDKLYPFTWDAVRYNGKLIAYPIAVEALSLIYNKDLLPNPPKTWEEIPALDKELKAKGKSALMFNLQEPYFTWPLIAADGGYAFKYENGKYDIKDVGVDNAGAKAGLTFLVDLIKNKHMNADTDYSIAEAAFNKGETAMTINGPWAWSNIDTSKVNYGVTVLPTFKGQPSKPFVGVLSAGINAASPNKELAKEFLENYLLTDEGLEAVNKDKPLGAVALKSYEEELAKDPRIAATMENAQKGEIMPNIPQMSAFWYAVRTAVINAASGRQTVDEALKDAQTGGSGENLYFQSSDNGPQNQRNAPRITFGGPSDSTGSNQNGERSGARSKQRRPQGLPNNTASWFTALTQHGKEDLKFPRGQGVPINTNSSPDDQIGYYRRATRRIRGGDGKMKDLSPRWYFYYLGTGPEAGLPYGANKDGIIWVATEGALNTPKDHIGTRNPANNAAIVLQLPQGTTLPKGFYAEGSRGGSQASSRSSSRSRNSSRNSTPGSSRGTSPARMAGNGGDAALALLLLDRLNQLESKMSGKGQQQQGQTVTKKSAAEASKKPRQKRTATKAYNVTQAFGRRGPEQTQGNFGDQELIRQGTDYKHWPQIAQFAPSASAFFGMSRIGMETTPSGTWLTYTGAIKLDDKDPNFKDQVILLNKHIDAYKTFPPTEPKKDKKKKADETQALPQRQKKQQTVTLLPAADLDDFSKQLQQSMSSADSTQAGGSGHHHHHH

SEQ ID NO: 3355 - protein, 806 aa, Artificial Sequence
  Description of Artificial Sequence: Synthetic polypeptide
MKIEEGKLVIWINGDKGYNGLAEVGKKFEKDTGIKVTVEHPDKLEEKFPQVAATGDGPDIIFWAHDRFGGYAQSGLLAEITPDKAFQDKLYPFTWDAVRYNGKLIAYPIAVEALSLIYNKDLLPNPPKTWEEIPALDKELKAKGKSALMFNLQEPYFTWPLIAADGGYAFKYENGKYDIKDVGVDNAGAKAGLTFLVDLIKNKHMNADTDYSIAEAAFNKGETAMTINGPWAWSNIDTSKVNYGVTVLPTFKGQPSKPFVGVLSAGINAASPNKELAKEFLENYLLTDEGLEAVNKDKPLGAVALKSYEEELAKDPRIAATMENAQKGEIMPNIPQMSAFWYAVRTAVINAASGRQTVDEALKDAQTGGSGENLYFQSSDNGPQNQRNAPRITFGGPSDSTGSNQNGERSGARSKQRRPQGLPNNTASWFTALTQHGKEDLKFPRGQGVPINTNSSPDDQIGYYRRATRRIRGGDGKMKDLSPRWYFYYLGTGPEAGLPYGANKDGIIWVATEGALNTPKDHIGTRNPANNAASVLQLPQGTTLPKGFYAEGSRGGSQASSRSSSRSRNSSRNSTPGSSRGTSPARMAGNGGDAALALLLLDRLNQLESKMSGKGQQQQGQTVTKKSAAEASKKPRQKRTATKAYNVTQAFGRRGPEQTQGNFGDQELIRQGTDYKHWPQIAQFAPSASAFFGMSRIGMEVTPSGTWLTYTGAIKLDDKDPNFKDQVILLNKHIDAYKTFPPTEPKKDKKKKADETQALPQRQKKQQTVTLLPAADLDDFSKQLQQSMSSADSTQAGGSGHHHHHH

SEQ ID NO: 3356 - protein, 806 aa, Artificial Sequence
  Description of Artificial Sequence: Synthetic polypeptide
MKIEEGKLVIWINGDKGYNGLAEVGKKFEKDTGIKVTVEHPDKLEEKFPQVAATGDGPDIIFWAHDRFGGYAQSGLLAEITPDKAFQDKLYPFTWDAVRYNGKLIAYPIAVEALSLIYNKDLLPNPPKTWEEIPALDKELKAKGKSALMFNLQEPYFTWPLIAADGGYAFKYENGKYDIKDVGVDNAGAKAGLTFLVDLIKNKHMNADTDYSIAEAAFNKGETAMTINGPWAWSNIDTSKVNYGVTVLPTFKGQPSKPFVGVLSAGINAASPNKELAKEFLENYLLTDEGLEAVNKDKPLGAVALKSYEEELAKDPRIAATMENAQKGEIMPNIPQMSAFWYAVRTAVINAASGRQTVDEALKDAQTGGSGENLYFQSSDNGPQNQRNAPRITFGGPSDSTGSNQNGERSGARSKQRRPQGLPNNTASWFTALTQHGKEDLKFPRGQGVPINTNSSPDDQIGYYRRATRRIRGGDGKMKDLSPRWYFYYLGTGPEAGLPYGANKDGIIWVATEGALNTPKDHIGTRNPANNAAIVLQLPQGTTLPKGFYAEGSRGGSQASSRSSSRSRNSSRNSTPGSSRGTSPARMAGNGGDAALALLLLDRLNQLESKMSGKGQQQQGQTVTKKSAAEASKKPRQKRTATKGYNVTQAFGRRGPEQTQGNFGDQDLIKLGTDYKHWPQIAQFAPSASAFFGMSRIGTEETPSGTWLTYTGAIKLDKKDPNFKDQVILLNKHIDAYKTFPPTEPKKDKKKKADETQALPQRQKKQQTVTLLPAADLDDFSKQLQQSMSSADSTQAGGSGHHHHHH

SEQ ID NO: 3357 - protein, 806 aa, Artificial Sequence
  Description of Artificial Sequence: Synthetic polypeptide
MKIEEGKLVIWINGDKGYNGLAEVGKKFEKDTGIKVTVEHPDKLEEKFPQVAATGDGPDIIFWAHDRFGGYAQSGLLAEITPDKAFQDKLYPFTWDAVRYNGKLIAYPIAVEALSLIYNKDLLPNPPKTWEEIPALDKELKAKGKSALMFNLQEPYFTWPLIAADGGYAFKYENGKYDIKDVGVDNAGAKAGLTFLVDLIKNKHMNADTDYSIAEAAFNKGETAMTINGPWAWSNIDTSKVNYGVTVLPTFKGQPSKPFVGVLSAGINAASPNKELAKEFLENYLLTDEGLEAVNKDKPLGAVALKSYEEELAKDPRIAATMENAQKGEIMPNIPQMSAFWYAVRTAVINAASGRQTVDEALKDAQTGGSGENLYFQSSDNGPQNQRNAPRITFGGPSDSTGSNQNGERSGARSKQRRPQGLPNNTASWFTALTQHGKEDLKFPRGQGVPINTNSSPDDQIGYYRRATRRIRGGDGKMKDLSPRWYFYYLGTGPEAGLPYGSNKDGIIWVATEGALNTPKDHIGTRNPANNAAIVLQLPQGTTLPKGFYAEGSRGGSQASSRSSSRSRNSSRNSTPGSSRGTSPARMAGNGGDAALALLLLDRLNQLESKMSGKGQQQQGQTVTKKSAAEASKKPRQKRTATKAYNVTQAFGRRGPEQTQGNFGDQELIRQGTDYKHWPQIAQFAPSASAFFGMSRIGMEVTPSGTWLTYTGAIKLDDKDPNFKDQVILLNKHIDAYKTFPPTEPKKDKKKKADETQALPQRQKKQQTVTLLPAADLDDFSKQLQQSMSSADSTQAGGSGHHHHHH

SEQ ID NO: 3358 - protein, 806 aa, Artificial Sequence
  Description of Artificial Sequence: Synthetic polypeptide
MKIEEGKLVIWINGDKGYNGLAEVGKKFEKDTGIKVTVEHPDKLEEKFPQVAATGDGPDIIFWAHDRFGGYAQSGLLAEITPDKAFQDKLYPFTWDAVRYNGKLIAYPIAVEALSLIYNKDLLPNPPKTWEEIPALDKELKAKGKSALMFNLQEPYFTWPLIAADGGYAFKYENGKYDIKDVGVDNAGAKAGLTFLVDLIKNKHMNADTDYSIAEAAFNKGETAMTINGPWAWSNIDTSKVNYGVTVLPTFKGQPSKPFVGVLSAGINAASPNKELAKEFLENYLLTDEGLEAVNKDKPLGAVALKSYEEELAKDPRIAATMENAQKGEIMPNIPQMSAFWYAVRTAVINAASGRQTVDEALKDAQTGGSGENLYFQSSDNGPQNQRNAPRITFGGPSDSTGSNQNGERSGARSKQRRPQGLPNNTASWFTALTQHGKEDLKFPRGQGVPINTNSSPDDQIGYYRRATRRIRGGDGKMKDLSPRWYFYYLGTGPEAGLPYGANKDGIIWVATEGALNTPKDHIGTRNPANNAAIVLQLPQGTTLPKGFYAEGSRGGSQASSRSSSRSRNSSRNSTPGSSRGTSPARMAGNGGDAALALLLLDRLNQLESKMSGKGQQQQGQTVTKKSAAEASKKPRQKRTATKAYNVTQAFGRRGPEQTQGNFGDQELIRQGTDYKHWPQIAQFAPSASAFFGMSRIGMEVTPSGTWLTYTGAIKLDKKDPNFKDQVILLNKHIDAYKTFPPTEPKKDKKKKADETQALPQRQKKQQTVTLLPAADLDDFSKQLQQSMSSADSTQAGGSGHHHHHH

SEQ ID NO: 3359 - protein, 806 aa, Artificial Sequence
  Description of Artificial Sequence: Synthetic polypeptide
MKIEEGKLVIWINGDKGYNGLAEVGKKFEKDTGIKVTVEHPDKLEEKFPQVAATGDGPDIIFWAHDRFGGYAQSGLLAEITPDKAFQDKLYPFTWDAVRYNGKLIAYPIAVEALSLIYNKDLLPNPPKTWEEIPALDKELKAKGKSALMFNLQEPYFTWPLIAADGGYAFKYENGKYDIKDVGVDNAGAKAGLTFLVDLIKNKHMNADTDYSIAEAAFNKGETAMTINGPWAWSNIDTSKVNYGVTVLPTFKGQPSKPFVGVLSAGINAASPNKELAKEFLENYLLTDEGLEAVNKDKPLGAVALKSYEEELAKDPRIAATMENAQKGEIMPNIPQMSAFWYAVRTAVINAASGRQTVDEALKDAQTGGSGENLYFQSSDNGPQNQRNAPRITFGGPSDSTGSNQNGERSGARSKQRRPQGLPNNTASWFTALTQHGKEDLKFPRGQGVPINTNSSPDDQIGYYRRATRRIRGGDGKMKDLSPRWYFYYLGTGPEAGLPYGANKDGIIWVATEGALNTPKDHIGTRNPANNAAIVLQLPQGTTLPKGFYAEGSRGGSQASSRSSSRSRNSSRNSTPGSSRGTSPARMAGNGGDAALALLLLDRLNQLESKMSGKGQQQQGQTVTKKSAAEASKKPRQKRTATKGYNVTQAFGRRGPEQTQGNFGDQELIRQGTDYKHWPQIAQFAPSASAFFGMSRIGMEVTPSGTWLTYTGAIKLDDKDPNFKDQVILLNKHIDAYKTFPPTEPKKDKKKKADETQALPQRQKKQQTVTLLPAADLDDFSKQLQQSMSSADSTQAGGSGHHHHHH

SEQ ID NO: 3360 - protein, 806 aa, Artificial Sequence
  Description of Artificial Sequence: Synthetic polypeptide
MKIEEGKLVIWINGDKGYNGLAEVGKKFEKDTGIKVTVEHPDKLEEKFPQVAATGDGPDIIFWAHDRFGGYAQSGLLAEITPDKAFQDKLYPFTWDAVRYNGKLIAYPIAVEALSLIYNKDLLPNPPKTWEEIPALDKELKAKGKSALMFNLQEPYFTWPLIAADGGYAFKYENGKYDIKDVGVDNAGAKAGLTFLVDLIKNKHMNADTDYSIAEAAFNKGETAMTINGPWAWSNIDTSKVNYGVTVLPTFKGQPSKPFVGVLSAGINAASPNKELAKEFLENYLLTDEGLEAVNKDKPLGAVALKSYEEELAKDPRIAATMENAQKGEIMPNIPQMSAFWYAVRTAVINAASGRQTVDEALKDAQTGGSGENLYFQSSDNGPQNQRNAPRITFGGPSDSTGSNQNGERSGARSKQRRPQGLPNNTASWFTALTQHGKEDLKFPRGQGVPINTNSSPDDQIGYYRRKTRRIRGGDGKMKDLSPRWYFYYLGTGPEAGLPYGANKDGIIWVATEGALNTPKDHIGTRNPANNAAIVLQLPQGTTLPKGFYAEGSRGGSQASSRSSSRSRNSSRNSTPGSSRGTSPARMAGNGGDAALALLLLDRLNQLESKMSGKGQQQQGQTVTKKSAAEASKKPRQKRTATKAYNVTQAFGRRGPEQTQGNFGDQELIRQGTDYKHWPQIAQFAPSASAFFGMSRIGMEVTPSGTWLTYTGAIKLDDKDPNFKDQVILLNKHIDAYKTFPPTEPKKDKKKKADETQALPQRQKKQQTVTLLPAADLDDFSKQLQQSMSSADSTQAGGSGHHHHHH

SEQ ID NO: 3361 - protein, 806 aa, Artificial Sequence
  Description of Artificial Sequence: Synthetic polypeptide
MKIEEGKLVIWINGDKGYNGLAEVGKKFEKDTGIKVTVEHPDKLEEKFPQVAATGDGPDIIFWAHDRFGGYAQSGLLAEITPDKAFQDKLYPFTWDAVRYNGKLIAYPIAVEALSLIYNKDLLPNPPKTWEEIPALDKELKAKGKSALMFNLQEPYFTWPLIAADGGYAFKYENGKYDIKDVGVDNAGAKAGLTFLVDLIKNKHMNADTDYSIAEAAFNKGETAMTINGPWAWSNIDTSKVNYGVTVLPTFKGQPSKPFVGVLSAGINAASPNKELAKEFLENYLLTDEGLEAVNKDKPLGAVALKSYEEELAKDPRIAATMENAQKGEIMPNIPQMSAFWYAVRTAVINAASGRQTVDEALKDAQTGGSGENLYFQSSDNGPQNQRNAPRITFGGPSDSTGSNQNGERSGARSKQRRPQGLPNNTASWFTALTQHGKEDLKFPRGQGVPINTNSSPDDQIGYYRRATRRIRGGDGKMKDLSPRWYFYYLGTGPEAGLPYGANKDGIIWVATEGALNTPKDHIGTRNPANNAAIALQLPQGTTLPKGFYAEGSRGGSQASSRSSSRSRNSSRNSTPGSSRGTSPARMAGNGGDAALALLLLDRLNQLESKMSGKGQQQQGQTVTKKSAAEASKKPRQKRTATKAYNVTQAFGRRGPEQTQGNFGDQELIRQGTDYKHWPQIAQFAPSASAFFGMSRIGMEVTPSGTWLTYTGAIKLDDKDPNFKDQVILLNKHIDAYKTFPPTEPKKDKKKKADETQALPQRQKKQQTVTLLPAADLDDFSKQLQQSMSSADSTQAGGSGHHHHHH

SEQ ID NO: 3362 - protein, 806 aa, Artificial Sequence
  Description of Artificial Sequence: Synthetic polypeptide
MKIEEGKLVIWINGDKGYNGLAEVGKKFEKDTGIKVTVEHPDKLEEKFPQVAATGDGPDIIFWAHDRFGGYAQSGLLAEITPDKAFQDKLYPFTWDAVRYNGKLIAYPIAVEALSLIYNKDLLPNPPKTWEEIPALDKELKAKGKSALMFNLQEPYFTWPLIAADGGYAFKYENGKYDIKDVGVDNAGAKAGLTFLVDLIKNKHMNADTDYSIAEAAFNKGETAMTINGPWAWSNIDTSKVNYGVTVLPTFKGQPSKPFVGVLSAGINAASPNKELAKEFLENYLLTDEGLEAVNKDKPLGAVALKSYEEELAKDPRIAATMENAQKGEIMPNIPQMSAFWYAVRTAVINAASGRQTVDEALKDAQTGGSGENLYFQSSDNGPQNQRNAPRITFGGPSDSTGSNQNGERSGARSKQRRPQGLPNNTASWFTALTQHGKEDLKFPRGQGVPINTNSSPDDQIGYYRRATRRIRGGDGKMKDLSPRWYFYYLGTGPEAGLPYGANKDGIIWVATEGALNTPKDHIGTRNPANNAAIVIQLPQGTTLPKGFYAEGSRGGSQASSRSSSRSRNSSRNSTPGSSRGTSPARMAGNGGDAALALLLLDRLNQLESKMSGKGQQQQGQTVTKKSAAEASKKPRQKRTATKAYNVTQAFGRRGPEQTQGNFGDQELIRQGTDYKHWPQIAQFAPSASAFFGMSRIGMEVTPSGTWLTYTGAIKLDDKDPNFKDQVILLNKHIDAYKTFPPTEPKKDKKKKADETQALPQRQKKQQTVTLLPAADLDDFSKQLQQSMSSADSTQAGGSGHHHHHH

SEQ ID NO: 3363 - protein, 806 aa, Artificial Sequence
  Description of Artificial Sequence: Synthetic polypeptide
MKIEEGKLVIWINGDKGYNGLAEVGKKFEKDTGIKVTVEHPDKLEEKFPQVAATGDGPDIIFWAHDRFGGYAQSGLLAEITPDKAFQDKLYPFTWDAVRYNGKLIAYPIAVEALSLIYNKDLLPNPPKTWEEIPALDKELKAKGKSALMFNLQEPYFTWPLIAADGGYAFKYENGKYDIKDVGVDNAGAKAGLTFLVDLIKNKHMNADTDYSIAEAAFNKGETAMTINGPWAWSNIDTSKVNYGVTVLPTFKGQPSKPFVGVLSAGINAASPNKELAKEFLENYLLTDEGLEAVNKDKPLGAVALKSYEEELAKDPRIAATMENAQKGEIMPNIPQMSAFWYAVRTAVINAASGRQTVDEALKDAQTGGSGENLYFQSSDNGPQNQRNAPRITFGGPSDSTGSNQNGERSGARSKQRRPQGLPNNTASWFTALTQHGKEDLKFPRGQGVPINTNSSPDDQIGYYRRATRRIRGGDGKMKDLSPRWFFYYLGTGPEAGLPYGANKDGIIWVATEGALNTPKDHIGTRNPANNAAIVLQLPQGTTLPKGFYAEGSRGGSQASSRSSSRSRNSSRNSTPGSSRGTSPARMAGNGGDAALALLLLDRLNQLESKMSGKGQQQQGQTVTKKSAAEASKKPRQKRTATKAYNVTQAFGRRGPEQTQGNFGDQELIRQGTDYKHWPQIAQFAPSASAFFGMSRIGMEVTPSGTWLTYTGAIKLDDKDPNFKDQVILLNKHIDAYKTFPPTEPKKDKKKKADETQALPQRQKKQQTVTLLPAADLDDFSKQLQQSMSSADSTQAGGSGHHHHHH

SEQ ID NO: 3364 - protein, 806 aa, Artificial Sequence
  Description of Artificial Sequence: Synthetic polypeptide
MKIEEGKLVIWINGDKGYNGLAEVGKKFEKDTGIKVTVEHPDKLEEKFPQVAATGDGPDIIFWAHDRFGGYAQSGLLAEITPDKAFQDKLYPFTWDAVRYNGKLIAYPIAVEALSLIYNKDLLPNPPKTWEEIPALDKELKAKGKSALMFNLQEPYFTWPLIAADGGYAFKYENGKYDIKDVGVDNAGAKAGLTFLVDLIKNKHMNADTDYSIAEAAFNKGETAMTINGPWAWSNIDTSKVNYGVTVLPTFKGQPSKPFVGVLSAGINAASPNKELAKEFLENYLLTDEGLEAVNKDKPLGAVALKSYEEELAKDPRIAATMENAQKGEIMPNIPQMSAFWYAVRTAVINAASGRQTVDEALKDAQTGGSGENLYFQSSDNGPQNQRNAPRITFGGPSDSTGSNQNGERSGARSKQRRPQGLPNNTASWFTGLTQHGKEDLKFPPGQGVPINTNSSPDDQIGYYRRATRRIRGGDGKMKDLPPRWYFYYLGTGPEADLPYGAVKDGIFWVAEEGALNTPKDHIGTRNPANNAAIPLQLPPGTTLPKGFYAEGSRGGSQASSRSSSRSRNSSRNSTPGSSRGTSPARMAGNGGDAALALLLLDRLNQLESKMSGKGQQQQGQTVTKKSAAEASKKPRQKRTATKAYNVTQAFGRRGPEQTQGNFGDQELIRQGTDYKHWPQIAQFAPSASAFFGMSRIGMEVTPSGTWLTYTGAIKLDDKDPNFKDQVILLNKHIDAYKTFPPTEPKKDKKKKADETQALPQRQKKQQTVTLLPAADLDDFSKQLQQSMSSADSTQAGGSGHHHHHH

SEQ ID NO: 3365 - protein, 806 aa, Artificial Sequence
  Description of Artificial Sequence: Synthetic polypeptide
MKIEEGKLVIWINGDKGYNGLAEVGKKFEKDTGIKVTVEHPDKLEEKFPQVAATGDGPDIIFWAHDRFGGYAQSGLLAEITPDKAFQDKLYPFTWDAVRYNGKLIAYPIAVEALSLIYNKDLLPNPPKTWEEIPALDKELKAKGKSALMFNLQEPYFTWPLIAADGGYAFKYENGKYDIKDVGVDNAGAKAGLTFLVDLIKNKHMNADTDYSIAEAAFNKGETAMTINGPWAWSNIDTSKVNYGVTVLPTFKGQPSKPFVGVLSAGINAASPNKELAKEFLENYLLTDEGLEAVNKDKPLGAVALKSYEEELAKDPRIAATMENAQKGEIMPNIPQMSAFWYAVRTAVINAASGRQTVDEALKDAQTGGSGENLYFQSSDNGPQNQRNAPRITFGGPSDSTGSNQNGERSGARSKQRRPQGLPNNTASWFTALTQHGKEDLKFPRGQGVPINTNSSPDDQIGYYRRATRRIRGGDGKMKDLSPRWYFYYLGTGPHAGLPYGANKDGIIWVATEGALNTPKDHIGTRNPANNAAIVLQLPQGTTLPKGFYAEGSRGGSQASSRSSSRSRNSSRNSTPGSSRGTSPARMAGNGGDAALALLLLDRLNQLESKMSGKGQQQQGQTVTKKSAAEASKKPRQKRTATKAYNVTQAFGRRGPEQTQGNFGDQELIRQGTDYKHWPQIAQFAPSASAFFGMSRIGMEVTPSGTWLTYTGAIKLDDKDPNFKDQVILLNKHIDAYKTFPPTEPKKDKKKKADETQALPQRQKKQQTVTLLPAADLDDFSKQLQQSMSSADSTQAGGSGHHHHHH

SEQ ID NO: 3366 - protein, 806 aa, Artificial Sequence
  Description of Artificial Sequence: Synthetic polypeptide
MKIEEGKLVIWINGDKGYNGLAEVGKKFEKDTGIKVTVEHPDKLEEKFPQVAATGDGPDIIFWAHDRFGGYAQSGLLAEITPDKAFQDKLYPFTWDAVRYNGKLIAYPIAVEALSLIYNKDLLPNPPKTWEEIPALDKELKAKGKSALMFNLQEPYFTWPLIAADGGYAFKYENGKYDIKDVGVDNAGAKAGLTFLVDLIKNKHMNADTDYSIAEAAFNKGETAMTINGPWAWSNIDTSKVNYGVTVLPTFKGQPSKPFVGVLSAGINAASPNKELAKEFLENYLLTDEGLEAVNKDKPLGAVALKSYEEELAKDPRIAATMENAQKGEIMPNIPQMSAFWYAVRTAVINAASGRQTVDEALKDAQTGGSGENLYFQSSDNGPQNQRNAPRITFGGPSDSTGSNQNGERSGARSKQRRPQGLPNNTASWFTALTQHGKEDLKFPRGQGVPINTNSSPDDQIGYYRRATRRIRGGDGKMKDLSPRWYFYYLGTGPEAGLPYGANKDGIIWVATEGALNTPKDHIGTRNPANNAAIVLQLPQGTTLPKGFYAEGSRGGSQASSRSSSRSRNSSRNSTPGSSRGTSPARMAGNGGDAALALLLLDRLNQLESKMSGKGQQQQGQTVTKKSAAEASKKPRQKRTATKGYNVTQAFGRRGPEQTQGNFGDQDLIRLGTDYKHWPQIAQFAPSASAFFGMSRIGMEVTPSGTWLTYTGAIKLDDKDPNFKDQVILLNKHIDAYKTFPPTEPKKDKKKKADETQALPQRQKKQQTVTLLPAADLDDFSKQLQQSMSSADSTQAGGSGHHHHHH

SEQ ID NO: 3367 - protein, 806 aa, Artificial Sequence
  Description of Artificial Sequence: Synthetic polypeptide
MKIEEGKLVIWINGDKGYNGLAEVGKKFEKDTGIKVTVEHPDKLEEKFPQVAATGDGPDIIFWAHDRFGGYAQSGLLAEITPDKAFQDKLYPFTWDAVRYNGKLIAYPIAVEALSLIYNKDLLPNPPKTWEEIPALDKELKAKGKSALMFNLQEPYFTWPLIAADGGYAFKYENGKYDIKDVGVDNAGAKAGLTFLVDLIKNKHMNADTDYSIAEAAFNKGETAMTINGPWAWSNIDTSKVNYGVTVLPTFKGQPSKPFVGVLSAGINAASPNKELAKEFLENYLLTDEGLEAVNKDKPLGAVALKSYEEELAKDPRIAATMENAQKGEIMPNIPQMSAFWYAVRTAVINAASGRQTVDEALKDAQTGGSGENLYFQSSDNGPQNQRNAPRITFGGPSDSTGSNQNGERSGARSKQRRPQGLPNNTASWFTPLVQFGKEDLKFPPGQGVPINTNSSPDDQIGYYRRATRRIRGGDGKMKDLPPKWYFYYLGTGPHADLPYGQKKDGVVWVARPGALNTPKDHIGTRNPANNAAIPLQLPPGTKLPKGFYAEGSRGGSQASSRSSSRSRNSSRNSTPGSSRGTSPARMAGNGGDAALALLLLDRLNQLESKMSGKGQQQQGQTVTKKSAAEASKKPRQKRTATKAYNVTQAFGRRGPEQTQGNFGDQELIRQGTDYKHWPQIAQFAPSASAFFGMSRIGMEVTPSGTWLTYTGAIKLDDKDPNFKDQVILLNKHIDAYKTFPPTEPKKDKKKKADETQALPQRQKKQQTVTLLPAADLDDFSKQLQQSMSSADSTQAGGSGHHHHHH

SEQ ID NO: 3368 - protein, 806 aa, Artificial Sequence
  Description of Artificial Sequence: Synthetic polypeptide
MKIEEGKLVIWINGDKGYNGLAEVGKKFEKDTGIKVTVEHPDKLEEKFPQVAATGDGPDIIFWAHDRFGGYAQSGLLAEITPDKAFQDKLYPFTWDAVRYNGKLIAYPIAVEALSLIYNKDLLPNPPKTWEEIPALDKELKAKGKSALMFNLQEPYFTWPLIAADGGYAFKYENGKYDIKDVGVDNAGAKAGLTFLVDLIKNKHMNADTDYSIAEAAFNKGETAMTINGPWAWSNIDTSKVNYGVTVLPTFKGQPSKPFVGVLSAGINAASPNKELAKEFLENYLLTDEGLEAVNKDKPLGAVALKSYEEELAKDPRIAATMENAQKGEIMPNIPQMSAFWYAVRTAVINAASGRQTVDEALKDAQTGGSGENLYFQSSDNGPQNQRNAPRITFGGPSDSTGSNQNGERSGARSKQRRPQGLPNNTASWFTALTQHGKEDLKFPRGQGVPINTNSSPDDQIGYYRRATRRIRGGDGKMKDLSPRWYFYYLGTGPEAGLPYGANKDGIIWVATEGALNTPKDHIGTRNPANNAAIVLQLPQGTTLPKGFYAEGSRGGSQASSRSSSRSRNSSRNSTPGSSRGTSPARMAGNGGDAALALLLLDRLNQLESKMSGKGQQQQGQTVTKKSAAEASKKPRQKRTATKAYNVTQAFGRRGPEQTQGNFGDQELIRQGTDYKHWPQIAQFAPSASAFFGMSRIGMEVTPSGTWLTYTGAIKLDDKDPNFKDQVELLNKHIDAYKTFPPTEPKKDKKKKADETQALPQRQKKQQTVTLLPAADLDDFSKQLQQSMSSADSTQAGGSGHHHHHH

SEQ ID NO: 3369 - protein, 806 aa, Artificial Sequence
  Description of Artificial Sequence: Synthetic polypeptide
MKIEEGKLVIWINGDKGYNGLAEVGKKFEKDTGIKVTVEHPDKLEEKFPQVAATGDGPDIIFWAHDRFGGYAQSGLLAEITPDKAFQDKLYPFTWDAVRYNGKLIAYPIAVEALSLIYNKDLLPNPPKTWEEIPALDKELKAKGKSALMFNLQEPYFTWPLIAADGGYAFKYENGKYDIKDVGVDNAGAKAGLTFLVDLIKNKHMNADTDYSIAEAAFNKGETAMTINGPWAWSNIDTSKVNYGVTVLPTFKGQPSKPFVGVLSAGINAASPNKELAKEFLENYLLTDEGLEAVNKDKPLGAVALKSYEEELAKDPRIAATMENAQKGEIMPNIPQMSAFWYAVRTAVINAASGRQTVDEALKDAQTGGSGENLYFQSSDNGPQNQRNAPRITFGGPSDSTGSNQNGERSGARSKQRRPQGLPNNTASWFTALTQHGKEDLKFPRGQGVPINTNSSPDDQIGYYRRATRRIRGGDGKMKDLSPRWYFYYLGTGPEAGLPYGANKDGIIWVATEGALNTPKDHIGTRNPANNAAIVLQLPQGTTLPKGFYAEGSRGGSQASSRSSERSRNSSRNSTPGEERGTSPARMAGNGGDAALALLLLDRLNQLESKMSGKGQQQQGQTVTKKSAAEASKKPRQKRTATKAYNVTQAFGRRGPEQTQGNFGDQELIRQGTDYKHWPQIAQFAPSASAFFGMSRIGMEVTPSGTWLTYTGAIKLDDKDPNFKDQVILLNKHIDAYKTFPPTEPKKDKKKKADETQALPQRQKKQQTVTLLPAADLDDFSKQLQQSMSSADSTQAGGSGHHHHHH

SEQ ID NO: 3370 - protein, 806 aa, Artificial Sequence
  Description of Artificial Sequence: Synthetic polypeptide
MKIEEGKLVIWINGDKGYNGLAEVGKKFEKDTGIKVTVEHPDKLEEKFPQVAATGDGPDIIFWAHDRFGGYAQSGLLAEITPDKAFQDKLYPFTWDAVRYNGKLIAYPIAVEALSLIYNKDLLPNPPKTWEEIPALDKELKAKGKSALMFNLQEPYFTWPLIAADGGYAFKYENGKYDIKDVGVDNAGAKAGLTFLVDLIKNKHMNADTDYSIAEAAFNKGETAMTINGPWAWSNIDTSKVNYGVTVLPTFKGQPSKPFVGVLSAGINAASPNKELAKEFLENYLLTDEGLEAVNKDKPLGAVALKSYEEELAKDPRIAATMENAQKGEIMPNIPQMSAFWYAVRTAVINAASGRQTVDEALKDAQTGGSGENLYFQSSDNGPQNQRNAPRITFGGPSDSTGSNQNGERSGARSKQRRPQGLPNNTASWFTPLTQHGKEDLKFPPGQGVPINTNSSPDDQIGYYRRATRRIRGGDGKMKDLPPRWYFYYLGTGPEADLPYGAVKDGIFWVAEEGALNTPKDHIGTRNPANNAAIPLQLPPGTTLPKGFYAEGSRGGSQASSRSSSRSRNSSRNSTPGSSRGTSPARMAGNGGDAALALLLLDRLNQLESKMSGKGQQQQGQTVTKKSAAEASKKPRQKRTATKAYNVTQAFGRRGPEQTQGNFGDQELIRQGTDYKHWPQIAQFAPSASAFFGMSRIGMEVTPSGTWLTYTGAIKLDDKDPNFKDQVILLNKHIDAYKTFPPTEPKKDKKKKADETQALPQRQKKQQTVTLLPAADLDDFSKQLQQSMSSADSTQAGGSGHHHHHH

SEQ ID NO: 3371 - protein, 806 aa, Artificial Sequence
  Description of Artificial Sequence: Synthetic polypeptide
MKIEEGKLVIWINGDKGYNGLAEVGKKFEKDTGIKVTVEHPDKLEEKFPQVAATGDGPDIIFWAHDRFGGYAQSGLLAEITPDKAFQDKLYPFTWDAVRYNGKLIAYPIAVEALSLIYNKDLLPNPPKTWEEIPALDKELKAKGKSALMFNLQEPYFTWPLIAADGGYAFKYENGKYDIKDVGVDNAGAKAGLTFLVDLIKNKHMNADTDYSIAEAAFNKGETAMTINGPWAWSNIDTSKVNYGVTVLPTFKGQPSKPFVGVLSAGINAASPNKELAKEFLENYLLTDEGLEAVNKDKPLGAVALKSYEEELAKDPRIAATMENAQKGEIMPNIPQMSAFWYAVRTAVINAASGRQTVDEALKDAQTGGSGENLYFQSSDNGPQNQRNAPRITFGGPSDSTGSNQNGERSGARSKQRRPQGLPNNTASWFTALTQHGKEDLKFPRGQGWPINTNSSPDDQIGYYRRATRRIRGGDGKMKDLSPRWYFYYLGTGPEAGLPYGANKDGIIWVATEGALNTPKDHIGTRNPANNAAIVLQLPQGTTLPKGFYAEGSRGGSQASSRSSSRSRNSSRNSTPGSSRGTSPARMAGNGGDAALALLLLDRLNQLESKMSGKGQQQQGQTVTKKSAAEASKKPRQKRTATKAYNVTQAFGRRGPEQTQGNFGDQELIRQGTDYKHWPQIAQFAPSASAFFGMSRIGMEVTPSGTWLTYTGAIKLDDKDPNFKDQVILLNKHIDAYKTFPPTEPKKDKKKKADETQALPQRQKKQQTVTLLPAADLDDFSKQLQQSMSSADSTQAGGSGHHHHHH

SEQ ID NO: 3372 - protein, 806 aa, Artificial Sequence
  Description of Artificial Sequence: Synthetic polypeptide
MKIEEGKLVIWINGDKGYNGLAEVGKKFEKDTGIKVTVEHPDKLEEKFPQVAATGDGPDIIFWAHDRFGGYAQSGLLAEITPDKAFQDKLYPFTWDAVRYNGKLIAYPIAVEALSLIYNKDLLPNPPKTWEEIPALDKELKAKGKSALMFNLQEPYFTWPLIAADGGYAFKYENGKYDIKDVGVDNAGAKAGLTFLVDLIKNKHMNADTDYSIAEAAFNKGETAMTINGPWAWSNIDTSKVNYGVTVLPTFKGQPSKPFVGVLSAGINAASPNKELAKEFLENYLLTDEGLEAVNKDKPLGAVALKSYEEELAKDPRIAATMENAQKGEIMPNIPQMSAFWYAVRTAVINAASGRQTVDEALKDAQTGGSGENLYFQSSDNGPQNQRNAPRITFGGPSDSTGSNQNGERSGARSKQRRPQGLPNNTASWFTALTQHGKEDLKFPRGQGVPINTNSSPDDQIGYYRRATRRIRGGDGKMKDLSPRWYFYYLGTGPEAGLPYGANKDGIIWVATEGALNTPKDHIGTRNPANNAAISLQLPQGTTLPKGFYAEGSRGGSQASSRSSSRSRNSSRNSTPGSSRGTSPARMAGNGGDAALALLLLDRLNQLESKMSGKGQQQQGQTVTKKSAAEASKKPRQKRTATKAYNVTQAFGRRGPEQTQGNFGDQELIRQGTDYKHWPQIAQFAPSASAFFGMSRIGMEVTPSGTWLTYTGAIKLDDKDPNFKDQVILLNKHIDAYKTFPPTEPKKDKKKKADETQALPQRQKKQQTVTLLPAADLDDFSKQLQQSMSSADSTQAGGSGHHHHHH

SEQ ID NO: 3373 - protein, 806 aa, Artificial Sequence
  Description of Artificial Sequence: Synthetic polypeptide
MKIEEGKLVIWINGDKGYNGLAEVGKKFEKDTGIKVTVEHPDKLEEKFPQVAATGDGPDIIFWAHDRFGGYAQSGLLAEITPDKAFQDKLYPFTWDAVRYNGKLIAYPIAVEALSLIYNKDLLPNPPKTWEEIPALDKELKAKGKSALMFNLQEPYFTWPLIAADGGYAFKYENGKYDIKDVGVDNAGAKAGLTFLVDLIKNKHMNADTDYSIAEAAFNKGETAMTINGPWAWSNIDTSKVNYGVTVLPTFKGQPSKPFVGVLSAGINAASPNKELAKEFLENYLLTDEGLEAVNKDKPLGAVALKSYEEELAKDPRIAATMENAQKGEIMPNIPQMSAFWYAVRTAVINAASGRQTVDEALKDAQTGGSGENLYFQSSDNGPQNQRNAPRITFGGPSDSTGSNQNGERSGARSKQRRPQGLPNNTASWFTALTQHGKEDLKFPRGQGVPINTNSSPDDQIGYYRRATRRIRGGDGKMKDLSPRWYFYYLGTGPEAGLPYGANKDGIIWVATEGALNTPKDHIGTRNPANNAAEVLQLPQGTTLPKGFYAEGSRGGSQASSRSSSRSRNSSRNSTPGSSRGTSPARMAGNGGDAALALLLLDRLNQLESKMSGKGQQQQGQTVTKKSAAEASKKPRQKRTATKAYNVTQAFGRRGPEQTQGNFGDQELIRQGTDYKHWPQIAQFAPSASAFFGMSRIGMEVTPSGTWLTYTGAIKLDDKDPNFKDQVILLNKHIDAYKTFPPTEPKKDKKKKADETQALPQRQKKQQTVTLLPAADLDDFSKQLQQSMSSADSTQAGGSGHHHHHH

SEQ ID NO: 3374 - protein, 806 aa, Artificial Sequence
  Description of Artificial Sequence: Synthetic polypeptide
MKIEEGKLVIWINGDKGYNGLAEVGKKFEKDTGIKVTVEHPDKLEEKFPQVAATGDGPDIIFWAHDRFGGYAQSGLLAEITPDKAFQDKLYPFTWDAVRYNGKLIAYPIAVEALSLIYNKDLLPNPPKTWEEIPALDKELKAKGKSALMFNLQEPYFTWPLIAADGGYAFKYENGKYDIKDVGVDNAGAKAGLTFLVDLIKNKHMNADTDYSIAEAAFNKGETAMTINGPWAWSNIDTSKVNYGVTVLPTFKGQPSKPFVGVLSAGINAASPNKELAKEFLENYLLTDEGLEAVNKDKPLGAVALKSYEEELAKDPRIAATMENAQKGEIMPNIPQMSAFWYAVRTAVINAASGRQTVDEALKDAQTGGSGENLYFQSSDNGPQNQRNAPRITFGGPSDSTGSNQNGERSGARSKQRRPQGLPNNTASWFTALTQHGKEDLKFPRGQGVPINTNSSPDDQIGYYRRATRRIRGGDGKMKDLSPRWYFYYLGTGPEAGLPYGANKDGIFWVATEGALNTPKDHIGTRNPANNAAIVLQLPQGTTLPKGFYAEGSRGGSQASSRSSSRSRNSSRNSTPGSSRGTSPARMAGNGGDAALALLLLDRLNQLESKMSGKGQQQQGQTVTKKSAAEASKKPRQKRTATKAYNVTQAFGRRGPEQTQGNFGDQELIRQGTDYKHWPQIAQFAPSASAFFGMSRIGMEVTPSGTWLTYTGAIKLDDKDPNFKDQVILLNKHIDAYKTFPPTEPKKDKKKKADETQALPQRQKKQQTVTLLPAADLDDFSKQLQQSMSSADSTQAGGSGHHHHHH

SEQ ID NO: 3375 - protein, 806 aa, Artificial Sequence
  Description of Artificial Sequence: Synthetic polypeptide
MKIEEGKLVIWINGDKGYNGLAEVGKKFEKDTGIKVTVEHPDKLEEKFPQVAATGDGPDIIFWAHDRFGGYAQSGLLAEITPDKAFQDKLYPFTWDAVRYNGKLIAYPIAVEALSLIYNKDLLPNPPKTWEEIPALDKELKAKGKSALMFNLQEPYFTWPLIAADGGYAFKYENGKYDIKDVGVDNAGAKAGLTFLVDLIKNKHMNADTDYSIAEAAFNKGETAMTINGPWAWSNIDTSKVNYGVTVLPTFKGQPSKPFVGVLSAGINAASPNKELAKEFLENYLLTDEGLEAVNKDKPLGAVALKSYEEELAKDPRIAATMENAQKGEIMPNIPQMSAFWYAVRTAVINAASGRQTVDEALKDAQTGGSGENLYFQSSDNGPQNQRNAPRITFGGPSDSTGSNQNGERSGARSKQRRPQGLPNNTASWFTALTQHGKEDLKFPRGQGVPINTNSSPDDQIGYYRRATRRIRGGDGKMKDLSPRWYFYYLGTGPEAGLPYGANKDGIIWVATEGALNTPKDHIGTRNPANNAAIVLQLPQGTTLPKGFYAEGSRGGSQASSRSSSRSRNSSRNSTPGSSRGTSPARMAGNGGDAALALLLLDRLNQLESKMSGKGQQQQGQTVTKKSAAEASKKPRQKRTATKAYNVTQAFGRRGPEQTQGNFGDQELIRQGTDYKHWPQIAQFAPSASAFFGMSRIGMEVNPSGTWLTYTGAIKLDDKDPNFKDQVILLNKHIDAYKTFPPTEPKKDKKKKADETQALPQRQKKQQTVTLLPAADLDDFSKQLQQSMSSADSTQAGGSGHHHHHH

SEQ ID NO: 3376 - protein, 806 aa, Artificial Sequence
  Description of Artificial Sequence: Synthetic polypeptide
MKIEEGKLVIWINGDKGYNGLAEVGKKFEKDTGIKVTVEHPDKLEEKFPQVAATGDGPDIIFWAHDRFGGYAQSGLLAEITPDKAFQDKLYPFTWDAVRYNGKLIAYPIAVEALSLIYNKDLLPNPPKTWEEIPALDKELKAKGKSALMFNLQEPYFTWPLIAADGGYAFKYENGKYDIKDVGVDNAGAKAGLTFLVDLIKNKHMNADTDYSIAEAAFNKGETAMTINGPWAWSNIDTSKVNYGVTVLPTFKGQPSKPFVGVLSAGINAASPNKELAKEFLENYLLTDEGLEAVNKDKPLGAVALKSYEEELAKDPRIAATMENAQKGEIMPNIPQMSAFWYAVRTAVINAASGRQTVDEALKDAQTGGSGENLYFQSSDNGPQNQRNAPRITFGGPSDSTGSNQNGERSGARSKQRRPQGLPNNTASWFTALTQHGKEDLKFPRGQGVPINTNSSPDDQIGYYRRATRRIRGGDGKMKDLAPRWYFYYLGTGPEAGLPYGANKDGIIWVATEGALNTPKDHIGTRNPANNAAIVLQLPQGTTLPKGFYAEGSRGGSQASSRSSSRSRNSSRNSTPGSSRGTSPARMAGNGGDAALALLLLDRLNQLESKMSGKGQQQQGQTVTKKSAAEASKKPRQKRTATKAYNVTQAFGRRGPEQTQGNFGDQELIRQGTDYKHWPQIAQFAPSASAFFGMSRIGMEVTPSGTWLTYTGAIKLDDKDPNFKDQVILLNKHIDAYKTFPPTEPKKDKKKKADETQALPQRQKKQQTVTLLPAADLDDFSKQLQQSMSSADSTQAGGSGHHHHHH

SEQ ID NO: 3377 - protein, 806 aa, Artificial Sequence
  Description of Artificial Sequence: Synthetic polypeptide
MKIEEGKLVIWINGDKGYNGLAEVGKKFEKDTGIKVTVEHPDKLEEKFPQVAATGDGPDIIFWAHDRFGGYAQSGLLAEITPDKAFQDKLYPFTWDAVRYNGKLIAYPIAVEALSLIYNKDLLPNPPKTWEEIPALDKELKAKGKSALMFNLQEPYFTWPLIAADGGYAFKYENGKYDIKDVGVDNAGAKAGLTFLVDLIKNKHMNADTDYSIAEAAFNKGETAMTINGPWAWSNIDTSKVNYGVTVLPTFKGQPSKPFVGVLSAGINAASPNKELAKEFLENYLLTDEGLEAVNKDKPLGAVALKSYEEELAKDPRIAATMENAQKGEIMPNIPQMSAFWYAVRTAVINAASGRQTVDEALKDAQTGGSGENLYFQSSDNGPQNQRNAPRITFGGPSDSTGSNQNGERSGARSKQRRPQGLPNNTASWFTALTQHGKEDLKFPRGQGVPINTNSSPDDQIGYYRRATRRIRGGDGKMKDLSPRWYFYYLGTGPEAGLPYGHNKDGIIWVATEGALNTPKDHIGTRNPANNAAIVLQLPQGTTLPKGFYAEGSRGGSQASSRSSSRSRNSSRNSTPGSSRGTSPARMAGNGGDAALALLLLDRLNQLESKMSGKGQQQQGQTVTKKSAAEASKKPRQKRTATKAYNVTQAFGRRGPEQTQGNFGDQELIRQGTDYKHWPQIAQFAPSASAFFGMSRIGMEVTPSGTWLTYTGAIKLDDKDPNFKDQVILLNKHIDAYKTFPPTEPKKDKKKKADETQALPQRQKKQQTVTLLPAADLDDFSKQLQQSMSSADSTQAGGSGHHHHHH

SEQ ID NO: 3378 - protein, 806 aa, Artificial Sequence
  Description of Artificial Sequence: Synthetic polypeptide
MKIEEGKLVIWINGDKGYNGLAEVGKKFEKDTGIKVTVEHPDKLEEKFPQVAATGDGPDIIFWAHDRFGGYAQSGLLAEITPDKAFQDKLYPFTWDAVRYNGKLIAYPIAVEALSLIYNKDLLPNPPKTWEEIPALDKELKAKGKSALMFNLQEPYFTWPLIAADGGYAFKYENGKYDIKDVGVDNAGAKAGLTFLVDLIKNKHMNADTDYSIAEAAFNKGETAMTINGPWAWSNIDTSKVNYGVTVLPTFKGQPSKPFVGVLSAGINAASPNKELAKEFLENYLLTDEGLEAVNKDKPLGAVALKSYEEELAKDPRIAATMENAQKGEIMPNIPQMSAFWYAVRTAVINAASGRQTVDEALKDAQTGGSGENLYFQSSDNGPQNQRNAPRITFGGPSDSTGSNQNGERSGARSKQRRPQGLPNNTASWFTALTQHGKEDLKFPRGQGVPINTNSSPDDQIGYYRRATRRIRGGDGKMKDLSPRWYFYYLGTGPEAGLPYGANKDGIIWVATEGALNTPKDHIGTRNPANNAAIVLQLPPGTTLPKGFYAEGSRGGSQASSRSSSRSRNSSRNSTPGSSRGTSPARMAGNGGDAALALLLLDRLNQLESKMSGKGQQQQGQTVTKKSAAEASKKPRQKRTATKAYNVTQAFGRRGPEQTQGNFGDQELIRQGTDYKHWPQIAQFAPSASAFFGMSRIGMEVTPSGTWLTYTGAIKLDDKDPNFKDQVILLNKHIDAYKTFPPTEPKKDKKKKADETQALPQRQKKQQTVTLLPAADLDDFSKQLQQSMSSADSTQAGGSGHHHHHH

SEQ ID NO: 3379 - protein, 806 aa, Artificial Sequence
  Description of Artificial Sequence: Synthetic polypeptide
MKIEEGKLVIWINGDKGYNGLAEVGKKFEKDTGIKVTVEHPDKLEEKFPQVAATGDGPDIIFWAHDRFGGYAQSGLLAEITPDKAFQDKLYPFTWDAVRYNGKLIAYPIAVEALSLIYNKDLLPNPPKTWEEIPALDKELKAKGKSALMFNLQEPYFTWPLIAADGGYAFKYENGKYDIKDVGVDNAGAKAGLTFLVDLIKNKHMNADTDYSIAEAAFNKGETAMTINGPWAWSNIDTSKVNYGVTVLPTFKGQPSKPFVGVLSAGINAASPNKELAKEFLENYLLTDEGLEAVNKDKPLGAVALKSYEEELAKDPRIAATMENAQKGEIMPNIPQMSAFWYAVRTAVINAASGRQTVDEALKDAQTGGSGENLYFQSSDNGPQNQRNAPRITFGGPSDSTGSNQNGERSGARSKQRRPQGLPNNTASWFTPLTQFGKEDLKFPPGQGVPINTNSSPDDQIGYYRRATRRIRGGDGKMKDLPPKWYFYYLGTGPHADLPYGQKHDGVVWVARPGALNTPKDHIGTRNPANNAAIPLQLPPGTKLPKGFYAEGSRGGSQASSRSSSRSRNSSRNSTPGSSRGTSPARMAGNGGDAALALLLLDRLNQLESKMSGKGQQQQGQTVTKKSAAEASKKPRQKRTATKAYNVTQAFGRRGPEQTQGNFGDQELIRQGTDYKHWPQIAQFAPSASAFFGMSRIGMEVTPSGTWLTYTGAIKLDDKDPNFKDQVILLNKHIDAYKTFPPTEPKKDKKKKADETQALPQRQKKQQTVTLLPAADLDDFSKQLQQSMSSADSTQAGGSGHHHHHH

SEQ ID NO: 3380 - protein, 806 aa, Artificial Sequence
  Description of Artificial Sequence: Synthetic polypeptide
MKIEEGKLVIWINGDKGYNGLAEVGKKFEKDTGIKVTVEHPDKLEEKFPQVAATGDGPDIIFWAHDRFGGYAQSGLLAEITPDKAFQDKLYPFTWDAVRYNGKLIAYPIAVEALSLIYNKDLLPNPPKTWEEIPALDKELKAKGKSALMFNLQEPYFTWPLIAADGGYAFKYENGKYDIKDVGVDNAGAKAGLTFLVDLIKNKHMNADTDYSIAEAAFNKGETAMTINGPWAWSNIDTSKVNYGVTVLPTFKGQPSKPFVGVLSAGINAASPNKELAKEFLENYLLTDEGLEAVNKDKPLGAVALKSYEEELAKDPRIAATMENAQKGEIMPNIPQMSAFWYAVRTAVINAASGRQTVDEALKDAQTGGSGENLYFQSSDNGPQNQRNAPRITFGGPSDSTGSNQNGERSGARSKQRRPQGLPNNTASWFTALTQHGKEDLKFPRGQGVPTNTNSSPDDQIGYYRRATRRIRGGDGKMKDLSPRWYFYYLGTGPEAGLPYGANKDGIIWVATEGALNTPKDHIGTRNPANNAAIVLQLPQGTTLPKGFYAEGSRGGSQASSRSSSRSRNSSRNSTPGSSRGTSPARMAGNGGDAALALLLLDRLNQLESKMSGKGQQQQGQTVTKKSAAEASKKPRQKRTATKAYNVTQAFGRRGPEQTQGNFGDQELIRQGTDYKHWPQIAQFAPSASAFFGMSRIGMEVTPSGTWLTYTGAIKLDDKDPNFKDQVILLNKHIDAYKTFPPTEPKKDKKKKADETQALPQRQKKQQTVTLLPAADLDDFSKQLQQSMSSADSTQAGGSGHHHHHH

SEQ ID NO: 3381 - protein, 806 aa, Artificial Sequence
  Description of Artificial Sequence: Synthetic polypeptide
MKIEEGKLVIWINGDKGYNGLAEVGKKFEKDTGIKVTVEHPDKLEEKFPQVAATGDGPDIIFWAHDRFGGYAQSGLLAEITPDKAFQDKLYPFTWDAVRYNGKLIAYPIAVEALSLIYNKDLLPNPPKTWEEIPALDKELKAKGKSALMFNLQEPYFTWPLIAADGGYAFKYENGKYDIKDVGVDNAGAKAGLTFLVDLIKNKHMNADTDYSIAEAAFNKGETAMTINGPWAWSNIDTSKVNYGVTVLPTFKGQPSKPFVGVLSAGINAASPNKELAKEFLENYLLTDEGLEAVNKDKPLGAVALKSYEEELAKDPRIAATMENAQKGEIMPNIPQMSAFWYAVRTAVINAASGRQTVDEALKDAQTGGSGENLYFQSSDNGPQNQRNAPRITFGGPSDSTGSNQNGERSGARSKQRRPQGLPNNTASWFTALTQHGKEDLKFPRGQGVPINTNSSPDDQIGYYRRATRRIRGGDGQMKDLSPRWYFYYLGTGPEAGLPYGANKDGIIWVATEGALNTPKDHIGTRNPANNAAIVLQLPQGTTLPKGFYAEGSRGGSQASSRSSSRSRNSSRNSTPGSSRGTSPARMAGNGGDAALALLLLDRLNQLESKMSGKGQQQQGQTVTKKSAAEASKKPRQKRTATKAYNVTQAFGRRGPEQTQGNFGDQELIRQGTDYKHWPQIAQFAPSASAFFGMSRIGMEVTPSGTWLTYTGAIKLDDKDPNFKDQVILLNKHIDAYKTFPPTEPKKDKKKKADETQALPQRQKKQQTVTLLPAADLDDFSKQLQQSMSSADSTQAGGSGHHHHHH

SEQ ID NO: 3382 - protein, 806 aa, Artificial Sequence
  Description of Artificial Sequence: Synthetic polypeptide
MKIEEGKLVIWINGDKGYNGLAEVGKKFEKDTGIKVTVEHPDKLEEKFPQVAATGDGPDIIFWAHDRFGGYAQSGLLAEITPDKAFQDKLYPFTWDAVRYNGKLIAYPIAVEALSLIYNKDLLPNPPKTWEEIPALDKELKAKGKSALMFNLQEPYFTWPLIAADGGYAFKYENGKYDIKDVGVDNAGAKAGLTFLVDLIKNKHMNADTDYSIAEAAFNKGETAMTINGPWAWSNIDTSKVNYGVTVLPTFKGQPSKPFVGVLSAGINAASPNKELAKEFLENYLLTDEGLEAVNKDKPLGAVALKSYEEELAKDPRIAATMENAQKGEIMPNIPQMSAFWYAVRTAVINAASGRQTVDEALKDAQTGGSGENLYFQSSDNGPQNQRNAPRITFGGPSDSTGSNQNGERSGARSKQRRPQGLPNNTASWFTALTQHGKEDLKFPRGQGVPINTNSSPDDQIGYYRRATRRYRGGDGKMKDLSPRWYFYYLGTGPEAGLPYGANKDGIIWVATEGALNTPKDHIGTRNPANNAAIVLQLPQGTTLPKGFYAEGSRGGSQASSRSSSRSRNSSRNSTPGSSRGTSPARMAGNGGDAALALLLLDRLNQLESKMSGKGQQQQGQTVTKKSAAEASKKPRQKRTATKAYNVTQAFGRRGPEQTQGNFGDQELIRQGTDYKHWPQIAQFAPSASAFFGMSRIGMEVTPSGTWLTYTGAIKLDDKDPNFKDQVILLNKHIDAYKTFPPTEPKKDKKKKADETQALPQRQKKQQTVTLLPAADLDDFSKQLQQSMSSADSTQAGGSGHHHHHH

SEQ ID NO: 3383 - protein, 806 aa, Artificial Sequence
  Description of Artificial Sequence: Synthetic polypeptide
MKIEEGKLVIWINGDKGYNGLAEVGKKFEKDTGIKVTVEHPDKLEEKFPQVAATGDGPDIIFWAHDRFGGYAQSGLLAEITPDKAFQDKLYPFTWDAVRYNGKLIAYPIAVEALSLIYNKDLLPNPPKTWEEIPALDKELKAKGKSALMFNLQEPYFTWPLIAADGGYAFKYENGKYDIKDVGVDNAGAKAGLTFLVDLIKNKHMNADTDYSIAEAAFNKGETAMTINGPWAWSNIDTSKVNYGVTVLPTFKGQPSKPFVGVLSAGINAASPNKELAKEFLENYLLTDEGLEAVNKDKPLGAVALKSYEEELAKDPRIAATMENAQKGEIMPNIPQMSAFWYAVRTAVINAASGRQTVDEALKDAQTGGSGENLYFQSSDNGPQNQRNAPRITFGGPSDSTGSNQNGERSGARSKQRRPQGLPNNTASWFTALTQHGKEDLKFPRGQGVPINTNSSPDDQIGYYRRATRRIRGGDGKMKDLSPRWYFYYLGTGPEAGLPYGANKDGIIWVATEGALNTPKDHIGTRNPANNAAIVLQLPQGTTLPKGFYAEGSRGGSQASSRSSSRSRNSSRNSTPGSSRGTSPARMAGNGGDAALALLLLDRLNQLESKMSGKGQQQQGQTVTKKSAAEASKKPRQKRTATKAYNVTQAFGRRGPEQTQGNFGDAELIRQGTDYKHWPQIAQFAPSASAFFGMSRIGMEVTPSGTWLTYTGAIKLDDKDPNFKDQVILLNKHIDAYKTFPPTEPKKDKKKKADETQALPQRQKKQQTVTLLPAADLDDFSKQLQQSMSSADSTQAGGSGHHHHHH

SEQ ID NO: 3384 - protein, 806 aa, Artificial Sequence
  Description of Artificial Sequence: Synthetic polypeptide
MKIEEGKLVIWINGDKGYNGLAEVGKKFEKDTGIKVTVEHPDKLEEKFPQVAATGDGPDIIFWAHDRFGGYAQSGLLAEITPDKAFQDKLYPFTWDAVRYNGKLIAYPIAVEALSLIYNKDLLPNPPKTWEEIPALDKELKAKGKSALMFNLQEPYFTWPLIAADGGYAFKYENGKYDIKDVGVDNAGAKAGLTFLVDLIKNKHMNADTDYSIAEAAFNKGETAMTINGPWAWSNIDTSKVNYGVTVLPTFKGQPSKPFVGVLSAGINAASPNKELAKEFLENYLLTDEGLEAVNKDKPLGAVALKSYEEELAKDPRIAATMENAQKGEIMPNIPQMSAFWYAVRTAVINAASGRQTVDEALKDAQTGGSGENLYFQSSDNGPQNQRNAPRITFGGPSDSTGSNQNGERSGARSKQRRPQGLPNNTASWFTALTQHGKEDLKFPRGQGVPINTNSSPDDQIGYYRRATRRIRGGDGKMKDLSPRWYFYYLGTGPEAGLPYGANKDGIIWVATEGALNTPKDHIGTRNPNNNAAIVLQLPQGTTLPKGFYAEGSRGGSQASSRSSSRSRNSSRNSTPGSSRGTSPARMAGNGGDAALALLLLDRLNQLESKMSGKGQQQQGQTVTKKSAAEASKKPRQKRTATKAYNVTQAFGRRGPEQTQGNFGDQELIRQGTDYKHWPQIAQFAPSASAFFGMSRIGMEVTPSGTWLTYTGAIKLDDKDPNFKDQVILLNKHIDAYKTFPPTEPKKDKKKKADETQALPQRQKKQQTVTLLPAADLDDFSKQLQQSMSSADSTQAGGSGHHHHHH

SEQ ID NO: 3385 - protein, 806 aa, Artificial Sequence
  Description of Artificial Sequence: Synthetic polypeptide
MKIEEGKLVIWINGDKGYNGLAEVGKKFEKDTGIKVTVEHPDKLEEKFPQVAATGDGPDIIFWAHDRFGGYAQSGLLAEITPDKAFQDKLYPFTWDAVRYNGKLIAYPIAVEALSLIYNKDLLPNPPKTWEEIPALDKELKAKGKSALMFNLQEPYFTWPLIAADGGYAFKYENGKYDIKDVGVDNAGAKAGLTFLVDLIKNKHMNADTDYSIAEAAFNKGETAMTINGPWAWSNIDTSKVNYGVTVLPTFKGQPSKPFVGVLSAGINAASPNKELAKEFLENYLLTDEGLEAVNKDKPLGAVALKSYEEELAKDPRIAATMENAQKGEIMPNIPQMSAFWYAVRTAVINAASGRQTVDEALKDAQTGGSGENLYFQSSDNGPQNQRNAPRITFGGPSDSTGSNQNGERSGARSKQRRPQGLPNNTASWFTALTQHGKEDLKFPRGQGVPINTNSSPDDQIGYYRRATRRIRGGDGKMKDLSPRWYFYYLGTGPEAGLPYGANKDGIIWVATEGALNTPKDHIGTRNPANNAAIVLQLPQGTTLPKGFYAEGSRGGSQASSRSSSRSRNSSRNSTPGSSRGTSPARMAGNGGDAALALLLLDRLNQLESKMSGKGQQQQGQTVTKKSAAEASKKPRQKRTATKAYNVTQAFGRRGPEQTQGNFGDQELIRQGTDYKHWPQIAQFAPSASAFFGMSRIGMEQTPSGTWLTYTGAIKLDDKDPNFKDQVILLNKHIDAYKTFPPTEPKKDKKKKADETQALPQRQKKQQTVTLLPAADLDDFSKQLQQSMSSADSTQAGGSGHHHHHH

SEQ ID NO: 3386 - protein, 806 aa, Artificial Sequence
  Description of Artificial Sequence: Synthetic polypeptide
MKIEEGKLVIWINGDKGYNGLAEVGKKFEKDTGIKVTVEHPDKLEEKFPQVAATGDGPDIIFWAHDRFGGYAQSGLLAEITPDKAFQDKLYPFTWDAVRYNGKLIAYPIAVEALSLIYNKDLLPNPPKTWEEIPALDKELKAKGKSALMFNLQEPYFTWPLIAADGGYAFKYENGKYDIKDVGVDNAGAKAGLTFLVDLIKNKHMNADTDYSIAEAAFNKGETAMTINGPWAWSNIDTSKVNYGVTVLPTFKGQPSKPFVGVLSAGINAASPNKELAKEFLENYLLTDEGLEAVNKDKPLGAVALKSYEEELAKDPRIAATMENAQKGEIMPNIPQMSAFWYAVRTAVINAASGRQTVDEALKDAQTGGSGENLYFQSSDNGPQNQRNAPRITFGGPSDSTGSNQNGERSGARSKQRRPQGLPNNTASWYTALTQHGKEDLKFPRGQGVPINTNSSPDDQIGYYRRATRRIRGGDGKMKDLSPRWYFYYLGTGPEAGLPYGANKDGIIWVATEGALNTPKDHIGTRNPANNAAIVLQLPQGTTLPKGFYAEGSRGGSQASSRSSSRSRNSSRNSTPGSSRGTSPARMAGNGGDAALALLLLDRLNQLESKMSGKGQQQQGQTVTKKSAAEASKKPRQKRTATKAYNVTQAFGRRGPEQTQGNFGDQELIRQGTDYKHWPQIAQFAPSASAFFGMSRIGMEVTPSGTWLTYTGAIKLDDKDPNFKDQVILLNKHIDAYKTFPPTEPKKDKKKKADETQALPQRQKKQQTVTLLPAADLDDFSKQLQQSMSSADSTQAGGSGHHHHHH

SEQ ID NO: 3387 - protein, 806 aa, Artificial Sequence
  Description of Artificial Sequence: Synthetic polypeptide
MKIEEGKLVIWINGDKGYNGLAEVGKKFEKDTGIKVTVEHPDKLEEKFPQVAATGDGPDIIFWAHDRFGGYAQSGLLAEITPDKAFQDKLYPFTWDAVRYNGKLIAYPIAVEALSLIYNKDLLPNPPKTWEEIPALDKELKAKGKSALMFNLQEPYFTWPLIAADGGYAFKYENGKYDIKDVGVDNAGAKAGLTFLVDLIKNKHMNADTDYSIAEAAFNKGETAMTINGPWAWSNIDTSKVNYGVTVLPTFKGQPSKPFVGVLSAGINAASPNKELAKEFLENYLLTDEGLEAVNKDKPLGAVALKSYEEELAKDPRIAATMENAQKGEIMPNIPQMSAFWYAVRTAVINAASGRQTVDEALKDAQTGGSGENLYFQSSDNGPQNQRNAPRITFGGPSDSTGSNQNGERSGARSKQRRPQGLPNNTASWFTALTQHGKEDLKFPRGQGVPINTNSSPDDQIGYYRRTTRRIRGGDGKMKDLSPRWYFYYLGTGPEAGLPYGANKDGIIWVATEGALNTPKDHIGTRNPANNAAIVLQLPQGTTLPKGFYAEGSRGGSQASSRSSSRSRNSSRNSTPGSSRGTSPARMAGNGGDAALALLLLDRLNQLESKMSGKGQQQQGQTVTKKSAAEASKKPRQKRTATKAYNVTQAFGRRGPEQTQGNFGDQELIRQGTDYKHWPQIAQFAPSASAFFGMSRIGMEVTPSGTWLTYTGAIKLDDKDPNFKDQVILLNKHIDAYKTFPPTEPKKDKKKKADETQALPQRQKKQQTVTLLPAADLDDFSKQLQQSMSSADSTQAGGSGHHHHHH

SEQ ID NO: 3388 - protein, 806 aa, Artificial Sequence
  Description of Artificial Sequence: Synthetic polypeptide
MKIEEGKLVIWINGDKGYNGLAEVGKKFEKDTGIKVTVEHPDKLEEKFPQVAATGDGPDIIFWAHDRFGGYAQSGLLAEITPDKAFQDKLYPFTWDAVRYNGKLIAYPIAVEALSLIYNKDLLPNPPKTWEEIPALDKELKAKGKSALMFNLQEPYFTWPLIAADGGYAFKYENGKYDIKDVGVDNAGAKAGLTFLVDLIKNKHMNADTDYSIAEAAFNKGETAMTINGPWAWSNIDTSKVNYGVTVLPTFKGQPSKPFVGVLSAGINAASPNKELAKEFLENYLLTDEGLEAVNKDKPLGAVALKSYEEELAKDPRIAATMENAQKGEIMPNIPQMSAFWYAVRTAVINAASGRQTVDEALKDAQTGGSGENLYFQSSDNGPQNQRNAPRITFGGPSDSTGSNQNGERSGARSKQRRPQGLPNNTASWFTALTQHGKEDLKFPRGQGVPINTNSSPDDQIGYYRRATRRIRGGDGKMKDLSPRWYFYYLGSGPEAGLPYGANKDGIIWVATEGALNTPKDHIGTRNPANNAAIVLQLPQGTTLPKGFYAEGSRGGSQASSRSSSRSRNSSRNSTPGSSRGTSPARMAGNGGDAALALLLLDRLNQLESKMSGKGQQQQGQTVTKKSAAEASKKPRQKRTATKAYNVTQAFGRRGPEQTQGNFGDQELIRQGTDYKHWPQIAQFAPSASAFFGMSRIGMEVTPSGTWLTYTGAIKLDDKDPNFKDQVILLNKHIDAYKTFPPTEPKKDKKKKADETQALPQRQKKQQTVTLLPAADLDDFSKQLQQSMSSADSTQAGGSGHHHHHH

SEQ ID NO: 3389 - protein, 806 aa, Artificial Sequence
  Description of Artificial Sequence: Synthetic polypeptide
MKIEEGKLVIWINGDKGYNGLAEVGKKFEKDTGIKVTVEHPDKLEEKFPQVAATGDGPDIIFWAHDRFGGYAQSGLLAEITPDKAFQDKLYPFTWDAVRYNGKLIAYPIAVEALSLIYNKDLLPNPPKTWEEIPALDKELKAKGKSALMFNLQEPYFTWPLIAADGGYAFKYENGKYDIKDVGVDNAGAKAGLTFLVDLIKNKHMNADTDYSIAEAAFNKGETAMTINGPWAWSNIDTSKVNYGVTVLPTFKGQPSKPFVGVLSAGINAASPNKELAKEFLENYLLTDEGLEAVNKDKPLGAVALKSYEEELAKDPRIAATMENAQKGEIMPNIPQMSAFWYAVRTAVINAASGRQTVDEALKDAQTGGSGENLYFQSSDNGPQNQRNAPRITFGGPSDSTGSNQNGERSGARSKQRRPQGLPNNTASWFTALTQHGKEDLKFPRGQGVPINTNSSPDDQIGYYRRATRRIRGGDGKMKDLSPRWYFYYLGTGPEAGLPYGANKDGIIWVAVEGALNTPKDHIGTRNPANNAAIVLQLPQGTTLPKGFYAEGSRGGSQASSRSSSRSRNSSRNSTPGSSRGTSPARMAGNGGDAALALLLLDRLNQLESKMSGKGQQQQGQTVTKKSAAEASKKPRQKRTATKAYNVTQAFGRRGPEQTQGNFGDQELIRQGTDYKHWPQIAQFAPSASAFFGMSRIGMEVTPSGTWLTYTGAIKLDDKDPNFKDQVILLNKHIDAYKTFPPTEPKKDKKKKADETQALPQRQKKQQTVTLLPAADLDDFSKQLQQSMSSADSTQAGGSGHHHHHH

SEQ ID NO: 3390 - protein, 806 aa, Artificial Sequence
  Description of Artificial Sequence: Synthetic polypeptide
MKIEEGKLVIWINGDKGYNGLAEVGKKFEKDTGIKVTVEHPDKLEEKFPQVAATGDGPDIIFWAHDRFGGYAQSGLLAEITPDKAFQDKLYPFTWDAVRYNGKLIAYPIAVEALSLIYNKDLLPNPPKTWEEIPALDKELKAKGKSALMFNLQEPYFTWPLIAADGGYAFKYENGKYDIKDVGVDNAGAKAGLTFLVDLIKNKHMNADTDYSIAEAAFNKGETAMTINGPWAWSNIDTSKVNYGVTVLPTFKGQPSKPFVGVLSAGINAASPNKELAKEFLENYLLTDEGLEAVNKDKPLGAVALKSYEEELAKDPRIAATMENAQKGEIMPNIPQMSAFWYAVRTAVINAASGRQTVDEALKDAQTGGSGENLYFQSSDNGPQNQRNAPRITFGGPSDSTGSNQNGERSGARSKQRRPQGLPNNTASWFTALTQHGKEDLTFPRGQGVPINTNSSPDDQIGYYRRATRRIRGGDGKMKDLSPRWYFYYLGTGPEAGLPYGANKDGIIWVATEGALNTPKDHIGTRNPANNAAIVLQLPQGTTLPKGFYAEGSRGGSQASSRSSSRSRNSSRNSTPGSSRGTSPARMAGNGGDAALALLLLDRLNQLESKMSGKGQQQQGQTVTKKSAAEASKKPRQKRTATKAYNVTQAFGRRGPEQTQGNFGDQELIRQGTDYKHWPQIAQFAPSASAFFGMSRIGMEVTPSGTWLTYTGAIKLDDKDPNFKDQVILLNKHIDAYKTFPPTEPKKDKKKKADETQALPQRQKKQQTVTLLPAADLDDFSKQLQQSMSSADSTQAGGSGHHHHHH

SEQ ID NO: 3391 - protein, 806 aa, Artificial Sequence
  Description of Artificial Sequence: Synthetic polypeptide
MKIEEGKLVIWINGDKGYNGLAEVGKKFEKDTGIKVTVEHPDKLEEKFPQVAATGDGPDIIFWAHDRFGGYAQSGLLAEITPDKAFQDKLYPFTWDAVRYNGKLIAYPIAVEALSLIYNKDLLPNPPKTWEEIPALDKELKAKGKSALMFNLQEPYFTWPLIAADGGYAFKYENGKYDIKDVGVDNAGAKAGLTFLVDLIKNKHMNADTDYSIAEAAFNKGETAMTINGPWAWSNIDTSKVNYGVTVLPTFKGQPSKPFVGVLSAGINAASPNKELAKEFLENYLLTDEGLEAVNKDKPLGAVALKSYEEELAKDPRIAATMENAQKGEIMPNIPQMSAFWYAVRTAVINAASGRQTVDEALKDAQTGGSGENLYFQSSDNGPQNQRNAPRITFGGPSDSTGSNQNGERSGARSKQRRPQGLPNNTASWFTALTQHGKEDLKFPRGQGVPINTNSSPDDQIGYYRRATRRIRGGDGKMKDLSPRWYFYYTGTGPEAGLPYGANKDGIIWVATEGALNTPKDHIGTRNPANNAAIVLQLPQGTTLPKGFYAEGSRGGSQASSRSSSRSRNSSRNSTPGSSRGTSPARMAGNGGDAALALLLLDRLNQLESKMSGKGQQQQGQTVTKKSAAEASKKPRQKRTATKAYNVTQAFGRRGPEQTQGNFGDQELIRQGTDYKHWPQIAQFAPSASAFFGMSRIGMEVTPSGTWLTYTGAIKLDDKDPNFKDQVILLNKHIDAYKTFPPTEPKKDKKKKADETQALPQRQKKQQTVTLLPAADLDDFSKQLQQSMSSADSTQAGGSGHHHHHH

SEQ ID NO: 3392 - protein, 806 aa, Artificial Sequence
  Description of Artificial Sequence: Synthetic polypeptide
MKIEEGKLVIWINGDKGYNGLAEVGKKFEKDTGIKVTVEHPDKLEEKFPQVAATGDGPDIIFWAHDRFGGYAQSGLLAEITPDKAFQDKLYPFTWDAVRYNGKLIAYPIAVEALSLIYNKDLLPNPPKTWEEIPALDKELKAKGKSALMFNLQEPYFTWPLIAADGGYAFKYENGKYDIKDVGVDNAGAKAGLTFLVDLIKNKHMNADTDYSIAEAAFNKGETAMTINGPWAWSNIDTSKVNYGVTVLPTFKGQPSKPFVGVLSAGINAASPNKELAKEFLENYLLTDEGLEAVNKDKPLGAVALKSYEEELAKDPRIAATMENAQKGEIMPNIPQMSAFWYAVRTAVINAASGRQTVDEALKDAQTGGSGENLYFQSSDNGPQNQRNAPRITFGGPSDSTGSNQNGERSGARSKQRRPQGLPNNTASWFTALTQHGKEDLKFPRGQGVPINTNSSPDDQIGDYRRATRRIRGGDGKMKDLSPRWYFYYLGTGPEAGLPYGANKDGIIWVATEGALNTPKDHIGTRNPANNAAIVLQLPQGTTLPKGFYAEGSRGGSQASSRSSSRSRNSSRNSTPGSSRGTSPARMAGNGGDAALALLLLDRLNQLESKMSGKGQQQQGQTVTKKSAAEASKKPRQKRTATKAYNVTQAFGRRGPEQTQGNFGDQELIRQGTDYKHWPQIAQFAPSASAFFGMSRIGMEVTPSGTWLTYTGAIKLDDKDPNFKDQVILLNKHIDAYKTFPPTEPKKDKKKKADETQALPQRQKKQQTVTLLPAADLDDFSKQLQQSMSSADSTQAGGSGHHHHHH

SEQ ID NO: 3393 - protein, 806 aa, Artificial Sequence
  Description of Artificial Sequence: Synthetic polypeptide
MKIEEGKLVIWINGDKGYNGLAEVGKKFEKDTGIKVTVEHPDKLEEKFPQVAATGDGPDIIFWAHDRFGGYAQSGLLAEITPDKAFQDKLYPFTWDAVRYNGKLIAYPIAVEALSLIYNKDLLPNPPKTWEEIPALDKELKAKGKSALMFNLQEPYFTWPLIAADGGYAFKYENGKYDIKDVGVDNAGAKAGLTFLVDLIKNKHMNADTDYSIAEAAFNKGETAMTINGPWAWSNIDTSKVNYGVTVLPTFKGQPSKPFVGVLSAGINAASPNKELAKEFLENYLLTDEGLEAVNKDKPLGAVALKSYEEELAKDPRIAATMENAQKGEIMPNIPQMSAFWYAVRTAVINAASGRQTVDEALKDAQTGGSGENLYFQSSDNGPQNQRNAPRITFGGPSDSTGSNQNGERSGARSKQRRPQGLPNNTASWFTALTQHGKEDLKFPRGQGVPINTNSSPDDQIGYYRRATRRIRGGDGKMKDLSPRWYFYYLGTGPEAGLPYGANKDGIIWVATEGALNTPKDHIGTRNPANNAAIVLQLPQGTTLPKGFYAEGSRGGSQASSRSSSRSRNSSRNSTPGSSRGTSPARMAGNGGDAALALLLLDRLNQLESKMSGKGQQQQGQTVTKKSAAEASKKPRQKRTATKEYNVTQAFGRRGPEQTQGNFGDQDLIKLGTDYKHWPQIAQFAPSASAFFGMSRIGTEETPSGTWLTYTGAIKLDKKDPNFKDQVILLNKHIDAYKTFPPTEPKKDKKKKADETQALPQRQKKQQTVTLLPAADLDDFSKQLQQSMSSADSTQAGGSGHHHHHH

SEQ ID NO: 3394 - protein, 806 aa, Artificial Sequence
  Description of Artificial Sequence: Synthetic polypeptide
MKIEEGKLVIWINGDKGYNGLAEVGKKFEKDTGIKVTVEHPDKLEEKFPQVAATGDGPDIIFWAHDRFGGYAQSGLLAEITPDKAFQDKLYPFTWDAVRYNGKLIAYPIAVEALSLIYNKDLLPNPPKTWEEIPALDKELKAKGKSALMFNLQEPYFTWPLIAADGGYAFKYENGKYDIKDVGVDNAGAKAGLTFLVDLIKNKHMNADTDYSIAEAAFNKGETAMTINGPWAWSNIDTSKVNYGVTVLPTFKGQPSKPFVGVLSAGINAASPNKELAKEFLENYLLTDEGLEAVNKDKPLGAVALKSYEEELAKDPRIAATMENAQKGEIMPNIPQMSAFWYAVRTAVINAASGRQTVDEALKDAQTGGSGENLYFQSSDNGPQNQRNAPRITFGGPSDSTGSNQNGERSGARSKQRRPQGLPNNTASWFTALTQHGKEDLKFPRGQGVPINTNSSPDDQIGYYRRATRRIRGGDGKMKDLSPRWYFYYLGTGPEAGLPYGANKDGIIWVATEGALNTPKDHIGTRNPANNAAIVLQLPQGTTLPKGFYAEGSRGGSQASSRSSSRSRNSSRNSTPGEERGTSPARMAGNGGDAALALLLLDRLNQLESKMSGKGQQQQGQTVTKKSAAEASKKPRQKRTATKAYNVTQAFGRRGPEQTQGNFGDQELIRQGTDYKHWPQIAQFAPSASAFFGMSRIGMEVTPSGTWLTYTGAIKLDDKDPNFKDQVILLNKHIDAYKTFPPTEPKKDKKKKADETQALPQRQKKQQTVTLLPAADLDDFSKQLQQSMSSADSTQAGGSGHHHHHH

SEQ ID NO: 3395 - protein, 806 aa, Artificial Sequence
  Description of Artificial Sequence: Synthetic polypeptide
MKIEEGKLVIWINGDKGYNGLAEVGKKFEKDTGIKVTVEHPDKLEEKFPQVAATGDGPDIIFWAHDRFGGYAQSGLLAEITPDKAFQDKLYPFTWDAVRYNGKLIAYPIAVEALSLIYNKDLLPNPPKTWEEIPALDKELKAKGKSALMFNLQEPYFTWPLIAADGGYAFKYENGKYDIKDVGVDNAGAKAGLTFLVDLIKNKHMNADTDYSIAEAAFNKGETAMTINGPWAWSNIDTSKVNYGVTVLPTFKGQPSKPFVGVLSAGINAASPNKELAKEFLENYLLTDEGLEAVNKDKPLGAVALKSYEEELAKDPRIAATMENAQKGEIMPNIPQMSAFWYAVRTAVINAASGRQTVDEALKDAQTGGSGENLYFQSSDNGPQNQRNAPRITFGGPSDSTGSNQNGERSGARSKQRRPQGLPNNTASWFTALTQHGKEDLKFPRGQGVPINTNSSPDDQIGYYRRATRRIRGGDGKMKDLSPRWYFYYLGTGPEAGLPYGANKDGIIWVATEGALNTPKDHIGTRNPANNAAIVLQLPQGTTLPKGFYAEGSRGGSQASSRSSSRSRNSSRNSTPGSSRGTSPARMAGNGGDAALALLLLDRLNQLESKMSGKGQQQQGQTVTKKSAAEMSKKPRQKRTATKGCNVTQCFGPRGPEQTQGNFGDAELIKKGTDYKHWPQIAQFAPSASAFFGMSRISSKETPSGTWLTYTGAIKLDKDDPNFKDQVILLNKHIDAYKTFPPTEPKKDKKKKADETQALPQRQKKQQTVTLLPAADLDDFSKQLQQSMSSADSTQAGGSGHHHHHH

SEQ ID NO: 3396 - protein, 806 aa, Artificial Sequence
  Description of Artificial Sequence: Synthetic polypeptide
MKIEEGKLVIWINGDKGYNGLAEVGKKFEKDTGIKVTVEHPDKLEEKFPQVAATGDGPDIIFWAHDRFGGYAQSGLLAEITPDKAFQDKLYPFTWDAVRYNGKLIAYPIAVEALSLIYNKDLLPNPPKTWEEIPALDKELKAKGKSALMFNLQEPYFTWPLIAADGGYAFKYENGKYDIKDVGVDNAGAKAGLTFLVDLIKNKHMNADTDYSIAEAAFNKGETAMTINGPWAWSNIDTSKVNYGVTVLPTFKGQPSKPFVGVLSAGINAASPNKELAKEFLENYLLTDEGLEAVNKDKPLGAVALKSYEEELAKDPRIAATMENAQKGEIMPNIPQMSAFWYAVRTAVINAASGRQTVDEALKDAQTGGSGENLYFQSSDNGPQNQRNAPRITFGGPSDSTGSNQNGERSGARSKQRRPQGLPNNTASWFTPLTQNGKEDLKFPPGQGVPINTNSSPDDQIGYYRRATRRIRGGDGKMKDLPPKWYFYYLGTGPHADLPYGQKQPGVFWVARPGALNTPKDHIGTRNPANNAAIPLQLPPGTKLPKGFYAEGSRGGSQASSRSSSRSRNSSRNSTPGSSRGTSPARMAGNGGDAALALLLLDRLNQLESKMSGKGQQQQGQTVTKKSAAEASKKPRQKRTATKAYNVTQAFGRRGPEQTQGNFGDQELIRQGTDYKHWPQIAQFAPSASAFFGMSRIGMEVTPSGTWLTYTGAIKLDDKDPNFKDQVILLNKHIDAYKTFPPTEPKKDKKKKADETQALPQRQKKQQTVTLLPAADLDDFSKQLQQSMSSADSTQAGGSGHHHHHH

SEQ ID NO: 3397 - protein, 806 aa, Artificial Sequence
  Description of Artificial Sequence: Synthetic polypeptide
MKIEEGKLVIWINGDKGYNGLAEVGKKFEKDTGIKVTVEHPDKLEEKFPQVAATGDGPDIIFWAHDRFGGYAQSGLLAEITPDKAFQDKLYPFTWDAVRYNGKLIAYPIAVEALSLIYNKDLLPNPPKTWEEIPALDKELKAKGKSALMFNLQEPYFTWPLIAADGGYAFKYENGKYDIKDVGVDNAGAKAGLTFLVDLIKNKHMNADTDYSIAEAAFNKGETAMTINGPWAWSNIDTSKVNYGVTVLPTFKGQPSKPFVGVLSAGINAASPNKELAKEFLENYLLTDEGLEAVNKDKPLGAVALKSYEEELAKDPRIAATMENAQKGEIMPNIPQMSAFWYAVRTAVINAASGRQTVDEALKDAQTGGSGENLYFQSSDNGPQNQRNAPRITFGGPSDSTGSNQNGERSGARSKQRRPQGLPNNTASWFTALTQHGKEDLKFPRGQGVPINTNSSPDDQIGYYRRATRRIRGGDGKMKDLSPRWYFYYLGTGPEAGLPYGANKDGIIWVAEEGALNTPKDHIGTRNPANNAAIVLQLPQGTTLPKGFYAEGSRGGSQASSRSSSRSRNSSRNSTPGSSRGTSPARMAGNGGDAALALLLLDRLNQLESKMSGKGQQQQGQTVTKKSAAEASKKPRQKRTATKAYNVTQAFGRRGPEQTQGNFGDQELIRQGTDYKHWPQIAQFAPSASAFFGMSRIGMEVTPSGTWLTYTGAIKLDDKDPNFKDQVILLNKHIDAYKTFPPTEPKKDKKKKADETQALPQRQKKQQTVTLLPAADLDDFSKQLQQSMSSADSTQAGGSGHHHHHH

SEQ ID NO: 3398 - protein, 806 aa, Artificial Sequence
  Description of Artificial Sequence: Synthetic polypeptide
MKIEEGKLVIWINGDKGYNGLAEVGKKFEKDTGIKVTVEHPDKLEEKFPQVAATGDGPDIIFWAHDRFGGYAQSGLLAEITPDKAFQDKLYPFTWDAVRYNGKLIAYPIAVEALSLIYNKDLLPNPPKTWEEIPALDKELKAKGKSALMFNLQEPYFTWPLIAADGGYAFKYENGKYDIKDVGVDNAGAKAGLTFLVDLIKNKHMNADTDYSIAEAAFNKGETAMTINGPWAWSNIDTSKVNYGVTVLPTFKGQPSKPFVGVLSAGINAASPNKELAKEFLENYLLTDEGLEAVNKDKPLGAVALKSYEEELAKDPRIAATMENAQKGEIMPNIPQMSAFWYAVRTAVINAASGRQTVDEALKDAQTGGSGENLYFQSSDNGPQNQRNAPRITFGGPSDSTGSNQNGERSGARSKQRRPQGLPNNTASWFTPLTQHGKEDLKFPPGQGVPINTNSSPDDQIGYYRRATRRIRGGDGKMKDLPPRWYFYYLGTGPEADLPYGAVKDGIVWVAEEGALNTPKDHIGTRNPANNAAIPLQLPPGTTLPKGFYAEGSRGGSQASSRSSSRSRNSSRNSTPGSSRGTSPARMAGNGGDAALALLLLDRLNQLESKMSGKGQQQQGQTVTKKSAAEASKKPRQKRTATKAYNVTQAFGRRGPEQTQGNFGDQELIRQGTDYKHWPQIAQFAPSASAFFGMSRIGMEVTPSGTWLTYTGAIKLDDKDPNFKDQVILLNKHIDAYKTFPPTEPKKDKKKKADETQALPQRQKKQQTVTLLPAADLDDFSKQLQQSMSSADSTQAGGSGHHHHHH

SEQ ID NO: 3399 - protein, 806 aa, Artificial Sequence
  Description of Artificial Sequence: Synthetic polypeptide
MKIEEGKLVIWINGDKGYNGLAEVGKKFEKDTGIKVTVEHPDKLEEKFPQVAATGDGPDIIFWAHDRFGGYAQSGLLAEITPDKAFQDKLYPFTWDAVRYNGKLIAYPIAVEALSLIYNKDLLPNPPKTWEEIPALDKELKAKGKSALMFNLQEPYFTWPLIAADGGYAFKYENGKYDIKDVGVDNAGAKAGLTFLVDLIKNKHMNADTDYSIAEAAFNKGETAMTINGPWAWSNIDTSKVNYGVTVLPTFKGQPSKPFVGVLSAGINAASPNKELAKEFLENYLLTDEGLEAVNKDKPLGAVALKSYEEELAKDPRIAATMENAQKGEIMPNIPQMSAFWYAVRTAVINAASGRQTVDEALKDAQTGGSGENLYFQSSDNGPQNQRNAPRITFGGPSDSTGSNQNGERSGARSKQRRPQGLPNNTASWFTGLTQNGKEDLKFPPGQGVPINTNSSPDDQIGYYRRATRRIRGGDGKMKDLPPKWYFYYLGTGPHADLPYGQKHDGVVWVARPGALNTPKDHIGTRNPANNAAIPLQLPPGTKLPKGFYAEGSRGGSQASSRSSSRSRNSSRNSTPGSSRGTSPARMAGNGGDAALALLLLDRLNQLESKMSGKGQQQQGQTVTKKSAAEASKKPRQKRTATKAYNVTQAFGRRGPEQTQGNFGDQELIRQGTDYKHWPQIAQFAPSASAFFGMSRIGMEVTPSGTWLTYTGAIKLDDKDPNFKDQVILLNKHIDAYKTFPPTEPKKDKKKKADETQALPQRQKKQQTVTLLPAADLDDFSKQLQQSMSSADSTQAGGSGHHHHHH

SEQ ID NO: 3400 - protein, 806 aa, Artificial Sequence
  Description of Artificial Sequence: Synthetic polypeptide
MKIEEGKLVIWINGDKGYNGLAEVGKKFEKDTGIKVTVEHPDKLEEKFPQVAATGDGPDIIFWAHDRFGGYAQSGLLAEITPDKAFQDKLYPFTWDAVRYNGKLIAYPIAVEALSLIYNKDLLPNPPKTWEEIPALDKELKAKGKSALMFNLQEPYFTWPLIAADGGYAFKYENGKYDIKDVGVDNAGAKAGLTFLVDLIKNKHMNADTDYSIAEAAFNKGETAMTINGPWAWSNIDTSKVNYGVTVLPTFKGQPSKPFVGVLSAGINAASPNKELAKEFLENYLLTDEGLEAVNKDKPLGAVALKSYEEELAKDPRIAATMENAQKGEIMPNIPQMSAFWYAVRTAVINAASGRQTVDEALKDAQTGGSGENLYFQSSDNGPQNQRNAPRITFGGPSDSTGSNQNGERSGARSKQRRPQGLPNNTASWFTALTQHGKEDLKFPRGQGVPINTNSSPDDQIGYYRRATRRIRGGDGKMKDLSPRWYFYYLGTGPEAGLPYGANKDGIIWVATEGALNTPKDHIGTRNPANNAAIVLQLPQGTTLPKGFYAEGSRGGSQASSRSSSRSRNSSRNSTPGSSRGTSPARMAGNGGDAALALLLLDRLNQLESKMSGKGQQQQGQTVTKKSAAEASKKPRQKRTATKEYNVTQAFGRRGPEQTQGNFGDQDLNKLGTDYKHWPQIAQFAPSASAFFGMSRISTEETPSGTWLTYTGAIKLDKKDPNFKDQVILLNKHIDAYKTFPPTEPKKDKKKKADETQALPQRQKKQQTVTLLPAADLDDFSKQLQQSMSSADSTQAGGSGHHHHHH

SEQ ID NO: 3401 - protein, 806 aa, Artificial Sequence
  Description of Artificial Sequence: Synthetic polypeptide
MKIEEGKLVIWINGDKGYNGLAEVGKKFEKDTGIKVTVEHPDKLEEKFPQVAATGDGPDIIFWAHDRFGGYAQSGLLAEITPDKAFQDKLYPFTWDAVRYNGKLIAYPIAVEALSLIYNKDLLPNPPKTWEEIPALDKELKAKGKSALMFNLQEPYFTWPLIAADGGYAFKYENGKYDIKDVGVDNAGAKAGLTFLVDLIKNKHMNADTDYSIAEAAFNKGETAMTINGPWAWSNIDTSKVNYGVTVLPTFKGQPSKPFVGVLSAGINAASPNKELAKEFLENYLLTDEGLEAVNKDKPLGAVALKSYEEELAKDPRIAATMENAQKGEIMPNIPQMSAFWYAVRTAVINAASGRQTVDEALKDAQTGGSGENLYFQSSDNGPQNQRNAPRITFGGPSDSTGSNQNGERSGARSKQRRPQGLPNNTASWFTALTQHGKEDLKFPRGQGVPINTNSSPDDQIGYYRRATRRIRGGDGKMKDLSPRWYFYYLGTGPEAGLPYGANKDGIIWVATEGALNTPKDHIGTRNPANNAAIVLQLPQGTTLPKGFYAEGSRGGSQASSRSSSRSRNSSRNSTPGSSRGTSPARMAGNGGDAALALLLLDRLNQLESKMSGKGQQQQGQTVTKKSAAEASKKPRQKRTATKGYNVTQAFGRRGPEQTQGNFGDQDLNKLGTDYKHWPQIAQFAPSASAFFGMSRIGTRETPSGTWLTYTGAIKLDKKDPNFKDQVILLNKHIDAYKTFPPTEPKKDKKKKADETQALPQRQKKQQTVTLLPAADLDDFSKQLQQSMSSADSTQAGGSGHHHHHH

SEQ ID NO: 3402 - protein, 806 aa, Artificial Sequence
  Description of Artificial Sequence: Synthetic polypeptide
MKIEEGKLVIWINGDKGYNGLAEVGKKFEKDTGIKVTVEHPDKLEEKFPQVAATGDGPDIIFWAHDRFGGYAQSGLLAEITPDKAFQDKLYPFTWDAVRYNGKLIAYPIAVEALSLIYNKDLLPNPPKTWEEIPALDKELKAKGKSALMFNLQEPYFTWPLIAADGGYAFKYENGKYDIKDVGVDNAGAKAGLTFLVDLIKNKHMNADTDYSIAEAAFNKGETAMTINGPWAWSNIDTSKVNYGVTVLPTFKGQPSKPFVGVLSAGINAASPNKELAKEFLENYLLTDEGLEAVNKDKPLGAVALKSYEEELAKDPRIAATMENAQKGEIMPNIPQMSAFWYAVRTAVINAASGRQTVDEALKDAQTGGSGENLYFQSSDNGPQNQRNAPRITFGGPSDSTGSNQNGERSGARSKQRRPQGLPNNTASWFTALTQHGKEDLKFPRGQGVPINTNSSPDDQIGYYRRATRRIRGGDGKMKDLSPRWYFYYLGTGPEAGLPYGANKDGIIWVATEGALNTPKDHIGTRNPANNAAIVLQLPQGTTLPKGFYAEGSRGGSQASSRSSSRSRNSSRNSTPGSSRGTSPARMAGNGGDAALALLLLDRLNQLESKMSGKGQQQQGQTVTKKSAAEASKKPRQKRTATKAYNVTQAFGRRGPEQTQGNFGDQELIRQGTDYKHWPQIAQFAPSASAFFGMSRIGMEVTPSGTWLTYTGAIKLDDKDPNFDDQVILLNKHIDAYKTFPPTEPKKDKKKKADETQALPQRQKKQQTVTLLPAADLDDFSKQLQQSMSSADSTQAGGSGHHHHHH

SEQ ID NO: 3403 - protein, 806 aa, Artificial Sequence
  Description of Artificial Sequence: Synthetic polypeptide
MKIEEGKLVIWINGDKGYNGLAEVGKKFEKDTGIKVTVEHPDKLEEKFPQVAATGDGPDIIFWAHDRFGGYAQSGLLAEITPDKAFQDKLYPFTWDAVRYNGKLIAYPIAVEALSLIYNKDLLPNPPKTWEEIPALDKELKAKGKSALMFNLQEPYFTWPLIAADGGYAFKYENGKYDIKDVGVDNAGAKAGLTFLVDLIKNKHMNADTDYSIAEAAFNKGETAMTINGPWAWSNIDTSKVNYGVTVLPTFKGQPSKPFVGVLSAGINAASPNKELAKEFLENYLLTDEGLEAVNKDKPLGAVALKSYEEELAKDPRIAATMENAQKGEIMPNIPQMSAFWYAVRTAVINAASGRQTVDEALKDAQTGGSGENLYFQSSDNGPQNQRNAPRITFGGPSDSTGSNQNGERSGARSKQRRPQGLPNNTASWFTALTQHGKEDLKFPRGQGVPINTNSSPDDQIGYYRRATRRIRGGDGKMKDLSPRWYFYYLGTGPEAGLPYGANKDGIIWVATEGALNTPKDHIGTRNPANNAAIVLQLPQGTTLPKGFYAEGSRGGSQASSRSSSRSRNSSRNSTPGSSRGTSPARMAGNGGDAALALLLLDRLNQLESKMSGKGQQQQGQTVTKKSAAEASKKPRQKRTATKAYNVTQAFGLRGPEQTQGNFGDQELIRQGTDYKHWPQIAQFAPSASAFFGMSRIGMEVTPSGTWLTYTGAIKLDDKDPNFKDQVILLNKHIDAYKTFPPTEPKKDKKKKADETQALPQRQKKQQTVTLLPAADLDDFSKQLQQSMSSADSTQAGGSGHHHHHH

SEQ ID NO: 3404 - protein, 806 aa, Artificial Sequence
  Description of Artificial Sequence: Synthetic polypeptide
MKIEEGKLVIWINGDKGYNGLAEVGKKFEKDTGIKVTVEHPDKLEEKFPQVAATGDGPDIIFWAHDRFGGYAQSGLLAEITPDKAFQDKLYPFTWDAVRYNGKLIAYPIAVEALSLIYNKDLLPNPPKTWEEIPALDKELKAKGKSALMFNLQEPYFTWPLIAADGGYAFKYENGKYDIKDVGVDNAGAKAGLTFLVDLIKNKHMNADTDYSIAEAAFNKGETAMTINGPWAWSNIDTSKVNYGVTVLPTFKGQPSKPFVGVLSAGINAASPNKELAKEFLENYLLTDEGLEAVNKDKPLGAVALKSYEEELAKDPRIAATMENAQKGEIMPNIPQMSAFWYAVRTAVINAASGRQTVDEALKDAQTGGSGENLYFQSSDNGPQNQRNAPRITFGGPSDSTGSNQNGERSGARSKQRRPQGLPNNTASWFTPLTQFGKEDLKFPPGQGVPINTNSSPDDQIGYYRRATRRIRGGDGKMKDLPPKWYFYYLGTGPHADLPYGQKHPGVFWVARPGALNTPKDHIGTRNPANNAAIPLQLPPGTKLPKGFYAEGSRGGSQASSRSSSRSRNSSRNSTPGSSRGTSPARMAGNGGDAALALLLLDRLNQLESKMSGKGQQQQGQTVTKKSAAEASKKPRQKRTATKAYNVTQAFGRRGPEQTQGNFGDQELIRQGTDYKHWPQIAQFAPSASAFFGMSRIGMEVTPSGTWLTYTGAIKLDDKDPNFKDQVILLNKHIDAYKTFPPTEPKKDKKKKADETQALPQRQKKQQTVTLLPAADLDDFSKQLQQSMSSADSTQAGGSGHHHHHH

SEQ ID NO: 3405 - protein, 806 aa, Artificial Sequence
  Description of Artificial Sequence: Synthetic polypeptide
MKIEEGKLVIWINGDKGYNGLAEVGKKFEKDTGIKVTVEHPDKLEEKFPQVAATGDGPDIIFWAHDRFGGYAQSGLLAEITPDKAFQDKLYPFTWDAVRYNGKLIAYPIAVEALSLIYNKDLLPNPPKTWEEIPALDKELKAKGKSALMFNLQEPYFTWPLIAADGGYAFKYENGKYDIKDVGVDNAGAKAGLTFLVDLIKNKHMNADTDYSIAEAAFNKGETAMTINGPWAWSNIDTSKVNYGVTVLPTFKGQPSKPFVGVLSAGINAASPNKELAKEFLENYLLTDEGLEAVNKDKPLGAVALKSYEEELAKDPRIAATMENAQKGEIMPNIPQMSAFWYAVRTAVINAASGRQTVDEALKDAQTGGSGENLYFQSSDNGPQNQRNAPRITFGGPSDSTGSNQNGERSGARSKQRRPQGLPNNTASWFTALTQHGKEDLKFPRGQGVPINTNSSPDDQIGYYRRATRRIRGGDGKMKDLSPRWYFYYLGTGPEAGLPYGANKDGIIWVATEGALNTPKDHIGTRNPANNAAIVLQLPQGTTLPKGFYAEGSRGGSQASSRSSERSRNSSRNSTPGEERGTEPARMAGNGGDAALALLLLDRLNQLESKMSGKGQQQQGQTVTKKSAAEASKKPRQKRTATKAYNVTQAFGRRGPEQTQGNFGDQELIRQGTDYKHWPQIAQFAPSASAFFGMSRIGMEVTPSGTWLTYTGAIKLDDKDPNFKDQVILLNKHIDAYKTFPPTEPKKDKKKKADETQALPQRQKKQQTVTLLPAADLDDFSKQLQQSMSSADSTQAGGSGHHHHHH

SEQ ID NO: 3406 - protein, 806 aa, Artificial Sequence
  Description of Artificial Sequence: Synthetic polypeptide
MKIEEGKLVIWINGDKGYNGLAEVGKKFEKDTGIKVTVEHPDKLEEKFPQVAATGDGPDIIFWAHDRFGGYAQSGLLAEITPDKAFQDKLYPFTWDAVRYNGKLIAYPIAVEALSLIYNKDLLPNPPKTWEEIPALDKELKAKGKSALMFNLQEPYFTWPLIAADGGYAFKYENGKYDIKDVGVDNAGAKAGLTFLVDLIKNKHMNADTDYSIAEAAFNKGETAMTINGPWAWSNIDTSKVNYGVTVLPTFKGQPSKPFVGVLSAGINAASPNKELAKEFLENYLLTDEGLEAVNKDKPLGAVALKSYEEELAKDPRIAATMENAQKGEIMPNIPQMSAFWYAVRTAVINAASGRQTVDEALKDAQTGGSGENLYFQSSDNGPQNQRNAPRITFGGPSDSTGSNQNGERSGARSKQRRPQGLPNNTASWFTALTQHGKEDLKFPRGQGVPINTNSSPDDQIGYYRRATRRIRGGDGKMKDLSPRWYFYYLGTGPEAGLPYGANKDGIIWVATEGALNTPKDHIGTRNPANNAAIVLQLPQGTTLPKGFYAEGSRGGSQASSRSSSRSRNSSRNSTPGSSRGTSPARMAGNGGDAALALLLLDRLNQLESKMSGKGQQQQGQTVTKKSAAEASKKPRQKRTATKQYNVTQAFGRRGPEQTQGNFGDQELIRQGTDYKHWPQIAQFAPSASAFFGMSRIGMEVTPSGTWLTYTGAIKLDDKDPNFKDQVILLNKHIDAYKTFPPTEPKKDKKKKADETQALPQRQKKQQTVTLLPAADLDDFSKQLQQSMSSADSTQAGGSGHHHHHH

SEQ ID NO: 3407 - protein, 806 aa, Artificial Sequence
  Description of Artificial Sequence: Synthetic polypeptide
MKIEEGKLVIWINGDKGYNGLAEVGKKFEKDTGIKVTVEHPDKLEEKFPQVAATGDGPDIIFWAHDRFGGYAQSGLLAEITPDKAFQDKLYPFTWDAVRYNGKLIAYPIAVEALSLIYNKDLLPNPPKTWEEIPALDKELKAKGKSALMFNLQEPYFTWPLIAADGGYAFKYENGKYDIKDVGVDNAGAKAGLTFLVDLIKNKHMNADTDYSIAEAAFNKGETAMTINGPWAWSNIDTSKVNYGVTVLPTFKGQPSKPFVGVLSAGINAASPNKELAKEFLENYLLTDEGLEAVNKDKPLGAVALKSYEEELAKDPRIAATMENAQKGEIMPNIPQMSAFWYAVRTAVINAASGRQTVDEALKDAQTGGSGENLYFQSSDNGPQNQRNAPRITFGGPSDSTGSNQNGERSGARSKQRRPQGLPNNTASWFTALTQHGKEDLKFPRGQGVPINENSSPDDQIGYYRRATRRIRGGDGKMKDLSPRWYFYYLGTGPEAGLPYGANKDGIIWVATEGALNTPKDHIGTRNPANNAAIVLQLPQGTTLPKGFYAEGSRGGSQASSRSSSRSRNSSRNSTPGSSRGTSPARMAGNGGDAALALLLLDRLNQLESKMSGKGQQQQGQTVTKKSAAEASKKPRQKRTATKAYNVTQAFGRRGPEQTQGNFGDQELIRQGTDYKHWPQIAQFAPSASAFFGMSRIGMEVTPSGTWLTYTGAIKLDDKDPNFKDQVILLNKHIDAYKTFPPTEPKKDKKKKADETQALPQRQKKQQTVTLLPAADLDDFSKQLQQSMSSADSTQAGGSGHHHHHH

SEQ ID NO: 3408 - protein, 806 aa, Artificial Sequence
  Description of Artificial Sequence: Synthetic polypeptide
MKIEEGKLVIWINGDKGYNGLAEVGKKFEKDTGIKVTVEHPDKLEEKFPQVAATGDGPDIIFWAHDRFGGYAQSGLLAEITPDKAFQDKLYPFTWDAVRYNGKLIAYPIAVEALSLIYNKDLLPNPPKTWEEIPALDKELKAKGKSALMFNLQEPYFTWPLIAADGGYAFKYENGKYDIKDVGVDNAGAKAGLTFLVDLIKNKHMNADTDYSIAEAAFNKGETAMTINGPWAWSNIDTSKVNYGVTVLPTFKGQPSKPFVGVLSAGINAASPNKELAKEFLENYLLTDEGLEAVNKDKPLGAVALKSYEEELAKDPRIAATMENAQKGEIMPNIPQMSAFWYAVRTAVINAASGRQTVDEALKDAQTGGSGENLYFQSSDNGPQNQRNAPRITFGGPSDSTGSNQNGERSGARSKQRRPQGLPNNTASWFTALTQHGKEDLKFPRGQGVPINTNSSPDDQIGYYRRATRRIRGGDGKMKDLSPRWYFYYLGTGPEAGLPYGANKDGIIWVATEGALNTPKDHIGDRNPANNAAIVLQLPQGTTLPKGFYAEGSRGGSQASSRSSSRSRNSSRNSTPGSSRGTSPARMAGNGGDAALALLLLDRLNQLESKMSGKGQQQQGQTVTKKSAAEASKKPRQKRTATKAYNVTQAFGRRGPEQTQGNFGDQELIRQGTDYKHWPQIAQFAPSASAFFGMSRIGMEVTPSGTWLTYTGAIKLDDKDPNFKDQVILLNKHIDAYKTFPPTEPKKDKKKKADETQALPQRQKKQQTVTLLPAADLDDFSKQLQQSMSSADSTQAGGSGHHHHHH

SEQ ID NO: 3409 - protein, 806 aa, Artificial Sequence
  Description of Artificial Sequence: Synthetic polypeptide
MKIEEGKLVIWINGDKGYNGLAEVGKKFEKDTGIKVTVEHPDKLEEKFPQVAATGDGPDIIFWAHDRFGGYAQSGLLAEITPDKAFQDKLYPFTWDAVRYNGKLIAYPIAVEALSLIYNKDLLPNPPKTWEEIPALDKELKAKGKSALMFNLQEPYFTWPLIAADGGYAFKYENGKYDIKDVGVDNAGAKAGLTFLVDLIKNKHMNADTDYSIAEAAFNKGETAMTINGPWAWSNIDTSKVNYGVTVLPTFKGQPSKPFVGVLSAGINAASPNKELAKEFLENYLLTDEGLEAVNKDKPLGAVALKSYEEELAKDPRIAATMENAQKGEIMPNIPQMSAFWYAVRTAVINAASGRQTVDEALKDAQTGGSGENLYFQSSDNGPQNQRNAPRITFGGPSDSTGSNQNGERSGARSKQRRPQGLPNNTASWFTALTQHGKEDLKFPRGQGVPINTNSSPDDQIGYYRRATRRIRGGDGKMKDLSPRWYFYYLGTGPEAGLPYGANKDGIIWVATEGALNTPKDHIGTRNPANNAAQVLQLPQGTTLPKGFYAEGSRGGSQASSRSSSRSRNSSRNSTPGSSRGTSPARMAGNGGDAALALLLLDRLNQLESKMSGKGQQQQGQTVTKKSAAEASKKPRQKRTATKAYNVTQAFGRRGPEQTQGNFGDQELIRQGTDYKHWPQIAQFAPSASAFFGMSRIGMEVTPSGTWLTYTGAIKLDDKDPNFKDQVILLNKHIDAYKTFPPTEPKKDKKKKADETQALPQRQKKQQTVTLLPAADLDDFSKQLQQSMSSADSTQAGGSGHHHHHH

SEQ ID NO: 3410 - protein, 806 aa, Artificial Sequence
  Description of Artificial Sequence: Synthetic polypeptide
MKIEEGKLVIWINGDKGYNGLAEVGKKFEKDTGIKVTVEHPDKLEEKFPQVAATGDGPDIIFWAHDRFGGYAQSGLLAEITPDKAFQDKLYPFTWDAVRYNGKLIAYPIAVEALSLIYNKDLLPNPPKTWEEIPALDKELKAKGKSALMFNLQEPYFTWPLIAADGGYAFKYENGKYDIKDVGVDNAGAKAGLTFLVDLIKNKHMNADTDYSIAEAAFNKGETAMTINGPWAWSNIDTSKVNYGVTVLPTFKGQPSKPFVGVLSAGINAASPNKELAKEFLENYLLTDEGLEAVNKDKPLGAVALKSYEEELAKDPRIAATMENAQKGEIMPNIPQMSAFWYAVRTAVINAASGRQTVDEALKDAQTGGSGENLYFQSSDNGPQNQRNAPRITFGGPSDSTGSNQNGERSGARSKQRRPQGLPNNTASWFTALTQHGKEDLKFPRGQGVPINTNSSPDDQIGYYRRVTRRIRGGDGKMKDLSPRWYFYYLGTGPEAGLPYGANKDGIIWVATEGALNTPKDHIGTRNPANNAAIVLQLPQGTTLPKGFYAEGSRGGSQASSRSSSRSRNSSRNSTPGSSRGTSPARMAGNGGDAALALLLLDRLNQLESKMSGKGQQQQGQTVTKKSAAEASKKPRQKRTATKAYNVTQAFGRRGPEQTQGNFGDQELIRQGTDYKHWPQIAQFAPSASAFFGMSRIGMEVTPSGTWLTYTGAIKLDDKDPNFKDQVILLNKHIDAYKTFPPTEPKKDKKKKADETQALPQRQKKQQTVTLLPAADLDDFSKQLQQSMSSADSTQAGGSGHHHHHH

SEQ ID NO: 3411 - protein, 806 aa, Artificial Sequence
  Description of Artificial Sequence: Synthetic polypeptide
MKIEEGKLVIWINGDKGYNGLAEVGKKFEKDTGIKVTVEHPDKLEEKFPQVAATGDGPDIIFWAHDRFGGYAQSGLLAEITPDKAFQDKLYPFTWDAVRYNGKLIAYPIAVEALSLIYNKDLLPNPPKTWEEIPALDKELKAKGKSALMFNLQEPYFTWPLIAADGGYAFKYENGKYDIKDVGVDNAGAKAGLTFLVDLIKNKHMNADTDYSIAEAAFNKGETAMTINGPWAWSNIDTSKVNYGVTVLPTFKGQPSKPFVGVLSAGINAASPNKELAKEFLENYLLTDEGLEAVNKDKPLGAVALKSYEEELAKDPRIAATMENAQKGEIMPNIPQMSAFWYAVRTAVINAASGRQTVDEALKDAQTGGSGENLYFQSSDNGPQNQRNAPRITFGGPSDSTGSNQNGERSGARSKQRRPQGLPNNTASWFTALTQHGKEDLKFPRGQGVPINTNSSPDDQIGYYRRATRRIRGGDGKMKDLSPRWYFYYLGTGPEAGLPYGANKDGIIWVATEGALNTPKDHIGTRNPANNAAIVLQLPQGTTLPKGFYAEGSRGGSQASSRSSSRSRNSSRNSTPGSSRGTSPARMAGNGGDAALALLLLDRLNQLESKMSGKGQQQQGQTVTKKSAAEASKKPRQKRTATKAYNVTQAFGRRGPEQTQGNFGDQELIREGTDYKHWPQIAQFAPSASAFFGMSRIGMEVTPSGTWLTYTGAIKLDDKDPNFKDQVILLNKHIDAYKTFPPTEPKKDKKKKADETQALPQRQKKQQTVTLLPAADLDDFSKQLQQSMSSADSTQAGGSGHHHHHH

SEQ ID NO: 3412 - protein, 806 aa, Artificial Sequence
  Description of Artificial Sequence: Synthetic polypeptide
MKIEEGKLVIWINGDKGYNGLAEVGKKFEKDTGIKVTVEHPDKLEEKFPQVAATGDGPDIIFWAHDRFGGYAQSGLLAEITPDKAFQDKLYPFTWDAVRYNGKLIAYPIAVEALSLIYNKDLLPNPPKTWEEIPALDKELKAKGKSALMFNLQEPYFTWPLIAADGGYAFKYENGKYDIKDVGVDNAGAKAGLTFLVDLIKNKHMNADTDYSIAEAAFNKGETAMTINGPWAWSNIDTSKVNYGVTVLPTFKGQPSKPFVGVLSAGINAASPNKELAKEFLENYLLTDEGLEAVNKDKPLGAVALKSYEEELAKDPRIAATMENAQKGEIMPNIPQMSAFWYAVRTAVINAASGRQTVDEALKDAQTGGSGENLYFQSSDNGPQNQRNAPRITFGGPSDSTGSNQNGERSGARSKQRRPQGLPNNTASWFTALTQHGKEDLKFPRGQGVPINTNSSPDDQIGYYRRATRRIRGGDGKMKDLSPRWYFYYLGTGPEAGLPYGANKDGIIWVATEGALNTPKDHIGTRNPANNAAICLQLPQGTTLPKGFYAEGSRGGSQASSRSSSRSRNSSRNSTPGSSRGTSPARMAGNGGDAALALLLLDRLNQLESKMSGKGQQQQGQTVTKKSAAEASKKPRQKRTATKAYNVTQAFGRRGPEQTQGNFGDQELIRQGTDYKHWPQIAQFAPSASAFFGMSRIGMEVTPSGTWLTYTGAIKLDDKDPNFKDQVILLNKHIDAYKTFPPTEPKKDKKKKADETQALPQRQKKQQTVTLLPAADLDDFSKQLQQSMSSADSTQAGGSGHHHHHH

SEQ ID NO: 3413 - protein, 806 aa, Artificial Sequence
  Description of Artificial Sequence: Synthetic polypeptide
MKIEEGKLVIWINGDKGYNGLAEVGKKFEKDTGIKVTVEHPDKLEEKFPQVAATGDGPDIIFWAHDRFGGYAQSGLLAEITPDKAFQDKLYPFTWDAVRYNGKLIAYPIAVEALSLIYNKDLLPNPPKTWEEIPALDKELKAKGKSALMFNLQEPYFTWPLIAADGGYAFKYENGKYDIKDVGVDNAGAKAGLTFLVDLIKNKHMNADTDYSIAEAAFNKGETAMTINGPWAWSNIDTSKVNYGVTVLPTFKGQPSKPFVGVLSAGINAASPNKELAKEFLENYLLTDEGLEAVNKDKPLGAVALKSYEEELAKDPRIAATMENAQKGEIMPNIPQMSAFWYAVRTAVINAASGRQTVDEALKDAQTGGSGENLYFQSSDNGPQNQRNAPRITFGGPSDSTGSNQNGERSGARSKQRRPQGLPNNTASWFTPLTQNGKEDLKFPPGQGVPINTNSSPDDQIGYYRRATRRIRGGDGKMKDLPPKWYFYYLGTGPHADLPYGQKHDGVVWVARPGALNTPKDHIGTRNPANNAAIPLQLPPGTKLPKGFYAEGSRGGSQASSRSSSRSRNSSRNSTPGSSRGTSPARMAGNGGDAALALLLLDRLNQLESKMSGKGQQQQGQTVTKKSAAEASKKPRQKRTATKAYNVTQAFGRRGPEQTQGNFGDQELIRQGTDYKHWPQIAQFAPSASAFFGMSRIGMEVTPSGTWLTYTGAIKLDDKDPNFKDQVILLNKHIDAYKTFPPTEPKKDKKKKADETQALPQRQKKQQTVTLLPAADLDDFSKQLQQSMSSADSTQAGGSGHHHHHH

SEQ ID NO: 3414 - protein, 806 aa, Artificial Sequence
  Description of Artificial Sequence: Synthetic polypeptide
MKIEEGKLVIWINGDKGYNGLAEVGKKFEKDTGIKVTVEHPDKLEEKFPQVAATGDGPDIIFWAHDRFGGYAQSGLLAEITPDKAFQDKLYPFTWDAVRYNGKLIAYPIAVEALSLIYNKDLLPNPPKTWEEIPALDKELKAKGKSALMFNLQEPYFTWPLIAADGGYAFKYENGKYDIKDVGVDNAGAKAGLTFLVDLIKNKHMNADTDYSIAEAAFNKGETAMTINGPWAWSNIDTSKVNYGVTVLPTFKGQPSKPFVGVLSAGINAASPNKELAKEFLENYLLTDEGLEAVNKDKPLGAVALKSYEEELAKDPRIAATMENAQKGEIMPNIPQMSAFWYAVRTAVINAASGRQTVDEALKDAQTGGSGENLYFQSSDNGPQNQRNAPRITFGGPSDSTGSNQNGERSGARSKQRRPQGLPNNTASWFTALTQHGKEDLKFPRGQGVPINTNSSPDDQIGYYRRATRRIRGGDGKMKDLSPRWYFYYLGTGPEAGLPYGANKDGIIWVATEGALNTPKDHIGTRNPANNAAIVLQLPQGTTLPKGFYAEGSRGGSQASSRSSSRSRNSSRNSTPGSSRGTSPARMAGNGGDAALALLLLDRLNQLESKMSGKGQQQQGQTVTKKSAAEASKKPRQKRTATKAYNVTQAFGRRGPEKTQGNFGDQELIRQGTDYKHWPQIAQFAPSASAFFGMSRIGMEVTPSGTWLTYTGAIKLDDKDPNFKDQVILLNKHIDAYKTFPPTEPKKDKKKKADETQALPQRQKKQQTVTLLPAADLDDFSKQLQQSMSSADSTQAGGSGHHHHHH

SEQ ID NO: 3415 - protein, 806 aa, Artificial Sequence
  Description of Artificial Sequence: Synthetic polypeptide
MKIEEGKLVIWINGDKGYNGLAEVGKKFEKDTGIKVTVEHPDKLEEKFPQVAATGDGPDIIFWAHDRFGGYAQSGLLAEITPDKAFQDKLYPFTWDAVRYNGKLIAYPIAVEALSLIYNKDLLPNPPKTWEEIPALDKELKAKGKSALMFNLQEPYFTWPLIAADGGYAFKYENGKYDIKDVGVDNAGAKAGLTFLVDLIKNKHMNADTDYSIAEAAFNKGETAMTINGPWAWSNIDTSKVNYGVTVLPTFKGQPSKPFVGVLSAGINAASPNKELAKEFLENYLLTDEGLEAVNKDKPLGAVALKSYEEELAKDPRIAATMENAQKGEIMPNIPQMSAFWYAVRTAVINAASGRQTVDEALKDAQTGGSGENLYFQSSDNGPQNQRNAPRITFGGPSDSTGSNQNGERSGARSKQRRPQGLPNNTYSWFTALTQHGKEDLKFPRGQGVPINTNSSPDDQIGYYRRATRRIRGGDGKMKDLSPRWYFYYLGTGPEAGLPYGANKDGIIWVATEGALNTPKDHIGTRNPANNAAIVLQLPQGTTLPKGFYAEGSRGGSQASSRSSSRSRNSSRNSTPGSSRGTSPARMAGNGGDAALALLLLDRLNQLESKMSGKGQQQQGQTVTKKSAAEASKKPRQKRTATKAYNVTQAFGRRGPEQTQGNFGDQELIRQGTDYKHWPQIAQFAPSASAFFGMSRIGMEVTPSGTWLTYTGAIKLDDKDPNFKDQVILLNKHIDAYKTFPPTEPKKDKKKKADETQALPQRQKKQQTVTLLPAADLDDFSKQLQQSMSSADSTQAGGSGHHHHHH

SEQ ID NO: 3416 - protein, 806 aa, Artificial Sequence
  Description of Artificial Sequence: Synthetic polypeptide
MKIEEGKLVIWINGDKGYNGLAEVGKKFEKDTGIKVTVEHPDKLEEKFPQVAATGDGPDIIFWAHDRFGGYAQSGLLAEITPDKAFQDKLYPFTWDAVRYNGKLIAYPIAVEALSLIYNKDLLPNPPKTWEEIPALDKELKAKGKSALMFNLQEPYFTWPLIAADGGYAFKYENGKYDIKDVGVDNAGAKAGLTFLVDLIKNKHMNADTDYSIAEAAFNKGETAMTINGPWAWSNIDTSKVNYGVTVLPTFKGQPSKPFVGVLSAGINAASPNKELAKEFLENYLLTDEGLEAVNKDKPLGAVALKSYEEELAKDPRIAATMENAQKGEIMPNIPQMSAFWYAVRTAVINAASGRQTVDEALKDAQTGGSGENLYFQSSDNGPQNQRNAPRITFGGPSDSTGSNQNGERSGARSKQRRPQGLPNNTASWFTALTQHGKEDLKFPPGQGVPINPNSKPDDQIGYWRRQTRRYRGGDGQMKDLPPRWYFYYLGTGPEAGLPYGANKDGIIWVATEGALNTPKDHIGTRNPANNAAIVLQLPQGTTLPKGFYAEGSRGGSQASSRSSSRSRNSSRNSTPGSSRGTSPARMAGNGGDAALALLLLDRLNQLESKMSGKGQQQQGQTVTKKSAAEASKKPRQKRTATKAYNVTQAFGRRGPEQTQGNFGDQELIRQGTDYKHWPQIAQFAPSASAFFGMSRIGMEVTPSGTWLTYTGAIKLDDKDPNFKDQVILLNKHIDAYKTFPPTEPKKDKKKKADETQALPQRQKKQQTVTLLPAADLDDFSKQLQQSMSSADSTQAGGSGHHHHHH

SEQ ID NO: 3417 - protein, 806 aa, Artificial Sequence
  Description of Artificial Sequence: Synthetic polypeptide
MKIEEGKLVIWINGDKGYNGLAEVGKKFEKDTGIKVTVEHPDKLEEKFPQVAATGDGPDIIFWAHDRFGGYAQSGLLAEITPDKAFQDKLYPFTWDAVRYNGKLIAYPIAVEALSLIYNKDLLPNPPKTWEEIPALDKELKAKGKSALMFNLQEPYFTWPLIAADGGYAFKYENGKYDIKDVGVDNAGAKAGLTFLVDLIKNKHMNADTDYSIAEAAFNKGETAMTINGPWAWSNIDTSKVNYGVTVLPTFKGQPSKPFVGVLSAGINAASPNKELAKEFLENYLLTDEGLEAVNKDKPLGAVALKSYEEELAKDPRIAATMENAQKGEIMPNIPQMSAFWYAVRTAVINAASGRQTVDEALKDAQTGGSGENLYFQSSDNGPQNQRNAPRITFGGPSDSTGSNQNGERSGARSKQRRPQGLPNNTASWFTALTQHGKEDLKFPRGQGVPINTNSSPDDQIGYYRRATRRIRGGDGKMKDLSPRWYFYYLGTGPEAGLPYGANKDGIIWVATEGALNTPKDHIGTRNPANNAAIVLQLPQGTTLPKGFYAEGSRGGSQASSRSSSRSRNSSRNSTPGSSRGTSPARMAGNGGDAALALLLLDRLNQLESKMSGKGQQQQGQTVTKKSAAEASKKPRQKRTATKAYNVTQAFGRRGPEQTQGNFGDQELIRQGTDYPHWPQIAQFAPSASAFFGMSRIGMEVTPSGTWLTYTGAIKLDDKDPNFKDQVILLNKHIDAYKTFPPTEPKKDKKKKADETQALPQRQKKQQTVTLLPAADLDDFSKQLQQSMSSADSTQAGGSGHHHHHH

SEQ ID NO: 3418 - protein, 806 aa, Artificial Sequence
  Description of Artificial Sequence: Synthetic polypeptide
MKIEEGKLVIWINGDKGYNGLAEVGKKFEKDTGIKVTVEHPDKLEEKFPQVAATGDGPDIIFWAHDRFGGYAQSGLLAEITPDKAFQDKLYPFTWDAVRYNGKLIAYPIAVEALSLIYNKDLLPNPPKTWEEIPALDKELKAKGKSALMFNLQEPYFTWPLIAADGGYAFKYENGKYDIKDVGVDNAGAKAGLTFLVDLIKNKHMNADTDYSIAEAAFNKGETAMTINGPWAWSNIDTSKVNYGVTVLPTFKGQPSKPFVGVLSAGINAASPNKELAKEFLENYLLTDEGLEAVNKDKPLGAVALKSYEEELAKDPRIAATMENAQKGEIMPNIPQMSAFWYAVRTAVINAASGRQTVDEALKDAQTGGSGENLYFQSSDNGPQNQRNAPRITFGGPSDSTGSNQNGERSGARSKQRRPQGLPNNTASWFTALTQHGKEDLKFPRGQGVPINTNSSPDDQIGYYRRATRRIRGGDGKMKDLSPRWYFYYLGTGPEAGLPYGANKDGIIWVATEGALNTPKDHIGTRNPANNAAIVLQLPQGTTLPKGFYAEGSRGGSQASSRSSSRSRNSSRNSTPGSSRGTSPARMAGNGGDAALALLLLDRLNQLESKMSGKGQQQQGQTVTKKSAAEASKRPRQKRTATKAYNVTQAFGRRGPEQTQGNFGDQELIRQGTDYKHWPQIAQFAPSASAFFGMSRIGMEVTPSGTWLTYTGAIKLDDKDPNFKDQVILLNKHIDAYKTFPPTEPKKDKKKKADETQALPQRQKKQQTVTLLPAADLDDFSKQLQQSMSSADSTQAGGSGHHHHHH

SEQ ID NO: 3419 - protein, 806 aa, Artificial Sequence
  Description of Artificial Sequence: Synthetic polypeptide
MKIEEGKLVIWINGDKGYNGLAEVGKKFEKDTGIKVTVEHPDKLEEKFPQVAATGDGPDIIFWAHDRFGGYAQSGLLAEITPDKAFQDKLYPFTWDAVRYNGKLIAYPIAVEALSLIYNKDLLPNPPKTWEEIPALDKELKAKGKSALMFNLQEPYFTWPLIAADGGYAFKYENGKYDIKDVGVDNAGAKAGLTFLVDLIKNKHMNADTDYSIAEAAFNKGETAMTINGPWAWSNIDTSKVNYGVTVLPTFKGQPSKPFVGVLSAGINAASPNKELAKEFLENYLLTDEGLEAVNKDKPLGAVALKSYEEELAKDPRIAATMENAQKGEIMPNIPQMSAFWYAVRTAVINAASGRQTVDEALKDAQTGGSGENLYFQSSDNGPQNQRNAPRITFGGPSDSTGSNQNGERSGARSKQRRPQGLPNNTASWFTALTQHGKEDLKFPRGQGVPINTNSSPDDQIGYYRRATRRIRGGDGKMKDLSPRWYFYYLGTGPEAGLPYGANKTGIIWVATEGALNTPKDHIGTRNPANNAAIVLQLPQGTTLPKGFYAEGSRGGSQASSRSSSRSRNSSRNSTPGSSRGTSPARMAGNGGDAALALLLLDRLNQLESKMSGKGQQQQGQTVTKKSAAEASKKPRQKRTATKAYNVTQAFGRRGPEQTQGNFGDQELIRQGTDYKHWPQIAQFAPSASAFFGMSRIGMEVTPSGTWLTYTGAIKLDDKDPNFKDQVILLNKHIDAYKTFPPTEPKKDKKKKADETQALPQRQKKQQTVTLLPAADLDDFSKQLQQSMSSADSTQAGGSGHHHHHH

SEQ ID NO: 3420 - protein, 806 aa, Artificial Sequence
  Description of Artificial Sequence: Synthetic polypeptide
MKIEEGKLVIWINGDKGYNGLAEVGKKFEKDTGIKVTVEHPDKLEEKFPQVAATGDGPDIIFWAHDRFGGYAQSGLLAEITPDKAFQDKLYPFTWDAVRYNGKLIAYPIAVEALSLIYNKDLLPNPPKTWEEIPALDKELKAKGKSALMFNLQEPYFTWPLIAADGGYAFKYENGKYDIKDVGVDNAGAKAGLTFLVDLIKNKHMNADTDYSIAEAAFNKGETAMTINGPWAWSNIDTSKVNYGVTVLPTFKGQPSKPFVGVLSAGINAASPNKELAKEFLENYLLTDEGLEAVNKDKPLGAVALKSYEEELAKDPRIAATMENAQKGEIMPNIPQMSAFWYAVRTAVINAASGRQTVDEALKDAQTGGSGENLYFQSSDNGPQNQRNAPRITFGGPSDSTGSNQNGERSGARSKQRRPQGLPNNTASWFTALTQHGKEDLKFPRGQGVPINTNSSPDDQIGYYRRATRRIRGGDGKMKDLSPRWYFYYLGTGPEAGLPYGANKDGIIWVATEGALNTPKDHIGKRNPANNAAIVLQLPQGTTLPKGFYAEGSRGGSQASSRSSSRSRNSSRNSTPGSSRGTSPARMAGNGGDAALALLLLDRLNQLESKMSGKGQQQQGQTVTKKSAAEASKKPRQKRTATKAYNVTQAFGRRGPEQTQGNFGDQELIRQGTDYKHWPQIAQFAPSASAFFGMSRIGMEVTPSGTWLTYTGAIKLDDKDPNFKDQVILLNKHIDAYKTFPPTEPKKDKKKKADETQALPQRQKKQQTVTLLPAADLDDFSKQLQQSMSSADSTQAGGSGHHHHHH

SEQ ID NO: 3421 - protein, 806 aa, Artificial Sequence
  Description of Artificial Sequence: Synthetic polypeptide
MKIEEGKLVIWINGDKGYNGLAEVGKKFEKDTGIKVTVEHPDKLEEKFPQVAATGDGPDIIFWAHDRFGGYAQSGLLAEITPDKAFQDKLYPFTWDAVRYNGKLIAYPIAVEALSLIYNKDLLPNPPKTWEEIPALDKELKAKGKSALMFNLQEPYFTWPLIAADGGYAFKYENGKYDIKDVGVDNAGAKAGLTFLVDLIKNKHMNADTDYSIAEAAFNKGETAMTINGPWAWSNIDTSKVNYGVTVLPTFKGQPSKPFVGVLSAGINAASPNKELAKEFLENYLLTDEGLEAVNKDKPLGAVALKSYEEELAKDPRIAATMENAQKGEIMPNIPQMSAFWYAVRTAVINAASGRQTVDEALKDAQTGGSGENLYFQSSDNGPQNQRNAPRITFGGPSDSTGSNQNGERSGARSKQRRPQGLPNNTASWFTALTQHGKEDLKFPRGQGVPINTNSSPDDQIGYYRRATRRIRGGDGKMKDLSPRWYFYYLGTGPEAGLPYGANKDGIIWVATEGALNTPKDHIGTRNPANNAAIVLQLPQGTTLPKGFYAEGSRGGSQASSRSSSRSRNSSRNSTPGSSRGTSPARMAGNGGDAALALLLLDRLNQLESKMSGKGQQQQGQTVTKKSAAEMSKKPRQKRTATKGYNVTQCFGPRGPEQTQGNFGDEELIRKGTDYKHWPQIAQFAPSASAFFGMSRISSKETPSGTWLTYTGAIKLDKDDPNFKDQVILLNKHIDAYKTFPPTEPKKDKKKKADETQALPQRQKKQQTVTLLPAADLDDFSKQLQQSMSSADSTQAGGSGHHHHHH

SEQ ID NO: 3422 - protein, 806 aa, Artificial Sequence
  Description of Artificial Sequence: Synthetic polypeptide
MKIEEGKLVIWINGDKGYNGLAEVGKKFEKDTGIKVTVEHPDKLEEKFPQVAATGDGPDIIFWAHDRFGGYAQSGLLAEITPDKAFQDKLYPFTWDAVRYNGKLIAYPIAVEALSLIYNKDLLPNPPKTWEEIPALDKELKAKGKSALMFNLQEPYFTWPLIAADGGYAFKYENGKYDIKDVGVDNAGAKAGLTFLVDLIKNKHMNADTDYSIAEAAFNKGETAMTINGPWAWSNIDTSKVNYGVTVLPTFKGQPSKPFVGVLSAGINAASPNKELAKEFLENYLLTDEGLEAVNKDKPLGAVALKSYEEELAKDPRIAATMENAQKGEIMPNIPQMSAFWYAVRTAVINAASGRQTVDEALKDAQTGGSGENLYFQSSDNGPQNQRNAPRITFGGPSDSTGSNQNGERSGARSKQRRPQGLPNNTASWFTALTQHGKEDLKFPRGQGVPINTNSSPDDQIGYYRRATRRIRGGDGKMKDLSPRWYFYYLGTGPEAGLPYGANKDGIIWVATEGALNTPKDHIGTRNPANNAAIVLQLPQGTTLPKGFYAEGSRGGSQASSRSSSRSRNSSRNSTPGSSRGTSPARMAGNGGDAALALLLLDRLNQLESKMSGKGQQQQGQTVTKKSAAEASKIPRQKRTATKAYNVTQAFGRRGPEQTQGNFGDQELIRQGTDYKHWPQIAQFAPSASAFFGMSRIGMEVTPSGTWLTYTGAIKLDDKDPNFKDQVILLNKHIDAYKTFPPTEPKKDKKKKADETQALPQRQKKQQTVTLLPAADLDDFSKQLQQSMSSADSTQAGGSGHHHHHH

SEQ ID NO: 3423 - protein, 806 aa, Artificial Sequence
  Description of Artificial Sequence: Synthetic polypeptide
MKIEEGKLVIWINGDKGYNGLAEVGKKFEKDTGIKVTVEHPDKLEEKFPQVAATGDGPDIIFWAHDRFGGYAQSGLLAEITPDKAFQDKLYPFTWDAVRYNGKLIAYPIAVEALSLIYNKDLLPNPPKTWEEIPALDKELKAKGKSALMFNLQEPYFTWPLIAADGGYAFKYENGKYDIKDVGVDNAGAKAGLTFLVDLIKNKHMNADTDYSIAEAAFNKGETAMTINGPWAWSNIDTSKVNYGVTVLPTFKGQPSKPFVGVLSAGINAASPNKELAKEFLENYLLTDEGLEAVNKDKPLGAVALKSYEEELAKDPRIAATMENAQKGEIMPNIPQMSAFWYAVRTAVINAASGRQTVDEALKDAQTGGSGENLYFQSSDNGPQNQRNAPRITFGGPSDSTGSNQNGERSGARSKQRRPQGLPNNTASWFTALTQHGKEDLKFPRGQGVPINTNSSPDDQIGYYRRATRRIRGGDGKMKDLSPRWYFYYLGTGPEAGLPYGANKDGIIWVATEGALNTPKDHIGTRNPANNAAIVLQLPQGTTLPKGFYAEGSRGGSQASSRSSSRSRNSSRNSTPGSSRGTSPARMAGNGGDAALALLLLDRLNQLESKMSGKGQQQQGQTVTKKSAAEASKKPRQKRTATKAYNVTQAFGRRGPEQTQGNFGDQELIRQGTDYKHWPQIAQFAPSASAFFGMSRIGMEITPSGTWLTYTGAIKLDDKDPNFKDQVILLNKHIDAYKTFPPTEPKKDKKKKADETQALPQRQKKQQTVTLLPAADLDDFSKQLQQSMSSADSTQAGGSGHHHHHH

SEQ ID NO: 3424 - protein, 806 aa, Artificial Sequence
  Description of Artificial Sequence: Synthetic polypeptide
MKIEEGKLVIWINGDKGYNGLAEVGKKFEKDTGIKVTVEHPDKLEEKFPQVAATGDGPDIIFWAHDRFGGYAQSGLLAEITPDKAFQDKLYPFTWDAVRYNGKLIAYPIAVEALSLIYNKDLLPNPPKTWEEIPALDKELKAKGKSALMFNLQEPYFTWPLIAADGGYAFKYENGKYDIKDVGVDNAGAKAGLTFLVDLIKNKHMNADTDYSIAEAAFNKGETAMTINGPWAWSNIDTSKVNYGVTVLPTFKGQPSKPFVGVLSAGINAASPNKELAKEFLENYLLTDEGLEAVNKDKPLGAVALKSYEEELAKDPRIAATMENAQKGEIMPNIPQMSAFWYAVRTAVINAASGRQTVDEALKDAQTGGSGENLYFQSSDNGPQNQRNAPRITFGGPSDSTGSNQNGERSGARSKQRRPQGLPNNTASWFTALTQHGKEDLKFPRGQGVPINTNSSPDDQIGYYRRAQRRIRGGDGKMKDLSPRWYFYYLGTGPEAGLPYGANKDGIIWVATEGALNTPKDHIGTRNPANNAAIVLQLPQGTTLPKGFYAEGSRGGSQASSRSSSRSRNSSRNSTPGSSRGTSPARMAGNGGDAALALLLLDRLNQLESKMSGKGQQQQGQTVTKKSAAEASKKPRQKRTATKAYNVTQAFGRRGPEQTQGNFGDQELIRQGTDYKHWPQIAQFAPSASAFFGMSRIGMEVTPSGTWLTYTGAIKLDDKDPNFKDQVILLNKHIDAYKTFPPTEPKKDKKKKADETQALPQRQKKQQTVTLLPAADLDDFSKQLQQSMSSADSTQAGGSGHHHHHH

SEQ ID NO: 3425 - protein, 806 aa, Artificial Sequence
  Description of Artificial Sequence: Synthetic polypeptide
MKIEEGKLVIWINGDKGYNGLAEVGKKFEKDTGIKVTVEHPDKLEEKFPQVAATGDGPDIIFWAHDRFGGYAQSGLLAEITPDKAFQDKLYPFTWDAVRYNGKLIAYPIAVEALSLIYNKDLLPNPPKTWEEIPALDKELKAKGKSALMFNLQEPYFTWPLIAADGGYAFKYENGKYDIKDVGVDNAGAKAGLTFLVDLIKNKHMNADTDYSIAEAAFNKGETAMTINGPWAWSNIDTSKVNYGVTVLPTFKGQPSKPFVGVLSAGINAASPNKELAKEFLENYLLTDEGLEAVNKDKPLGAVALKSYEEELAKDPRIAATMENAQKGEIMPNIPQMSAFWYAVRTAVINAASGRQTVDEALKDAQTGGSGENLYFQSSDNGPQNQRNAPRITFGGPSDSTGSNQNGERSGARSKQRRPQGLPNNTASWFTALTQHGKEDLKFPRGQGVPINTNSSPDDQIGYYRRATRRIRGGDGKMKDLSPRWYFYYLGTGPEAGLPYGENKDGIIWVATEGALNTPKDHIGTRNPANNAAIVLQLPQGTTLPKGFYAEGSRGGSQASSRSSSRSRNSSRNSTPGSSRGTSPARMAGNGGDAALALLLLDRLNQLESKMSGKGQQQQGQTVTKKSAAEASKKPRQKRTATKAYNVTQAFGRRGPEQTQGNFGDQELIRQGTDYKHWPQIAQFAPSASAFFGMSRIGMEVTPSGTWLTYTGAIKLDDKDPNFKDQVILLNKHIDAYKTFPPTEPKKDKKKKADETQALPQRQKKQQTVTLLPAADLDDFSKQLQQSMSSADSTQAGGSGHHHHHH

SEQ ID NO: 3426 - protein, 806 aa, Artificial Sequence
  Description of Artificial Sequence: Synthetic polypeptide
MKIEEGKLVIWINGDKGYNGLAEVGKKFEKDTGIKVTVEHPDKLEEKFPQVAATGDGPDIIFWAHDRFGGYAQSGLLAEITPDKAFQDKLYPFTWDAVRYNGKLIAYPIAVEALSLIYNKDLLPNPPKTWEEIPALDKELKAKGKSALMFNLQEPYFTWPLIAADGGYAFKYENGKYDIKDVGVDNAGAKAGLTFLVDLIKNKHMNADTDYSIAEAAFNKGETAMTINGPWAWSNIDTSKVNYGVTVLPTFKGQPSKPFVGVLSAGINAASPNKELAKEFLENYLLTDEGLEAVNKDKPLGAVALKSYEEELAKDPRIAATMENAQKGEIMPNIPQMSAFWYAVRTAVINAASGRQTVDEALKDAQTGGSGENLYFQSSDNGPQNQRNAPRITFGGPSDSTGSNQNGERSGARSKQRRPQGLPNNTASWFTALTQHGKEDLKFPRGQGVPINTNSSPDDQIGYYRRATRRIRGGDGKMKDLSPRWYFYYLGTGPEAGLPYGANKDGIIWVATEGALNTPKDHIGTRNPANNAAKVLQLPQGTTLPKGFYAEGSRGGSQASSRSSSRSRNSSRNSTPGSSRGTSPARMAGNGGDAALALLLLDRLNQLESKMSGKGQQQQGQTVTKKSAAEASKKPRQKRTATKAYNVTQAFGRRGPEQTQGNFGDQELIRQGTDYKHWPQIAQFAPSASAFFGMSRIGMEVTPSGTWLTYTGAIKLDDKDPNFKDQVILLNKHIDAYKTFPPTEPKKDKKKKADETQALPQRQKKQQTVTLLPAADLDDFSKQLQQSMSSADSTQAGGSGHHHHHH

SEQ ID NO: 3427 - protein, 806 aa, Artificial Sequence
  Description of Artificial Sequence: Synthetic polypeptide
MKIEEGKLVIWINGDKGYNGLAEVGKKFEKDTGIKVTVEHPDKLEEKFPQVAATGDGPDIIFWAHDRFGGYAQSGLLAEITPDKAFQDKLYPFTWDAVRYNGKLIAYPIAVEALSLIYNKDLLPNPPKTWEEIPALDKELKAKGKSALMFNLQEPYFTWPLIAADGGYAFKYENGKYDIKDVGVDNAGAKAGLTFLVDLIKNKHMNADTDYSIAEAAFNKGETAMTINGPWAWSNIDTSKVNYGVTVLPTFKGQPSKPFVGVLSAGINAASPNKELAKEFLENYLLTDEGLEAVNKDKPLGAVALKSYEEELAKDPRIAATMENAQKGEIMPNIPQMSAFWYAVRTAVINAASGRQTVDEALKDAQTGGSGENLYFQSSDNGPQNQRNAPRITFGGPSDSTGSNQNGERSGARSKQRRPQGLPNNTLSWFTALTQHGKEDLKFPRGQGVPINTNSSPDDQIGYYRRATRRIRGGDGKMKDLSPRWYFYYLGTGPEAGLPYGANKDGIIWVATEGALNTPKDHIGTRNPANNAAIVLQLPQGTTLPKGFYAEGSRGGSQASSRSSSRSRNSSRNSTPGSSRGTSPARMAGNGGDAALALLLLDRLNQLESKMSGKGQQQQGQTVTKKSAAEASKKPRQKRTATKAYNVTQAFGRRGPEQTQGNFGDQELIRQGTDYKHWPQIAQFAPSASAFFGMSRIGMEVTPSGTWLTYTGAIKLDDKDPNFKDQVILLNKHIDAYKTFPPTEPKKDKKKKADETQALPQRQKKQQTVTLLPAADLDDFSKQLQQSMSSADSTQAGGSGHHHHHH

SEQ ID NO: 3428 - protein, 806 aa, Artificial Sequence
  Description of Artificial Sequence: Synthetic polypeptide
MKIEEGKLVIWINGDKGYNGLAEVGKKFEKDTGIKVTVEHPDKLEEKFPQVAATGDGPDIIFWAHDRFGGYAQSGLLAEITPDKAFQDKLYPFTWDAVRYNGKLIAYPIAVEALSLIYNKDLLPNPPKTWEEIPALDKELKAKGKSALMFNLQEPYFTWPLIAADGGYAFKYENGKYDIKDVGVDNAGAKAGLTFLVDLIKNKHMNADTDYSIAEAAFNKGETAMTINGPWAWSNIDTSKVNYGVTVLPTFKGQPSKPFVGVLSAGINAASPNKELAKEFLENYLLTDEGLEAVNKDKPLGAVALKSYEEELAKDPRIAATMENAQKGEIMPNIPQMSAFWYAVRTAVINAASGRQTVDEALKDAQTGGSGENLYFQSSDNGPQNQRNAPRITFGGPSDSTGSNQNGERSGARSKQRRPQGLPNNTASWFTALTQHGKEDLKFPRGQGVPINTNSSPDDQIGYYRRATRRIRGGDGKMKDLSPRWYFYYLGTGPEAGLPYGANKDGIIWVATEGALNTPKDHIGTRNPANNAAIVLQLPQGTTLPKGFYAEGSRGGSQASSRSSSRSRNSSRNSTPGSSRGTSPARMAGNGGDAALALLLLDRLNQLESKMSGKGQQQQGQTVTKKSAAEASKKPRQKRTATKEYNVTQAFGRRGPEQTQGNFGDQDLNKLGTDYKHWPQIAQFAPSASAFFGMSRIGTEETPSGTWLTYTGAIKLDKKDPNFKDQVILLNKHIDAYKTFPPTEPKKDKKKKADETQALPQRQKKQQTVTLLPAADLDDFSKQLQQSMSSADSTQAGGSGHHHHHH

SEQ ID NO: 3429 - protein, 806 aa, Artificial Sequence
  Description of Artificial Sequence: Synthetic polypeptide
MKIEEGKLVIWINGDKGYNGLAEVGKKFEKDTGIKVTVEHPDKLEEKFPQVAATGDGPDIIFWAHDRFGGYAQSGLLAEITPDKAFQDKLYPFTWDAVRYNGKLIAYPIAVEALSLIYNKDLLPNPPKTWEEIPALDKELKAKGKSALMFNLQEPYFTWPLIAADGGYAFKYENGKYDIKDVGVDNAGAKAGLTFLVDLIKNKHMNADTDYSIAEAAFNKGETAMTINGPWAWSNIDTSKVNYGVTVLPTFKGQPSKPFVGVLSAGINAASPNKELAKEFLENYLLTDEGLEAVNKDKPLGAVALKSYEEELAKDPRIAATMENAQKGEIMPNIPQMSAFWYAVRTAVINAASGRQTVDEALKDAQTGGSGENLYFQSSDNGPQNQRNAPRITFGGPSDSTGSNQNGERSGARSKQRRPQGLPNNTASWFTPLTQHGKEDLKFPPGQGVPINTNSSPDDQIGYYRRATRRIRGGDGKMKDLPPRWYFYYLGTGPEADLPYGAVKDGIVWVAAEGALNTPKDHIGTRNPANNAAIPLQLPPGTTLPKGFYAEGSRGGSQASSRSSSRSRNSSRNSTPGSSRGTSPARMAGNGGDAALALLLLDRLNQLESKMSGKGQQQQGQTVTKKSAAEASKKPRQKRTATKAYNVTQAFGRRGPEQTQGNFGDQELIRQGTDYKHWPQIAQFAPSASAFFGMSRIGMEVTPSGTWLTYTGAIKLDDKDPNFKDQVILLNKHIDAYKTFPPTEPKKDKKKKADETQALPQRQKKQQTVTLLPAADLDDFSKQLQQSMSSADSTQAGGSGHHHHHH

SEQ ID NO: 3430 - protein, 806 aa, Artificial Sequence
  Description of Artificial Sequence: Synthetic polypeptide
MKIEEGKLVIWINGDKGYNGLAEVGKKFEKDTGIKVTVEHPDKLEEKFPQVAATGDGPDIIFWAHDRFGGYAQSGLLAEITPDKAFQDKLYPFTWDAVRYNGKLIAYPIAVEALSLIYNKDLLPNPPKTWEEIPALDKELKAKGKSALMFNLQEPYFTWPLIAADGGYAFKYENGKYDIKDVGVDNAGAKAGLTFLVDLIKNKHMNADTDYSIAEAAFNKGETAMTINGPWAWSNIDTSKVNYGVTVLPTFKGQPSKPFVGVLSAGINAASPNKELAKEFLENYLLTDEGLEAVNKDKPLGAVALKSYEEELAKDPRIAATMENAQKGEIMPNIPQMSAFWYAVRTAVINAASGRQTVDEALKDAQTGGSGENLYFQSSDNGPQNQRNAPRITFGGPSDSTGSNQNGERSGARSKQRRPQGLPNNTASWFTALTQHGKEDLKFPRGQGVPINTNSSPDDQIGYYRRATRRIRGGDGKMKDLSPRWYFYYLGTGPEAGLPYGANKDGIIWVATEGALNTPKDHIGTRNPANNAAIVLQLPNGTTLPKGFYAEGSRGGSQASSRSSSRSRNSSRNSTPGSSRGTSPARMAGNGGDAALALLLLDRLNQLESKMSGKGQQQQGQTVTKKSAAEASKKPRQKRTATKAYNVTQAFGRRGPEQTQGNFGDQELIRQGTDYKHWPQIAQFAPSASAFFGMSRIGMEVTPSGTWLTYTGAIKLDDKDPNFKDQVILLNKHIDAYKTFPPTEPKKDKKKKADETQALPQRQKKQQTVTLLPAADLDDFSKQLQQSMSSADSTQAGGSGHHHHHH

SEQ ID NO: 3431 - protein, 806 aa, Artificial Sequence
  Description of Artificial Sequence: Synthetic polypeptide
MKIEEGKLVIWINGDKGYNGLAEVGKKFEKDTGIKVTVEHPDKLEEKFPQVAATGDGPDIIFWAHDRFGGYAQSGLLAEITPDKAFQDKLYPFTWDAVRYNGKLIAYPIAVEALSLIYNKDLLPNPPKTWEEIPALDKELKAKGKSALMFNLQEPYFTWPLIAADGGYAFKYENGKYDIKDVGVDNAGAKAGLTFLVDLIKNKHMNADTDYSIAEAAFNKGETAMTINGPWAWSNIDTSKVNYGVTVLPTFKGQPSKPFVGVLSAGINAASPNKELAKEFLENYLLTDEGLEAVNKDKPLGAVALKSYEEELAKDPRIAATMENAQKGEIMPNIPQMSAFWYAVRTAVINAASGRQTVDEALKDAQTGGSGENLYFQSSDNGPQNQRNAPRITFGGPSDSTGSNQNGERSGARSKQRRPQGLPNNTASWFTPLTQFGKEDLKFPPGQGVPINTNSSPDDQIGYYRRATRRIRGGDGKMKDLPPKWYFYYLGTGPHADLPYGHKMDGVVWVARPGALNTPKDHIGTRNPANNAAIPLQLPPGTKLPKGFYAEGSRGGSQASSRSSSRSRNSSRNSTPGSSRGTSPARMAGNGGDAALALLLLDRLNQLESKMSGKGQQQQGQTVTKKSAAEASKKPRQKRTATKAYNVTQAFGRRGPEQTQGNFGDQELIRQGTDYKHWPQIAQFAPSASAFFGMSRIGMEVTPSGTWLTYTGAIKLDDKDPNFKDQVILLNKHIDAYKTFPPTEPKKDKKKKADETQALPQRQKKQQTVTLLPAADLDDFSKQLQQSMSSADSTQAGGSGHHHHHH

SEQ ID NO: 3432 - protein, 806 aa, Artificial Sequence
  Description of Artificial Sequence: Synthetic polypeptide
MKIEEGKLVIWINGDKGYNGLAEVGKKFEKDTGIKVTVEHPDKLEEKFPQVAATGDGPDIIFWAHDRFGGYAQSGLLAEITPDKAFQDKLYPFTWDAVRYNGKLIAYPIAVEALSLIYNKDLLPNPPKTWEEIPALDKELKAKGKSALMFNLQEPYFTWPLIAADGGYAFKYENGKYDIKDVGVDNAGAKAGLTFLVDLIKNKHMNADTDYSIAEAAFNKGETAMTINGPWAWSNIDTSKVNYGVTVLPTFKGQPSKPFVGVLSAGINAASPNKELAKEFLENYLLTDEGLEAVNKDKPLGAVALKSYEEELAKDPRIAATMENAQKGEIMPNIPQMSAFWYAVRTAVINAASGRQTVDEALKDAQTGGSGENLYFQSSDNGPQNQRNAPRITFGGPSDSTGSNQNGERSGARSKQRRPQGLPNNTASWFTALTQHGKEDLKFPRGQGVPINTNSSPDDQIGYYRRATRRIRGGDGKMKDLSPRWYFYYLGTGPEAGLPYGANKDGIIWVATEGALNTPKDHIGTRNPANNAAIVLQLPQGTTLPKGFYAEGSRGGSQASSRSSSRSRNSSRNSTPGSSRGTSPARMAGNGGDAALALLLLDRLNQLESKMSGKGQQQQGQTVTKKSAAEASKKPRQKRTATKAYNVTQAFGRRGPEQTQGNFGDQELIRQGTDYKHWPQIAQFAPSASAFFGMSEIGMEVTPSGTWLTYTGAIKLDDKDPNFKDQVILLNKHIDAYKTFPPTEPKKDKKKKADETQALPQRQKKQQTVTLLPAADLDDFSKQLQQSMSSADSTQAGGSGHHHHHH

SEQ ID NO: 3433 - protein, 806 aa, Artificial Sequence
  Description of Artificial Sequence: Synthetic polypeptide
MKIEEGKLVIWINGDKGYNGLAEVGKKFEKDTGIKVTVEHPDKLEEKFPQVAATGDGPDIIFWAHDRFGGYAQSGLLAEITPDKAFQDKLYPFTWDAVRYNGKLIAYPIAVEALSLIYNKDLLPNPPKTWEEIPALDKELKAKGKSALMFNLQEPYFTWPLIAADGGYAFKYENGKYDIKDVGVDNAGAKAGLTFLVDLIKNKHMNADTDYSIAEAAFNKGETAMTINGPWAWSNIDTSKVNYGVTVLPTFKGQPSKPFVGVLSAGINAASPNKELAKEFLENYLLTDEGLEAVNKDKPLGAVALKSYEEELAKDPRIAATMENAQKGEIMPNIPQMSAFWYAVRTAVINAASGRQTVDEALKDAQTGGSGENLYFQSSDNGPQNQRNAPRITFGGPSDSTGSNQNGERSGARSKQRRPQGLPNNTASWFTALTQHGKEDLKFPRGQGVPINTNSSPDDQIGYYRRATRRIRGGDGKMKDLSPRWYFYYLGTGPEAGLPYGANKDGIIWVATEGALNTPKDHIGTRNPANNAAIVLQLPQGTQLPKGFYAEGSRGGSQASSRSSSRSRNSSRNSTPGSSRGTSPARMAGNGGDAALALLLLDRLNQLESKMSGKGQQQQGQTVTKKSAAEASKKPRQKRTATKAYNVTQAFGRRGPEQTQGNFGDQELIRQGTDYKHWPQIAQFAPSASAFFGMSRIGMEVTPSGTWLTYTGAIKLDDKDPNFKDQVILLNKHIDAYKTFPPTEPKKDKKKKADETQALPQRQKKQQTVTLLPAADLDDFSKQLQQSMSSADSTQAGGSGHHHHHH

SEQ ID NO: 3434 - protein, 806 aa, Artificial Sequence
  Description of Artificial Sequence: Synthetic polypeptide
MKIEEGKLVIWINGDKGYNGLAEVGKKFEKDTGIKVTVEHPDKLEEKFPQVAATGDGPDIIFWAHDRFGGYAQSGLLAEITPDKAFQDKLYPFTWDAVRYNGKLIAYPIAVEALSLIYNKDLLPNPPKTWEEIPALDKELKAKGKSALMFNLQEPYFTWPLIAADGGYAFKYENGKYDIKDVGVDNAGAKAGLTFLVDLIKNKHMNADTDYSIAEAAFNKGETAMTINGPWAWSNIDTSKVNYGVTVLPTFKGQPSKPFVGVLSAGINAASPNKELAKEFLENYLLTDEGLEAVNKDKPLGAVALKSYEEELAKDPRIAATMENAQKGEIMPNIPQMSAFWYAVRTAVINAASGRQTVDEALKDAQTGGSGENLYFQSSDNGPQNQRNAPRITFGGPSDSTGSNQNGERSGARSKQRRPQGLPNNTASWFTALTQHGKEDLKFPRGQGVPINTNSSPDDQIGYYRRATRRIRGGDGKMKDLSPRWYFYYLGTGPEAGLPYGANKDGIIWVATEGALNTPKDHIGTRNPANNAAIVLQLPQGTTLPKGFYAEGSRGGSQASSRSSSRSRNSSRNSTPGSSRGTSPARMAGNGGDAALALLLLDRLNQLESKMSGKGQQQQGQTVTKKSAAEMSKKPRQKRTATKECNVTQCFGPRGPEQTQGNFGDAELIKKGTDYKHWPQIAQFAPSASAFFGMSRISSKEQPSGTWLTYTGAIKLDKDDPNFKDQVILLNKHIDAYKTFPPTEPKKDKKKKADETQALPQRQKKQQTVTLLPAADLDDFSKQLQQSMSSADSTQAGGSGHHHHHH

SEQ ID NO: 3435 - protein, 806 aa, Artificial Sequence
  Description of Artificial Sequence: Synthetic polypeptide
MKIEEGKLVIWINGDKGYNGLAEVGKKFEKDTGIKVTVEHPDKLEEKFPQVAATGDGPDIIFWAHDRFGGYAQSGLLAEITPDKAFQDKLYPFTWDAVRYNGKLIAYPIAVEALSLIYNKDLLPNPPKTWEEIPALDKELKAKGKSALMFNLQEPYFTWPLIAADGGYAFKYENGKYDIKDVGVDNAGAKAGLTFLVDLIKNKHMNADTDYSIAEAAFNKGETAMTINGPWAWSNIDTSKVNYGVTVLPTFKGQPSKPFVGVLSAGINAASPNKELAKEFLENYLLTDEGLEAVNKDKPLGAVALKSYEEELAKDPRIAATMENAQKGEIMPNIPQMSAFWYAVRTAVINAASGRQTVDEALKDAQTGGSGENLYFQSSDNGPQNQRNAPRITFGGPSDSTGSNQNGERSGARSKQRRPQGLPNNTASWFTALTQHGKEDLKFPRGQGVPINTNSSPDDQIGYYRRMTRRIRGGDGKMKDLSPRWYFYYLGTGPEAGLPYGANKDGIIWVATEGALNTPKDHIGTRNPANNAAIVLQLPQGTTLPKGFYAEGSRGGSQASSRSSSRSRNSSRNSTPGSSRGTSPARMAGNGGDAALALLLLDRLNQLESKMSGKGQQQQGQTVTKKSAAEASKKPRQKRTATKAYNVTQAFGRRGPEQTQGNFGDQELIRQGTDYKHWPQIAQFAPSASAFFGMSRIGMEVTPSGTWLTYTGAIKLDDKDPNFKDQVILLNKHIDAYKTFPPTEPKKDKKKKADETQALPQRQKKQQTVTLLPAADLDDFSKQLQQSMSSADSTQAGGSGHHHHHH

SEQ ID NO: 3436 - protein, 806 aa, Artificial Sequence
  Description of Artificial Sequence: Synthetic polypeptide
MKIEEGKLVIWINGDKGYNGLAEVGKKFEKDTGIKVTVEHPDKLEEKFPQVAATGDGPDIIFWAHDRFGGYAQSGLLAEITPDKAFQDKLYPFTWDAVRYNGKLIAYPIAVEALSLIYNKDLLPNPPKTWEEIPALDKELKAKGKSALMFNLQEPYFTWPLIAADGGYAFKYENGKYDIKDVGVDNAGAKAGLTFLVDLIKNKHMNADTDYSIAEAAFNKGETAMTINGPWAWSNIDTSKVNYGVTVLPTFKGQPSKPFVGVLSAGINAASPNKELAKEFLENYLLTDEGLEAVNKDKPLGAVALKSYEEELAKDPRIAATMENAQKGEIMPNIPQMSAFWYAVRTAVINAASGRQTVDEALKDAQTGGSGENLYFQSSDNGPQNQRNAPRITFGGPSDSTGSNQNGERSGARSKQRRPQGLPNNTASWFTALTQHGKEDLKFPRGQGVPINTNSSPDDQIGYYRRATRRIRGGDGKMKDLSPRWYFYYLGTGPEAGLPYGANKDGIIWVATEGALNTPKDHIGTRNPANNAAIVLQLPQGTTLPKGFYAEGSRGGSQASSRSSSRSRNSSRNSTPGSSRGTSPARMAGNGGDAALALLLLDRLNQLESKMSGKGQQQQGQTVTKKSAAEASKKPRQKRTATKAYNVTQAFGSRGPEQTQGNFGDQELIRQGTDYKHWPQIAQFAPSASAFFGMSRIGMEVTPSGTWLTYTGAIKLDDKDPNFKDQVILLNKHIDAYKTFPPTEPKKDKKKKADETQALPQRQKKQQTVTLLPAADLDDFSKQLQQSMSSADSTQAGGSGHHHHHH

SEQ ID NO: 3437 - protein, 806 aa, Artificial Sequence
  Description of Artificial Sequence: Synthetic polypeptide
MKIEEGKLVIWINGDKGYNGLAEVGKKFEKDTGIKVTVEHPDKLEEKFPQVAATGDGPDIIFWAHDRFGGYAQSGLLAEITPDKAFQDKLYPFTWDAVRYNGKLIAYPIAVEALSLIYNKDLLPNPPKTWEEIPALDKELKAKGKSALMFNLQEPYFTWPLIAADGGYAFKYENGKYDIKDVGVDNAGAKAGLTFLVDLIKNKHMNADTDYSIAEAAFNKGETAMTINGPWAWSNIDTSKVNYGVTVLPTFKGQPSKPFVGVLSAGINAASPNKELAKEFLENYLLTDEGLEAVNKDKPLGAVALKSYEEELAKDPRIAATMENAQKGEIMPNIPQMSAFWYAVRTAVINAASGRQTVDEALKDAQTGGSGENLYFQSSDNGPQNQRNAPRITFGGPSDSTGSNQNGERSGARSKQRRPQGLPNNTASWFTALTQHGKEDLKFPRGQGVPINTNSSPDDQIGYYRRATRRIRGGDGKMKDLSPRWYFYYLGTGPEAGLPYGTNKDGIIWVATEGALNTPKDHIGTRNPANNAAIVLQLPQGTTLPKGFYAEGSRGGSQASSRSSSRSRNSSRNSTPGSSRGTSPARMAGNGGDAALALLLLDRLNQLESKMSGKGQQQQGQTVTKKSAAEASKKPRQKRTATKAYNVTQAFGRRGPEQTQGNFGDQELIRQGTDYKHWPQIAQFAPSASAFFGMSRIGMEVTPSGTWLTYTGAIKLDDKDPNFKDQVILLNKHIDAYKTFPPTEPKKDKKKKADETQALPQRQKKQQTVTLLPAADLDDFSKQLQQSMSSADSTQAGGSGHHHHHH

SEQ ID NO: 3438 - protein, 806 aa, Artificial Sequence
  Description of Artificial Sequence: Synthetic polypeptide
MKIEEGKLVIWINGDKGYNGLAEVGKKFEKDTGIKVTVEHPDKLEEKFPQVAATGDGPDIIFWAHDRFGGYAQSGLLAEITPDKAFQDKLYPFTWDAVRYNGKLIAYPIAVEALSLIYNKDLLPNPPKTWEEIPALDKELKAKGKSALMFNLQEPYFTWPLIAADGGYAFKYENGKYDIKDVGVDNAGAKAGLTFLVDLIKNKHMNADTDYSIAEAAFNKGETAMTINGPWAWSNIDTSKVNYGVTVLPTFKGQPSKPFVGVLSAGINAASPNKELAKEFLENYLLTDEGLEAVNKDKPLGAVALKSYEEELAKDPRIAATMENAQKGEIMPNIPQMSAFWYAVRTAVINAASGRQTVDEALKDAQTGGSGENLYFQSSDNGPQNQRNAPRITFGGPSDSTGSNQNGERSGARSKQRRPQGLPNNTASWFTALTQHGKEDLKFPRGQGVPINTNSSPDDQIGYYRRATRRIRGGDGKMKDLSPRWYFYYLGTGPEAGLPYGANKDGIIWVATEGALNTPKDHIGTRNPANNAAIVLQLPQGTTLPKGFYAEGSRGGSQASSRSSSRSRNSSRNSTPGSSRGTSPARMAGNGGDAALALLLLDRLNQLESKMSGKGQQQQGQTVTKKSAAEASKKPRQKRTATKAYNVTQAFGRRGPEQTQGNFGDQELIRQGTDYKHWPQIAQFAPSAQAFFGMSRIGMEVTPSGTWLTYTGAIKLDDKDPNFKDQVILLNKHIDAYKTFPPTEPKKDKKKKADETQALPQRQKKQQTVTLLPAADLDDFSKQLQQSMSSADSTQAGGSGHHHHHH

SEQ ID NO: 3439 - protein, 806 aa, Artificial Sequence
  Description of Artificial Sequence: Synthetic polypeptide
MKIEEGKLVIWINGDKGYNGLAEVGKKFEKDTGIKVTVEHPDKLEEKFPQVAATGDGPDIIFWAHDRFGGYAQSGLLAEITPDKAFQDKLYPFTWDAVRYNGKLIAYPIAVEALSLIYNKDLLPNPPKTWEEIPALDKELKAKGKSALMFNLQEPYFTWPLIAADGGYAFKYENGKYDIKDVGVDNAGAKAGLTFLVDLIKNKHMNADTDYSIAEAAFNKGETAMTINGPWAWSNIDTSKVNYGVTVLPTFKGQPSKPFVGVLSAGINAASPNKELAKEFLENYLLTDEGLEAVNKDKPLGAVALKSYEEELAKDPRIAATMENAQKGEIMPNIPQMSAFWYAVRTAVINAASGRQTVDEALKDAQTGGSGENLYFQSSDNGPQNQRNAPRITFGGPSDSTGSNQNGERSGARSKQRRPQGLPNNTASWFTALTQHGKEDLKFPRGQGVPINTNSSPDDQIGTYRRATRRIRGGDGKMKDLSPRWYFYYLGTGPEAGLPYGANKDGIIWVATEGALNTPKDHIGTRNPANNAAIVLQLPQGTTLPKGFYAEGSRGGSQASSRSSSRSRNSSRNSTPGSSRGTSPARMAGNGGDAALALLLLDRLNQLESKMSGKGQQQQGQTVTKKSAAEASKKPRQKRTATKAYNVTQAFGRRGPEQTQGNFGDQELIRQGTDYKHWPQIAQFAPSASAFFGMSRIGMEVTPSGTWLTYTGAIKLDDKDPNFKDQVILLNKHIDAYKTFPPTEPKKDKKKKADETQALPQRQKKQQTVTLLPAADLDDFSKQLQQSMSSADSTQAGGSGHHHHHH

SEQ ID NO: 3440 - protein, 806 aa, Artificial Sequence
  Description of Artificial Sequence: Synthetic polypeptide
MKIEEGKLVIWINGDKGYNGLAEVGKKFEKDTGIKVTVEHPDKLEEKFPQVAATGDGPDIIFWAHDRFGGYAQSGLLAEITPDKAFQDKLYPFTWDAVRYNGKLIAYPIAVEALSLIYNKDLLPNPPKTWEEIPALDKELKAKGKSALMFNLQEPYFTWPLIAADGGYAFKYENGKYDIKDVGVDNAGAKAGLTFLVDLIKNKHMNADTDYSIAEAAFNKGETAMTINGPWAWSNIDTSKVNYGVTVLPTFKGQPSKPFVGVLSAGINAASPNKELAKEFLENYLLTDEGLEAVNKDKPLGAVALKSYEEELAKDPRIAATMENAQKGEIMPNIPQMSAFWYAVRTAVINAASGRQTVDEALKDAQTGGSGENLYFQSSDNGPQNQRNAPRITFGGPSDSTGSNQNGERSGARSKQRRPQGLPNNTASWFTALTQHGKEDLKFPRGQGVPINTNSSPDDQIGYYRRATRRIRGGDGKMKDLSPRWYFYYLGTGPEAGLPYGANKDGIIWVATEGALNTPKDHIGTRNPANNAAIVLQLPQGTTLPKGFYAEGSRGGSQASSRSSSRSRNSSRNSTPGSSRGTSPARMAGNGGDAALALLLLDRLNQLESKMSGKGQQQQGQTVTKKSAAEASKKPRQKRTATKGYNVTQAFGRRGPEQTQGNFGDQDLIKLGTDYKHWPQIAQFAPSASAFFGMSRIGTRETPSGTWLTYTGAIKLDKKDPNFKDQVILLNKHIDAYKTFPPTEPKKDKKKKADETQALPQRQKKQQTVTLLPAADLDDFSKQLQQSMSSADSTQAGGSGHHHHHH

SEQ ID NO: 3441 - protein, 806 aa, Artificial Sequence
  Description of Artificial Sequence: Synthetic polypeptide
MKIEEGKLVIWINGDKGYNGLAEVGKKFEKDTGIKVTVEHPDKLEEKFPQVAATGDGPDIIFWAHDRFGGYAQSGLLAEITPDKAFQDKLYPFTWDAVRYNGKLIAYPIAVEALSLIYNKDLLPNPPKTWEEIPALDKELKAKGKSALMFNLQEPYFTWPLIAADGGYAFKYENGKYDIKDVGVDNAGAKAGLTFLVDLIKNKHMNADTDYSIAEAAFNKGETAMTINGPWAWSNIDTSKVNYGVTVLPTFKGQPSKPFVGVLSAGINAASPNKELAKEFLENYLLTDEGLEAVNKDKPLGAVALKSYEEELAKDPRIAATMENAQKGEIMPNIPQMSAFWYAVRTAVINAASGRQTVDEALKDAQTGGSGENLYFQSSDNGPQNQRNAPRITFGGPSDSTGSNQNGERSGARSKQRRPQGLPNNTASWFTALTQHGKEDLKFPRGQGVPINTNSSPDDQIGYYRRATRRIRGGDGKMKDLSPRWYFYYLGTGPEAGLPYGANKDGIIWVATEGALNTPKDHIGTRNPANNAAIVLQLPSGTTLPKGFYAEGSRGGSQASSRSSSRSRNSSRNSTPGSSRGTSPARMAGNGGDAALALLLLDRLNQLESKMSGKGQQQQGQTVTKKSAAEASKKPRQKRTATKAYNVTQAFGRRGPEQTQGNFGDQELIRQGTDYKHWPQIAQFAPSASAFFGMSRIGMEVTPSGTWLTYTGAIKLDDKDPNFKDQVILLNKHIDAYKTFPPTEPKKDKKKKADETQALPQRQKKQQTVTLLPAADLDDFSKQLQQSMSSADSTQAGGSGHHHHHH

SEQ ID NO: 3442 - protein, 806 aa, Artificial Sequence
  Description of Artificial Sequence: Synthetic polypeptide
MKIEEGKLVIWINGDKGYNGLAEVGKKFEKDTGIKVTVEHPDKLEEKFPQVAATGDGPDIIFWAHDRFGGYAQSGLLAEITPDKAFQDKLYPFTWDAVRYNGKLIAYPIAVEALSLIYNKDLLPNPPKTWEEIPALDKELKAKGKSALMFNLQEPYFTWPLIAADGGYAFKYENGKYDIKDVGVDNAGAKAGLTFLVDLIKNKHMNADTDYSIAEAAFNKGETAMTINGPWAWSNIDTSKVNYGVTVLPTFKGQPSKPFVGVLSAGINAASPNKELAKEFLENYLLTDEGLEAVNKDKPLGAVALKSYEEELAKDPRIAATMENAQKGEIMPNIPQMSAFWYAVRTAVINAASGRQTVDEALKDAQTGGSGENLYFQSSDNGPQNQRNAPRITFGGPSDSTGSNQNGERSGARSKQRRPQGLPNNTASWFTALTQHGKEDLKFPRGQGVPINTNSSPDDQIGYYRRATRRIRGGDGKMKDLSPRWYFYYLGTGPEAHLPYGANKDGIIWVATEGALNTPKDHIGTRNPANNAAIVLQLPQGTTLPKGFYAEGSRGGSQASSRSSSRSRNSSRNSTPGSSRGTSPARMAGNGGDAALALLLLDRLNQLESKMSGKGQQQQGQTVTKKSAAEASKKPRQKRTATKAYNVTQAFGRRGPEQTQGNFGDQELIRQGTDYKHWPQIAQFAPSASAFFGMSRIGMEVTPSGTWLTYTGAIKLDDKDPNFKDQVILLNKHIDAYKTFPPTEPKKDKKKKADETQALPQRQKKQQTVTLLPAADLDDFSKQLQQSMSSADSTQAGGSGHHHHHH

SEQ ID NO: 3443 - protein, 806 aa, Artificial Sequence
  Description of Artificial Sequence: Synthetic polypeptide
MKIEEGKLVIWINGDKGYNGLAEVGKKFEKDTGIKVTVEHPDKLEEKFPQVAATGDGPDIIFWAHDRFGGYAQSGLLAEITPDKAFQDKLYPFTWDAVRYNGKLIAYPIAVEALSLIYNKDLLPNPPKTWEEIPALDKELKAKGKSALMFNLQEPYFTWPLIAADGGYAFKYENGKYDIKDVGVDNAGAKAGLTFLVDLIKNKHMNADTDYSIAEAAFNKGETAMTINGPWAWSNIDTSKVNYGVTVLPTFKGQPSKPFVGVLSAGINAASPNKELAKEFLENYLLTDEGLEAVNKDKPLGAVALKSYEEELAKDPRIAATMENAQKGEIMPNIPQMSAFWYAVRTAVINAASGRQTVDEALKDAQTGGSGENLYFQSSDNGPQNQRNAPRITFGGPSDSTGSNQNGERSGARSKQRRPQGLPNNTASWFTALTQHGKEDLKFPRGQGVPINTNSSPDDQIGYYRRATRRIRGGDGKMKDLSPRWYFYYLGTGPEAGLPYGANKDGIIWVATEGALNTPKDHIGTRNPANNAAIVLQLPQGTTLPKGFYAEGSRGGSQASSRSSSRSRNSSRNSTPGSSRGTSPARMAGNGGDAALALLLLDRLNQLESKMSGKGQQQQGQTVTKKTAAEASKKPRQKRTATKAYNVTQAFGRRGPEQTQGNFGDQELIRQGTDYKHWPQIAQFAPSASAFFGMSRIGMEVTPSGTWLTYTGAIKLDDKDPNFKDQVILLNKHIDAYKTFPPTEPKKDKKKKADETQALPQRQKKQQTVTLLPAADLDDFSKQLQQSMSSADSTQAGGSGHHHHHH

SEQ ID NO: 3444 - protein, 806 aa, Artificial Sequence
  Description of Artificial Sequence: Synthetic polypeptide
MKIEEGKLVIWINGDKGYNGLAEVGKKFEKDTGIKVTVEHPDKLEEKFPQVAATGDGPDIIFWAHDRFGGYAQSGLLAEITPDKAFQDKLYPFTWDAVRYNGKLIAYPIAVEALSLIYNKDLLPNPPKTWEEIPALDKELKAKGKSALMFNLQEPYFTWPLIAADGGYAFKYENGKYDIKDVGVDNAGAKAGLTFLVDLIKNKHMNADTDYSIAEAAFNKGETAMTINGPWAWSNIDTSKVNYGVTVLPTFKGQPSKPFVGVLSAGINAASPNKELAKEFLENYLLTDEGLEAVNKDKPLGAVALKSYEEELAKDPRIAATMENAQKGEIMPNIPQMSAFWYAVRTAVINAASGRQTVDEALKDAQTGGSGENLYFQSSDNGPQNQRNAPRITFGGPSDSTGSNQNGERSGARSKQRRPQGLPNNTASWFTPLTQHGKEDLKFPPGQGVPINTNSSPDDQIGYYRRATRRIRGGDGKMKDLPPRWYFYYLGTGPEADLPYGAVKPGIVWVAEEGALNTPKDHIGTRNPANNAAIPLQLPPGTTLPKGFYAEGSRGGSQASSRSSSRSRNSSRNSTPGSSRGTSPARMAGNGGDAALALLLLDRLNQLESKMSGKGQQQQGQTVTKKSAAEASKKPRQKRTATKAYNVTQAFGRRGPEQTQGNFGDQELIRQGTDYKHWPQIAQFAPSASAFFGMSRIGMEVTPSGTWLTYTGAIKLDDKDPNFKDQVILLNKHIDAYKTFPPTEPKKDKKKKADETQALPQRQKKQQTVTLLPAADLDDFSKQLQQSMSSADSTQAGGSGHHHHHH

SEQ ID NO: 3445 - protein, 806 aa, Artificial Sequence
  Description of Artificial Sequence: Synthetic polypeptide
MKIEEGKLVIWINGDKGYNGLAEVGKKFEKDTGIKVTVEHPDKLEEKFPQVAATGDGPDIIFWAHDRFGGYAQSGLLAEITPDKAFQDKLYPFTWDAVRYNGKLIAYPIAVEALSLIYNKDLLPNPPKTWEEIPALDKELKAKGKSALMFNLQEPYFTWPLIAADGGYAFKYENGKYDIKDVGVDNAGAKAGLTFLVDLIKNKHMNADTDYSIAEAAFNKGETAMTINGPWAWSNIDTSKVNYGVTVLPTFKGQPSKPFVGVLSAGINAASPNKELAKEFLENYLLTDEGLEAVNKDKPLGAVALKSYEEELAKDPRIAATMENAQKGEIMPNIPQMSAFWYAVRTAVINAASGRQTVDEALKDAQTGGSGENLYFQSSDNGPQNQRNAPRITFGGPSDSTGSNQNGERSGARSKQRRPQGLPNNTASWFTALTQHGKEDLKFPRGQGVPINTNSSPDDQIGYYRRATRRIRGGDGKMKDLSPRWYFYYLGTGPEAGLPYGANKDGIIWVATEGALNTPKDHIGTRNPANNAAIVLQLPQGTTLPKGFYAEGSRGGSQASSRSSSRSRNSSRNSTPGSSRGTSPARMAGNGGDAALALLLLDRLNQLESKMSGKGQQQQGQTVTKKSAAEASKKPRQKRTATKAYNVTQAFGRRGPEQTQGNFGDQEFIRQGTDYKHWPQIAQFAPSASAFFGMSRIGMEVTPSGTWLTYTGAIKLDDKDPNFKDQVILLNKHIDAYKTFPPTEPKKDKKKKADETQALPQRQKKQQTVTLLPAADLDDFSKQLQQSMSSADSTQAGGSGHHHHHH

SEQ ID NO: 3446 - protein, 806 aa, Artificial Sequence
  Description of Artificial Sequence: Synthetic polypeptide
MKIEEGKLVIWINGDKGYNGLAEVGKKFEKDTGIKVTVEHPDKLEEKFPQVAATGDGPDIIFWAHDRFGGYAQSGLLAEITPDKAFQDKLYPFTWDAVRYNGKLIAYPIAVEALSLIYNKDLLPNPPKTWEEIPALDKELKAKGKSALMFNLQEPYFTWPLIAADGGYAFKYENGKYDIKDVGVDNAGAKAGLTFLVDLIKNKHMNADTDYSIAEAAFNKGETAMTINGPWAWSNIDTSKVNYGVTVLPTFKGQPSKPFVGVLSAGINAASPNKELAKEFLENYLLTDEGLEAVNKDKPLGAVALKSYEEELAKDPRIAATMENAQKGEIMPNIPQMSAFWYAVRTAVINAASGRQTVDEALKDAQTGGSGENLYFQSSDNGPQNQRNAPRITFGGPSDSTGSNQNGERSGARSKQRRPQGLPNNTASWFTALTQHGKEDLKFPRGQGVPINTNSSPDDQIGYYRRATRRIRGGDGKMKDLSPRWYFYYLGTGPEAGLPYGANKDGIIWVATEGALNTPKDHIGTRNPANNAAIVLQLPQGTTLPKGFYAEGSRGGSQASSRSSSRSRNSSRNSTPGSSRGTSPARMAGNGGDAALALLLLDRLNQLESKMSGKGQQQQGQTVTKKSAAEASKKPRQKRTATKAYNVTQAFGRRGPEQTQGNFGDQELIRQGTDYKHWPQIAQFIPSASAFFGMSRIGMEVTPSGTWLTYTGAIKLDDKDPNFKDQVILLNKHIDAYKTFPPTEPKKDKKKKADETQALPQRQKKQQTVTLLPAADLDDFSKQLQQSMSSADSTQAGGSGHHHHHH

SEQ ID NO: 3447 - protein, 806 aa, Artificial Sequence
  Description of Artificial Sequence: Synthetic polypeptide
MKIEEGKLVIWINGDKGYNGLAEVGKKFEKDTGIKVTVEHPDKLEEKFPQVAATGDGPDIIFWAHDRFGGYAQSGLLAEITPDKAFQDKLYPFTWDAVRYNGKLIAYPIAVEALSLIYNKDLLPNPPKTWEEIPALDKELKAKGKSALMFNLQEPYFTWPLIAADGGYAFKYENGKYDIKDVGVDNAGAKAGLTFLVDLIKNKHMNADTDYSIAEAAFNKGETAMTINGPWAWSNIDTSKVNYGVTVLPTFKGQPSKPFVGVLSAGINAASPNKELAKEFLENYLLTDEGLEAVNKDKPLGAVALKSYEEELAKDPRIAATMENAQKGEIMPNIPQMSAFWYAVRTAVINAASGRQTVDEALKDAQTGGSGENLYFQSSDNGPQNQRNAPRITFGGPSDSTGSNQNGERSGARSKQRRPQGLPNNTASWFTALTQHGKEDLKFPRGQGVPINTNSQPDDQIGYYRRATRRIRGGDGKMKDLSPRWYFYYLGTGPEAGLPYGANKDGIIWVATEGALNTPKDHIGTRNPANNAAIVLQLPQGTTLPKGFYAEGSRGGSQASSRSSSRSRNSSRNSTPGSSRGTSPARMAGNGGDAALALLLLDRLNQLESKMSGKGQQQQGQTVTKKSAAEASKKPRQKRTATKAYNVTQAFGRRGPEQTQGNFGDQELIRQGTDYKHWPQIAQFAPSASAFFGMSRIGMEVTPSGTWLTYTGAIKLDDKDPNFKDQVILLNKHIDAYKTFPPTEPKKDKKKKADETQALPQRQKKQQTVTLLPAADLDDFSKQLQQSMSSADSTQAGGSGHHHHHH

SEQ ID NO: 3448 - protein, 806 aa, Artificial Sequence
  Description of Artificial Sequence: Synthetic polypeptide
MKIEEGKLVIWINGDKGYNGLAEVGKKFEKDTGIKVTVEHPDKLEEKFPQVAATGDGPDIIFWAHDRFGGYAQSGLLAEITPDKAFQDKLYPFTWDAVRYNGKLIAYPIAVEALSLIYNKDLLPNPPKTWEEIPALDKELKAKGKSALMFNLQEPYFTWPLIAADGGYAFKYENGKYDIKDVGVDNAGAKAGLTFLVDLIKNKHMNADTDYSIAEAAFNKGETAMTINGPWAWSNIDTSKVNYGVTVLPTFKGQPSKPFVGVLSAGINAASPNKELAKEFLENYLLTDEGLEAVNKDKPLGAVALKSYEEELAKDPRIAATMENAQKGEIMPNIPQMSAFWYAVRTAVINAASGRQTVDEALKDAQTGGSGENLYFQSSDNGPQNQRNAPRITFGGPSDSTGSNQNGERSGARSKQRRPQGLPNNTASWFTALTQHGKEDLKFPRGQGVPINTNSSPDDQIGYYRRATRRIRGGDGKMKDLSPRWYFYYLGTGPEAGLPYGANKDGIIWVATEGALNTPKDHIGTRNPANNAAIVLQLPQGTTLPKGFYAEGSRGGSQASSRSSSRSRNSSRNSTPGSSRGTSPARMAGNGGDAALALLLLDRLNQLESKMSGKGQQQQGQTVTKKSAAEASKKPRQKRTATKAYNVTQAFGRRGPEQTQGNFGDQELIRQGTDYKHWPQIAQFAPSASAFFGMSRISMEVTPSGTWLTYTGAIKLDDKDPNFKDQVILLNKHIDAYKTFPPTEPKKDKKKKADETQALPQRQKKQQTVTLLPAADLDDFSKQLQQSMSSADSTQAGGSGHHHHHH

SEQ ID NO: 3449 - protein, 806 aa, Artificial Sequence
  Description of Artificial Sequence: Synthetic polypeptide
MKIEEGKLVIWINGDKGYNGLAEVGKKFEKDTGIKVTVEHPDKLEEKFPQVAATGDGPDIIFWAHDRFGGYAQSGLLAEITPDKAFQDKLYPFTWDAVRYNGKLIAYPIAVEALSLIYNKDLLPNPPKTWEEIPALDKELKAKGKSALMFNLQEPYFTWPLIAADGGYAFKYENGKYDIKDVGVDNAGAKAGLTFLVDLIKNKHMNADTDYSIAEAAFNKGETAMTINGPWAWSNIDTSKVNYGVTVLPTFKGQPSKPFVGVLSAGINAASPNKELAKEFLENYLLTDEGLEAVNKDKPLGAVALKSYEEELAKDPRIAATMENAQKGEIMPNIPQMSAFWYAVRTAVINAASGRQTVDEALKDAQTGGSGENLYFQSSDNGPQNQRNAPRITFGGPSDSTGSNQNGERSGARSKQRRPQGLPNNTASWFTALTQHGKEDLKFPRGQGVPINTNSSPDDQIGYYRRATRRIRGGDGKMKDLSPRWYFYYLGTGPEAGLPYGANKDGIIWVATEGALNTPKTHIGTRNPANNAAIVLQLPQGTTLPKGFYAEGSRGGSQASSRSSSRSRNSSRNSTPGSSRGTSPARMAGNGGDAALALLLLDRLNQLESKMSGKGQQQQGQTVTKKSAAEASKKPRQKRTATKAYNVTQAFGRRGPEQTQGNFGDQELIRQGTDYKHWPQIAQFAPSASAFFGMSRIGMEVTPSGTWLTYTGAIKLDDKDPNFKDQVILLNKHIDAYKTFPPTEPKKDKKKKADETQALPQRQKKQQTVTLLPAADLDDFSKQLQQSMSSADSTQAGGSGHHHHHH

SEQ ID NO: 3450 - protein, 806 aa, Artificial Sequence
  Description of Artificial Sequence: Synthetic polypeptide
MKIEEGKLVIWINGDKGYNGLAEVGKKFEKDTGIKVTVEHPDKLEEKFPQVAATGDGPDIIFWAHDRFGGYAQSGLLAEITPDKAFQDKLYPFTWDAVRYNGKLIAYPIAVEALSLIYNKDLLPNPPKTWEEIPALDKELKAKGKSALMFNLQEPYFTWPLIAADGGYAFKYENGKYDIKDVGVDNAGAKAGLTFLVDLIKNKHMNADTDYSIAEAAFNKGETAMTINGPWAWSNIDTSKVNYGVTVLPTFKGQPSKPFVGVLSAGINAASPNKELAKEFLENYLLTDEGLEAVNKDKPLGAVALKSYEEELAKDPRIAATMENAQKGEIMPNIPQMSAFWYAVRTAVINAASGRQTVDEALKDAQTGGSGENLYFQSSDNGPQNQRNAPRITFGGPSDSTGSNQNGERSGARSKQRRPQGLPNNTASWFTALTQHGKEDLKFPRGQGVPINTNSSPDDQIGYYRRATRRIRGGDGKMKDLSPRWYFYYLGTGPEAGLPYGANKDGIIWVATEGALNTPKDHIGTRNPANNAAIVLQLPQGTTLPKGFYAEGSRGGSQASSRSSSRSRNSSRNSTPGSSRGTSPARMAGNGGDAALALLLLDRLNQLESKMSGKGQQQQGQTVTKKSAAEASKKPRQKRTATKAYNVTQAFGRRGPEQTQGNFGDQELIRQGTDYKHWPQIAQFAPSASAFFGMSRIGAEVTPSGTWLTYTGAIKLDDKDPNFKDQVILLNKHIDAYKTFPPTEPKKDKKKKADETQALPQRQKKQQTVTLLPAADLDDFSKQLQQSMSSADSTQAGGSGHHHHHH

SEQ ID NO: 3451 - protein, 806 aa, Artificial Sequence
  Description of Artificial Sequence: Synthetic polypeptide
MKIEEGKLVIWINGDKGYNGLAEVGKKFEKDTGIKVTVEHPDKLEEKFPQVAATGDGPDIIFWAHDRFGGYAQSGLLAEITPDKAFQDKLYPFTWDAVRYNGKLIAYPIAVEALSLIYNKDLLPNPPKTWEEIPALDKELKAKGKSALMFNLQEPYFTWPLIAADGGYAFKYENGKYDIKDVGVDNAGAKAGLTFLVDLIKNKHMNADTDYSIAEAAFNKGETAMTINGPWAWSNIDTSKVNYGVTVLPTFKGQPSKPFVGVLSAGINAASPNKELAKEFLENYLLTDEGLEAVNKDKPLGAVALKSYEEELAKDPRIAATMENAQKGEIMPNIPQMSAFWYAVRTAVINAASGRQTVDEALKDAQTGGSGENLYFQSSDNGPQNQRNAPRITFGGPSDSTGSNQNGERSGARSKQRRPQGLPNNTASWFTALTQHGKEDLKFPRGQGVPINTNSSPDDQIGYYRRATRRIRGGDGKMKDLSPRWYFYYLGTGPEAGLPYGANMDGIIWVATEGALNTPKDHIGTRNPANNAAIVLQLPQGTTLPKGFYAEGSRGGSQASSRSSSRSRNSSRNSTPGSSRGTSPARMAGNGGDAALALLLLDRLNQLESKMSGKGQQQQGQTVTKKSAAEASKKPRQKRTATKAYNVTQAFGRRGPEQTQGNFGDQELIRQGTDYKHWPQIAQFAPSASAFFGMSRIGMEVTPSGTWLTYTGAIKLDDKDPNFKDQVILLNKHIDAYKTFPPTEPKKDKKKKADETQALPQRQKKQQTVTLLPAADLDDFSKQLQQSMSSADSTQAGGSGHHHHHH

SEQ ID NO: 3452 - protein, 806 aa, Artificial Sequence
  Description of Artificial Sequence: Synthetic polypeptide
MKIEEGKLVIWINGDKGYNGLAEVGKKFEKDTGIKVTVEHPDKLEEKFPQVAATGDGPDIIFWAHDRFGGYAQSGLLAEITPDKAFQDKLYPFTWDAVRYNGKLIAYPIAVEALSLIYNKDLLPNPPKTWEEIPALDKELKAKGKSALMFNLQEPYFTWPLIAADGGYAFKYENGKYDIKDVGVDNAGAKAGLTFLVDLIKNKHMNADTDYSIAEAAFNKGETAMTINGPWAWSNIDTSKVNYGVTVLPTFKGQPSKPFVGVLSAGINAASPNKELAKEFLENYLLTDEGLEAVNKDKPLGAVALKSYEEELAKDPRIAATMENAQKGEIMPNIPQMSAFWYAVRTAVINAASGRQTVDEALKDAQTGGSGENLYFQSSDNGPQNQRNAPRITFGGPSDSTGSNQNGERSGARSKQRRPQGLPNNTASWFTALTQHGKEDLKFPRGQGVPINTNSSPDDQIGYYRRATRRIRGGDGKMKDLSPRWYFYYLGTGPEAGLPYGANKDGIIWVATEGALNTPKDHIGTRNPANNAAIVLQLPQGTTLPKGFYSEGSRGGSQASSRSSSRSRNSSRNSTPGSSRGTSPARMAGNGGDAALALLLLDRLNQLESKMSGKGQQQQGQTVTKKSAAEASKKPRQKRTATKAYNVTQAFGRRGPEQTQGNFGDQELIRQGTDYKHWPQIAQFAPSASAFFGMSRIGMEVTPSGTWLTYTGAIKLDDKDPNFKDQVILLNKHIDAYKTFPPTEPKKDKKKKADETQALPQRQKKQQTVTLLPAADLDDFSKQLQQSMSSADSTQAGGSGHHHHHH

SEQ ID NO: 3453 - protein, 806 aa, Artificial Sequence
  Description of Artificial Sequence: Synthetic polypeptide
MKIEEGKLVIWINGDKGYNGLAEVGKKFEKDTGIKVTVEHPDKLEEKFPQVAATGDGPDIIFWAHDRFGGYAQSGLLAEITPDKAFQDKLYPFTWDAVRYNGKLIAYPIAVEALSLIYNKDLLPNPPKTWEEIPALDKELKAKGKSALMFNLQEPYFTWPLIAADGGYAFKYENGKYDIKDVGVDNAGAKAGLTFLVDLIKNKHMNADTDYSIAEAAFNKGETAMTINGPWAWSNIDTSKVNYGVTVLPTFKGQPSKPFVGVLSAGINAASPNKELAKEFLENYLLTDEGLEAVNKDKPLGAVALKSYEEELAKDPRIAATMENAQKGEIMPNIPQMSAFWYAVRTAVINAASGRQTVDEALKDAQTGGSGENLYFQSSDNGPQNQRNAPRITFGGPSDSTGSNQNGERSGARSKQRRPQGLPNNTASWFTALTQHGKEDLKFPRGQGVPINTNSSPDDQIGYYRRATRRIRGGDGKMKDLSPRWYFYYLGTGPEAGLPYGANKDGIIWVATEGALNTPKDHIGTRNPANNAAIVLQLPQGTWLPKGFYAEGSRGGSQASSRSSSRSRNSSRNSTPGSSRGTSPARMAGNGGDAALALLLLDRLNQLESKMSGKGQQQQGQTVTKKSAAEASKKPRQKRTATKAYNVTQAFGRRGPEQTQGNFGDQELIRQGTDYKHWPQIAQFAPSASAFFGMSRIGMEVTPSGTWLTYTGAIKLDDKDPNFKDQVILLNKHIDAYKTFPPTEPKKDKKKKADETQALPQRQKKQQTVTLLPAADLDDFSKQLQQSMSSADSTQAGGSGHHHHHH

SEQ ID NO: 3454 - protein, 806 aa, Artificial Sequence
  Description of Artificial Sequence: Synthetic polypeptide
MKIEEGKLVIWINGDKGYNGLAEVGKKFEKDTGIKVTVEHPDKLEEKFPQVAATGDGPDIIFWAHDRFGGYAQSGLLAEITPDKAFQDKLYPFTWDAVRYNGKLIAYPIAVEALSLIYNKDLLPNPPKTWEEIPALDKELKAKGKSALMFNLQEPYFTWPLIAADGGYAFKYENGKYDIKDVGVDNAGAKAGLTFLVDLIKNKHMNADTDYSIAEAAFNKGETAMTINGPWAWSNIDTSKVNYGVTVLPTFKGQPSKPFVGVLSAGINAASPNKELAKEFLENYLLTDEGLEAVNKDKPLGAVALKSYEEELAKDPRIAATMENAQKGEIMPNIPQMSAFWYAVRTAVINAASGRQTVDEALKDAQTGGSGENLYFQSSDNGPQNQRNAPRITFGGPSDSTGSNQNGERSGARSKQRRPQGLPNNTASWFTALTQHGKEDLKFPRGQGVPINTNSSPDDQIGYYRRATRRIRGGDGKMKDLSPRWYFYYLGTGPEAGLPYGANKDGIIWVATEGALNTPKDHIGTRNPENNAAIVLQLPQGTTLPKGFYAEGSRGGSQASSRSSSRSRNSSRNSTPGSSRGTSPARMAGNGGDAALALLLLDRLNQLESKMSGKGQQQQGQTVTKKSAAEASKKPRQKRTATKAYNVTQAFGRRGPEQTQGNFGDQELIRQGTDYKHWPQIAQFAPSASAFFGMSRIGMEVTPSGTWLTYTGAIKLDDKDPNFKDQVILLNKHIDAYKTFPPTEPKKDKKKKADETQALPQRQKKQQTVTLLPAADLDDFSKQLQQSMSSADSTQAGGSGHHHHHH

SEQ ID NO: 3455 - protein, 806 aa, Artificial Sequence
  Description of Artificial Sequence: Synthetic polypeptide
MKIEEGKLVIWINGDKGYNGLAEVGKKFEKDTGIKVTVEHPDKLEEKFPQVAATGDGPDIIFWAHDRFGGYAQSGLLAEITPDKAFQDKLYPFTWDAVRYNGKLIAYPIAVEALSLIYNKDLLPNPPKTWEEIPALDKELKAKGKSALMFNLQEPYFTWPLIAADGGYAFKYENGKYDIKDVGVDNAGAKAGLTFLVDLIKNKHMNADTDYSIAEAAFNKGETAMTINGPWAWSNIDTSKVNYGVTVLPTFKGQPSKPFVGVLSAGINAASPNKELAKEFLENYLLTDEGLEAVNKDKPLGAVALKSYEEELAKDPRIAATMENAQKGEIMPNIPQMSAFWYAVRTAVINAASGRQTVDEALKDAQTGGSGENLYFQSSDNGPQNQRNAPRITFGGPSDSTGSNQNGERSGARSKQRRPQGLPNNTASWFTALTQHGKEDLKFPRGQGVPINTNSSPDDQIGYYRRATRRIRGGDGKMKDLSPRWYFYYLGTGPEAGLPYGANKDGIIWVATEGALNTPKDHIGTRNPANNAAIVLQLPQGTTLPKGFYAEGSRGGSQASSRSSSRSRNSSRNSTPGSSRGTSPARMAGNGGDAALALLLLDRLNQLESKMSGKGQQQQGQTVTKKSAAEASKKPRQKRTATKAYNVTQAFGRRGPEQTQGNFGDQELIRQGTDYKHWPQIAQFAPSASAFFGMSRIGMEVTPSGTWLTYTGAIKLDRKDPNFKDQVILLNKHIDAYKTFPPTEPKKDKKKKADETQALPQRQKKQQTVTLLPAADLDDFSKQLQQSMSSADSTQAGGSGHHHHHH

SEQ ID NO: 3456 - protein, 806 aa, Artificial Sequence
  Description of Artificial Sequence: Synthetic polypeptide
MKIEEGKLVIWINGDKGYNGLAEVGKKFEKDTGIKVTVEHPDKLEEKFPQVAATGDGPDIIFWAHDRFGGYAQSGLLAEITPDKAFQDKLYPFTWDAVRYNGKLIAYPIAVEALSLIYNKDLLPNPPKTWEEIPALDKELKAKGKSALMFNLQEPYFTWPLIAADGGYAFKYENGKYDIKDVGVDNAGAKAGLTFLVDLIKNKHMNADTDYSIAEAAFNKGETAMTINGPWAWSNIDTSKVNYGVTVLPTFKGQPSKPFVGVLSAGINAASPNKELAKEFLENYLLTDEGLEAVNKDKPLGAVALKSYEEELAKDPRIAATMENAQKGEIMPNIPQMSAFWYAVRTAVINAASGRQTVDEALKDAQTGGSGENLYFQSSDNGPQNQRNAPRITFGGPSDSTGSNQNGERSGARSKQRRPQGLPNNTASWFTALTQFGKEDLKFPRGQGVPINTNSSPDDQIGYYRRATRRIRGGDGKMKDLSPRWYFYYLGTGPEAGLPYGANKDGIIWVATEGALNTPKDHIGTRNPANNAAIVLQLPQGTTLPKGFYAEGSRGGSQASSRSSSRSRNSSRNSTPGSSRGTSPARMAGNGGDAALALLLLDRLNQLESKMSGKGQQQQGQTVTKKSAAEASKKPRQKRTATKAYNVTQAFGRRGPEQTQGNFGDQELIRQGTDYKHWPQIAQFAPSASAFFGMSRIGMEVTPSGTWLTYTGAIKLDDKDPNFKDQVILLNKHIDAYKTFPPTEPKKDKKKKADETQALPQRQKKQQTVTLLPAADLDDFSKQLQQSMSSADSTQAGGSGHHHHHH

SEQ ID NO: 3457 - protein, 806 aa, Artificial Sequence
  Description of Artificial Sequence: Synthetic polypeptide
MKIEEGKLVIWINGDKGYNGLAEVGKKFEKDTGIKVTVEHPDKLEEKFPQVAATGDGPDIIFWAHDRFGGYAQSGLLAEITPDKAFQDKLYPFTWDAVRYNGKLIAYPIAVEALSLIYNKDLLPNPPKTWEEIPALDKELKAKGKSALMFNLQEPYFTWPLIAADGGYAFKYENGKYDIKDVGVDNAGAKAGLTFLVDLIKNKHMNADTDYSIAEAAFNKGETAMTINGPWAWSNIDTSKVNYGVTVLPTFKGQPSKPFVGVLSAGINAASPNKELAKEFLENYLLTDEGLEAVNKDKPLGAVALKSYEEELAKDPRIAATMENAQKGEIMPNIPQMSAFWYAVRTAVINAASGRQTVDEALKDAQTGGSGENLYFQSSDNGPQNQRNAPRITFGGPSDSTGSNQNGERSGARSKQRRPQGLPNNTASWFTALTQHGKEDLKFPRGQGVPINTNSSPDDQIGYYRRATRRIRGGDGKMKDLSPRWYFYYLGTGPEAGLPYGAAKDGIIWVATEGALNTPKDHIGTRNPANNAAIVLQLPQGTTLPKGFYAEGSRGGSQASSRSSSRSRNSSRNSTPGSSRGTSPARMAGNGGDAALALLLLDRLNQLESKMSGKGQQQQGQTVTKKSAAEASKKPRQKRTATKAYNVTQAFGRRGPEQTQGNFGDQELIRQGTDYKHWPQIAQFAPSASAFFGMSRIGMEVTPSGTWLTYTGAIKLDDKDPNFKDQVILLNKHIDAYKTFPPTEPKKDKKKKADETQALPQRQKKQQTVTLLPAADLDDFSKQLQQSMSSADSTQAGGSGHHHHHH

SEQ ID NO: 3458 - protein, 806 aa, Artificial Sequence
  Description of Artificial Sequence: Synthetic polypeptide
MKIEEGKLVIWINGDKGYNGLAEVGKKFEKDTGIKVTVEHPDKLEEKFPQVAATGDGPDIIFWAHDRFGGYAQSGLLAEITPDKAFQDKLYPFTWDAVRYNGKLIAYPIAVEALSLIYNKDLLPNPPKTWEEIPALDKELKAKGKSALMFNLQEPYFTWPLIAADGGYAFKYENGKYDIKDVGVDNAGAKAGLTFLVDLIKNKHMNADTDYSIAEAAFNKGETAMTINGPWAWSNIDTSKVNYGVTVLPTFKGQPSKPFVGVLSAGINAASPNKELAKEFLENYLLTDEGLEAVNKDKPLGAVALKSYEEELAKDPRIAATMENAQKGEIMPNIPQMSAFWYAVRTAVINAASGRQTVDEALKDAQTGGSGENLYFQSSDNGPQNQRNAPRITFGGPSDSTGSNQNGERSGARSKQRRPQGLPNNTASWFTALTQHGKEDLKFPRGQGVPINTNSNPDDQIGYYRRATRRIRGGDGKMKDLSPRWYFYYLGTGPEAGLPYGANKDGIIWVATEGALNTPKDHIGTRNPANNAAIVLQLPQGTTLPKGFYAEGSRGGSQASSRSSSRSRNSSRNSTPGSSRGTSPARMAGNGGDAALALLLLDRLNQLESKMSGKGQQQQGQTVTKKSAAEASKKPRQKRTATKAYNVTQAFGRRGPEQTQGNFGDQELIRQGTDYKHWPQIAQFAPSASAFFGMSRIGMEVTPSGTWLTYTGAIKLDDKDPNFKDQVILLNKHIDAYKTFPPTEPKKDKKKKADETQALPQRQKKQQTVTLLPAADLDDFSKQLQQSMSSADSTQAGGSGHHHHHH

SEQ ID NO: 3459 - protein, 806 aa, Artificial Sequence
  Description of Artificial Sequence: Synthetic polypeptide
MKIEEGKLVIWINGDKGYNGLAEVGKKFEKDTGIKVTVEHPDKLEEKFPQVAATGDGPDIIFWAHDRFGGYAQSGLLAEITPDKAFQDKLYPFTWDAVRYNGKLIAYPIAVEALSLIYNKDLLPNPPKTWEEIPALDKELKAKGKSALMFNLQEPYFTWPLIAADGGYAFKYENGKYDIKDVGVDNAGAKAGLTFLVDLIKNKHMNADTDYSIAEAAFNKGETAMTINGPWAWSNIDTSKVNYGVTVLPTFKGQPSKPFVGVLSAGINAASPNKELAKEFLENYLLTDEGLEAVNKDKPLGAVALKSYEEELAKDPRIAATMENAQKGEIMPNIPQMSAFWYAVRTAVINAASGRQTVDEALKDAQTGGSGENLYFQSSDNGPQNQRNAPRITFGGPSDSTGSNQNGERSGARSKQRRPQGLPNNTASWFTALTQHGKEDLKFPRGQGVPINTNSSPDDQIGYYRRATRRIRGGDGKMKDLSPRWYFYYLGTGPEAGLPYGANKDGIIWVATEGALNTPKDHIGTRNPANNAAIVLQLPQGTTLPKGFYAEGSRGGSQASSRSSSRSRNSSRNSTPGSSRGTSPARMAGNGGDAALALLLLDRLNQLESKMSGKGQQQQGQTVTKKSAAEASKKPRQKRTATKAYNVTQAFGRRGPEQTQGNFGDQELIRQGTDYKHWPQIAQFAPSASAFFGMSRIGMEHTPSGTWLTYTGAIKLDDKDPNFKDQVILLNKHIDAYKTFPPTEPKKDKKKKADETQALPQRQKKQQTVTLLPAADLDDFSKQLQQSMSSADSTQAGGSGHHHHHH

SEQ ID NO: 3460 - protein, 806 aa, Artificial Sequence
  Description of Artificial Sequence: Synthetic polypeptide
MKIEEGKLVIWINGDKGYNGLAEVGKKFEKDTGIKVTVEHPDKLEEKFPQVAATGDGPDIIFWAHDRFGGYAQSGLLAEITPDKAFQDKLYPFTWDAVRYNGKLIAYPIAVEALSLIYNKDLLPNPPKTWEEIPALDKELKAKGKSALMFNLQEPYFTWPLIAADGGYAFKYENGKYDIKDVGVDNAGAKAGLTFLVDLIKNKHMNADTDYSIAEAAFNKGETAMTINGPWAWSNIDTSKVNYGVTVLPTFKGQPSKPFVGVLSAGINAASPNKELAKEFLENYLLTDEGLEAVNKDKPLGAVALKSYEEELAKDPRIAATMENAQKGEIMPNIPQMSAFWYAVRTAVINAASGRQTVDEALKDAQTGGSGENLYFQSSDNGPQNQRNAPRITFGGPSDSTGSNQNGERSGARSKQRRPQGLPNNTASWFTALTQHGKEDLKFPRGQGVPINTNSSPDDQIGYYRRATRRIRGGDGKMKDLSPRWYFYYLGTGPEAGLPYGANKDGIIWVATEGARNTPKDHIGTRNPANNAAIVLQLPQGTTLPKGFYAEGSRGGSQASSRSSSRSRNSSRNSTPGSSRGTSPARMAGNGGDAALALLLLDRLNQLESKMSGKGQQQQGQTVTKKSAAEASKKPRQKRTATKAYNVTQAFGRRGPEQTQGNFGDQELIRQGTDYKHWPQIAQFAPSASAFFGMSRIGMEVTPSGTWLTYTGAIKLDDKDPNFKDQVILLNKHIDAYKTFPPTEPKKDKKKKADETQALPQRQKKQQTVTLLPAADLDDFSKQLQQSMSSADSTQAGGSGHHHHHH

SEQ ID NO: 3461 - protein, 806 aa, Artificial Sequence
  Description of Artificial Sequence: Synthetic polypeptide
MKIEEGKLVIWINGDKGYNGLAEVGKKFEKDTGIKVTVEHPDKLEEKFPQVAATGDGPDIIFWAHDRFGGYAQSGLLAEITPDKAFQDKLYPFTWDAVRYNGKLIAYPIAVEALSLIYNKDLLPNPPKTWEEIPALDKELKAKGKSALMFNLQEPYFTWPLIAADGGYAFKYENGKYDIKDVGVDNAGAKAGLTFLVDLIKNKHMNADTDYSIAEAAFNKGETAMTINGPWAWSNIDTSKVNYGVTVLPTFKGQPSKPFVGVLSAGINAASPNKELAKEFLENYLLTDEGLEAVNKDKPLGAVALKSYEEELAKDPRIAATMENAQKGEIMPNIPQMSAFWYAVRTAVINAASGRQTVDEALKDAQTGGSGENLYFQSSDNGPQNQRNAPRITFGGPSDSTGSNQNGERSGARSKQRRPQGLPNNTASWFTALTQHGKEDLKFPRGQGIPINTNSSPDDQIGYYRRATRRIRGGDGKMKDLSPRWYFYYLGTGPEAGLPYGANKDGIIWVATEGALNTPKDHIGTRNPANNAAIVLQLPQGTTLPKGFYAEGSRGGSQASSRSSSRSRNSSRNSTPGSSRGTSPARMAGNGGDAALALLLLDRLNQLESKMSGKGQQQQGQTVTKKSAAEASKKPRQKRTATKAYNVTQAFGRRGPEQTQGNFGDQELIRQGTDYKHWPQIAQFAPSASAFFGMSRIGMEVTPSGTWLTYTGAIKLDDKDPNFKDQVILLNKHIDAYKTFPPTEPKKDKKKKADETQALPQRQKKQQTVTLLPAADLDDFSKQLQQSMSSADSTQAGGSGHHHHHH

SEQ ID NO: 3462 - protein, 806 aa, Artificial Sequence
  Description of Artificial Sequence: Synthetic polypeptide
MKIEEGKLVIWINGDKGYNGLAEVGKKFEKDTGIKVTVEHPDKLEEKFPQVAATGDGPDIIFWAHDRFGGYAQSGLLAEITPDKAFQDKLYPFTWDAVRYNGKLIAYPIAVEALSLIYNKDLLPNPPKTWEEIPALDKELKAKGKSALMFNLQEPYFTWPLIAADGGYAFKYENGKYDIKDVGVDNAGAKAGLTFLVDLIKNKHMNADTDYSIAEAAFNKGETAMTINGPWAWSNIDTSKVNYGVTVLPTFKGQPSKPFVGVLSAGINAASPNKELAKEFLENYLLTDEGLEAVNKDKPLGAVALKSYEEELAKDPRIAATMENAQKGEIMPNIPQMSAFWYAVRTAVINAASGRQTVDEALKDAQTGGSGENLYFQSSDNGPQNQRNAPRITFGGPSDSTGSNQNGERSGARSKQRRPQGLPNNTASWFTALTQHGKEDLKFPRGQGVPINTNSSPDDQIGWYRRATRRIRGGDGKMKDLSPRWYFYYLGTGPEAGLPYGANKDGIIWVATEGALNTPKDHIGTRNPANNAAIVLQLPQGTTLPKGFYAEGSRGGSQASSRSSSRSRNSSRNSTPGSSRGTSPARMAGNGGDAALALLLLDRLNQLESKMSGKGQQQQGQTVTKKSAAEASKKPRQKRTATKAYNVTQAFGRRGPEQTQGNFGDQELIRQGTDYKHWPQIAQFAPSASAFFGMSRIGMEVTPSGTWLTYTGAIKLDDKDPNFKDQVILLNKHIDAYKTFPPTEPKKDKKKKADETQALPQRQKKQQTVTLLPAADLDDFSKQLQQSMSSADSTQAGGSGHHHHHH

SEQ ID NO: 3463 - protein, 806 aa, Artificial Sequence
  Description of Artificial Sequence: Synthetic polypeptide
MKIEEGKLVIWINGDKGYNGLAEVGKKFEKDTGIKVTVEHPDKLEEKFPQVAATGDGPDIIFWAHDRFGGYAQSGLLAEITPDKAFQDKLYPFTWDAVRYNGKLIAYPIAVEALSLIYNKDLLPNPPKTWEEIPALDKELKAKGKSALMFNLQEPYFTWPLIAADGGYAFKYENGKYDIKDVGVDNAGAKAGLTFLVDLIKNKHMNADTDYSIAEAAFNKGETAMTINGPWAWSNIDTSKVNYGVTVLPTFKGQPSKPFVGVLSAGINAASPNKELAKEFLENYLLTDEGLEAVNKDKPLGAVALKSYEEELAKDPRIAATMENAQKGEIMPNIPQMSAFWYAVRTAVINAASGRQTVDEALKDAQTGGSGENLYFQSSDNGPQNQRNAPRITFGGPSDSTGSNQNGERSGARSKQRRPQGLPNNTASWFTALTQHGKEDLKFPRGQGVPINTNSSPDDQIGCYRRATRRIRGGDGKMKDLSPRWYFYYLGTGPEAGLPYGANKDGIIWVATEGALNTPKDHIGTRNPANNAAIVLQLPQGTTLPKGFYAEGSRGGSQASSRSSSRSRNSSRNSTPGSSRGTSPARMAGNGGDAALALLLLDRLNQLESKMSGKGQQQQGQTVTKKSAAEASKKPRQKRTATKAYNVTQAFGRRGPEQTQGNFGDQELIRQGTDYKHWPQIAQFAPSASAFFGMSRIGMEVTPSGTWLTYTGAIKLDDKDPNFKDQVILLNKHIDAYKTFPPTEPKKDKKKKADETQALPQRQKKQQTVTLLPAADLDDFSKQLQQSMSSADSTQAGGSGHHHHHH

SEQ ID NO: 3464 - protein, 806 aa, Artificial Sequence
  Description of Artificial Sequence: Synthetic polypeptide
MKIEEGKLVIWINGDKGYNGLAEVGKKFEKDTGIKVTVEHPDKLEEKFPQVAATGDGPDIIFWAHDRFGGYAQSGLLAEITPDKAFQDKLYPFTWDAVRYNGKLIAYPIAVEALSLIYNKDLLPNPPKTWEEIPALDKELKAKGKSALMFNLQEPYFTWPLIAADGGYAFKYENGKYDIKDVGVDNAGAKAGLTFLVDLIKNKHMNADTDYSIAEAAFNKGETAMTINGPWAWSNIDTSKVNYGVTVLPTFKGQPSKPFVGVLSAGINAASPNKELAKEFLENYLLTDEGLEAVNKDKPLGAVALKSYEEELAKDPRIAATMENAQKGEIMPNIPQMSAFWYAVRTAVINAASGRQTVDEALKDAQTGGSGENLYFQSSDNGPQNQRNAPRITFGGPSDSTGSNQNGERSGARSKQRRPQGLPNNTASWFTALTQHGKEDLKFPRGQGVPINTNSSPDDQIGYYRRATRRIRGGDGKMKDLSPRWYFYYLGTGPEAGLPYGANKDGIIWVATEGALNTPKDHIGTRNPANNAAIVLQLPQGTTLPKGFYAEGSRGGSQASSRSSSRSRNSSRNSTPGSSRGTSPARMAGNGGDAALALLLLDRLNQLESKMSGKGQQQQGQTVTKKSAAEASKKPRQKRTATKAYNVTQAFGRRGPEQTQGNFGDQELIRQGTDYKHWPQIAQFAPSASAFFGMSRIGMEVQPSGTWLTYTGAIKLDDKDPNFKDQVILLNKHIDAYKTFPPTEPKKDKKKKADETQALPQRQKKQQTVTLLPAADLDDFSKQLQQSMSSADSTQAGGSGHHHHHH

SEQ ID NO: 3465 - protein, 806 aa, Artificial Sequence
  Description of Artificial Sequence: Synthetic polypeptide
MKIEEGKLVIWINGDKGYNGLAEVGKKFEKDTGIKVTVEHPDKLEEKFPQVAATGDGPDIIFWAHDRFGGYAQSGLLAEITPDKAFQDKLYPFTWDAVRYNGKLIAYPIAVEALSLIYNKDLLPNPPKTWEEIPALDKELKAKGKSALMFNLQEPYFTWPLIAADGGYAFKYENGKYDIKDVGVDNAGAKAGLTFLVDLIKNKHMNADTDYSIAEAAFNKGETAMTINGPWAWSNIDTSKVNYGVTVLPTFKGQPSKPFVGVLSAGINAASPNKELAKEFLENYLLTDEGLEAVNKDKPLGAVALKSYEEELAKDPRIAATMENAQKGEIMPNIPQMSAFWYAVRTAVINAASGRQTVDEALKDAQTGGSGENLYFQSSDNGPQNQRNAPRITFGGPSDSTGSNQNGERSGARSKQRRPQGLPNNTASWFTALTQHGKEDLKFPRGQGVPINTNSSPDDQIGYYRRATRRIRGGDGKMKDLSPRWYFYYLGTGPEAGLPYGANKDGIIWVATEGALNTPKDHIGTRNPANNAAIKLQLPQGTTLPKGFYAEGSRGGSQASSRSSSRSRNSSRNSTPGSSRGTSPARMAGNGGDAALALLLLDRLNQLESKMSGKGQQQQGQTVTKKSAAEASKKPRQKRTATKAYNVTQAFGRRGPEQTQGNFGDQELIRQGTDYKHWPQIAQFAPSASAFFGMSRIGMEVTPSGTWLTYTGAIKLDDKDPNFKDQVILLNKHIDAYKTFPPTEPKKDKKKKADETQALPQRQKKQQTVTLLPAADLDDFSKQLQQSMSSADSTQAGGSGHHHHHH

SEQ ID NO: 3466 - protein, 806 aa, Artificial Sequence
  Description of Artificial Sequence: Synthetic polypeptide
MKIEEGKLVIWINGDKGYNGLAEVGKKFEKDTGIKVTVEHPDKLEEKFPQVAATGDGPDIIFWAHDRFGGYAQSGLLAEITPDKAFQDKLYPFTWDAVRYNGKLIAYPIAVEALSLIYNKDLLPNPPKTWEEIPALDKELKAKGKSALMFNLQEPYFTWPLIAADGGYAFKYENGKYDIKDVGVDNAGAKAGLTFLVDLIKNKHMNADTDYSIAEAAFNKGETAMTINGPWAWSNIDTSKVNYGVTVLPTFKGQPSKPFVGVLSAGINAASPNKELAKEFLENYLLTDEGLEAVNKDKPLGAVALKSYEEELAKDPRIAATMENAQKGEIMPNIPQMSAFWYAVRTAVINAASGRQTVDEALKDAQTGGSGENLYFQSSDNGPQNQRNAPRITFGGPSDSTGSNQNGERSGARSKQRRPQGLPNNTASWFTPLTQFGKEDLKFPPGQGVPINTNSSPDDQIGYYRRATRRIRGGDGKMKDLPPKWYFYYLGTGPHADLPYGQKQDGVFWVARPGALNTPKDHIGTRNPANNAAIPLQLPPGTKLPKGFYAEGSRGGSQASSRSSSRSRNSSRNSTPGSSRGTSPARMAGNGGDAALALLLLDRLNQLESKMSGKGQQQQGQTVTKKSAAEASKKPRQKRTATKAYNVTQAFGRRGPEQTQGNFGDQELIRQGTDYKHWPQIAQFAPSASAFFGMSRIGMEVTPSGTWLTYTGAIKLDDKDPNFKDQVILLNKHIDAYKTFPPTEPKKDKKKKADETQALPQRQKKQQTVTLLPAADLDDFSKQLQQSMSSADSTQAGGSGHHHHHH

SEQ ID NO: 3467 - protein, 806 aa, Artificial Sequence
  Description of Artificial Sequence: Synthetic polypeptide
MKIEEGKLVIWINGDKGYNGLAEVGKKFEKDTGIKVTVEHPDKLEEKFPQVAATGDGPDIIFWAHDRFGGYAQSGLLAEITPDKAFQDKLYPFTWDAVRYNGKLIAYPIAVEALSLIYNKDLLPNPPKTWEEIPALDKELKAKGKSALMFNLQEPYFTWPLIAADGGYAFKYENGKYDIKDVGVDNAGAKAGLTFLVDLIKNKHMNADTDYSIAEAAFNKGETAMTINGPWAWSNIDTSKVNYGVTVLPTFKGQPSKPFVGVLSAGINAASPNKELAKEFLENYLLTDEGLEAVNKDKPLGAVALKSYEEELAKDPRIAATMENAQKGEIMPNIPQMSAFWYAVRTAVINAASGRQTVDEALKDAQTGGSGENLYFQSSDNGPQNQRNAPRITFGGPSDSTGSNQNGERSGARSKQRRPQGLPNNTASWFTALTQHGKEDLKFPRGQGVPINTNSSPDDQIGYYRRATRRIRGGDGKMKDLSPRWYFYYLGTGPEAGLPYGANKDGIIWVATEGALNTPKDHIGTRNPANNAAIVLQLPQGTTLPKGFYAEGSRGGSQASSRSSSRSRNSSRNSTPGSSRGTSPARMAGNGGDAALALLLLDRLNQLESKMSGKGQQQQGQTVTKKSAAEASKKPRQKRTATKEYNVTQAFGRRGPEQTQGNFGDQDLIKLGTDYKHWPQIAQFAPSASAFFGMSRIGMRETPSGTWLTYTGAIKLDKKDPNFKDQVILLNKHIDAYKTFPPTEPKKDKKKKADETQALPQRQKKQQTVTLLPAADLDDFSKQLQQSMSSADSTQAGGSGHHHHHH

SEQ ID NO: 3468 - protein, 806 aa, Artificial Sequence
  Description of Artificial Sequence: Synthetic polypeptide
MKIEEGKLVIWINGDKGYNGLAEVGKKFEKDTGIKVTVEHPDKLEEKFPQVAATGDGPDIIFWAHDRFGGYAQSGLLAEITPDKAFQDKLYPFTWDAVRYNGKLIAYPIAVEALSLIYNKDLLPNPPKTWEEIPALDKELKAKGKSALMFNLQEPYFTWPLIAADGGYAFKYENGKYDIKDVGVDNAGAKAGLTFLVDLIKNKHMNADTDYSIAEAAFNKGETAMTINGPWAWSNIDTSKVNYGVTVLPTFKGQPSKPFVGVLSAGINAASPNKELAKEFLENYLLTDEGLEAVNKDKPLGAVALKSYEEELAKDPRIAATMENAQKGEIMPNIPQMSAFWYAVRTAVINAASGRQTVDEALKDAQTGGSGENLYFQSSDNGPQNQRNAPRITFGGPSDSTGSNQNGERSGARSKQRRPQGLPNNTASWFTALTQHGKEDLKFPRGQGVPINTNSSPDDQIGYYRRATRRIRGGDGKMKDLSPRWYFYYLGTGPEAGLPYGANKDGIIWVATEGALNTPKDHIGTRNPANNAAIVLQLPQGTTLPKGFYAEGSRGGSQASSRSSSRSRNSSRNSTPGSSRGTSPARMAGNGGDAALALLLLDRLNQLESKMSGKGQQQQGQTVTKKSAAEASKKPRQKRTATKEYNVTQAFGRRGPEQTQGNFGDQDLIKLGTDYKHWPQIAQFAPSASAFFGMSRIGMEETPSGTWLTYTGAIKLDKKDPNFKDQVILLNKHIDAYKTFPPTEPKKDKKKKADETQALPQRQKKQQTVTLLPAADLDDFSKQLQQSMSSADSTQAGGSGHHHHHH

SEQ ID NO: 3469 - protein, 806 aa, Artificial Sequence
  Description of Artificial Sequence: Synthetic polypeptide
MKIEEGKLVIWINGDKGYNGLAEVGKKFEKDTGIKVTVEHPDKLEEKFPQVAATGDGPDIIFWAHDRFGGYAQSGLLAEITPDKAFQDKLYPFTWDAVRYNGKLIAYPIAVEALSLIYNKDLLPNPPKTWEEIPALDKELKAKGKSALMFNLQEPYFTWPLIAADGGYAFKYENGKYDIKDVGVDNAGAKAGLTFLVDLIKNKHMNADTDYSIAEAAFNKGETAMTINGPWAWSNIDTSKVNYGVTVLPTFKGQPSKPFVGVLSAGINAASPNKELAKEFLENYLLTDEGLEAVNKDKPLGAVALKSYEEELAKDPRIAATMENAQKGEIMPNIPQMSAFWYAVRTAVINAASGRQTVDEALKDAQTGGSGENLYFQSSDNGPQNQRNAPRITFGGPSDSTGSNQNGERSGARSKQRRPQGLPNNTASWFTALTQHGKEDLKFPPGQGVPINPNSKPDDQIGYWRRQVRRYRGGDGQMKDLPPRWYFYYLGTGPEAGLPYGANKDGIIWVATEGALNTPKDHIGTRNPANNAAIVLQLPQGTTLPKGFYAEGSRGGSQASSRSSSRSRNSSRNSTPGSSRGTSPARMAGNGGDAALALLLLDRLNQLESKMSGKGQQQQGQTVTKKSAAEASKKPRQKRTATKAYNVTQAFGRRGPEQTQGNFGDQELIRQGTDYKHWPQIAQFAPSASAFFGMSRIGMEVTPSGTWLTYTGAIKLDDKDPNFKDQVILLNKHIDAYKTFPPTEPKKDKKKKADETQALPQRQKKQQTVTLLPAADLDDFSKQLQQSMSSADSTQAGGSGHHHHHH

SEQ ID NO: 3470 - protein, 806 aa, Artificial Sequence
  Description of Artificial Sequence: Synthetic polypeptide
MKIEEGKLVIWINGDKGYNGLAEVGKKFEKDTGIKVTVEHPDKLEEKFPQVAATGDGPDIIFWAHDRFGGYAQSGLLAEITPDKAFQDKLYPFTWDAVRYNGKLIAYPIAVEALSLIYNKDLLPNPPKTWEEIPALDKELKAKGKSALMFNLQEPYFTWPLIAADGGYAFKYENGKYDIKDVGVDNAGAKAGLTFLVDLIKNKHMNADTDYSIAEAAFNKGETAMTINGPWAWSNIDTSKVNYGVTVLPTFKGQPSKPFVGVLSAGINAASPNKELAKEFLENYLLTDEGLEAVNKDKPLGAVALKSYEEELAKDPRIAATMENAQKGEIMPNIPQMSAFWYAVRTAVINAASGRQTVDEALKDAQTGGSGENLYFQSSDNGPQNQRNAPRITFGGPSDSTGSNQNGERSGARSKQRRPQGLPNNTASWFTALTQHGKEDLKFPRGQGVPINTNSSPDDQIGYYRRATRRIRGGDGKMKDLSPRWYFYYLGTGPEAGLPYGANKDGIIWVATEGALNTPKDHIGTRNPANNAAIVLQLPQGTTLPKGFYAEGSRGGSQASSRSSSRSRNSSRNSTPGSSRGTSPARMAGNGGDAALALLLLDRLNQLESKMSGKGQQQQGQTVTKKSAAEASKKPRQKRTATKDYNVTQAFGRRGPEQTQGNFGDQDLIKLGTDYKHWPQIAQFAPSASAFFGMSRISTEETPSGTWLTYTGAIKLDKKDPNFKDQVILLNKHIDAYKTFPPTEPKKDKKKKADETQALPQRQKKQQTVTLLPAADLDDFSKQLQQSMSSADSTQAGGSGHHHHHH

SEQ ID NO: 3471 - protein, 806 aa, Artificial Sequence
  Description of Artificial Sequence: Synthetic polypeptide
MKIEEGKLVIWINGDKGYNGLAEVGKKFEKDTGIKVTVEHPDKLEEKFPQVAATGDGPDIIFWAHDRFGGYAQSGLLAEITPDKAFQDKLYPFTWDAVRYNGKLIAYPIAVEALSLIYNKDLLPNPPKTWEEIPALDKELKAKGKSALMFNLQEPYFTWPLIAADGGYAFKYENGKYDIKDVGVDNAGAKAGLTFLVDLIKNKHMNADTDYSIAEAAFNKGETAMTINGPWAWSNIDTSKVNYGVTVLPTFKGQPSKPFVGVLSAGINAASPNKELAKEFLENYLLTDEGLEAVNKDKPLGAVALKSYEEELAKDPRIAATMENAQKGEIMPNIPQMSAFWYAVRTAVINAASGRQTVDEALKDAQTGGSGENLYFQSSDNGPQNQRNAPRITFGGPSDSTGSNQNGERSGARSKQRRPQGLPNNTASWFTALTQHGKEDLKFPRGQGVPINTNSSPDDQIGYYRRATRRIRGGDGKMKDLSPRWYFYYLGTGPEAGLPYGANKDGIIWVAREGALNTPKDHIGTRNPANNAAIVLQLPQGTTLPKGFYAEGSRGGSQASSRSSSRSRNSSRNSTPGSSRGTSPARMAGNGGDAALALLLLDRLNQLESKMSGKGQQQQGQTVTKKSAAEASKKPRQKRTATKAYNVTQAFGRRGPEQTQGNFGDQELIRQGTDYKHWPQIAQFAPSASAFFGMSRIGMEVTPSGTWLTYTGAIKLDDKDPNFKDQVILLNKHIDAYKTFPPTEPKKDKKKKADETQALPQRQKKQQTVTLLPAADLDDFSKQLQQSMSSADSTQAGGSGHHHHHH

SEQ ID NO: 3472 - protein, 806 aa, Artificial Sequence
  Description of Artificial Sequence: Synthetic polypeptide
MKIEEGKLVIWINGDKGYNGLAEVGKKFEKDTGIKVTVEHPDKLEEKFPQVAATGDGPDIIFWAHDRFGGYAQSGLLAEITPDKAFQDKLYPFTWDAVRYNGKLIAYPIAVEALSLIYNKDLLPNPPKTWEEIPALDKELKAKGKSALMFNLQEPYFTWPLIAADGGYAFKYENGKYDIKDVGVDNAGAKAGLTFLVDLIKNKHMNADTDYSIAEAAFNKGETAMTINGPWAWSNIDTSKVNYGVTVLPTFKGQPSKPFVGVLSAGINAASPNKELAKEFLENYLLTDEGLEAVNKDKPLGAVALKSYEEELAKDPRIAATMENAQKGEIMPNIPQMSAFWYAVRTAVINAASGRQTVDEALKDAQTGGSGENLYFQSSDNGPQNQRNAPRITFGGPSDSTGSNQNGERSGARSKQRRPQGLPNNTASWFTPLTQNGKEDLKFPPGQGVPINTNSSPDDQIGYYRRATRRIRGGDGKMKDLPPKWYFYYLGTGPHADLPYGQKQDGVFWVARPGALNTPKDHIGTRNPANNAAIPLQLPPGTKLPKGFYAEGSRGGSQASSRSSSRSRNSSRNSTPGSSRGTSPARMAGNGGDAALALLLLDRLNQLESKMSGKGQQQQGQTVTKKSAAEASKKPRQKRTATKAYNVTQAFGRRGPEQTQGNFGDQELIRQGTDYKHWPQIAQFAPSASAFFGMSRIGMEVTPSGTWLTYTGAIKLDDKDPNFKDQVILLNKHIDAYKTFPPTEPKKDKKKKADETQALPQRQKKQQTVTLLPAADLDDFSKQLQQSMSSADSTQAGGSGHHHHHH

SEQ ID NO: 3473 - protein, 806 aa, Artificial Sequence
  Description of Artificial Sequence: Synthetic polypeptide
MKIEEGKLVIWINGDKGYNGLAEVGKKFEKDTGIKVTVEHPDKLEEKFPQVAATGDGPDIIFWAHDRFGGYAQSGLLAEITPDKAFQDKLYPFTWDAVRYNGKLIAYPIAVEALSLIYNKDLLPNPPKTWEEIPALDKELKAKGKSALMFNLQEPYFTWPLIAADGGYAFKYENGKYDIKDVGVDNAGAKAGLTFLVDLIKNKHMNADTDYSIAEAAFNKGETAMTINGPWAWSNIDTSKVNYGVTVLPTFKGQPSKPFVGVLSAGINAASPNKELAKEFLENYLLTDEGLEAVNKDKPLGAVALKSYEEELAKDPRIAATMENAQKGEIMPNIPQMSAFWYAVRTAVINAASGRQTVDEALKDAQTGGSGENLYFQSSDNGPQNQRNAPRITFGGPSDSTGSNQNGERSGARSKQRRPQGLPNNTASWFTALTQHGKEDLKFPRGQGVPINTNSSPDDQIGYYRRATRRIRGGDGKMKDLSPRWYFYYLGTGPEAGLPYGANKDGIIWVATEGALNTPKDHIGTRNPANNAAIVLQLPQGTTLPKGFYAEGSRGGSQASSRSSSRSRNSSRNSTPGSSRGTSPARMAGNGGDAALALLLLDRLNQLESKMSGKGQQQQGQTVTKKSAAEASKKPRQKRTATKAYNVTQAFGRRGPEQTQGNFGDQELIRLGTDYKHWPQIAQFAPSASAFFGMSRIGMEVTPSGTWLTYTGAIKLDDKDPNFKDQVILLNKHIDAYKTFPPTEPKKDKKKKADETQALPQRQKKQQTVTLLPAADLDDFSKQLQQSMSSADSTQAGGSGHHHHHH

SEQ ID NO: 3474 - protein, 806 aa, Artificial Sequence
  Description of Artificial Sequence: Synthetic polypeptide
MKIEEGKLVIWINGDKGYNGLAEVGKKFEKDTGIKVTVEHPDKLEEKFPQVAATGDGPDIIFWAHDRFGGYAQSGLLAEITPDKAFQDKLYPFTWDAVRYNGKLIAYPIAVEALSLIYNKDLLPNPPKTWEEIPALDKELKAKGKSALMFNLQEPYFTWPLIAADGGYAFKYENGKYDIKDVGVDNAGAKAGLTFLVDLIKNKHMNADTDYSIAEAAFNKGETAMTINGPWAWSNIDTSKVNYGVTVLPTFKGQPSKPFVGVLSAGINAASPNKELAKEFLENYLLTDEGLEAVNKDKPLGAVALKSYEEELAKDPRIAATMENAQKGEIMPNIPQMSAFWYAVRTAVINAASGRQTVDEALKDAQTGGSGENLYFQSSDNGPQNQRNAPRITFGGPSDSTGSNQNGERSGARSKQRRPQGLPNNTASWFTPLTQHGKEDLKFPPGQGVPINTNSSPDDQIGYYRRATRRIRGGDGKMKDLPPKWYFYYLGTGPHADLPYGQKQDGVVWVARPGALNTPKDHIGTRNPANNAAIPLQLPPGTKLPKGFYAEGSRGGSQASSRSSSRSRNSSRNSTPGSSRGTSPARMAGNGGDAALALLLLDRLNQLESKMSGKGQQQQGQTVTKKSAAEASKKPRQKRTATKAYNVTQAFGRRGPEQTQGNFGDQELIRQGTDYKHWPQIAQFAPSASAFFGMSRIGMEVTPSGTWLTYTGAIKLDDKDPNFKDQVILLNKHIDAYKTFPPTEPKKDKKKKADETQALPQRQKKQQTVTLLPAADLDDFSKQLQQSMSSADSTQAGGSGHHHHHH

SEQ ID NO: 3475 - protein, 806 aa, Artificial Sequence
  Description of Artificial Sequence: Synthetic polypeptide
MKIEEGKLVIWINGDKGYNGLAEVGKKFEKDTGIKVTVEHPDKLEEKFPQVAATGDGPDIIFWAHDRFGGYAQSGLLAEITPDKAFQDKLYPFTWDAVRYNGKLIAYPIAVEALSLIYNKDLLPNPPKTWEEIPALDKELKAKGKSALMFNLQEPYFTWPLIAADGGYAFKYENGKYDIKDVGVDNAGAKAGLTFLVDLIKNKHMNADTDYSIAEAAFNKGETAMTINGPWAWSNIDTSKVNYGVTVLPTFKGQPSKPFVGVLSAGINAASPNKELAKEFLENYLLTDEGLEAVNKDKPLGAVALKSYEEELAKDPRIAATMENAQKGEIMPNIPQMSAFWYAVRTAVINAASGRQTVDEALKDAQTGGSGENLYFQSSDNGPQNQRNAPRITFGGPSDSTGSNQNGERSGARSKQRRPQGLPNNTASWFTALTQHGKEDLKFPRGQGVPINTNSSPDDQIGYYRRATRRIRGGDGKMKDLSPRWYFYYLGTGPEAGLPYGANKDGIIWVATEGALNTPKDHIGTRNPANNAAIVLQLPQGTTLPKGFYAEGSRGGSQASSRSSSRSRNSSRNSTPGSSRGTSPARMAGNGGDAALALLLLDRLNQLESKMSGKGQQQQGQTVTKKSAAEMSKKPRQKRTATKGYNVTQCFGPRGPEQTQGNFGDAELIKKGSDYKHWPQIAQFAPSASAFFGMSRISSKEQPSGTWLTYTGAIKLDKDDPNFKDQVILLNKHIDAYKTFPPTEPKKDKKKKADETQALPQRQKKQQTVTLLPAADLDDFSKQLQQSMSSADSTQAGGSGHHHHHH

SEQ ID NO: 3476 - protein, 806 aa, Artificial Sequence
  Description of Artificial Sequence: Synthetic polypeptide
MKIEEGKLVIWINGDKGYNGLAEVGKKFEKDTGIKVTVEHPDKLEEKFPQVAATGDGPDIIFWAHDRFGGYAQSGLLAEITPDKAFQDKLYPFTWDAVRYNGKLIAYPIAVEALSLIYNKDLLPNPPKTWEEIPALDKELKAKGKSALMFNLQEPYFTWPLIAADGGYAFKYENGKYDIKDVGVDNAGAKAGLTFLVDLIKNKHMNADTDYSIAEAAFNKGETAMTINGPWAWSNIDTSKVNYGVTVLPTFKGQPSKPFVGVLSAGINAASPNKELAKEFLENYLLTDEGLEAVNKDKPLGAVALKSYEEELAKDPRIAATMENAQKGEIMPNIPQMSAFWYAVRTAVINAASGRQTVDEALKDAQTGGSGENLYFQSSDNGPQNQRNAPRITFGGPSDSTGSNQNGERSGARSKQRRPQGLPNNTASWFTALTQHGKEDLKFPRGQGVPINTNSSPDDQIGYYRRATRRIRGGDGKMKDLSPRWYFYYLGTGPEAGLPYGANKDGIIWVATEGALNTPKDHIGTRNPANNAAIVLQLPQGTTLPKGFYAEGSRGGSQASSRSSERSRNSSRNSTPGSSRGTEPARMAGNGGDAALALLLLDRLNQLESKMSGKGQQQQGQTVTKKSAAEASKKPRQKRTATKAYNVTQAFGRRGPEQTQGNFGDQELIRQGTDYKHWPQIAQFAPSASAFFGMSRIGMEVTPSGTWLTYTGAIKLDDKDPNFKDQVILLNKHIDAYKTFPPTEPKKDKKKKADETQALPQRQKKQQTVTLLPAADLDDFSKQLQQSMSSADSTQAGGSGHHHHHH

SEQ ID NO: 3477 - protein, 806 aa, Artificial Sequence
  Description of Artificial Sequence: Synthetic polypeptide
MKIEEGKLVIWINGDKGYNGLAEVGKKFEKDTGIKVTVEHPDKLEEKFPQVAATGDGPDIIFWAHDRFGGYAQSGLLAEITPDKAFQDKLYPFTWDAVRYNGKLIAYPIAVEALSLIYNKDLLPNPPKTWEEIPALDKELKAKGKSALMFNLQEPYFTWPLIAADGGYAFKYENGKYDIKDVGVDNAGAKAGLTFLVDLIKNKHMNADTDYSIAEAAFNKGETAMTINGPWAWSNIDTSKVNYGVTVLPTFKGQPSKPFVGVLSAGINAASPNKELAKEFLENYLLTDEGLEAVNKDKPLGAVALKSYEEELAKDPRIAATMENAQKGEIMPNIPQMSAFWYAVRTAVINAASGRQTVDEALKDAQTGGSGENLYFQSSDNGPQNQRNAPRITFGGPSDSTGSNQNGERSGARSKQRRPQGLPNNTASWFTALTQHGKEDLKFPRGQGVPINTNSSPDDQIGYYRRATRRIRGGDGKMKDLSPRWYFYYLGTGPEAGLPYGANKDGIIWVATEGALNTPKDHIGTRNPANNAAIVLQLPQGTTLPKGFYAEGSRGGSQASSRSSSRSRNSSRNSTPGSSRGTSPARMAGNGGDAALALLLLDRLNQLESKMSGKGQQQQGQTVTKKSAAEASKKPRQKRTATKAYNVTQAFGRRGPEQTQGNFGDQELIRQGTDYKHWPQIAQFAPSASAFFGMSRIGMEMTPSGTWLTYTGAIKLDDKDPNFKDQVILLNKHIDAYKTFPPTEPKKDKKKKADETQALPQRQKKQQTVTLLPAADLDDFSKQLQQSMSSADSTQAGGSGHHHHHH

SEQ ID NO: 3478 - protein, 806 aa, Artificial Sequence
  Description of Artificial Sequence: Synthetic polypeptide
MKIEEGKLVIWINGDKGYNGLAEVGKKFEKDTGIKVTVEHPDKLEEKFPQVAATGDGPDIIFWAHDRFGGYAQSGLLAEITPDKAFQDKLYPFTWDAVRYNGKLIAYPIAVEALSLIYNKDLLPNPPKTWEEIPALDKELKAKGKSALMFNLQEPYFTWPLIAADGGYAFKYENGKYDIKDVGVDNAGAKAGLTFLVDLIKNKHMNADTDYSIAEAAFNKGETAMTINGPWAWSNIDTSKVNYGVTVLPTFKGQPSKPFVGVLSAGINAASPNKELAKEFLENYLLTDEGLEAVNKDKPLGAVALKSYEEELAKDPRIAATMENAQKGEIMPNIPQMSAFWYAVRTAVINAASGRQTVDEALKDAQTGGSGENLYFQSSDNGPQNQRNAPRITFGGPSDSTGSNQNGERSGARSKQRRPQGLPNNTASWFTALTQHGKEDLKFPRGQGVPINTNSSPDDQIGYYRRATRRIRGGDGKMKDLSPRWYFYYLGTGPEAGLPYGANKDGIIWVATEGALNTPKDHIGTRNPANNAAIVLQLPQGTTLPKGFYAEGSRGGSQASSRSSSRSRNSSRNSTPGSSRGTSPARMAGNGGDAALALLLLDRLNQLESKMSGKGQQQQGQTVTKKSAAEMSKKPRQKRTATKGCNVTQCFGPRGPEQTQGNFGDADLVKKGTDYKHWPQIAQFAPSASAFFGMSRISSKEQPSGTWLTYTGAIKLDKDDPNFKDQVILLNKHIDAYKTFPPTEPKKDKKKKADETQALPQRQKKQQTVTLLPAADLDDFSKQLQQSMSSADSTQAGGSGHHHHHH

SEQ ID NO: 3479 - protein, 806 aa, Artificial Sequence
  Description of Artificial Sequence: Synthetic polypeptide
MKIEEGKLVIWINGDKGYNGLAEVGKKFEKDTGIKVTVEHPDKLEEKFPQVAATGDGPDIIFWAHDRFGGYAQSGLLAEITPDKAFQDKLYPFTWDAVRYNGKLIAYPIAVEALSLIYNKDLLPNPPKTWEEIPALDKELKAKGKSALMFNLQEPYFTWPLIAADGGYAFKYENGKYDIKDVGVDNAGAKAGLTFLVDLIKNKHMNADTDYSIAEAAFNKGETAMTINGPWAWSNIDTSKVNYGVTVLPTFKGQPSKPFVGVLSAGINAASPNKELAKEFLENYLLTDEGLEAVNKDKPLGAVALKSYEEELAKDPRIAATMENAQKGEIMPNIPQMSAFWYAVRTAVINAASGRQTVDEALKDAQTGGSGENLYFQSSDNGPQNQRNAPRITFGGPSDSTGSNQNGERSGARSKQRRPQGLPNNTASWFTALTQHGKEDLKFPRGQGVPINTNSSPDDQIGYYRRATRRIRGGDGKMKDLSPRWYFYYLGTGPEAGLPYGANKDGIIWVATEGALNTPKDHIGTRNPANNTAIVLQLPQGTTLPKGFYAEGSRGGSQASSRSSSRSRNSSRNSTPGSSRGTSPARMAGNGGDAALALLLLDRLNQLESKMSGKGQQQQGQTVTKKSAAEASKKPRQKRTATKAYNVTQAFGRRGPEQTQGNFGDQELIRQGTDYKHWPQIAQFAPSASAFFGMSRIGMEVTPSGTWLTYTGAIKLDDKDPNFKDQVILLNKHIDAYKTFPPTEPKKDKKKKADETQALPQRQKKQQTVTLLPAADLDDFSKQLQQSMSSADSTQAGGSGHHHHHH

SEQ ID NO: 3480 - protein, 806 aa, Artificial Sequence
  Description of Artificial Sequence: Synthetic polypeptide
MKIEEGKLVIWINGDKGYNGLAEVGKKFEKDTGIKVTVEHPDKLEEKFPQVAATGDGPDIIFWAHDRFGGYAQSGLLAEITPDKAFQDKLYPFTWDAVRYNGKLIAYPIAVEALSLIYNKDLLPNPPKTWEEIPALDKELKAKGKSALMFNLQEPYFTWPLIAADGGYAFKYENGKYDIKDVGVDNAGAKAGLTFLVDLIKNKHMNADTDYSIAEAAFNKGETAMTINGPWAWSNIDTSKVNYGVTVLPTFKGQPSKPFVGVLSAGINAASPNKELAKEFLENYLLTDEGLEAVNKDKPLGAVALKSYEEELAKDPRIAATMENAQKGEIMPNIPQMSAFWYAVRTAVINAASGRQTVDEALKDAQTGGSGENLYFQSSDNGPQNQRNAPRITFGGPSDSTGSNQNGERSGARSKQRRPQGLPNNTASWFTALTQHGKEDLKFPRGQGVPINTNSSPDDQIGYYRRATRRIRGGDGKMKDLSPRWYFYYLGTGPEAGLPYGANKDGIIWVATEGALNTPKDHIGTRNPANNAAIVLQLPQGTTLPKGFYAEGSRGGSQASSRSSSRSRNSSRNSTPGSSRGTSPARMAGNGGDAALALLLLDRLNQLESKMSGKGQQQQGQTVTKKSAAEASKKPRQKRTATKTYNVTQAFGRRGPEQTQGNFGDQELIRQGTDYKHWPQIAQFAPSASAFFGMSRIGMEVTPSGTWLTYTGAIKLDDKDPNFKDQVILLNKHIDAYKTFPPTEPKKDKKKKADETQALPQRQKKQQTVTLLPAADLDDFSKQLQQSMSSADSTQAGGSGHHHHHH

SEQ ID NO: 3481 - protein, 806 aa, Artificial Sequence
  Description of Artificial Sequence: Synthetic polypeptide
MKIEEGKLVIWINGDKGYNGLAEVGKKFEKDTGIKVTVEHPDKLEEKFPQVAATGDGPDIIFWAHDRFGGYAQSGLLAEITPDKAFQDKLYPFTWDAVRYNGKLIAYPIAVEALSLIYNKDLLPNPPKTWEEIPALDKELKAKGKSALMFNLQEPYFTWPLIAADGGYAFKYENGKYDIKDVGVDNAGAKAGLTFLVDLIKNKHMNADTDYSIAEAAFNKGETAMTINGPWAWSNIDTSKVNYGVTVLPTFKGQPSKPFVGVLSAGINAASPNKELAKEFLENYLLTDEGLEAVNKDKPLGAVALKSYEEELAKDPRIAATMENAQKGEIMPNIPQMSAFWYAVRTAVINAASGRQTVDEALKDAQTGGSGENLYFQSSDNGPQNQRNAPRITFGGPSDSTGSNQNGERSGARSKQRRPQGLPNNTASWFTALVQHGKEDLKFPRGQGVPINTNSSPDDQIGYYRRATRRIRGGDGKMKDLSPRWYFYYLGTGPEAGLPYGANKDGIIWVATEGALNTPKDHIGTRNPANNAAIVLQLPQGTTLPKGFYAEGSRGGSQASSRSSSRSRNSSRNSTPGSSRGTSPARMAGNGGDAALALLLLDRLNQLESKMSGKGQQQQGQTVTKKSAAEASKKPRQKRTATKAYNVTQAFGRRGPEQTQGNFGDQELIRQGTDYKHWPQIAQFAPSASAFFGMSRIGMEVTPSGTWLTYTGAIKLDDKDPNFKDQVILLNKHIDAYKTFPPTEPKKDKKKKADETQALPQRQKKQQTVTLLPAADLDDFSKQLQQSMSSADSTQAGGSGHHHHHH

SEQ ID NO: 3482 - protein, 806 aa, Artificial Sequence
  Description of Artificial Sequence: Synthetic polypeptide
MKIEEGKLVIWINGDKGYNGLAEVGKKFEKDTGIKVTVEHPDKLEEKFPQVAATGDGPDIIFWAHDRFGGYAQSGLLAEITPDKAFQDKLYPFTWDAVRYNGKLIAYPIAVEALSLIYNKDLLPNPPKTWEEIPALDKELKAKGKSALMFNLQEPYFTWPLIAADGGYAFKYENGKYDIKDVGVDNAGAKAGLTFLVDLIKNKHMNADTDYSIAEAAFNKGETAMTINGPWAWSNIDTSKVNYGVTVLPTFKGQPSKPFVGVLSAGINAASPNKELAKEFLENYLLTDEGLEAVNKDKPLGAVALKSYEEELAKDPRIAATMENAQKGEIMPNIPQMSAFWYAVRTAVINAASGRQTVDEALKDAQTGGSGENLYFQSSDNGPQNQRNAPRITFGGPSDSTGSNQNGERSGARSKQRRPQGLPNNTASWFTALTQHGKEDLKFPRGQGVPINTNSSPDDQIGYYRRATRRIRGGDGKMKDLSPRWYFYYLGTGPEAGLPYGANKDGIIWVATEGALNTPKDHIGTRNPANNAAIVLQLPQGTTLPKGFYAEGSRGGSQASSRSSSRSRNSSRNSTPGSSRGTSPARMAGNGGDAALALLLLDRLNQLESKMSGKGQQQQGQTVTKKSAAEMSKKPRQKRTATKGCNVTQCFGPRGPEQTQGNFGDADLNKKGTDYKHWPQIAQFAPSASAFFGMSRISSKEQPSGTWLTYTGAIKLDKDDPNFKDQVILLNKHIDAYKTFPPTEPKKDKKKKADETQALPQRQKKQQTVTLLPAADLDDFSKQLQQSMSSADSTQAGGSGHHHHHH

SEQ ID NO: 3483 - protein, 806 aa, Artificial Sequence
  Description of Artificial Sequence: Synthetic polypeptide
MKIEEGKLVIWINGDKGYNGLAEVGKKFEKDTGIKVTVEHPDKLEEKFPQVAATGDGPDIIFWAHDRFGGYAQSGLLAEITPDKAFQDKLYPFTWDAVRYNGKLIAYPIAVEALSLIYNKDLLPNPPKTWEEIPALDKELKAKGKSALMFNLQEPYFTWPLIAADGGYAFKYENGKYDIKDVGVDNAGAKAGLTFLVDLIKNKHMNADTDYSIAEAAFNKGETAMTINGPWAWSNIDTSKVNYGVTVLPTFKGQPSKPFVGVLSAGINAASPNKELAKEFLENYLLTDEGLEAVNKDKPLGAVALKSYEEELAKDPRIAATMENAQKGEIMPNIPQMSAFWYAVRTAVINAASGRQTVDEALKDAQTGGSGENLYFQSSDNGPQNQRNAPRITFGGPSDSTGSNQNGERSGARSKQRRPQGLPNNTASWFTALTQHGKEDLKFPRGQGVPINTNSSPDDQIGYYRRATRRIRGGDGKMKDLSPRWYFYYLGTGPEAGLPYGANKDGIIWVATEGALNTPKDHIGTRNPANNAAIYLQLPQGTTLPKGFYAEGSRGGSQASSRSSSRSRNSSRNSTPGSSRGTSPARMAGNGGDAALALLLLDRLNQLESKMSGKGQQQQGQTVTKKSAAEASKKPRQKRTATKAYNVTQAFGRRGPEQTQGNFGDQELIRQGTDYKHWPQIAQFAPSASAFFGMSRIGMEVTPSGTWLTYTGAIKLDDKDPNFKDQVILLNKHIDAYKTFPPTEPKKDKKKKADETQALPQRQKKQQTVTLLPAADLDDFSKQLQQSMSSADSTQAGGSGHHHHHH

SEQ ID NO: 3484 - protein, 806 aa, Artificial Sequence
  Description of Artificial Sequence: Synthetic polypeptide
MKIEEGKLVIWINGDKGYNGLAEVGKKFEKDTGIKVTVEHPDKLEEKFPQVAATGDGPDIIFWAHDRFGGYAQSGLLAEITPDKAFQDKLYPFTWDAVRYNGKLIAYPIAVEALSLIYNKDLLPNPPKTWEEIPALDKELKAKGKSALMFNLQEPYFTWPLIAADGGYAFKYENGKYDIKDVGVDNAGAKAGLTFLVDLIKNKHMNADTDYSIAEAAFNKGETAMTINGPWAWSNIDTSKVNYGVTVLPTFKGQPSKPFVGVLSAGINAASPNKELAKEFLENYLLTDEGLEAVNKDKPLGAVALKSYEEELAKDPRIAATMENAQKGEIMPNIPQMSAFWYAVRTAVINAASGRQTVDEALKDAQTGGSGENLYFQSSDNGPQNQRNAPRITFGGPSDSTGSNQNGERSGARSKQRRPQGLPNNTASWFTALTQHGKEDLKFPRGQGVPINTNSSPDDQIGYYRRATRRIRGGDGKMKDLSPRWYFYYLGTGPEAGLPYGANKDGIIWVATEGALNTPKDHIGTRNPANNAAIVLQLPQGTTLPKGFYAEGSRGGSQASSRSSSRSRNSSRNSTPGSSRGTSPARMAGNGGDAALALLLLDRLNQLESKMSGKGQQQQGQTVTKKSAAEMSKKPRQKRTATKGYNVTQCFGPRGPEQTQGNFGDAELNKKGTDYKHWPQIAQFAPSASAFFGMSRISSKEQPSGTWLTYTGAIKLDKDDPNFKDQVILLNKHIDAYKTFPPTEPKKDKKKKADETQALPQRQKKQQTVTLLPAADLDDFSKQLQQSMSSADSTQAGGSGHHHHHH

SEQ ID NO: 3485 - protein, 806 aa, Artificial Sequence
  Description of Artificial Sequence: Synthetic polypeptide
MKIEEGKLVIWINGDKGYNGLAEVGKKFEKDTGIKVTVEHPDKLEEKFPQVAATGDGPDIIFWAHDRFGGYAQSGLLAEITPDKAFQDKLYPFTWDAVRYNGKLIAYPIAVEALSLIYNKDLLPNPPKTWEEIPALDKELKAKGKSALMFNLQEPYFTWPLIAADGGYAFKYENGKYDIKDVGVDNAGAKAGLTFLVDLIKNKHMNADTDYSIAEAAFNKGETAMTINGPWAWSNIDTSKVNYGVTVLPTFKGQPSKPFVGVLSAGINAASPNKELAKEFLENYLLTDEGLEAVNKDKPLGAVALKSYEEELAKDPRIAATMENAQKGEIMPNIPQMSAFWYAVRTAVINAASGRQTVDEALKDAQTGGSGENLYFQSSDNGPQNQRNAPRITFGGPSDSTGSNQNGERSGARSKQRRPQGLPNNTASWFTALTQHGKEDLKFPKGQGVPINTNSKPDDQIGYYRRQTRRYRGGDGQMKDLNPRWYFYYLGTGPEAGLPYGANKDGIIWVATEGALNTPKDHIGTRNPANNAAIVLQLPQGTTLPKGFYAEGSRGGSQASSRSSSRSRNSSRNSTPGSSRGTSPARMAGNGGDAALALLLLDRLNQLESKMSGKGQQQQGQTVTKKSAAEASKKPRQKRTATKAYNVTQAFGRRGPEQTQGNFGDQELIRQGTDYKHWPQIAQFAPSASAFFGMSRIGMEVTPSGTWLTYTGAIKLDDKDPNFKDQVILLNKHIDAYKTFPPTEPKKDKKKKADETQALPQRQKKQQTVTLLPAADLDDFSKQLQQSMSSADSTQAGGSGHHHHHH

SEQ ID NO: 3486 - protein, 806 aa, Artificial Sequence
  Description of Artificial Sequence: Synthetic polypeptide
MKIEEGKLVIWINGDKGYNGLAEVGKKFEKDTGIKVTVEHPDKLEEKFPQVAATGDGPDIIFWAHDRFGGYAQSGLLAEITPDKAFQDKLYPFTWDAVRYNGKLIAYPIAVEALSLIYNKDLLPNPPKTWEEIPALDKELKAKGKSALMFNLQEPYFTWPLIAADGGYAFKYENGKYDIKDVGVDNAGAKAGLTFLVDLIKNKHMNADTDYSIAEAAFNKGETAMTINGPWAWSNIDTSKVNYGVTVLPTFKGQPSKPFVGVLSAGINAASPNKELAKEFLENYLLTDEGLEAVNKDKPLGAVALKSYEEELAKDPRIAATMENAQKGEIMPNIPQMSAFWYAVRTAVINAASGRQTVDEALKDAQTGGSGENLYFQSSDNGPQNQRNAPRITFGGPSDSTGSNQNGERSGARSKQRRPQGLPNNTASWFTALTQHGKEDLKFPRGQGVPINTNSSPDDQIGYYRRATRRIRGGDGKMKDLSPRWYFYYLGTGPEAGLPYGANKDGIIWVATEGALNTPKDHIGTRNPANNAAIVLQLPQGTTLPKGFYAEGSRGGSQASSRSSSRSRNSSRNSTPGSSRGTSPARMAGNGGDAALALLLLDRLNQLESKMSGKGQQQQGQTVTKKSAAEMSKKPRWKRTPTKEYNVTQAFGPRGPKDTQGNFGDAELIKQGTDYKHWPQIAQFVPSAAAFFFMSRIGMKETPDGVWLTYTGTIKLDKDDPNFDDQVKLLNKHIDAYKTFPPTEPKKDKKKKADETQALPQRQKKQQTVTLLPAADLDDFSKQLQQSMSSADSTQAGGSGHHHHHH

SEQ ID NO: 3487 - protein, 806 aa, Artificial Sequence
  Description of Artificial Sequence: Synthetic polypeptide
MKIEEGKLVIWINGDKGYNGLAEVGKKFEKDTGIKVTVEHPDKLEEKFPQVAATGDGPDIIFWAHDRFGGYAQSGLLAEITPDKAFQDKLYPFTWDAVRYNGKLIAYPIAVEALSLIYNKDLLPNPPKTWEEIPALDKELKAKGKSALMFNLQEPYFTWPLIAADGGYAFKYENGKYDIKDVGVDNAGAKAGLTFLVDLIKNKHMNADTDYSIAEAAFNKGETAMTINGPWAWSNIDTSKVNYGVTVLPTFKGQPSKPFVGVLSAGINAASPNKELAKEFLENYLLTDEGLEAVNKDKPLGAVALKSYEEELAKDPRIAATMENAQKGEIMPNIPQMSAFWYAVRTAVINAASGRQTVDEALKDAQTGGSGENLYFQSSDNGPQNQRNAPRITFGGPSDSTGSNQNGERSGARSKQRRPQGLPNNTASWFTALTQHGKEDLKFPRGQGVPINTNSSPDDQIGYYRRATRRIRGGDGKMKDLSPRWYFYYLGTGPEAGLPYGANKDGIIWVATEGALNTPKDHIGTRNPANNAAITLQLPQGTTLPKGFYAEGSRGGSQASSRSSSRSRNSSRNSTPGSSRGTSPARMAGNGGDAALALLLLDRLNQLESKMSGKGQQQQGQTVTKKSAAEASKKPRQKRTATKAYNVTQAFGRRGPEQTQGNFGDQELIRQGTDYKHWPQIAQFAPSASAFFGMSRIGMEVTPSGTWLTYTGAIKLDDKDPNFKDQVILLNKHIDAYKTFPPTEPKKDKKKKADETQALPQRQKKQQTVTLLPAADLDDFSKQLQQSMSSADSTQAGGSGHHHHHH

SEQ ID NO: 3488 - protein, 806 aa, Artificial Sequence
  Description of Artificial Sequence: Synthetic polypeptide
MKIEEGKLVIWINGDKGYNGLAEVGKKFEKDTGIKVTVEHPDKLEEKFPQVAATGDGPDIIFWAHDRFGGYAQSGLLAEITPDKAFQDKLYPFTWDAVRYNGKLIAYPIAVEALSLIYNKDLLPNPPKTWEEIPALDKELKAKGKSALMFNLQEPYFTWPLIAADGGYAFKYENGKYDIKDVGVDNAGAKAGLTFLVDLIKNKHMNADTDYSIAEAAFNKGETAMTINGPWAWSNIDTSKVNYGVTVLPTFKGQPSKPFVGVLSAGINAASPNKELAKEFLENYLLTDEGLEAVNKDKPLGAVALKSYEEELAKDPRIAATMENAQKGEIMPNIPQMSAFWYAVRTAVINAASGRQTVDEALKDAQTGGSGENLYFQSSDNGPQNQRNAPRITFGGPSDSTGSNQNGERSGARSKQRRPQGLPNNTASWFTALTQHGKEDLKFPRGQGVPINTNSSPDDQIGYYRRATRRIRGGDGKMKDLSPRWYFYYLGTGPEAGLPYGANKDGIIWVATEGALNTPKDHIGTRNPANNAAIVLQLPQGTTLPKGFYAEGSRGGSQASSRSSSRSRNSSRNSTPGSSRGTSPARMAGNGGDAALALLLLDRLNQLESKMSGKGQQQQGQTVTKKSAAEASKAPRQKRTATKAYNVTQAFGRRGPEQTQGNFGDQELIRQGTDYKHWPQIAQFAPSASAFFGMSRIGMEVTPSGTWLTYTGAIKLDDKDPNFKDQVILLNKHIDAYKTFPPTEPKKDKKKKADETQALPQRQKKQQTVTLLPAADLDDFSKQLQQSMSSADSTQAGGSGHHHHHH

SEQ ID NO: 3489 - protein, 806 aa, Artificial Sequence
  Description of Artificial Sequence: Synthetic polypeptide
MKIEEGKLVIWINGDKGYNGLAEVGKKFEKDTGIKVTVEHPDKLEEKFPQVAATGDGPDIIFWAHDRFGGYAQSGLLAEITPDKAFQDKLYPFTWDAVRYNGKLIAYPIAVEALSLIYNKDLLPNPPKTWEEIPALDKELKAKGKSALMFNLQEPYFTWPLIAADGGYAFKYENGKYDIKDVGVDNAGAKAGLTFLVDLIKNKHMNADTDYSIAEAAFNKGETAMTINGPWAWSNIDTSKVNYGVTVLPTFKGQPSKPFVGVLSAGINAASPNKELAKEFLENYLLTDEGLEAVNKDKPLGAVALKSYEEELAKDPRIAATMENAQKGEIMPNIPQMSAFWYAVRTAVINAASGRQTVDEALKDAQTGGSGENLYFQSSDNGPQNQRNAPRITFGGPSDSTGSNQNGERSGARSKQRRPQGLPNNTASWFTALTQHGKEDLKFPRGQGVPINTNSSPDDQIGYYRRATRRIRGGDGKMKDLSPRWYFYYLGTGPEAGLPYGANKDGIIWVATEGALNTPKDHIGTRNPANNAAIVLQLPQGTTLPKGFYAEGSRGGSQASSRSSSRSRNSSRNSTPGSSRGTSPARMAGNGGDAALALLLLDRLNQLESKMSGKGQQQQGQTVTKKSAAEASKKPRQKRTATKAYNVTQAFGRRGPEQTQGNFGDQELTRQGTDYKHWPQIAQFAPSASAFFGMSRIGMEVTPSGTWLTYTGAIKLDDKDPNFKDQVILLNKHIDAYKTFPPTEPKKDKKKKADETQALPQRQKKQQTVTLLPAADLDDFSKQLQQSMSSADSTQAGGSGHHHHHH

SEQ ID NO: 3490 - protein, 806 aa, Artificial Sequence
  Description of Artificial Sequence: Synthetic polypeptide
MKIEEGKLVIWINGDKGYNGLAEVGKKFEKDTGIKVTVEHPDKLEEKFPQVAATGDGPDIIFWAHDRFGGYAQSGLLAEITPDKAFQDKLYPFTWDAVRYNGKLIAYPIAVEALSLIYNKDLLPNPPKTWEEIPALDKELKAKGKSALMFNLQEPYFTWPLIAADGGYAFKYENGKYDIKDVGVDNAGAKAGLTFLVDLIKNKHMNADTDYSIAEAAFNKGETAMTINGPWAWSNIDTSKVNYGVTVLPTFKGQPSKPFVGVLSAGINAASPNKELAKEFLENYLLTDEGLEAVNKDKPLGAVALKSYEEELAKDPRIAATMENAQKGEIMPNIPQMSAFWYAVRTAVINAASGRQTVDEALKDAQTGGSGENLYFQSSDNGPQNQRNAPRITFGGPSDSTGSNQNGERSGARSKQRRPQGLPNNTASWFTALTQHGKEDLKFPRGQGVPINTNSSPDDQIGYYRRATRRIRGGDGKMKDLSPRWYFYYLGTGPEAGLPYGANKVGIIWVATEGALNTPKDHIGTRNPANNAAIVLQLPQGTTLPKGFYAEGSRGGSQASSRSSSRSRNSSRNSTPGSSRGTSPARMAGNGGDAALALLLLDRLNQLESKMSGKGQQQQGQTVTKKSAAEASKKPRQKRTATKAYNVTQAFGRRGPEQTQGNFGDQELIRQGTDYKHWPQIAQFAPSASAFFGMSRIGMEVTPSGTWLTYTGAIKLDDKDPNFKDQVILLNKHIDAYKTFPPTEPKKDKKKKADETQALPQRQKKQQTVTLLPAADLDDFSKQLQQSMSSADSTQAGGSGHHHHHH

SEQ ID NO: 3491 - protein, 806 aa, Artificial Sequence
  Description of Artificial Sequence: Synthetic polypeptide
MKIEEGKLVIWINGDKGYNGLAEVGKKFEKDTGIKVTVEHPDKLEEKFPQVAATGDGPDIIFWAHDRFGGYAQSGLLAEITPDKAFQDKLYPFTWDAVRYNGKLIAYPIAVEALSLIYNKDLLPNPPKTWEEIPALDKELKAKGKSALMFNLQEPYFTWPLIAADGGYAFKYENGKYDIKDVGVDNAGAKAGLTFLVDLIKNKHMNADTDYSIAEAAFNKGETAMTINGPWAWSNIDTSKVNYGVTVLPTFKGQPSKPFVGVLSAGINAASPNKELAKEFLENYLLTDEGLEAVNKDKPLGAVALKSYEEELAKDPRIAATMENAQKGEIMPNIPQMSAFWYAVRTAVINAASGRQTVDEALKDAQTGGSGENLYFQSSDNGPQNQRNAPRITFGGPSDSTGSNQNGERSGARSKQRRPQGLPNNTASWFTALTQHGKEDLKFPRGQGVPINTNSSPDDQIGYYRRATRRIRGGDGKMKDLSPRWYFYYLGTGPEAGLPYGANKDGIIWVATEGALNTPKDHIGTRNPANNAAIVLQLPQGTTLPKGFYAEGSRGGSQASSRSSSRSRNSSRNSTPGSSRGTSPARMAGNGGDAALALLLLDRLNQLESKMSGKGQQQQGQTVTKKSAAEASKKPRQKRTATKGYNVTQAFGRRGPEQTQGNFGDQDLIKLGTDYKHWPQIAQFAPSASAFFGMSRISMEETPSGTWLTYTGAIKLDKKDPNFKDQVILLNKHIDAYKTFPPTEPKKDKKKKADETQALPQRQKKQQTVTLLPAADLDDFSKQLQQSMSSADSTQAGGSGHHHHHH

SEQ ID NO: 3492 - protein, 806 aa, Artificial Sequence
  Description of Artificial Sequence: Synthetic polypeptide
MKIEEGKLVIWINGDKGYNGLAEVGKKFEKDTGIKVTVEHPDKLEEKFPQVAATGDGPDIIFWAHDRFGGYAQSGLLAEITPDKAFQDKLYPFTWDAVRYNGKLIAYPIAVEALSLIYNKDLLPNPPKTWEEIPALDKELKAKGKSALMFNLQEPYFTWPLIAADGGYAFKYENGKYDIKDVGVDNAGAKAGLTFLVDLIKNKHMNADTDYSIAEAAFNKGETAMTINGPWAWSNIDTSKVNYGVTVLPTFKGQPSKPFVGVLSAGINAASPNKELAKEFLENYLLTDEGLEAVNKDKPLGAVALKSYEEELAKDPRIAATMENAQKGEIMPNIPQMSAFWYAVRTAVINAASGRQTVDEALKDAQTGGSGENLYFQSSDNGPQNQRNAPRITFGGPSDSTGSNQNGERSGARSKQRRPQGLPNNTASWFTALTQHGKEDLKFPKGQGVPINTNSKPDDQIGYYRRQVRRYRGGDGQMKDLDPRWYFYYLGTGPEAGLPYGANKDGIIWVATEGALNTPKDHIGTRNPANNAAIVLQLPQGTTLPKGFYAEGSRGGSQASSRSSSRSRNSSRNSTPGSSRGTSPARMAGNGGDAALALLLLDRLNQLESKMSGKGQQQQGQTVTKKSAAEASKKPRQKRTATKAYNVTQAFGRRGPEQTQGNFGDQELIRQGTDYKHWPQIAQFAPSASAFFGMSRIGMEVTPSGTWLTYTGAIKLDDKDPNFKDQVILLNKHIDAYKTFPPTEPKKDKKKKADETQALPQRQKKQQTVTLLPAADLDDFSKQLQQSMSSADSTQAGGSGHHHHHH

SEQ ID NO: 3493 - protein, 806 aa, Artificial Sequence
  Description of Artificial Sequence: Synthetic polypeptide
MKIEEGKLVIWINGDKGYNGLAEVGKKFEKDTGIKVTVEHPDKLEEKFPQVAATGDGPDIIFWAHDRFGGYAQSGLLAEITPDKAFQDKLYPFTWDAVRYNGKLIAYPIAVEALSLIYNKDLLPNPPKTWEEIPALDKELKAKGKSALMFNLQEPYFTWPLIAADGGYAFKYENGKYDIKDVGVDNAGAKAGLTFLVDLIKNKHMNADTDYSIAEAAFNKGETAMTINGPWAWSNIDTSKVNYGVTVLPTFKGQPSKPFVGVLSAGINAASPNKELAKEFLENYLLTDEGLEAVNKDKPLGAVALKSYEEELAKDPRIAATMENAQKGEIMPNIPQMSAFWYAVRTAVINAASGRQTVDEALKDAQTGGSGENLYFQSSDNGPQNQRNAPRITFGGPSDSTGSNQNGERSGARSKQRRPQGLPNNTASWFTALTQHGKEDLKFPRGQGVPINTNSSPDDQIGYYRRATRRIRGGDGKMKDLSPRWYFYYLGTGPEAGLPYGANKDGILWVATEGALNTPKDHIGTRNPANNAAIVLQLPQGTTLPKGFYAEGSRGGSQASSRSSSRSRNSSRNSTPGSSRGTSPARMAGNGGDAALALLLLDRLNQLESKMSGKGQQQQGQTVTKKSAAEASKKPRQKRTATKAYNVTQAFGRRGPEQTQGNFGDQELIRQGTDYKHWPQIAQFAPSASAFFGMSRIGMEVTPSGTWLTYTGAIKLDDKDPNFKDQVILLNKHIDAYKTFPPTEPKKDKKKKADETQALPQRQKKQQTVTLLPAADLDDFSKQLQQSMSSADSTQAGGSGHHHHHH

SEQ ID NO: 3494 - protein, 806 aa, Artificial Sequence
  Description of Artificial Sequence: Synthetic polypeptide
MKIEEGKLVIWINGDKGYNGLAEVGKKFEKDTGIKVTVEHPDKLEEKFPQVAATGDGPDIIFWAHDRFGGYAQSGLLAEITPDKAFQDKLYPFTWDAVRYNGKLIAYPIAVEALSLIYNKDLLPNPPKTWEEIPALDKELKAKGKSALMFNLQEPYFTWPLIAADGGYAFKYENGKYDIKDVGVDNAGAKAGLTFLVDLIKNKHMNADTDYSIAEAAFNKGETAMTINGPWAWSNIDTSKVNYGVTVLPTFKGQPSKPFVGVLSAGINAASPNKELAKEFLENYLLTDEGLEAVNKDKPLGAVALKSYEEELAKDPRIAATMENAQKGEIMPNIPQMSAFWYAVRTAVINAASGRQTVDEALKDAQTGGSGENLYFQSSDNGPQNQRNAPRITFGGPSDSTGSNQNGERSGARSKQRRPQGLPNNTASWFTALTQHGKEDLKFPRGQGVPINTNSSPDDQIGYYRRATRRIRGGDGKMKDLSPRWYFYYLGTGPEAGLPYGANKDGIIWVATEGALNTPKDHIGTRNPANNAARVLQLPQGTTLPKGFYAEGSRGGSQASSRSSSRSRNSSRNSTPGSSRGTSPARMAGNGGDAALALLLLDRLNQLESKMSGKGQQQQGQTVTKKSAAEASKKPRQKRTATKAYNVTQAFGRRGPEQTQGNFGDQELIRQGTDYKHWPQIAQFAPSASAFFGMSRIGMEVTPSGTWLTYTGAIKLDDKDPNFKDQVILLNKHIDAYKTFPPTEPKKDKKKKADETQALPQRQKKQQTVTLLPAADLDDFSKQLQQSMSSADSTQAGGSGHHHHHH

SEQ ID NO: 3495 - protein, 806 aa, Artificial Sequence
  Description of Artificial Sequence: Synthetic polypeptide
MKIEEGKLVIWINGDKGYNGLAEVGKKFEKDTGIKVTVEHPDKLEEKFPQVAATGDGPDIIFWAHDRFGGYAQSGLLAEITPDKAFQDKLYPFTWDAVRYNGKLIAYPIAVEALSLIYNKDLLPNPPKTWEEIPALDKELKAKGKSALMFNLQEPYFTWPLIAADGGYAFKYENGKYDIKDVGVDNAGAKAGLTFLVDLIKNKHMNADTDYSIAEAAFNKGETAMTINGPWAWSNIDTSKVNYGVTVLPTFKGQPSKPFVGVLSAGINAASPNKELAKEFLENYLLTDEGLEAVNKDKPLGAVALKSYEEELAKDPRIAATMENAQKGEIMPNIPQMSAFWYAVRTAVINAASGRQTVDEALKDAQTGGSGENLYFQSSDNGPQNQRNAPRITFGGPSDSTGSNQNGERSGARSKQRRPQGLPNNTASWFTALTQHGKEDLKFPRGQGVPINTNSSPDDQIGYWRRATRRIRGGDGKMKDLSPRWYFYYLGTGPEAGLPYGANKDGIIWVATEGALNTPKDHIGTRNPANNAAIVLQLPQGTTLPKGFYAEGSRGGSQASSRSSSRSRNSSRNSTPGSSRGTSPARMAGNGGDAALALLLLDRLNQLESKMSGKGQQQQGQTVTKKSAAEASKKPRQKRTATKAYNVTQAFGRRGPEQTQGNFGDQELIRQGTDYKHWPQIAQFAPSASAFFGMSRIGMEVTPSGTWLTYTGAIKLDDKDPNFKDQVILLNKHIDAYKTFPPTEPKKDKKKKADETQALPQRQKKQQTVTLLPAADLDDFSKQLQQSMSSADSTQAGGSGHHHHHH

SEQ ID NO: 3496 - protein, 806 aa, Artificial Sequence
  Description of Artificial Sequence: Synthetic polypeptide
MKIEEGKLVIWINGDKGYNGLAEVGKKFEKDTGIKVTVEHPDKLEEKFPQVAATGDGPDIIFWAHDRFGGYAQSGLLAEITPDKAFQDKLYPFTWDAVRYNGKLIAYPIAVEALSLIYNKDLLPNPPKTWEEIPALDKELKAKGKSALMFNLQEPYFTWPLIAADGGYAFKYENGKYDIKDVGVDNAGAKAGLTFLVDLIKNKHMNADTDYSIAEAAFNKGETAMTINGPWAWSNIDTSKVNYGVTVLPTFKGQPSKPFVGVLSAGINAASPNKELAKEFLENYLLTDEGLEAVNKDKPLGAVALKSYEEELAKDPRIAATMENAQKGEIMPNIPQMSAFWYAVRTAVINAASGRQTVDEALKDAQTGGSGENLYFQSSDNGPQNQRNAPRITFGGPSDSTGSNQNGERSGARSKQRRPQGLPNNTASWFTALTQHGKEDLKFPRGQGVPINTNSSPDDQIGYYRRYTRRIRGGDGKMKDLSPRWYFYYLGTGPEAGLPYGANKDGIIWVATEGALNTPKDHIGTRNPANNAAIVLQLPQGTTLPKGFYAEGSRGGSQASSRSSSRSRNSSRNSTPGSSRGTSPARMAGNGGDAALALLLLDRLNQLESKMSGKGQQQQGQTVTKKSAAEASKKPRQKRTATKAYNVTQAFGRRGPEQTQGNFGDQELIRQGTDYKHWPQIAQFAPSASAFFGMSRIGMEVTPSGTWLTYTGAIKLDDKDPNFKDQVILLNKHIDAYKTFPPTEPKKDKKKKADETQALPQRQKKQQTVTLLPAADLDDFSKQLQQSMSSADSTQAGGSGHHHHHH

SEQ ID NO: 3497 - protein, 806 aa, Artificial Sequence
  Description of Artificial Sequence: Synthetic polypeptide
MKIEEGKLVIWINGDKGYNGLAEVGKKFEKDTGIKVTVEHPDKLEEKFPQVAATGDGPDIIFWAHDRFGGYAQSGLLAEITPDKAFQDKLYPFTWDAVRYNGKLIAYPIAVEALSLIYNKDLLPNPPKTWEEIPALDKELKAKGKSALMFNLQEPYFTWPLIAADGGYAFKYENGKYDIKDVGVDNAGAKAGLTFLVDLIKNKHMNADTDYSIAEAAFNKGETAMTINGPWAWSNIDTSKVNYGVTVLPTFKGQPSKPFVGVLSAGINAASPNKELAKEFLENYLLTDEGLEAVNKDKPLGAVALKSYEEELAKDPRIAATMENAQKGEIMPNIPQMSAFWYAVRTAVINAASGRQTVDEALKDAQTGGSGENLYFQSSDNGPQNQRNAPRITFGGPSDSTGSNQNGERSGARSKQRRPQGLPNNTASWFTALTQHGKEDLKFPRGQGVPINTNSSPDDQIGYYRRATRRIRGGDGKMKDLSPEWYFYYLGTGPEAGLPYGANKDGIIWVATEGALNTPKDHIGTRNPANNAAIVLQLPQGTTLPKGFYAEGSRGGSQASSRSSSRSRNSSRNSTPGSSRGTSPARMAGNGGDAALALLLLDRLNQLESKMSGKGQQQQGQTVTKKSAAEASKKPRQKRTATKAYNVTQAFGRRGPEQTQGNFGDQELIRQGTDYKHWPQIAQFAPSASAFFGMSRIGMEVTPSGTWLTYTGAIKLDDKDPNFKDQVILLNKHIDAYKTFPPTEPKKDKKKKADETQALPQRQKKQQTVTLLPAADLDDFSKQLQQSMSSADSTQAGGSGHHHHHH

SEQ ID NO: 3498 - protein, 806 aa, Artificial Sequence
  Description of Artificial Sequence: Synthetic polypeptide
MKIEEGKLVIWINGDKGYNGLAEVGKKFEKDTGIKVTVEHPDKLEEKFPQVAATGDGPDIIFWAHDRFGGYAQSGLLAEITPDKAFQDKLYPFTWDAVRYNGKLIAYPIAVEALSLIYNKDLLPNPPKTWEEIPALDKELKAKGKSALMFNLQEPYFTWPLIAADGGYAFKYENGKYDIKDVGVDNAGAKAGLTFLVDLIKNKHMNADTDYSIAEAAFNKGETAMTINGPWAWSNIDTSKVNYGVTVLPTFKGQPSKPFVGVLSAGINAASPNKELAKEFLENYLLTDEGLEAVNKDKPLGAVALKSYEEELAKDPRIAATMENAQKGEIMPNIPQMSAFWYAVRTAVINAASGRQTVDEALKDAQTGGSGENLYFQSSDNGPQNQRNAPRITFGGPSDSTGSNQNGERSGARSKQRRPQGLPNNTASWFTALTQHGKEDLKFPRGQGVPINTNSSPDDQIGYYRRATRRIRGGDGKMKDLSPRWYFYYLGTGPEAGLPYGANKDGIIWVATEGALNTPKDHIGTRNPANNAAWVLQLPQGTTLPKGFYAEGSRGGSQASSRSSSRSRNSSRNSTPGSSRGTSPARMAGNGGDAALALLLLDRLNQLESKMSGKGQQQQGQTVTKKSAAEASKKPRQKRTATKAYNVTQAFGRRGPEQTQGNFGDQELIRQGTDYKHWPQIAQFAPSASAFFGMSRIGMEVTPSGTWLTYTGAIKLDDKDPNFKDQVILLNKHIDAYKTFPPTEPKKDKKKKADETQALPQRQKKQQTVTLLPAADLDDFSKQLQQSMSSADSTQAGGSGHHHHHH

SEQ ID NO: 3499 - protein, 806 aa, Artificial Sequence
  Description of Artificial Sequence: Synthetic polypeptide
MKIEEGKLVIWINGDKGYNGLAEVGKKFEKDTGIKVTVEHPDKLEEKFPQVAATGDGPDIIFWAHDRFGGYAQSGLLAEITPDKAFQDKLYPFTWDAVRYNGKLIAYPIAVEALSLIYNKDLLPNPPKTWEEIPALDKELKAKGKSALMFNLQEPYFTWPLIAADGGYAFKYENGKYDIKDVGVDNAGAKAGLTFLVDLIKNKHMNADTDYSIAEAAFNKGETAMTINGPWAWSNIDTSKVNYGVTVLPTFKGQPSKPFVGVLSAGINAASPNKELAKEFLENYLLTDEGLEAVNKDKPLGAVALKSYEEELAKDPRIAATMENAQKGEIMPNIPQMSAFWYAVRTAVINAASGRQTVDEALKDAQTGGSGENLYFQSSDNGPQNQRNAPRITFGGPSDSTGSNQNGERSGARSKQRRPQGLPNNTASWFTALTQHGKEDLKFPRGQGVPINTNSSPDDQIGYYRRATRRIRGGDGKMKDLSPRWYFYYLGTGPEAGLPYGANKDGIIWVATEGALNTPKDHIGTRNPANNAAIVLQLPQGTTLPKGFYAEGSRGGSQASSRSSSRSRNSSRNSTPGSSRGTSPARMAGNGGDAALALLLLDRLNQLESKMSGKGQQQQGQTVTKKSAAEASKKPRQKRTATKAYNVTQAFGRRGPEQTQGNFGDQELIRQGSDYKHWPQIAQFAPSASAFFGMSRIGMEVTPSGTWLTYTGAIKLDDKDPNFKDQVILLNKHIDAYKTFPPTEPKKDKKKKADETQALPQRQKKQQTVTLLPAADLDDFSKQLQQSMSSADSTQAGGSGHHHHHH

SEQ ID NO: 3500 - protein, 806 aa, Artificial Sequence
  Description of Artificial Sequence: Synthetic polypeptide
MKIEEGKLVIWINGDKGYNGLAEVGKKFEKDTGIKVTVEHPDKLEEKFPQVAATGDGPDIIFWAHDRFGGYAQSGLLAEITPDKAFQDKLYPFTWDAVRYNGKLIAYPIAVEALSLIYNKDLLPNPPKTWEEIPALDKELKAKGKSALMFNLQEPYFTWPLIAADGGYAFKYENGKYDIKDVGVDNAGAKAGLTFLVDLIKNKHMNADTDYSIAEAAFNKGETAMTINGPWAWSNIDTSKVNYGVTVLPTFKGQPSKPFVGVLSAGINAASPNKELAKEFLENYLLTDEGLEAVNKDKPLGAVALKSYEEELAKDPRIAATMENAQKGEIMPNIPQMSAFWYAVRTAVINAASGRQTVDEALKDAQTGGSGENLYFQSSDNGPQNQRNAPRITFGGPSDSTGSNQNGERSGARSKQRRPQGLPNNTASWFQALTQHGKEDLKFPRGQGVPINTNSSPDDQIGYYRRATRRIRGGDGKMKDLSPRWYFYYLGTGPEAGLPYGANKDGIIWVATEGALNTPKDHIGTRNPANNAAIVLQLPQGTTLPKGFYAEGSRGGSQASSRSSSRSRNSSRNSTPGSSRGTSPARMAGNGGDAALALLLLDRLNQLESKMSGKGQQQQGQTVTKKSAAEASKKPRQKRTATKAYNVTQAFGRRGPEQTQGNFGDQELIRQGTDYKHWPQIAQFAPSASAFFGMSRIGMEVTPSGTWLTYTGAIKLDDKDPNFKDQVILLNKHIDAYKTFPPTEPKKDKKKKADETQALPQRQKKQQTVTLLPAADLDDFSKQLQQSMSSADSTQAGGSGHHHHHH

SEQ ID NO: 3501 - protein, 806 aa, Artificial Sequence
  Description of Artificial Sequence: Synthetic polypeptide
MKIEEGKLVIWINGDKGYNGLAEVGKKFEKDTGIKVTVEHPDKLEEKFPQVAATGDGPDIIFWAHDRFGGYAQSGLLAEITPDKAFQDKLYPFTWDAVRYNGKLIAYPIAVEALSLIYNKDLLPNPPKTWEEIPALDKELKAKGKSALMFNLQEPYFTWPLIAADGGYAFKYENGKYDIKDVGVDNAGAKAGLTFLVDLIKNKHMNADTDYSIAEAAFNKGETAMTINGPWAWSNIDTSKVNYGVTVLPTFKGQPSKPFVGVLSAGINAASPNKELAKEFLENYLLTDEGLEAVNKDKPLGAVALKSYEEELAKDPRIAATMENAQKGEIMPNIPQMSAFWYAVRTAVINAASGRQTVDEALKDAQTGGSGENLYFQSSDNGPQNQRNAPRITFGGPSDSTGSNQNGERSGARSKQRRPQGLPNNTASWFTALTQHGKEDLKFPRGQGVPINTNSSPDDQIGYYRRATRRIRGGDGKMKDLSPRWYFYYLGTGPEAGLPYGANKDGIIWVATEGALNTPKDHIGTRNPANNAAIVLQLPQGTTLPKGFYAEGSRGGSQASSRSSSRSRNSSRNSTPGSSRGTSPARMAGNGGDAALALLLLDRLNQLESKMSGKGQQQQGQTVTKKSAAEASKKPRQKRTATKAYNVTQAFGPRGPEQTQGNFGDQELIRQGTDYKHWPQIAQFAPSASAFFGMSRIGMEVTPSGTWLTYTGAIKLDDKDPNFKDQVILLNKHIDAYKTFPPTEPKKDKKKKADETQALPQRQKKQQTVTLLPAADLDDFSKQLQQSMSSADSTQAGGSGHHHHHH

SEQ ID NO: 3502 - protein, 806 aa, Artificial Sequence
  Description of Artificial Sequence: Synthetic polypeptide
MKIEEGKLVIWINGDKGYNGLAEVGKKFEKDTGIKVTVEHPDKLEEKFPQVAATGDGPDIIFWAHDRFGGYAQSGLLAEITPDKAFQDKLYPFTWDAVRYNGKLIAYPIAVEALSLIYNKDLLPNPPKTWEEIPALDKELKAKGKSALMFNLQEPYFTWPLIAADGGYAFKYENGKYDIKDVGVDNAGAKAGLTFLVDLIKNKHMNADTDYSIAEAAFNKGETAMTINGPWAWSNIDTSKVNYGVTVLPTFKGQPSKPFVGVLSAGINAASPNKELAKEFLENYLLTDEGLEAVNKDKPLGAVALKSYEEELAKDPRIAATMENAQKGEIMPNIPQMSAFWYAVRTAVINAASGRQTVDEALKDAQTGGSGENLYFQSSDNGPQNQRNAPRITFGGPSDSTGSNQNGERSGARSKQRRPQGLPNNTASWFTALTQHGKEDLKFPRGQGVPINTNSSPDDQIGYYRRATRRIRGGDGKMKDLSPRWYFYYLGTGPEADLPYGANKDGIVWVATEGALNTPKDHIGTRNPANNAAIVLQLPQGTTLPKGFYAEGSRGGSQASSRSSSRSRNSSRNSTPGSSRGTSPARMAGNGGDAALALLLLDRLNQLESKMSGKGQQQQGQTVTKKSAAEASKKPRQKRTATKAYNVTQAFGRRGPEQTQGNFGDQELIRQGTDYKHWPQIAQFAPSASAFFGMSRIGMEVTPSGTWLTYTGAIKLDDKDPNFKDQVILLNKHIDAYKTFPPTEPKKDKKKKADETQALPQRQKKQQTVTLLPAADLDDFSKQLQQSMSSADSTQAGGSGHHHHHH

SEQ ID NO: 3503 - protein, 806 aa, Artificial Sequence
  Description of Artificial Sequence: Synthetic polypeptide
MKIEEGKLVIWINGDKGYNGLAEVGKKFEKDTGIKVTVEHPDKLEEKFPQVAATGDGPDIIFWAHDRFGGYAQSGLLAEITPDKAFQDKLYPFTWDAVRYNGKLIAYPIAVEALSLIYNKDLLPNPPKTWEEIPALDKELKAKGKSALMFNLQEPYFTWPLIAADGGYAFKYENGKYDIKDVGVDNAGAKAGLTFLVDLIKNKHMNADTDYSIAEAAFNKGETAMTINGPWAWSNIDTSKVNYGVTVLPTFKGQPSKPFVGVLSAGINAASPNKELAKEFLENYLLTDEGLEAVNKDKPLGAVALKSYEEELAKDPRIAATMENAQKGEIMPNIPQMSAFWYAVRTAVINAASGRQTVDEALKDAQTGGSGENLYFQSSDNGPQNQRNAPRITFGGPSDSTGSNQNGERSGARSKQRRPQGLPNNTASWFTALTQHGKEDLKFPRGQGMPINTNSSPDDQIGYYRRATRRIRGGDGKMKDLSPRWYFYYLGTGPEAGLPYGANKDGIIWVATEGALNTPKDHIGTRNPANNAAIVLQLPQGTTLPKGFYAEGSRGGSQASSRSSSRSRNSSRNSTPGSSRGTSPARMAGNGGDAALALLLLDRLNQLESKMSGKGQQQQGQTVTKKSAAEASKKPRQKRTATKAYNVTQAFGRRGPEQTQGNFGDQELIRQGTDYKHWPQIAQFAPSASAFFGMSRIGMEVTPSGTWLTYTGAIKLDDKDPNFKDQVILLNKHIDAYKTFPPTEPKKDKKKKADETQALPQRQKKQQTVTLLPAADLDDFSKQLQQSMSSADSTQAGGSGHHHHHH

SEQ ID NO: 3504 - protein, 806 aa, Artificial Sequence
  Description of Artificial Sequence: Synthetic polypeptide
MKIEEGKLVIWINGDKGYNGLAEVGKKFEKDTGIKVTVEHPDKLEEKFPQVAATGDGPDIIFWAHDRFGGYAQSGLLAEITPDKAFQDKLYPFTWDAVRYNGKLIAYPIAVEALSLIYNKDLLPNPPKTWEEIPALDKELKAKGKSALMFNLQEPYFTWPLIAADGGYAFKYENGKYDIKDVGVDNAGAKAGLTFLVDLIKNKHMNADTDYSIAEAAFNKGETAMTINGPWAWSNIDTSKVNYGVTVLPTFKGQPSKPFVGVLSAGINAASPNKELAKEFLENYLLTDEGLEAVNKDKPLGAVALKSYEEELAKDPRIAATMENAQKGEIMPNIPQMSAFWYAVRTAVINAASGRQTVDEALKDAQTGGSGENLYFQSSDNGPQNQRNAPRITFGGPSDSTGSNQNGERSGARSKQRRPQGLPNNTASWFTALTQHGKEDLKFPRGQGVPINTNSSPDDQIGYYRRATRRIRGGDGKMKDLSPRWYFYYLGTGPEAGLPYGANKDGIIWVATEGALNTPKDHIGTRNPANNSAIVLQLPQGTTLPKGFYAEGSRGGSQASSRSSSRSRNSSRNSTPGSSRGTSPARMAGNGGDAALALLLLDRLNQLESKMSGKGQQQQGQTVTKKSAAEASKKPRQKRTATKAYNVTQAFGRRGPEQTQGNFGDQELIRQGTDYKHWPQIAQFAPSASAFFGMSRIGMEVTPSGTWLTYTGAIKLDDKDPNFKDQVILLNKHIDAYKTFPPTEPKKDKKKKADETQALPQRQKKQQTVTLLPAADLDDFSKQLQQSMSSADSTQAGGSGHHHHHH

SEQ ID NO: 3505 - protein, 806 aa, Artificial Sequence
  Description of Artificial Sequence: Synthetic polypeptide
MKIEEGKLVIWINGDKGYNGLAEVGKKFEKDTGIKVTVEHPDKLEEKFPQVAATGDGPDIIFWAHDRFGGYAQSGLLAEITPDKAFQDKLYPFTWDAVRYNGKLIAYPIAVEALSLIYNKDLLPNPPKTWEEIPALDKELKAKGKSALMFNLQEPYFTWPLIAADGGYAFKYENGKYDIKDVGVDNAGAKAGLTFLVDLIKNKHMNADTDYSIAEAAFNKGETAMTINGPWAWSNIDTSKVNYGVTVLPTFKGQPSKPFVGVLSAGINAASPNKELAKEFLENYLLTDEGLEAVNKDKPLGAVALKSYEEELAKDPRIAATMENAQKGEIMPNIPQMSAFWYAVRTAVINAASGRQTVDEALKDAQTGGSGENLYFQSSDNGPQNQRNAPRITFGGPSDSTGSNQNGERSGARSKQRRPQGLPNNTASWFTALTQHGKEDLKFPRGQGVPINTNSSPDDQIGYYRRATRRIRGGDGKMKDLSPRWHFYYLGTGPEAGLPYGANKDGIIWVATEGALNTPKDHIGTRNPANNAAIVLQLPQGTTLPKGFYAEGSRGGSQASSRSSSRSRNSSRNSTPGSSRGTSPARMAGNGGDAALALLLLDRLNQLESKMSGKGQQQQGQTVTKKSAAEASKKPRQKRTATKAYNVTQAFGRRGPEQTQGNFGDQELIRQGTDYKHWPQIAQFAPSASAFFGMSRIGMEVTPSGTWLTYTGAIKLDDKDPNFKDQVILLNKHIDAYKTFPPTEPKKDKKKKADETQALPQRQKKQQTVTLLPAADLDDFSKQLQQSMSSADSTQAGGSGHHHHHH

SEQ ID NO: 3506 - protein, 806 aa, Artificial Sequence
  Description of Artificial Sequence: Synthetic polypeptide
MKIEEGKLVIWINGDKGYNGLAEVGKKFEKDTGIKVTVEHPDKLEEKFPQVAATGDGPDIIFWAHDRFGGYAQSGLLAEITPDKAFQDKLYPFTWDAVRYNGKLIAYPIAVEALSLIYNKDLLPNPPKTWEEIPALDKELKAKGKSALMFNLQEPYFTWPLIAADGGYAFKYENGKYDIKDVGVDNAGAKAGLTFLVDLIKNKHMNADTDYSIAEAAFNKGETAMTINGPWAWSNIDTSKVNYGVTVLPTFKGQPSKPFVGVLSAGINAASPNKELAKEFLENYLLTDEGLEAVNKDKPLGAVALKSYEEELAKDPRIAATMENAQKGEIMPNIPQMSAFWYAVRTAVINAASGRQTVDEALKDAQTGGSGENLYFQSSDNGPQNQRNAPRITFGGPSDSTGSNQNGERSGARSKQRRPQGLPNNTVSWFTALTQHGKEDLKFPRGQGVPINTNSSPDDQIGYYRRATRRIRGGDGKMKDLSPRWYFYYLGTGPEAGLPYGANKDGIIWVATEGALNTPKDHIGTRNPANNAAIVLQLPQGTTLPKGFYAEGSRGGSQASSRSSSRSRNSSRNSTPGSSRGTSPARMAGNGGDAALALLLLDRLNQLESKMSGKGQQQQGQTVTKKSAAEASKKPRQKRTATKAYNVTQAFGRRGPEQTQGNFGDQELIRQGTDYKHWPQIAQFAPSASAFFGMSRIGMEVTPSGTWLTYTGAIKLDDKDPNFKDQVILLNKHIDAYKTFPPTEPKKDKKKKADETQALPQRQKKQQTVTLLPAADLDDFSKQLQQSMSSADSTQAGGSGHHHHHH

SEQ ID NO: 3507 - protein, 806 aa, Artificial Sequence
  Description of Artificial Sequence: Synthetic polypeptide
MKIEEGKLVIWINGDKGYNGLAEVGKKFEKDTGIKVTVEHPDKLEEKFPQVAATGDGPDIIFWAHDRFGGYAQSGLLAEITPDKAFQDKLYPFTWDAVRYNGKLIAYPIAVEALSLIYNKDLLPNPPKTWEEIPALDKELKAKGKSALMFNLQEPYFTWPLIAADGGYAFKYENGKYDIKDVGVDNAGAKAGLTFLVDLIKNKHMNADTDYSIAEAAFNKGETAMTINGPWAWSNIDTSKVNYGVTVLPTFKGQPSKPFVGVLSAGINAASPNKELAKEFLENYLLTDEGLEAVNKDKPLGAVALKSYEEELAKDPRIAATMENAQKGEIMPNIPQMSAFWYAVRTAVINAASGRQTVDEALKDAQTGGSGENLYFQSSDNGPQNQRNAPRITFGGPSDSTGSNQNGERSGARSKQRRPQGLPNNTASWFTALTQHGKEDLKFPRGQGVPINTNSSPDDQIGYYRRATRRIRGGDGKMKDLSPRWYFYYLGTGPEAGLPYGANKDGIIWVATEGALNTPKDHIGTRNPANNAAIVLQLPQGTTLPKGFYAEGSRGGSQASSRSSSRSRNSSRNSTPGSSRGTSPARMAGNGGDAALALLLLDRLNQLESKMSGKGQQQQGQTVTKKSAAEASKKPRQKRTATKAYNVTQAFGRRGPEQTQGNFGDQELIRQGTDYKHWPQIAQFAPSASAFFGMSRIGMEVTPSGTWLTYTGAIKLDDSDPNFKDQVILLNKHIDAYKTFPPTEPKKDKKKKADETQALPQRQKKQQTVTLLPAADLDDFSKQLQQSMSSADSTQAGGSGHHHHHH

SEQ ID NO: 3508 - protein, 806 aa, Artificial Sequence
  Description of Artificial Sequence: Synthetic polypeptide
MKIEEGKLVIWINGDKGYNGLAEVGKKFEKDTGIKVTVEHPDKLEEKFPQVAATGDGPDIIFWAHDRFGGYAQSGLLAEITPDKAFQDKLYPFTWDAVRYNGKLIAYPIAVEALSLIYNKDLLPNPPKTWEEIPALDKELKAKGKSALMFNLQEPYFTWPLIAADGGYAFKYENGKYDIKDVGVDNAGAKAGLTFLVDLIKNKHMNADTDYSIAEAAFNKGETAMTINGPWAWSNIDTSKVNYGVTVLPTFKGQPSKPFVGVLSAGINAASPNKELAKEFLENYLLTDEGLEAVNKDKPLGAVALKSYEEELAKDPRIAATMENAQKGEIMPNIPQMSAFWYAVRTAVINAASGRQTVDEALKDAQTGGSGENLYFQSSDNGPQNQRNAPRITFGGPSDSTGSNQNGERSGARSKQRRPQGLPNNTASWFTALTQHGKEDLKFPRGQGVPINTNSSPDDQIGYYRRATRRIRGGDGKMKDLSPRWYFYYLGTGPEAGLPYGANKDGIIWVATEGALNTPKDHIGTRNPANNAAIVLQLPQGTTLPKGFYAEGSRGGSQASSRSSSRSRNSSRNSTPGSSRGTSPARMAGNGGDAALALLLLDRLNQLESKMSGKGQQQQGQTVTKKSAAEASKKPRQKRTATKAYNVTQAFGRRGPEQTQGNFGDQELIRQGTDYKHWPQIAQFAPSASAFFGMSKIGMEVTPSGTWLTYTGAIKLDDKDPNFKDQVILLNKHIDAYKTFPPTEPKKDKKKKADETQALPQRQKKQQTVTLLPAADLDDFSKQLQQSMSSADSTQAGGSGHHHHHH

SEQ ID NO: 3509 - protein, 806 aa, Artificial Sequence
  Description of Artificial Sequence: Synthetic polypeptide
MKIEEGKLVIWINGDKGYNGLAEVGKKFEKDTGIKVTVEHPDKLEEKFPQVAATGDGPDIIFWAHDRFGGYAQSGLLAEITPDKAFQDKLYPFTWDAVRYNGKLIAYPIAVEALSLIYNKDLLPNPPKTWEEIPALDKELKAKGKSALMFNLQEPYFTWPLIAADGGYAFKYENGKYDIKDVGVDNAGAKAGLTFLVDLIKNKHMNADTDYSIAEAAFNKGETAMTINGPWAWSNIDTSKVNYGVTVLPTFKGQPSKPFVGVLSAGINAASPNKELAKEFLENYLLTDEGLEAVNKDKPLGAVALKSYEEELAKDPRIAATMENAQKGEIMPNIPQMSAFWYAVRTAVINAASGRQTVDEALKDAQTGGSGENLYFQSSDNGPQNQRNAPRITFGGPSDSTGSNQNGERSGARSKQRRPQGLPNNTASWFTALTQHGKEDLKFPRGQGVPINTNSSPDDQIGYYRRATRRIRGGDGKMKDLSPRWYFYYLGTGPEAGLPYGANKDGIIWVATEGALNTPKDHIGTRNPANNAAIVLQLPQGTGLPKGFYAEGSRGGSQASSRSSSRSRNSSRNSTPGSSRGTSPARMAGNGGDAALALLLLDRLNQLESKMSGKGQQQQGQTVTKKSAAEASKKPRQKRTATKAYNVTQAFGRRGPEQTQGNFGDQELIRQGTDYKHWPQIAQFAPSASAFFGMSRIGMEVTPSGTWLTYTGAIKLDDKDPNFKDQVILLNKHIDAYKTFPPTEPKKDKKKKADETQALPQRQKKQQTVTLLPAADLDDFSKQLQQSMSSADSTQAGGSGHHHHHH

SEQ ID NO: 3510 - protein, 806 aa, Artificial Sequence
  Description of Artificial Sequence: Synthetic polypeptide
MKIEEGKLVIWINGDKGYNGLAEVGKKFEKDTGIKVTVEHPDKLEEKFPQVAATGDGPDIIFWAHDRFGGYAQSGLLAEITPDKAFQDKLYPFTWDAVRYNGKLIAYPIAVEALSLIYNKDLLPNPPKTWEEIPALDKELKAKGKSALMFNLQEPYFTWPLIAADGGYAFKYENGKYDIKDVGVDNAGAKAGLTFLVDLIKNKHMNADTDYSIAEAAFNKGETAMTINGPWAWSNIDTSKVNYGVTVLPTFKGQPSKPFVGVLSAGINAASPNKELAKEFLENYLLTDEGLEAVNKDKPLGAVALKSYEEELAKDPRIAATMENAQKGEIMPNIPQMSAFWYAVRTAVINAASGRQTVDEALKDAQTGGSGENLYFQSSDNGPQNQRNAPRITFGGPSDSTGSNQNGERSGARSKQRRPQGLPNNTASWFTALTQHGKEDLKFPRGQGVPINTNSSPDDQIGYYRRATRRIRGGDGKMKDLSPRWYFYYLGTGPEAGLPYGANKDGIIWVATEGALNTPKDHIGTRNPANNAAIVLQLPQGTTLPKGFYAEGSRGGSQASSRSSSRSRNSSRNSTPGSSRGTSPARMAGNGGDAALALLLLDRLNQLESKMSGKGQQQQGQTVTKKSAAEASKKPRQKRTATKAYNVTQAFGRRGPQQTQGNFGDQELIRQGTDYKHWPQIAQFAPSASAFFGMSRIGMEVTPSGTWLTYTGAIKLDDKDPNFKDQVILLNKHIDAYKTFPPTEPKKDKKKKADETQALPQRQKKQQTVTLLPAADLDDFSKQLQQSMSSADSTQAGGSGHHHHHH

SEQ ID NO: 3511 - protein, 806 aa, Artificial Sequence
  Description of Artificial Sequence: Synthetic polypeptide
MKIEEGKLVIWINGDKGYNGLAEVGKKFEKDTGIKVTVEHPDKLEEKFPQVAATGDGPDIIFWAHDRFGGYAQSGLLAEITPDKAFQDKLYPFTWDAVRYNGKLIAYPIAVEALSLIYNKDLLPNPPKTWEEIPALDKELKAKGKSALMFNLQEPYFTWPLIAADGGYAFKYENGKYDIKDVGVDNAGAKAGLTFLVDLIKNKHMNADTDYSIAEAAFNKGETAMTINGPWAWSNIDTSKVNYGVTVLPTFKGQPSKPFVGVLSAGINAASPNKELAKEFLENYLLTDEGLEAVNKDKPLGAVALKSYEEELAKDPRIAATMENAQKGEIMPNIPQMSAFWYAVRTAVINAASGRQTVDEALKDAQTGGSGENLYFQSSDNGPQNQRNAPRITFGGPSDSTGSNQNGERSGARSKQRRPQGLPNNTASWFTALTQHGKEDLKFPRGQGVPINTNSSPDDQIGYYRRATRRIRGGDGKMKDLSPRWYFYYLGTGPEAGLPYGANKDGIIWVATEGALNTPKDHIGTRNPANNAAIVLQLPQGTTLPKGFYAEGSRGGSQASSRSSSRSRNSSRNSTPGSSRGTSPARMAGNGGDAALALLLLDRLNQLESKMSGKGQQQQGQTVTKKSAAEASKKPRQKRTATKAYNVTQAFGRRGPEQTQGNFGDLELIRQGTDYKHWPQIAQFAPSASAFFGMSRIGMEVTPSGTWLTYTGAIKLDDKDPNFKDQVILLNKHIDAYKTFPPTEPKKDKKKKADETQALPQRQKKQQTVTLLPAADLDDFSKQLQQSMSSADSTQAGGSGHHHHHH

SEQ ID NO: 3512 - protein, 806 aa, Artificial Sequence
  Description of Artificial Sequence: Synthetic polypeptide
MKIEEGKLVIWINGDKGYNGLAEVGKKFEKDTGIKVTVEHPDKLEEKFPQVAATGDGPDIIFWAHDRFGGYAQSGLLAEITPDKAFQDKLYPFTWDAVRYNGKLIAYPIAVEALSLIYNKDLLPNPPKTWEEIPALDKELKAKGKSALMFNLQEPYFTWPLIAADGGYAFKYENGKYDIKDVGVDNAGAKAGLTFLVDLIKNKHMNADTDYSIAEAAFNKGETAMTINGPWAWSNIDTSKVNYGVTVLPTFKGQPSKPFVGVLSAGINAASPNKELAKEFLENYLLTDEGLEAVNKDKPLGAVALKSYEEELAKDPRIAATMENAQKGEIMPNIPQMSAFWYAVRTAVINAASGRQTVDEALKDAQTGGSGENLYFQSSDNGPQNQRNAPRITFGGPSDSTGSNQNGERSGARSKQRRPQGLPNNTASWFTALTQHGKEDLKFPRGQGVPINTNSSPDDQIGYYRRATRRIRGGDGKMKDLSPRWYFYYLGTGPEAGLPYGANKDGIIWVATEGALNTPKDHIGTRNPANNAAIVLQLPQGTTLPKGFYAEGSRGGSQASSRSSSRSRNSSRNSTPGSSRGTSPARMAGNGGDAALALLLLDRLNQLESKMSGKGQQQQGQTVTKKSAAEASKKPRQKRTATKDYNVTQAFGRRGPEQTQGNFGDQDLIKLGTDYKHWPQIAQFAPSASAFFGMSRIGMEETPSGTWLTYTGAIKLDKKDPNFKDQVILLNKHIDAYKTFPPTEPKKDKKKKADETQALPQRQKKQQTVTLLPAADLDDFSKQLQQSMSSADSTQAGGSGHHHHHH

SEQ ID NO: 3513 - protein, 806 aa, Artificial Sequence
  Description of Artificial Sequence: Synthetic polypeptide
MKIEEGKLVIWINGDKGYNGLAEVGKKFEKDTGIKVTVEHPDKLEEKFPQVAATGDGPDIIFWAHDRFGGYAQSGLLAEITPDKAFQDKLYPFTWDAVRYNGKLIAYPIAVEALSLIYNKDLLPNPPKTWEEIPALDKELKAKGKSALMFNLQEPYFTWPLIAADGGYAFKYENGKYDIKDVGVDNAGAKAGLTFLVDLIKNKHMNADTDYSIAEAAFNKGETAMTINGPWAWSNIDTSKVNYGVTVLPTFKGQPSKPFVGVLSAGINAASPNKELAKEFLENYLLTDEGLEAVNKDKPLGAVALKSYEEELAKDPRIAATMENAQKGEIMPNIPQMSAFWYAVRTAVINAASGRQTVDEALKDAQTGGSGENLYFQSSDNGPQNQRNAPRITFGGPSDSTGSNQNGERSGARSKQRRPQGLPNNTASWFTALTQHGKEDLKFPRGQGVPINTNSSPDDQIGYYRRATRRIRGGDGKMKDLSPRWYFYYLGTGPEAGLPYGANKDGIIWVATEGALNTPKDHIGTRNPANNAAIVLQLPQGTTLPKGFYAEGSRGGSQASSRSSSRSRNSSRNSTPGSSRGTSPARMAGNGGDAALALLLLDRLNQLESKMSGKGQQQQGQTVTKKSAAEASKKPRQKRTATKGYNVTQAFGRRGPEQTQGNFGDQDLNKLGTDYKHWPQIAQFAPSASAFFGMSRISTEETPSGTWLTYTGAIKLDKKDPNFKDQVILLNKHIDAYKTFPPTEPKKDKKKKADETQALPQRQKKQQTVTLLPAADLDDFSKQLQQSMSSADSTQAGGSGHHHHHH

SEQ ID NO: 3514 - protein, 806 aa, Artificial Sequence
  Description of Artificial Sequence: Synthetic polypeptide
MKIEEGKLVIWINGDKGYNGLAEVGKKFEKDTGIKVTVEHPDKLEEKFPQVAATGDGPDIIFWAHDRFGGYAQSGLLAEITPDKAFQDKLYPFTWDAVRYNGKLIAYPIAVEALSLIYNKDLLPNPPKTWEEIPALDKELKAKGKSALMFNLQEPYFTWPLIAADGGYAFKYENGKYDIKDVGVDNAGAKAGLTFLVDLIKNKHMNADTDYSIAEAAFNKGETAMTINGPWAWSNIDTSKVNYGVTVLPTFKGQPSKPFVGVLSAGINAASPNKELAKEFLENYLLTDEGLEAVNKDKPLGAVALKSYEEELAKDPRIAATMENAQKGEIMPNIPQMSAFWYAVRTAVINAASGRQTVDEALKDAQTGGSGENLYFQSSDNGPQNQRNAPRITFGGPSDSTGSNQNGERSGARSKQRRPQGLPNNTASWFTPLTQFGKEDLKFPPGQGVPINTNSSPDDQIGYYRRATRRIRGGDGKMKDLPPKWYFYYLGTGPHADLPYGQKKDGVVWVARPGALNTPKDHIGTRNPANNAAIPLQLPPGTKLPKGFYAEGSRGGSQASSRSSSRSRNSSRNSTPGSSRGTSPARMAGNGGDAALALLLLDRLNQLESKMSGKGQQQQGQTVTKKSAAEASKKPRQKRTATKAYNVTQAFGRRGPEQTQGNFGDQELIRQGTDYKHWPQIAQFAPSASAFFGMSRIGMEVTPSGTWLTYTGAIKLDDKDPNFKDQVILLNKHIDAYKTFPPTEPKKDKKKKADETQALPQRQKKQQTVTLLPAADLDDFSKQLQQSMSSADSTQAGGSGHHHHHH

SEQ ID NO: 3515 - protein, 806 aa, Artificial Sequence
  Description of Artificial Sequence: Synthetic polypeptide
MKIEEGKLVIWINGDKGYNGLAEVGKKFEKDTGIKVTVEHPDKLEEKFPQVAATGDGPDIIFWAHDRFGGYAQSGLLAEITPDKAFQDKLYPFTWDAVRYNGKLIAYPIAVEALSLIYNKDLLPNPPKTWEEIPALDKELKAKGKSALMFNLQEPYFTWPLIAADGGYAFKYENGKYDIKDVGVDNAGAKAGLTFLVDLIKNKHMNADTDYSIAEAAFNKGETAMTINGPWAWSNIDTSKVNYGVTVLPTFKGQPSKPFVGVLSAGINAASPNKELAKEFLENYLLTDEGLEAVNKDKPLGAVALKSYEEELAKDPRIAATMENAQKGEIMPNIPQMSAFWYAVRTAVINAASGRQTVDEALKDAQTGGSGENLYFQSSDNGPQNQRNAPRITFGGPSDSTGSNQNGERSGARSKQRRPQGLPNNTASWFTALTQHGKEDLKFPRGQGVPINTNSSPDDQIGYYRRATRRIRGGDGKMKDLSPRWYFYYIGTGPEAGLPYGANKDGIIWVATEGALNTPKDHIGTRNPANNAAIVLQLPQGTTLPKGFYAEGSRGGSQASSRSSSRSRNSSRNSTPGSSRGTSPARMAGNGGDAALALLLLDRLNQLESKMSGKGQQQQGQTVTKKSAAEASKKPRQKRTATKAYNVTQAFGRRGPEQTQGNFGDQELIRQGTDYKHWPQIAQFAPSASAFFGMSRIGMEVTPSGTWLTYTGAIKLDDKDPNFKDQVILLNKHIDAYKTFPPTEPKKDKKKKADETQALPQRQKKQQTVTLLPAADLDDFSKQLQQSMSSADSTQAGGSGHHHHHH

SEQ ID NO: 3516 - protein, 806 aa, Artificial Sequence
  Description of Artificial Sequence: Synthetic polypeptide
MKIEEGKLVIWINGDKGYNGLAEVGKKFEKDTGIKVTVEHPDKLEEKFPQVAATGDGPDIIFWAHDRFGGYAQSGLLAEITPDKAFQDKLYPFTWDAVRYNGKLIAYPIAVEALSLIYNKDLLPNPPKTWEEIPALDKELKAKGKSALMFNLQEPYFTWPLIAADGGYAFKYENGKYDIKDVGVDNAGAKAGLTFLVDLIKNKHMNADTDYSIAEAAFNKGETAMTINGPWAWSNIDTSKVNYGVTVLPTFKGQPSKPFVGVLSAGINAASPNKELAKEFLENYLLTDEGLEAVNKDKPLGAVALKSYEEELAKDPRIAATMENAQKGEIMPNIPQMSAFWYAVRTAVINAASGRQTVDEALKDAQTGGSGENLYFQSSDNGPQNQRNAPRITFGGPSDSTGSNQNGERSGARSKQRRPQGLPNNTASWFTALTQHGKEDLKFPRGQGVPINTNSSPDDQIGYYRRATRRIRGGDGKMKDLSPRWYFYYLGTGPEAGLPYGANKDGIIWVATEGALNTPKDHIGTRNPANNAAIVLQLPQGTTLPKGFYAEGSRGGSQASSRSSSRSRNSSRNSTPGSSRGTSPARMAGNGGDAALALLLLDRLNQLESKMSGKGQQQQGQTVTKKSAAEASKKPRQKRTATKEYNVTQAFGRRGPEQTQGNFGDQDLIKLGTDYKHWPQIAQFAPSASAFFGMSRISTRETPSGTWLTYTGAIKLDKKDPNFKDQVILLNKHIDAYKTFPPTEPKKDKKKKADETQALPQRQKKQQTVTLLPAADLDDFSKQLQQSMSSADSTQAGGSGHHHHHH

SEQ ID NO: 3517 - protein, 806 aa, Artificial Sequence
  Description of Artificial Sequence: Synthetic polypeptide
MKIEEGKLVIWINGDKGYNGLAEVGKKFEKDTGIKVTVEHPDKLEEKFPQVAATGDGPDIIFWAHDRFGGYAQSGLLAEITPDKAFQDKLYPFTWDAVRYNGKLIAYPIAVEALSLIYNKDLLPNPPKTWEEIPALDKELKAKGKSALMFNLQEPYFTWPLIAADGGYAFKYENGKYDIKDVGVDNAGAKAGLTFLVDLIKNKHMNADTDYSIAEAAFNKGETAMTINGPWAWSNIDTSKVNYGVTVLPTFKGQPSKPFVGVLSAGINAASPNKELAKEFLENYLLTDEGLEAVNKDKPLGAVALKSYEEELAKDPRIAATMENAQKGEIMPNIPQMSAFWYAVRTAVINAASGRQTVDEALKDAQTGGSGENLYFQSSDNGPQNQRNAPRITFGGPSDSTGSNQNGERSGARSKQRRPQGLPNNTASWFTALTQHGKEDLKFPRGQGVPINTNSSPDDQIGYYRRATRRIRGGDGKMKDLSPRWYFYYLGTGPEAGLPYGANKDGIIWVATEGALNTPKDHIGTRNPANNAAVVLQLPQGTTLPKGFYAEGSRGGSQASSRSSSRSRNSSRNSTPGSSRGTSPARMAGNGGDAALALLLLDRLNQLESKMSGKGQQQQGQTVTKKSAAEASKKPRQKRTATKAYNVTQAFGRRGPEQTQGNFGDQELIRQGTDYKHWPQIAQFAPSASAFFGMSRIGMEVTPSGTWLTYTGAIKLDDKDPNFKDQVILLNKHIDAYKTFPPTEPKKDKKKKADETQALPQRQKKQQTVTLLPAADLDDFSKQLQQSMSSADSTQAGGSGHHHHHH

SEQ ID NO: 3518 - protein, 806 aa, Artificial Sequence
  Description of Artificial Sequence: Synthetic polypeptide
MKIEEGKLVIWINGDKGYNGLAEVGKKFEKDTGIKVTVEHPDKLEEKFPQVAATGDGPDIIFWAHDRFGGYAQSGLLAEITPDKAFQDKLYPFTWDAVRYNGKLIAYPIAVEALSLIYNKDLLPNPPKTWEEIPALDKELKAKGKSALMFNLQEPYFTWPLIAADGGYAFKYENGKYDIKDVGVDNAGAKAGLTFLVDLIKNKHMNADTDYSIAEAAFNKGETAMTINGPWAWSNIDTSKVNYGVTVLPTFKGQPSKPFVGVLSAGINAASPNKELAKEFLENYLLTDEGLEAVNKDKPLGAVALKSYEEELAKDPRIAATMENAQKGEIMPNIPQMSAFWYAVRTAVINAASGRQTVDEALKDAQTGGSGENLYFQSSDNGPQNQRNAPRITFGGPSDSTGSNQNGERSGARSKQRRPQGLPNNTASWFTALTQHGKEDLKFPRGQGVPINTNSSPDDQIGYYRRATRRIRGGDGKMKDLSPRWYFYYLGTGPEAGLPYGANKDGIIWVATEGALNTPKDHIGTRNPANNAAIVLQLPQGTTLPKGFYAEGSRGGSQASSRSSSRSRNSSRNSTPGSSRGTSPARMAGNGGDAALALLLLDRLNQLESKMSGKGQQQQGQTVTKKSAAEASKKPRQKRTATKAYNVTQAFGRRGPEQTQGNFGDQELIKQGTDYKHWPQIAQFAPSASAFFGMSRIGMEVTPSGTWLTYTGAIKLDDKDPNFKDQVILLNKHIDAYKTFPPTEPKKDKKKKADETQALPQRQKKQQTVTLLPAADLDDFSKQLQQSMSSADSTQAGGSGHHHHHH

SEQ ID NO: 3519 - protein, 806 aa, Artificial Sequence
  Description of Artificial Sequence: Synthetic polypeptide
MKIEEGKLVIWINGDKGYNGLAEVGKKFEKDTGIKVTVEHPDKLEEKFPQVAATGDGPDIIFWAHDRFGGYAQSGLLAEITPDKAFQDKLYPFTWDAVRYNGKLIAYPIAVEALSLIYNKDLLPNPPKTWEEIPALDKELKAKGKSALMFNLQEPYFTWPLIAADGGYAFKYENGKYDIKDVGVDNAGAKAGLTFLVDLIKNKHMNADTDYSIAEAAFNKGETAMTINGPWAWSNIDTSKVNYGVTVLPTFKGQPSKPFVGVLSAGINAASPNKELAKEFLENYLLTDEGLEAVNKDKPLGAVALKSYEEELAKDPRIAATMENAQKGEIMPNIPQMSAFWYAVRTAVINAASGRQTVDEALKDAQTGGSGENLYFQSSDNGPQNQRNAPRITFGGPSDSTGSNQNGERSGARSKQRRPQGLPNNTASWFTALTQHGKEDLKFPRGQGVPINTNSSPDDQIGYYRRATRRIRGGDGKMKDLSPRWYFYYLGTGPEAGLPYGANKDGIIWVATEGALNTPKDHIGTRNPANNAAIVLQLPQGTTLPKGFYAEGSRGGSQASSRSSSRSRNSSRNSTPGSSRGTSPARMAGNGGDAALALLLLDRLNQLESKMSGKGQQQQGQTVTKKSAAEASKKPRQKRTATKAYNVTQAFGRRGPEQTQGNFGDQELIRQGTDYKHWPQIAQFAPSASAFFGMSRIGMEDTPSGTWLTYTGAIKLDDKDPNFKDQVILLNKHIDAYKTFPPTEPKKDKKKKADETQALPQRQKKQQTVTLLPAADLDDFSKQLQQSMSSADSTQAGGSGHHHHHH

SEQ ID NO: 3520 - protein, 806 aa, Artificial Sequence
  Description of Artificial Sequence: Synthetic polypeptide
MKIEEGKLVIWINGDKGYNGLAEVGKKFEKDTGIKVTVEHPDKLEEKFPQVAATGDGPDIIFWAHDRFGGYAQSGLLAEITPDKAFQDKLYPFTWDAVRYNGKLIAYPIAVEALSLIYNKDLLPNPPKTWEEIPALDKELKAKGKSALMFNLQEPYFTWPLIAADGGYAFKYENGKYDIKDVGVDNAGAKAGLTFLVDLIKNKHMNADTDYSIAEAAFNKGETAMTINGPWAWSNIDTSKVNYGVTVLPTFKGQPSKPFVGVLSAGINAASPNKELAKEFLENYLLTDEGLEAVNKDKPLGAVALKSYEEELAKDPRIAATMENAQKGEIMPNIPQMSAFWYAVRTAVINAASGRQTVDEALKDAQTGGSGENLYFQSSDNGPQNQRNAPRITFGGPSDSTGSNQNGERSGARSKQRRPQGLPNNTASWFTALTQHGKEDLKFPRGQGVPINTNSSPDDQIGYYRRATRRIRGGDGKMKDLSPRWYFYYLGTGPEAGLPYGANKDGIIWVATEGALNTPKDHIGTRNPANNAAIWLQLPQGTTLPKGFYAEGSRGGSQASSRSSSRSRNSSRNSTPGSSRGTSPARMAGNGGDAALALLLLDRLNQLESKMSGKGQQQQGQTVTKKSAAEASKKPRQKRTATKAYNVTQAFGRRGPEQTQGNFGDQELIRQGTDYKHWPQIAQFAPSASAFFGMSRIGMEVTPSGTWLTYTGAIKLDDKDPNFKDQVILLNKHIDAYKTFPPTEPKKDKKKKADETQALPQRQKKQQTVTLLPAADLDDFSKQLQQSMSSADSTQAGGSGHHHHHH

SEQ ID NO: 3521 - protein, 806 aa, Artificial Sequence
  Description of Artificial Sequence: Synthetic polypeptide
MKIEEGKLVIWINGDKGYNGLAEVGKKFEKDTGIKVTVEHPDKLEEKFPQVAATGDGPDIIFWAHDRFGGYAQSGLLAEITPDKAFQDKLYPFTWDAVRYNGKLIAYPIAVEALSLIYNKDLLPNPPKTWEEIPALDKELKAKGKSALMFNLQEPYFTWPLIAADGGYAFKYENGKYDIKDVGVDNAGAKAGLTFLVDLIKNKHMNADTDYSIAEAAFNKGETAMTINGPWAWSNIDTSKVNYGVTVLPTFKGQPSKPFVGVLSAGINAASPNKELAKEFLENYLLTDEGLEAVNKDKPLGAVALKSYEEELAKDPRIAATMENAQKGEIMPNIPQMSAFWYAVRTAVINAASGRQTVDEALKDAQTGGSGENLYFQSSDNGPQNQRNAPRITFGGPSDSTGSNQNGERSGARSKQRRPQGLPNNTASWFTGLTQNGKEDLKFPPGQGVPINTNSSPDDQIGYYRRATRRIRGGDGKMKDLPPKWYFYYLGTGPHADLPYGQKHDGVFWVARPGALNTPKDHIGTRNPANNAAIPLQLPPGTKLPKGFYAEGSRGGSQASSRSSSRSRNSSRNSTPGSSRGTSPARMAGNGGDAALALLLLDRLNQLESKMSGKGQQQQGQTVTKKSAAEASKKPRQKRTATKAYNVTQAFGRRGPEQTQGNFGDQELIRQGTDYKHWPQIAQFAPSASAFFGMSRIGMEVTPSGTWLTYTGAIKLDDKDPNFKDQVILLNKHIDAYKTFPPTEPKKDKKKKADETQALPQRQKKQQTVTLLPAADLDDFSKQLQQSMSSADSTQAGGSGHHHHHH

SEQ ID NO: 3522 - protein, 806 aa, Artificial Sequence
  Description of Artificial Sequence: Synthetic polypeptide
MKIEEGKLVIWINGDKGYNGLAEVGKKFEKDTGIKVTVEHPDKLEEKFPQVAATGDGPDIIFWAHDRFGGYAQSGLLAEITPDKAFQDKLYPFTWDAVRYNGKLIAYPIAVEALSLIYNKDLLPNPPKTWEEIPALDKELKAKGKSALMFNLQEPYFTWPLIAADGGYAFKYENGKYDIKDVGVDNAGAKAGLTFLVDLIKNKHMNADTDYSIAEAAFNKGETAMTINGPWAWSNIDTSKVNYGVTVLPTFKGQPSKPFVGVLSAGINAASPNKELAKEFLENYLLTDEGLEAVNKDKPLGAVALKSYEEELAKDPRIAATMENAQKGEIMPNIPQMSAFWYAVRTAVINAASGRQTVDEALKDAQTGGSGENLYFQSSDNGPQNQRNAPRITFGGPSDSTGSNQNGERSGARSKQRRPQGLPNNTASWFTAITQHGKEDLKFPRGQGVPINTNSSPDDQIGYYRRATRRIRGGDGKMKDLSPRWYFYYLGTGPEAGLPYGANKDGIIWVATEGALNTPKDHIGTRNPANNAAIVLQLPQGTTLPKGFYAEGSRGGSQASSRSSSRSRNSSRNSTPGSSRGTSPARMAGNGGDAALALLLLDRLNQLESKMSGKGQQQQGQTVTKKSAAEASKKPRQKRTATKAYNVTQAFGRRGPEQTQGNFGDQELIRQGTDYKHWPQIAQFAPSASAFFGMSRIGMEVTPSGTWLTYTGAIKLDDKDPNFKDQVILLNKHIDAYKTFPPTEPKKDKKKKADETQALPQRQKKQQTVTLLPAADLDDFSKQLQQSMSSADSTQAGGSGHHHHHH

SEQ ID NO: 3523 - protein, 806 aa, Artificial Sequence
  Description of Artificial Sequence: Synthetic polypeptide
MKIEEGKLVIWINGDKGYNGLAEVGKKFEKDTGIKVTVEHPDKLEEKFPQVAATGDGPDIIFWAHDRFGGYAQSGLLAEITPDKAFQDKLYPFTWDAVRYNGKLIAYPIAVEALSLIYNKDLLPNPPKTWEEIPALDKELKAKGKSALMFNLQEPYFTWPLIAADGGYAFKYENGKYDIKDVGVDNAGAKAGLTFLVDLIKNKHMNADTDYSIAEAAFNKGETAMTINGPWAWSNIDTSKVNYGVTVLPTFKGQPSKPFVGVLSAGINAASPNKELAKEFLENYLLTDEGLEAVNKDKPLGAVALKSYEEELAKDPRIAATMENAQKGEIMPNIPQMSAFWYAVRTAVINAASGRQTVDEALKDAQTGGSGENLYFQSSDNGPQNQRNAPRITFGGPSDSTGSNQNGERSGARSKQRRPQGLPNNTASWFTALTQHGKEDLKFPRGQGVPINTNSSPDDQIGYYRRATRRIRGGDGKMKDLSPRWYFYYLGTGPEAGLPYGANKDGIIWVATEGALNTPKDHIGTRNPANNAAIVLQLPQGTTLPKGFYAEGSRGGSQASSRSSSRSRNSSRNSTPGSSRGTSPARMAGNGGDAALALLLLDRLNQLESKMSGKGQQQQGQTVTKKSAAEASKKPRQKRTATKAYNVTQAFGRRGPEQTQGNFGDQELIRQGTDYKHWPQIAQFAPSASAFFGMSRIGMEVTPSGTWLTYTGAIKLDDDDPNFKDQVILLNKHIDAYKTFPPTEPKKDKKKKADETQALPQRQKKQQTVTLLPAADLDDFSKQLQQSMSSADSTQAGGSGHHHHHH

SEQ ID NO: 3524 - protein, 806 aa, Artificial Sequence
  Description of Artificial Sequence: Synthetic polypeptide
MKIEEGKLVIWINGDKGYNGLAEVGKKFEKDTGIKVTVEHPDKLEEKFPQVAATGDGPDIIFWAHDRFGGYAQSGLLAEITPDKAFQDKLYPFTWDAVRYNGKLIAYPIAVEALSLIYNKDLLPNPPKTWEEIPALDKELKAKGKSALMFNLQEPYFTWPLIAADGGYAFKYENGKYDIKDVGVDNAGAKAGLTFLVDLIKNKHMNADTDYSIAEAAFNKGETAMTINGPWAWSNIDTSKVNYGVTVLPTFKGQPSKPFVGVLSAGINAASPNKELAKEFLENYLLTDEGLEAVNKDKPLGAVALKSYEEELAKDPRIAATMENAQKGEIMPNIPQMSAFWYAVRTAVINAASGRQTVDEALKDAQTGGSGENLYFQSSDNGPQNQRNAPRITFGGPSDSTGSNQNGERSGARSKQRRPQGLPNNTASWFTALTQHGKEDLKFPRGQGVPINTNSSPDDQIGYYRRATRRIRGGDGKMKDLSPRWYFYYLGTGPEAGLPYGANKDGIIWVATEGALNTPKDHIGTRNPANNAAIVLQLPQGTTLPKGFYAEGSRGGSQASSRSSSRSRNSSRNSTPGSSRGTSPARMAGNGGDAALALLLLDRLNQLESKMSGKGQQQQGQTVTKKSAAEASKKPRQKRTATKAYNVTQAFGRRGPEQTQGNFGDQELIEQGTDYKHWPQIAQFAPSASAFFGMSRIGMEVTPSGTWLTYTGAIKLDDKDPNFKDQVILLNKHIDAYKTFPPTEPKKDKKKKADETQALPQRQKKQQTVTLLPAADLDDFSKQLQQSMSSADSTQAGGSGHHHHHH

SEQ ID NO: 3525 - protein, 806 aa, Artificial Sequence
  Description of Artificial Sequence: Synthetic polypeptide
MKIEEGKLVIWINGDKGYNGLAEVGKKFEKDTGIKVTVEHPDKLEEKFPQVAATGDGPDIIFWAHDRFGGYAQSGLLAEITPDKAFQDKLYPFTWDAVRYNGKLIAYPIAVEALSLIYNKDLLPNPPKTWEEIPALDKELKAKGKSALMFNLQEPYFTWPLIAADGGYAFKYENGKYDIKDVGVDNAGAKAGLTFLVDLIKNKHMNADTDYSIAEAAFNKGETAMTINGPWAWSNIDTSKVNYGVTVLPTFKGQPSKPFVGVLSAGINAASPNKELAKEFLENYLLTDEGLEAVNKDKPLGAVALKSYEEELAKDPRIAATMENAQKGEIMPNIPQMSAFWYAVRTAVINAASGRQTVDEALKDAQTGGSGENLYFQSSDNGPQNQRNAPRITFGGPSDSTGSNQNGERSGARSKQRRPQGLPNNTASWFTALTQHGKEDLKFPRGQGVPINTNSSPDDQIGYYRRATRRIRGGDGKMKDLSPRWYFYYLGTGPEAGLPYGANKDGIIWVATEGALNTPKDHIGTRNPANNAAIVLQLPQGTTLPKGFYAEGSRGGSQASSRSSSRSRNSSRNSTPGSSRGTSPARMAGNGGDAALALLLLDRLNQLESKMSGKGQQQQGQTVTKKSAAEASKKPRQKRTATKSYNVTQAFGRRGPEQTQGNFGDQELIRQGTDYKHWPQIAQFAPSASAFFGMSRIGMEVTPSGTWLTYTGAIKLDDKDPNFKDQVILLNKHIDAYKTFPPTEPKKDKKKKADETQALPQRQKKQQTVTLLPAADLDDFSKQLQQSMSSADSTQAGGSGHHHHHH

SEQ ID NO: 3526 - protein, 806 aa, Artificial Sequence
  Description of Artificial Sequence: Synthetic polypeptide
MKIEEGKLVIWINGDKGYNGLAEVGKKFEKDTGIKVTVEHPDKLEEKFPQVAATGDGPDIIFWAHDRFGGYAQSGLLAEITPDKAFQDKLYPFTWDAVRYNGKLIAYPIAVEALSLIYNKDLLPNPPKTWEEIPALDKELKAKGKSALMFNLQEPYFTWPLIAADGGYAFKYENGKYDIKDVGVDNAGAKAGLTFLVDLIKNKHMNADTDYSIAEAAFNKGETAMTINGPWAWSNIDTSKVNYGVTVLPTFKGQPSKPFVGVLSAGINAASPNKELAKEFLENYLLTDEGLEAVNKDKPLGAVALKSYEEELAKDPRIAATMENAQKGEIMPNIPQMSAFWYAVRTAVINAASGRQTVDEALKDAQTGGSGENLYFQSSDNGPQNQRNAPRITFGGPSDSTGSNQNGERSGARSKQRRPQGLPNNTASWFTALTQHGKEDLKFPRGQGVPINTNSSPDDQIGYYRRATRRIRGGDGKMKDLSPRWYFYYLGTGPEAGLPYGANKDGIIWVATEGALNTPKDHIGTRNPANNAAIVLQLPQGTTLPKGFYAEGSRGGSQASSRSSSRSRNSSRNSTPGSSRGTSPARMAGNGGDAALALLLLDRLNQLESKMSGKGQQQQGQTVTKKSAAEASKKPRQKRTATKFYNVTQAFGRRGPEQTQGNFGDQELIRQGTDYKHWPQIAQFAPSASAFFGMSRIGMEVTPSGTWLTYTGAIKLDDKDPNFKDQVILLNKHIDAYKTFPPTEPKKDKKKKADETQALPQRQKKQQTVTLLPAADLDDFSKQLQQSMSSADSTQAGGSGHHHHHH

SEQ ID NO: 3527 - protein, 806 aa, Artificial Sequence
  Description of Artificial Sequence: Synthetic polypeptide
MKIEEGKLVIWINGDKGYNGLAEVGKKFEKDTGIKVTVEHPDKLEEKFPQVAATGDGPDIIFWAHDRFGGYAQSGLLAEITPDKAFQDKLYPFTWDAVRYNGKLIAYPIAVEALSLIYNKDLLPNPPKTWEEIPALDKELKAKGKSALMFNLQEPYFTWPLIAADGGYAFKYENGKYDIKDVGVDNAGAKAGLTFLVDLIKNKHMNADTDYSIAEAAFNKGETAMTINGPWAWSNIDTSKVNYGVTVLPTFKGQPSKPFVGVLSAGINAASPNKELAKEFLENYLLTDEGLEAVNKDKPLGAVALKSYEEELAKDPRIAATMENAQKGEIMPNIPQMSAFWYAVRTAVINAASGRQTVDEALKDAQTGGSGENLYFQSSDNGPQNQRNAPRITFGGPSDSTGSNQNGERSGARSKQRRPQGLPNNTASWFTPLVQFGKEDLKFPPGQGVPINTNSSPDDQIGYYRRATRRIRGGDGKMKDLPPKWYFYYLGTGPHADLPYGQKKDGVFWVARPGALNTPKDHIGTRNPANNAAIPLQLPPGTKLPKGFYAEGSRGGSQASSRSSSRSRNSSRNSTPGSSRGTSPARMAGNGGDAALALLLLDRLNQLESKMSGKGQQQQGQTVTKKSAAEASKKPRQKRTATKAYNVTQAFGRRGPEQTQGNFGDQELIRQGTDYKHWPQIAQFAPSASAFFGMSRIGMEVTPSGTWLTYTGAIKLDDKDPNFKDQVILLNKHIDAYKTFPPTEPKKDKKKKADETQALPQRQKKQQTVTLLPAADLDDFSKQLQQSMSSADSTQAGGSGHHHHHH

SEQ ID NO: 3528 - protein, 806 aa, Artificial Sequence
  Description of Artificial Sequence: Synthetic polypeptide
MKIEEGKLVIWINGDKGYNGLAEVGKKFEKDTGIKVTVEHPDKLEEKFPQVAATGDGPDIIFWAHDRFGGYAQSGLLAEITPDKAFQDKLYPFTWDAVRYNGKLIAYPIAVEALSLIYNKDLLPNPPKTWEEIPALDKELKAKGKSALMFNLQEPYFTWPLIAADGGYAFKYENGKYDIKDVGVDNAGAKAGLTFLVDLIKNKHMNADTDYSIAEAAFNKGETAMTINGPWAWSNIDTSKVNYGVTVLPTFKGQPSKPFVGVLSAGINAASPNKELAKEFLENYLLTDEGLEAVNKDKPLGAVALKSYEEELAKDPRIAATMENAQKGEIMPNIPQMSAFWYAVRTAVINAASGRQTVDEALKDAQTGGSGENLYFQSSDNGPQNQRNAPRITFGGPSDSTGSNQNGERSGARSKQRRPQGLPNNTASWFTALTQHGKEDLKFPRGQGVPINTNSSPDDQIGYYRRHTRRIRGGDGKMKDLSPRWYFYYLGTGPEAGLPYGANKDGIIWVATEGALNTPKDHIGTRNPANNAAIVLQLPQGTTLPKGFYAEGSRGGSQASSRSSSRSRNSSRNSTPGSSRGTSPARMAGNGGDAALALLLLDRLNQLESKMSGKGQQQQGQTVTKKSAAEASKKPRQKRTATKAYNVTQAFGRRGPEQTQGNFGDQELIRQGTDYKHWPQIAQFAPSASAFFGMSRIGMEVTPSGTWLTYTGAIKLDDKDPNFKDQVILLNKHIDAYKTFPPTEPKKDKKKKADETQALPQRQKKQQTVTLLPAADLDDFSKQLQQSMSSADSTQAGGSGHHHHHH

SEQ ID NO: 3529 - protein, 806 aa, Artificial Sequence
  Description of Artificial Sequence: Synthetic polypeptide
MKIEEGKLVIWINGDKGYNGLAEVGKKFEKDTGIKVTVEHPDKLEEKFPQVAATGDGPDIIFWAHDRFGGYAQSGLLAEITPDKAFQDKLYPFTWDAVRYNGKLIAYPIAVEALSLIYNKDLLPNPPKTWEEIPALDKELKAKGKSALMFNLQEPYFTWPLIAADGGYAFKYENGKYDIKDVGVDNAGAKAGLTFLVDLIKNKHMNADTDYSIAEAAFNKGETAMTINGPWAWSNIDTSKVNYGVTVLPTFKGQPSKPFVGVLSAGINAASPNKELAKEFLENYLLTDEGLEAVNKDKPLGAVALKSYEEELAKDPRIAATMENAQKGEIMPNIPQMSAFWYAVRTAVINAASGRQTVDEALKDAQTGGSGENLYFQSSDNGPQNQRNAPRITFGGPSDSTGSNQNGERSGARSKQRRPQGLPNNTASWFTALTQHGKEDLKFPRGQGVPINTNSSPDDQIGYYRRATRRIRGGDGKKKDLSPRWYFYYLGTGPEAGLPYGANKDGIIWVATEGALNTPKDHIGTRNPANNAAIVLQLPQGTTLPKGFYAEGSRGGSQASSRSSSRSRNSSRNSTPGSSRGTSPARMAGNGGDAALALLLLDRLNQLESKMSGKGQQQQGQTVTKKSAAEASKKPRQKRTATKAYNVTQAFGRRGPEQTQGNFGDQELIRQGTDYKHWPQIAQFAPSASAFFGMSRIGMEVTPSGTWLTYTGAIKLDDKDPNFKDQVILLNKHIDAYKTFPPTEPKKDKKKKADETQALPQRQKKQQTVTLLPAADLDDFSKQLQQSMSSADSTQAGGSGHHHHHH

SEQ ID NO: 3530 - protein, 806 aa, Artificial Sequence
  Description of Artificial Sequence: Synthetic polypeptide
MKIEEGKLVIWINGDKGYNGLAEVGKKFEKDTGIKVTVEHPDKLEEKFPQVAATGDGPDIIFWAHDRFGGYAQSGLLAEITPDKAFQDKLYPFTWDAVRYNGKLIAYPIAVEALSLIYNKDLLPNPPKTWEEIPALDKELKAKGKSALMFNLQEPYFTWPLIAADGGYAFKYENGKYDIKDVGVDNAGAKAGLTFLVDLIKNKHMNADTDYSIAEAAFNKGETAMTINGPWAWSNIDTSKVNYGVTVLPTFKGQPSKPFVGVLSAGINAASPNKELAKEFLENYLLTDEGLEAVNKDKPLGAVALKSYEEELAKDPRIAATMENAQKGEIMPNIPQMSAFWYAVRTAVINAASGRQTVDEALKDAQTGGSGENLYFQSSDNGPQNQRNAPRITFGGPSDSTGSNQNGERSGARSKQRRPQGLPNNTASWFTALTQHGKEDLKFPKGQGVPINTNSSPDDQIGYYRRATRRIRGGDGKMKDLSPRWYFYYLGTGPEAGLPYGANKDGIIWVATEGALNTPKDHIGTRNPANNAAIVLQLPQGTTLPKGFYAEGSRGGSQASSRSSSRSRNSSRNSTPGSSRGTSPARMAGNGGDAALALLLLDRLNQLESKMSGKGQQQQGQTVTKKSAAEASKKPRQKRTATKAYNVTQAFGRRGPEQTQGNFGDQELIRQGTDYKHWPQIAQFAPSASAFFGMSRIGMEVTPSGTWLTYTGAIKLDDKDPNFKDQVILLNKHIDAYKTFPPTEPKKDKKKKADETQALPQRQKKQQTVTLLPAADLDDFSKQLQQSMSSADSTQAGGSGHHHHHH

SEQ ID NO: 3531 - protein, 806 aa, Artificial Sequence
  Description of Artificial Sequence: Synthetic polypeptide
MKIEEGKLVIWINGDKGYNGLAEVGKKFEKDTGIKVTVEHPDKLEEKFPQVAATGDGPDIIFWAHDRFGGYAQSGLLAEITPDKAFQDKLYPFTWDAVRYNGKLIAYPIAVEALSLIYNKDLLPNPPKTWEEIPALDKELKAKGKSALMFNLQEPYFTWPLIAADGGYAFKYENGKYDIKDVGVDNAGAKAGLTFLVDLIKNKHMNADTDYSIAEAAFNKGETAMTINGPWAWSNIDTSKVNYGVTVLPTFKGQPSKPFVGVLSAGINAASPNKELAKEFLENYLLTDEGLEAVNKDKPLGAVALKSYEEELAKDPRIAATMENAQKGEIMPNIPQMSAFWYAVRTAVINAASGRQTVDEALKDAQTGGSGENLYFQSSDNGPQNQRNAPRITFGGPSDSTGSNQNGERSGARSKQRRPQGLPNNTASWFTALTQHGKEDLKFPRGQGVPINTNSSPDDQIGYYRRATRRIRGGDGKMKDLSPRWYFYYLGTGPEAGLPYGANKDGIIWVATEGALNTPKDHIGTRNPANNAAIVLQLPQGTTLPKGFYAEGSRGGSQASSRSSERSRNSSRNSTPGESRGTEPARMAGNGGDAALALLLLDRLNQLESKMSGKGQQQQGQTVTKKSAAEASKKPRQKRTATKAYNVTQAFGRRGPEQTQGNFGDQELIRQGTDYKHWPQIAQFAPSASAFFGMSRIGMEVTPSGTWLTYTGAIKLDDKDPNFKDQVILLNKHIDAYKTFPPTEPKKDKKKKADETQALPQRQKKQQTVTLLPAADLDDFSKQLQQSMSSADSTQAGGSGHHHHHH

SEQ ID NO: 3532 - protein, 806 aa, Artificial Sequence
  Description of Artificial Sequence: Synthetic polypeptide
MKIEEGKLVIWINGDKGYNGLAEVGKKFEKDTGIKVTVEHPDKLEEKFPQVAATGDGPDIIFWAHDRFGGYAQSGLLAEITPDKAFQDKLYPFTWDAVRYNGKLIAYPIAVEALSLIYNKDLLPNPPKTWEEIPALDKELKAKGKSALMFNLQEPYFTWPLIAADGGYAFKYENGKYDIKDVGVDNAGAKAGLTFLVDLIKNKHMNADTDYSIAEAAFNKGETAMTINGPWAWSNIDTSKVNYGVTVLPTFKGQPSKPFVGVLSAGINAASPNKELAKEFLENYLLTDEGLEAVNKDKPLGAVALKSYEEELAKDPRIAATMENAQKGEIMPNIPQMSAFWYAVRTAVINAASGRQTVDEALKDAQTGGSGENLYFQSSDNGPQNQRNAPRITFGGPSDSTGSNQNGERSGARSKQRRPQGLPNNTASWFTALTQHGKEDLKFPRGQGVPINTNSSPDDQIGYYRRATRRIRGGDGKMKDLSPRWYFYYLGTGPEAGLPYGANKDGIIWVATEGALNTPKDHIGTRNPDNNAAIVLQLPQGTTLPKGFYAEGSRGGSQASSRSSSRSRNSSRNSTPGSSRGTSPARMAGNGGDAALALLLLDRLNQLESKMSGKGQQQQGQTVTKKSAAEASKKPRQKRTATKAYNVTQAFGRRGPEQTQGNFGDQELIRQGTDYKHWPQIAQFAPSASAFFGMSRIGMEVTPSGTWLTYTGAIKLDDKDPNFKDQVILLNKHIDAYKTFPPTEPKKDKKKKADETQALPQRQKKQQTVTLLPAADLDDFSKQLQQSMSSADSTQAGGSGHHHHHH

SEQ ID NO: 3533 - protein, 806 aa, Artificial Sequence
  Description of Artificial Sequence: Synthetic polypeptide
MKIEEGKLVIWINGDKGYNGLAEVGKKFEKDTGIKVTVEHPDKLEEKFPQVAATGDGPDIIFWAHDRFGGYAQSGLLAEITPDKAFQDKLYPFTWDAVRYNGKLIAYPIAVEALSLIYNKDLLPNPPKTWEEIPALDKELKAKGKSALMFNLQEPYFTWPLIAADGGYAFKYENGKYDIKDVGVDNAGAKAGLTFLVDLIKNKHMNADTDYSIAEAAFNKGETAMTINGPWAWSNIDTSKVNYGVTVLPTFKGQPSKPFVGVLSAGINAASPNKELAKEFLENYLLTDEGLEAVNKDKPLGAVALKSYEEELAKDPRIAATMENAQKGEIMPNIPQMSAFWYAVRTAVINAASGRQTVDEALKDAQTGGSGENLYFQSSDNGPQNQRNAPRITFGGPSDSTGSNQNGERSGARSKQRRPQGLPNNTASWFTALTQHGKEDLKFPRGQGVPINTNSSPDDQIGYYRRATRRIRGGDGKMKDLSPRWYFYYLGTGPEAGLPYGANKDGIIWVATEGALNTPKDHIGTRNPANNAAIVLQLPQGTTLPKGFYAEGSRGGSQASSRSSSRSRNSSRNSTPGSSRGTSPARMAGNGGDAALALLLLDRLNQLESKMSGKGQQQQGQTVTKKSAAEAAKKPRQKRTATKAYNVTQAFGRRGPEQTQGNFGDQELIRQGTDYKHWPQIAQFAPSASAFFGMSRIGMEVTPSGTWLTYTGAIKLDDKDPNFKDQVILLNKHIDAYKTFPPTEPKKDKKKKADETQALPQRQKKQQTVTLLPAADLDDFSKQLQQSMSSADSTQAGGSGHHHHHH

SEQ ID NO: 3534 - protein, 806 aa, Artificial Sequence
  Description of Artificial Sequence: Synthetic polypeptide
MKIEEGKLVIWINGDKGYNGLAEVGKKFEKDTGIKVTVEHPDKLEEKFPQVAATGDGPDIIFWAHDRFGGYAQSGLLAEITPDKAFQDKLYPFTWDAVRYNGKLIAYPIAVEALSLIYNKDLLPNPPKTWEEIPALDKELKAKGKSALMFNLQEPYFTWPLIAADGGYAFKYENGKYDIKDVGVDNAGAKAGLTFLVDLIKNKHMNADTDYSIAEAAFNKGETAMTINGPWAWSNIDTSKVNYGVTVLPTFKGQPSKPFVGVLSAGINAASPNKELAKEFLENYLLTDEGLEAVNKDKPLGAVALKSYEEELAKDPRIAATMENAQKGEIMPNIPQMSAFWYAVRTAVINAASGRQTVDEALKDAQTGGSGENLYFQSSDNGPQNQRNAPRITFGGPSDSTGSNQNGERSGARSKQRRPQGLPNNTASWFTALTQHGKEDLKFPRGQGVPINTNSSPDDQIGYYRRATRRIRGGDGKMKDLSPSWYFYYLGTGPEAGLPYGANKDGIIWVATEGALNTPKDHIGTRNPANNAAIVLQLPQGTTLPKGFYAEGSRGGSQASSRSSSRSRNSSRNSTPGSSRGTSPARMAGNGGDAALALLLLDRLNQLESKMSGKGQQQQGQTVTKKSAAEASKKPRQKRTATKAYNVTQAFGRRGPEQTQGNFGDQELIRQGTDYKHWPQIAQFAPSASAFFGMSRIGMEVTPSGTWLTYTGAIKLDDKDPNFKDQVILLNKHIDAYKTFPPTEPKKDKKKKADETQALPQRQKKQQTVTLLPAADLDDFSKQLQQSMSSADSTQAGGSGHHHHHH

SEQ ID NO: 3535 - protein, 806 aa, Artificial Sequence
  Description of Artificial Sequence: Synthetic polypeptide
MKIEEGKLVIWINGDKGYNGLAEVGKKFEKDTGIKVTVEHPDKLEEKFPQVAATGDGPDIIFWAHDRFGGYAQSGLLAEITPDKAFQDKLYPFTWDAVRYNGKLIAYPIAVEALSLIYNKDLLPNPPKTWEEIPALDKELKAKGKSALMFNLQEPYFTWPLIAADGGYAFKYENGKYDIKDVGVDNAGAKAGLTFLVDLIKNKHMNADTDYSIAEAAFNKGETAMTINGPWAWSNIDTSKVNYGVTVLPTFKGQPSKPFVGVLSAGINAASPNKELAKEFLENYLLTDEGLEAVNKDKPLGAVALKSYEEELAKDPRIAATMENAQKGEIMPNIPQMSAFWYAVRTAVINAASGRQTVDEALKDAQTGGSGENLYFQSSDNGPQNQRNAPRITFGGPSDSTGSNQNGERSGARSKQRRPQGLPNNTASWFTALTQHGKEDLKFPRGQGVPINTNSSPDDQIGYYRRATRRIRGGDGKMKDLSPRWYFYYLGTGPEAGLPYGANKDGIIWVATEGALNTPKDHIGTRNPANNAAIVLQLPQGTTLPPGFYAEGSRGGSQASSRSSSRSRNSSRNSTPGSSRGTSPARMAGNGGDAALALLLLDRLNQLESKMSGKGQQQQGQTVTKKSAAEASKKPRQKRTATKAYNVTQAFGRRGPEQTQGNFGDQELIRQGTDYKHWPQIAQFAPSASAFFGMSRIGMEVTPSGTWLTYTGAIKLDDKDPNFKDQVILLNKHIDAYKTFPPTEPKKDKKKKADETQALPQRQKKQQTVTLLPAADLDDFSKQLQQSMSSADSTQAGGSGHHHHHH

SEQ ID NO: 3536 - protein, 806 aa, Artificial Sequence
  Description of Artificial Sequence: Synthetic polypeptide
MKIEEGKLVIWINGDKGYNGLAEVGKKFEKDTGIKVTVEHPDKLEEKFPQVAATGDGPDIIFWAHDRFGGYAQSGLLAEITPDKAFQDKLYPFTWDAVRYNGKLIAYPIAVEALSLIYNKDLLPNPPKTWEEIPALDKELKAKGKSALMFNLQEPYFTWPLIAADGGYAFKYENGKYDIKDVGVDNAGAKAGLTFLVDLIKNKHMNADTDYSIAEAAFNKGETAMTINGPWAWSNIDTSKVNYGVTVLPTFKGQPSKPFVGVLSAGINAASPNKELAKEFLENYLLTDEGLEAVNKDKPLGAVALKSYEEELAKDPRIAATMENAQKGEIMPNIPQMSAFWYAVRTAVINAASGRQTVDEALKDAQTGGSGENLYFQSSDNGPQNQRNAPRITFGGPSDSTGSNQNGERSGARSKQRRPQGLPNNTASWFTALTQHGKEDLKFPRGQGVPINTNSSPDDQIGYYRRATRRIRGGDGKMKDLSPRWYFYYLGTGPEAGLPYGANKDGIIWVATEGALNTPKDHIGTRNPANNAAIVLQLPQGTTLPKGFYAEGSRGGSQASSRSSSRSRNSSRNSTPGSSRGTSPARMAGNGGDAALALLLLDRLNQLESKMSGKGQQQQGQTVTKKSAAEMSKKPRQKRTATKGCNVTQCFGPRGPEQTQGNFGDAELNKKGVDYKHWPQIAQFAPSASAFFGMSRISSKETPSGTWLTYTGAIKLDKDDPNFKDQVILLNKHIDAYKTFPPTEPKKDKKKKADETQALPQRQKKQQTVTLLPAADLDDFSKQLQQSMSSADSTQAGGSGHHHHHH

SEQ ID NO: 3537 - protein, 806 aa, Artificial Sequence
  Description of Artificial Sequence: Synthetic polypeptide
MKIEEGKLVIWINGDKGYNGLAEVGKKFEKDTGIKVTVEHPDKLEEKFPQVAATGDGPDIIFWAHDRFGGYAQSGLLAEITPDKAFQDKLYPFTWDAVRYNGKLIAYPIAVEALSLIYNKDLLPNPPKTWEEIPALDKELKAKGKSALMFNLQEPYFTWPLIAADGGYAFKYENGKYDIKDVGVDNAGAKAGLTFLVDLIKNKHMNADTDYSIAEAAFNKGETAMTINGPWAWSNIDTSKVNYGVTVLPTFKGQPSKPFVGVLSAGINAASPNKELAKEFLENYLLTDEGLEAVNKDKPLGAVALKSYEEELAKDPRIAATMENAQKGEIMPNIPQMSAFWYAVRTAVINAASGRQTVDEALKDAQTGGSGENLYFQSSDNGPQNQRNAPRITFGGPSDSTGSNQNGERSGARSKQRRPQGLPNNTASWFTALTQHGKQDLKFPRGQGVPINTNSSPDDQIGYYRRATRRIRGGDGKMKDLSPRWYFYYLGTGPEAGLPYGANKDGIIWVATEGALNTPKDHIGTRNPANNAAIVLQLPQGTTLPKGFYAEGSRGGSQASSRSSSRSRNSSRNSTPGSSRGTSPARMAGNGGDAALALLLLDRLNQLESKMSGKGQQQQGQTVTKKSAAEASKKPRQKRTATKAYNVTQAFGRRGPEQTQGNFGDQELIRQGTDYKHWPQIAQFAPSASAFFGMSRIGMEVTPSGTWLTYTGAIKLDDKDPNFKDQVILLNKHIDAYKTFPPTEPKKDKKKKADETQALPQRQKKQQTVTLLPAADLDDFSKQLQQSMSSADSTQAGGSGHHHHHH

SEQ ID NO: 3538 - protein, 806 aa, Artificial Sequence
  Description of Artificial Sequence: Synthetic polypeptide
MKIEEGKLVIWINGDKGYNGLAEVGKKFEKDTGIKVTVEHPDKLEEKFPQVAATGDGPDIIFWAHDRFGGYAQSGLLAEITPDKAFQDKLYPFTWDAVRYNGKLIAYPIAVEALSLIYNKDLLPNPPKTWEEIPALDKELKAKGKSALMFNLQEPYFTWPLIAADGGYAFKYENGKYDIKDVGVDNAGAKAGLTFLVDLIKNKHMNADTDYSIAEAAFNKGETAMTINGPWAWSNIDTSKVNYGVTVLPTFKGQPSKPFVGVLSAGINAASPNKELAKEFLENYLLTDEGLEAVNKDKPLGAVALKSYEEELAKDPRIAATMENAQKGEIMPNIPQMSAFWYAVRTAVINAASGRQTVDEALKDAQTGGSGENLYFQSSDNGPQNQRNAPRITFGGPSDSTGSNQNGERSGARSKQRRPQGLPNNTASWFTPLTQNGKEDLKFPPGQGVPINTNSSPDDQIGYYRRATRRIRGGDGKMKDLPPKWYFYYLGTGPHADLPYGQKQDGVVWVARPGALNTPKDHIGTRNPANNAAIPLQLPPGTKLPKGFYAEGSRGGSQASSRSSSRSRNSSRNSTPGSSRGTSPARMAGNGGDAALALLLLDRLNQLESKMSGKGQQQQGQTVTKKSAAEASKKPRQKRTATKAYNVTQAFGRRGPEQTQGNFGDQELIRQGTDYKHWPQIAQFAPSASAFFGMSRIGMEVTPSGTWLTYTGAIKLDDKDPNFKDQVILLNKHIDAYKTFPPTEPKKDKKKKADETQALPQRQKKQQTVTLLPAADLDDFSKQLQQSMSSADSTQAGGSGHHHHHH

SEQ ID NO: 3539 - protein, 806 aa, Artificial Sequence
  Description of Artificial Sequence: Synthetic polypeptide
MKIEEGKLVIWINGDKGYNGLAEVGKKFEKDTGIKVTVEHPDKLEEKFPQVAATGDGPDIIFWAHDRFGGYAQSGLLAEITPDKAFQDKLYPFTWDAVRYNGKLIAYPIAVEALSLIYNKDLLPNPPKTWEEIPALDKELKAKGKSALMFNLQEPYFTWPLIAADGGYAFKYENGKYDIKDVGVDNAGAKAGLTFLVDLIKNKHMNADTDYSIAEAAFNKGETAMTINGPWAWSNIDTSKVNYGVTVLPTFKGQPSKPFVGVLSAGINAASPNKELAKEFLENYLLTDEGLEAVNKDKPLGAVALKSYEEELAKDPRIAATMENAQKGEIMPNIPQMSAFWYAVRTAVINAASGRQTVDEALKDAQTGGSGENLYFQSSDNGPQNQRNAPRITFGGPSDSTGSNQNGERSGARSKQRRPQGLPNNTASWFTALTQHGKEDLKFPRGQGVPINTNSSPDDQIGYYRRATRRIRGGDGKMKDLSPRWYFYYLGTGPEAGLPYGANKAGIIWVATEGALNTPKDHIGTRNPANNAAIVLQLPQGTTLPKGFYAEGSRGGSQASSRSSSRSRNSSRNSTPGSSRGTSPARMAGNGGDAALALLLLDRLNQLESKMSGKGQQQQGQTVTKKSAAEASKKPRQKRTATKAYNVTQAFGRRGPEQTQGNFGDQELIRQGTDYKHWPQIAQFAPSASAFFGMSRIGMEVTPSGTWLTYTGAIKLDDKDPNFKDQVILLNKHIDAYKTFPPTEPKKDKKKKADETQALPQRQKKQQTVTLLPAADLDDFSKQLQQSMSSADSTQAGGSGHHHHHH

SEQ ID NO: 3540 - protein, 806 aa, Artificial Sequence
  Description of Artificial Sequence: Synthetic polypeptide
MKIEEGKLVIWINGDKGYNGLAEVGKKFEKDTGIKVTVEHPDKLEEKFPQVAATGDGPDIIFWAHDRFGGYAQSGLLAEITPDKAFQDKLYPFTWDAVRYNGKLIAYPIAVEALSLIYNKDLLPNPPKTWEEIPALDKELKAKGKSALMFNLQEPYFTWPLIAADGGYAFKYENGKYDIKDVGVDNAGAKAGLTFLVDLIKNKHMNADTDYSIAEAAFNKGETAMTINGPWAWSNIDTSKVNYGVTVLPTFKGQPSKPFVGVLSAGINAASPNKELAKEFLENYLLTDEGLEAVNKDKPLGAVALKSYEEELAKDPRIAATMENAQKGEIMPNIPQMSAFWYAVRTAVINAASGRQTVDEALKDAQTGGSGENLYFQSSDNGPQNQRNAPRITFGGPSDSTGSNQNGERSGARSKQRRPQGLPNNTASWFTALTQHGKEDLKFPPGQGVPINPNSKPDDQIGYYRRQVRRYRGGDGQMKDLPPRWYFYYLGTGPEAGLPYGANKDGIIWVATEGALNTPKDHIGTRNPANNAAIVLQLPQGTTLPKGFYAEGSRGGSQASSRSSSRSRNSSRNSTPGSSRGTSPARMAGNGGDAALALLLLDRLNQLESKMSGKGQQQQGQTVTKKSAAEASKKPRQKRTATKAYNVTQAFGRRGPEQTQGNFGDQELIRQGTDYKHWPQIAQFAPSASAFFGMSRIGMEVTPSGTWLTYTGAIKLDDKDPNFKDQVILLNKHIDAYKTFPPTEPKKDKKKKADETQALPQRQKKQQTVTLLPAADLDDFSKQLQQSMSSADSTQAGGSGHHHHHH

SEQ ID NO: 3541 - protein, 806 aa, Artificial Sequence
  Description of Artificial Sequence: Synthetic polypeptide
MKIEEGKLVIWINGDKGYNGLAEVGKKFEKDTGIKVTVEHPDKLEEKFPQVAATGDGPDIIFWAHDRFGGYAQSGLLAEITPDKAFQDKLYPFTWDAVRYNGKLIAYPIAVEALSLIYNKDLLPNPPKTWEEIPALDKELKAKGKSALMFNLQEPYFTWPLIAADGGYAFKYENGKYDIKDVGVDNAGAKAGLTFLVDLIKNKHMNADTDYSIAEAAFNKGETAMTINGPWAWSNIDTSKVNYGVTVLPTFKGQPSKPFVGVLSAGINAASPNKELAKEFLENYLLTDEGLEAVNKDKPLGAVALKSYEEELAKDPRIAATMENAQKGEIMPNIPQMSAFWYAVRTAVINAASGRQTVDEALKDAQTGGSGENLYFQSSDNGPQNQRNAPRITFGGPSDSTGSNQNGERSGARSKQRRPQGLPNNTASWFTALTQHGKEDLKFPRGQGVPINTNSSPDDQIGYYRRATRRIRGGDGKMKDLSPRWYFYYLGTGPEAGLPYGANKDGIIWVATEGALNTPKDHIGTRNPANNAAIVLQLPQGTTLPKGFYAEGSRGGSQASSRSSSRSRNSSRNSTPGSSRGTSPARMAGNGGDAALALLLLDRLNQLESKMSGKGQQQQGQTVTKKSAAEMSKKPRWKRTATKGYNVTQAFGKRGPKDTQGNFGDAELIKQGTDYKHWPQIAQFVPSAAAFFFMSRISMKETPDGVWLTYTGTIKLDKDDPNFDDQVKLLNKHIDAYKTFPPTEPKKDKKKKADETQALPQRQKKQQTVTLLPAADLDDFSKQLQQSMSSADSTQAGGSGHHHHHH

SEQ ID NO: 3542 - protein, 806 aa, Artificial Sequence
  Description of Artificial Sequence: Synthetic polypeptide
MKIEEGKLVIWINGDKGYNGLAEVGKKFEKDTGIKVTVEHPDKLEEKFPQVAATGDGPDIIFWAHDRFGGYAQSGLLAEITPDKAFQDKLYPFTWDAVRYNGKLIAYPIAVEALSLIYNKDLLPNPPKTWEEIPALDKELKAKGKSALMFNLQEPYFTWPLIAADGGYAFKYENGKYDIKDVGVDNAGAKAGLTFLVDLIKNKHMNADTDYSIAEAAFNKGETAMTINGPWAWSNIDTSKVNYGVTVLPTFKGQPSKPFVGVLSAGINAASPNKELAKEFLENYLLTDEGLEAVNKDKPLGAVALKSYEEELAKDPRIAATMENAQKGEIMPNIPQMSAFWYAVRTAVINAASGRQTVDEALKDAQTGGSGENLYFQSSDNGPQNQRNAPRITFGGPSDSTGSNQNGERSGARSKQRRPQGLPNNTASWFTALTQHGKEDLKFPRGQGVPINTNSSPDDQIGYYRRATRRIRGGDGKMKDLSPRWYFYYLGTGPEAGLPYGANKDGIIWVATEGALNTPKDHIGTRNPANNAAIVLQLPQGTTLPKGFYAEGSRGGSQASSRSSSRSRNSSRNSTPGSSRGTSPARMAGNGGDAALALLLLDRLNQLESKMSGKGQQQQGQTVTKKSAAEASKKPRQKRTATKAYNVTQAFGRRGPEQTQGNFGDQELIRQGTDYKHWPQIAQFAPSVSAFFGMSRIGMEVTPSGTWLTYTGAIKLDDKDPNFKDQVILLNKHIDAYKTFPPTEPKKDKKKKADETQALPQRQKKQQTVTLLPAADLDDFSKQLQQSMSSADSTQAGGSGHHHHHH

SEQ ID NO: 3543 - protein, 806 aa, Artificial Sequence
  Description of Artificial Sequence: Synthetic polypeptide
MKIEEGKLVIWINGDKGYNGLAEVGKKFEKDTGIKVTVEHPDKLEEKFPQVAATGDGPDIIFWAHDRFGGYAQSGLLAEITPDKAFQDKLYPFTWDAVRYNGKLIAYPIAVEALSLIYNKDLLPNPPKTWEEIPALDKELKAKGKSALMFNLQEPYFTWPLIAADGGYAFKYENGKYDIKDVGVDNAGAKAGLTFLVDLIKNKHMNADTDYSIAEAAFNKGETAMTINGPWAWSNIDTSKVNYGVTVLPTFKGQPSKPFVGVLSAGINAASPNKELAKEFLENYLLTDEGLEAVNKDKPLGAVALKSYEEELAKDPRIAATMENAQKGEIMPNIPQMSAFWYAVRTAVINAASGRQTVDEALKDAQTGGSGENLYFQSSDNGPQNQRNAPRITFGGPSDSTGSNQNGERSGARSKQRRPQGLPNNTASWFTALTQHGKEDLKFPRGQGVPINTNSSPDDQIGYYRRATRRIRGGDGKMKDLSPRWYFYYLGTGPEAGLPYGANKDGIIWVATEGALNTPKDHIGTRNPANNAAIVLQLPQGTTPPKGFYAEGSRGGSQASSRSSSRSRNSSRNSTPGSSRGTSPARMAGNGGDAALALLLLDRLNQLESKMSGKGQQQQGQTVTKKSAAEASKKPRQKRTATKAYNVTQAFGRRGPEQTQGNFGDQELIRQGTDYKHWPQIAQFAPSASAFFGMSRIGMEVTPSGTWLTYTGAIKLDDKDPNFKDQVILLNKHIDAYKTFPPTEPKKDKKKKADETQALPQRQKKQQTVTLLPAADLDDFSKQLQQSMSSADSTQAGGSGHHHHHH

SEQ ID NO: 3544 - protein, 806 aa, Artificial Sequence
  Description of Artificial Sequence: Synthetic polypeptide
MKIEEGKLVIWINGDKGYNGLAEVGKKFEKDTGIKVTVEHPDKLEEKFPQVAATGDGPDIIFWAHDRFGGYAQSGLLAEITPDKAFQDKLYPFTWDAVRYNGKLIAYPIAVEALSLIYNKDLLPNPPKTWEEIPALDKELKAKGKSALMFNLQEPYFTWPLIAADGGYAFKYENGKYDIKDVGVDNAGAKAGLTFLVDLIKNKHMNADTDYSIAEAAFNKGETAMTINGPWAWSNIDTSKVNYGVTVLPTFKGQPSKPFVGVLSAGINAASPNKELAKEFLENYLLTDEGLEAVNKDKPLGAVALKSYEEELAKDPRIAATMENAQKGEIMPNIPQMSAFWYAVRTAVINAASGRQTVDEALKDAQTGGSGENLYFQSSDNGPQNQRNAPRITFGGPSDSTGSNQNGERSGARSKQRRPQGLPNNTASWFTALTQHGKEDLKFPRGQGVPINTNSSPDDQIGYYRRATRRIRGGDGKMKDLSPRWYFYYLGTGPEAGLPYGANKDGIIWVATEGALNTPKDHIGTRNPANNAAIVLQLPQGTTLPKGFYAEGSRGGSQASSRSSSRSRNSSRNSTPGSSRGTSPARMAGNGGDAALALLLLDRLNQLESKMSGKGQQQQGQTVTKKSAAEASKKPRQKRTATKAYNVTQAFGRRGPEQTQGNFGDQELIRQGTDYKRWPQIAQFAPSASAFFGMSRIGMEVTPSGTWLTYTGAIKLDDKDPNFKDQVILLNKHIDAYKTFPPTEPKKDKKKKADETQALPQRQKKQQTVTLLPAADLDDFSKQLQQSMSSADSTQAGGSGHHHHHH

SEQ ID NO: 3545 - protein, 806 aa, Artificial Sequence
  Description of Artificial Sequence: Synthetic polypeptide
MKIEEGKLVIWINGDKGYNGLAEVGKKFEKDTGIKVTVEHPDKLEEKFPQVAATGDGPDIIFWAHDRFGGYAQSGLLAEITPDKAFQDKLYPFTWDAVRYNGKLIAYPIAVEALSLIYNKDLLPNPPKTWEEIPALDKELKAKGKSALMFNLQEPYFTWPLIAADGGYAFKYENGKYDIKDVGVDNAGAKAGLTFLVDLIKNKHMNADTDYSIAEAAFNKGETAMTINGPWAWSNIDTSKVNYGVTVLPTFKGQPSKPFVGVLSAGINAASPNKELAKEFLENYLLTDEGLEAVNKDKPLGAVALKSYEEELAKDPRIAATMENAQKGEIMPNIPQMSAFWYAVRTAVINAASGRQTVDEALKDAQTGGSGENLYFQSSDNGPQNQRNAPRITFGGPSDSTGSNQNGERSGARSKQRRPQGLPNNTASWFTALTQHGKEDLKFPRGQGVPINTNSSPDDQIGYYRRATRRIRGGDGKMKDLSPRWYFYYLGTGPEAGLPYGANKDGIIWVATEGALNTPKDHIGTRNPANNAAIVLQLPQGTTLPKGFYAEGSRGGSQASSRSSSRSRNSSRNSTPGSSRGTSPARMAGNGGDAALALLLLDRLNQLESKMSGKGQQQQGQTVTKKSAAEASKKPRQKRTATKAYNVTQAFGRRGPEQTQGNFGDQELNRQGTDYKHWPQIAQFAPSASAFFGMSRIGMEVTPSGTWLTYTGAIKLDDKDPNFKDQVILLNKHIDAYKTFPPTEPKKDKKKKADETQALPQRQKKQQTVTLLPAADLDDFSKQLQQSMSSADSTQAGGSGHHHHHH

SEQ ID NO: 3546 - protein, 806 aa, Artificial Sequence
  Description of Artificial Sequence: Synthetic polypeptide
MKIEEGKLVIWINGDKGYNGLAEVGKKFEKDTGIKVTVEHPDKLEEKFPQVAATGDGPDIIFWAHDRFGGYAQSGLLAEITPDKAFQDKLYPFTWDAVRYNGKLIAYPIAVEALSLIYNKDLLPNPPKTWEEIPALDKELKAKGKSALMFNLQEPYFTWPLIAADGGYAFKYENGKYDIKDVGVDNAGAKAGLTFLVDLIKNKHMNADTDYSIAEAAFNKGETAMTINGPWAWSNIDTSKVNYGVTVLPTFKGQPSKPFVGVLSAGINAASPNKELAKEFLENYLLTDEGLEAVNKDKPLGAVALKSYEEELAKDPRIAATMENAQKGEIMPNIPQMSAFWYAVRTAVINAASGRQTVDEALKDAQTGGSGENLYFQSSDNGPQNQRNAPRITFGGPSDSTGSNQNGERSGARSKQRRPQGLPNNTASWFTALTQHGKEDLKFPRGQGVPINQNSSPDDQIGYYRRATRRIRGGDGKMKDLSPRWYFYYLGTGPEAGLPYGANKDGIIWVATEGALNTPKDHIGTRNPANNAAIVLQLPQGTTLPKGFYAEGSRGGSQASSRSSSRSRNSSRNSTPGSSRGTSPARMAGNGGDAALALLLLDRLNQLESKMSGKGQQQQGQTVTKKSAAEASKKPRQKRTATKAYNVTQAFGRRGPEQTQGNFGDQELIRQGTDYKHWPQIAQFAPSASAFFGMSRIGMEVTPSGTWLTYTGAIKLDDKDPNFKDQVILLNKHIDAYKTFPPTEPKKDKKKKADETQALPQRQKKQQTVTLLPAADLDDFSKQLQQSMSSADSTQAGGSGHHHHHH

SEQ ID NO: 3547 - protein, 806 aa, Artificial Sequence
  Description of Artificial Sequence: Synthetic polypeptide
MKIEEGKLVIWINGDKGYNGLAEVGKKFEKDTGIKVTVEHPDKLEEKFPQVAATGDGPDIIFWAHDRFGGYAQSGLLAEITPDKAFQDKLYPFTWDAVRYNGKLIAYPIAVEALSLIYNKDLLPNPPKTWEEIPALDKELKAKGKSALMFNLQEPYFTWPLIAADGGYAFKYENGKYDIKDVGVDNAGAKAGLTFLVDLIKNKHMNADTDYSIAEAAFNKGETAMTINGPWAWSNIDTSKVNYGVTVLPTFKGQPSKPFVGVLSAGINAASPNKELAKEFLENYLLTDEGLEAVNKDKPLGAVALKSYEEELAKDPRIAATMENAQKGEIMPNIPQMSAFWYAVRTAVINAASGRQTVDEALKDAQTGGSGENLYFQSSDNGPQNQRNAPRITFGGPSDSTGSNQNGERSGARSKQRRPQGLPNNTASWFTALTQHGKEDLKFPRGQGVPINTNSSPDDQIGYYRRATRRIRGGDGKMKDLSPRWYFYYLGTGPEAGLPYGANKDGIIWVATEGALNTPKDHIGTRNPANNAAFVLQLPQGTTLPKGFYAEGSRGGSQASSRSSSRSRNSSRNSTPGSSRGTSPARMAGNGGDAALALLLLDRLNQLESKMSGKGQQQQGQTVTKKSAAEASKKPRQKRTATKAYNVTQAFGRRGPEQTQGNFGDQELIRQGTDYKHWPQIAQFAPSASAFFGMSRIGMEVTPSGTWLTYTGAIKLDDKDPNFKDQVILLNKHIDAYKTFPPTEPKKDKKKKADETQALPQRQKKQQTVTLLPAADLDDFSKQLQQSMSSADSTQAGGSGHHHHHH

SEQ ID NO: 3548 - protein, 806 aa, Artificial Sequence
  Description of Artificial Sequence: Synthetic polypeptide
MKIEEGKLVIWINGDKGYNGLAEVGKKFEKDTGIKVTVEHPDKLEEKFPQVAATGDGPDIIFWAHDRFGGYAQSGLLAEITPDKAFQDKLYPFTWDAVRYNGKLIAYPIAVEALSLIYNKDLLPNPPKTWEEIPALDKELKAKGKSALMFNLQEPYFTWPLIAADGGYAFKYENGKYDIKDVGVDNAGAKAGLTFLVDLIKNKHMNADTDYSIAEAAFNKGETAMTINGPWAWSNIDTSKVNYGVTVLPTFKGQPSKPFVGVLSAGINAASPNKELAKEFLENYLLTDEGLEAVNKDKPLGAVALKSYEEELAKDPRIAATMENAQKGEIMPNIPQMSAFWYAVRTAVINAASGRQTVDEALKDAQTGGSGENLYFQSSDNGPQNQRNAPRITFGGPSDSTGSNQNGERSGARSKQRRPQGLPNNTASWFTALKQHGKEDLKFPRGQGVPINTNSSPDDQIGYYRRATRRIRGGDGKMKDLSPRWYFYYLGTGPEAGLPYGANKDGIIWVATEGALNTPKDHIGTRNPANNAAIVLQLPQGTTLPKGFYAEGSRGGSQASSRSSSRSRNSSRNSTPGSSRGTSPARMAGNGGDAALALLLLDRLNQLESKMSGKGQQQQGQTVTKKSAAEASKKPRQKRTATKAYNVTQAFGRRGPEQTQGNFGDQELIRQGTDYKHWPQIAQFAPSASAFFGMSRIGMEVTPSGTWLTYTGAIKLDDKDPNFKDQVILLNKHIDAYKTFPPTEPKKDKKKKADETQALPQRQKKQQTVTLLPAADLDDFSKQLQQSMSSADSTQAGGSGHHHHHH

SEQ ID NO: 3549 - protein, 806 aa, Artificial Sequence
  Description of Artificial Sequence: Synthetic polypeptide
MKIEEGKLVIWINGDKGYNGLAEVGKKFEKDTGIKVTVEHPDKLEEKFPQVAATGDGPDIIFWAHDRFGGYAQSGLLAEITPDKAFQDKLYPFTWDAVRYNGKLIAYPIAVEALSLIYNKDLLPNPPKTWEEIPALDKELKAKGKSALMFNLQEPYFTWPLIAADGGYAFKYENGKYDIKDVGVDNAGAKAGLTFLVDLIKNKHMNADTDYSIAEAAFNKGETAMTINGPWAWSNIDTSKVNYGVTVLPTFKGQPSKPFVGVLSAGINAASPNKELAKEFLENYLLTDEGLEAVNKDKPLGAVALKSYEEELAKDPRIAATMENAQKGEIMPNIPQMSAFWYAVRTAVINAASGRQTVDEALKDAQTGGSGENLYFQSSDNGPQNQRNAPRITFGGPSDSTGSNQNGERSGARSKQRRPQGLPNNTASWFTALTQHGKEDLKFPRGQGVPINTNSSPDDQIGYYRRATRRIRGGDGKMKDLSPRWYFYYLGTGPEAGLPYGANKDGIIWVATEGALNTPKDHIGTRNPANNAAIVLQLPQGTTLPKGFYAEGSRGGSQASSRSSSRSRNSSRNSTPGSSRGTSPARMAGNGGDAALALLLLDRLNQLESKMSGKGQQQQGQTVTKKSAAEASKKPRQKRTATKAYNVTQAFGRRGPEQTQGNFGDQELIRQGTDYKHWPQIAQFAPSASAFFGMSRIGVEVTPSGTWLTYTGAIKLDDKDPNFKDQVILLNKHIDAYKTFPPTEPKKDKKKKADETQALPQRQKKQQTVTLLPAADLDDFSKQLQQSMSSADSTQAGGSGHHHHHH

SEQ ID NO: 3550 - protein, 806 aa, Artificial Sequence
  Description of Artificial Sequence: Synthetic polypeptide
MKIEEGKLVIWINGDKGYNGLAEVGKKFEKDTGIKVTVEHPDKLEEKFPQVAATGDGPDIIFWAHDRFGGYAQSGLLAEITPDKAFQDKLYPFTWDAVRYNGKLIAYPIAVEALSLIYNKDLLPNPPKTWEEIPALDKELKAKGKSALMFNLQEPYFTWPLIAADGGYAFKYENGKYDIKDVGVDNAGAKAGLTFLVDLIKNKHMNADTDYSIAEAAFNKGETAMTINGPWAWSNIDTSKVNYGVTVLPTFKGQPSKPFVGVLSAGINAASPNKELAKEFLENYLLTDEGLEAVNKDKPLGAVALKSYEEELAKDPRIAATMENAQKGEIMPNIPQMSAFWYAVRTAVINAASGRQTVDEALKDAQTGGSGENLYFQSSDNGPQNQRNAPRITFGGPSDSTGSNQNGERSGARSKQRRPQGLPNNTASWFTALTQHGKEDLKFPRGQGVPINTNSSPDDQIGYYRRATRRIRGGDGKMKDLSPRWYFYYLGTGPEAGLPYGANKDGIIWVATEGALNTPKDHIGTRNPANNAAIVLQLPQGTTLPKGFYAEGSRGGSQASSRSSERSRNSSRNSTPGSERGTEPARMAGNGGDAALALLLLDRLNQLESKMSGKGQQQQGQTVTKKSAAEASKKPRQKRTATKAYNVTQAFGRRGPEQTQGNFGDQELIRQGTDYKHWPQIAQFAPSASAFFGMSRIGMEVTPSGTWLTYTGAIKLDDKDPNFKDQVILLNKHIDAYKTFPPTEPKKDKKKKADETQALPQRQKKQQTVTLLPAADLDDFSKQLQQSMSSADSTQAGGSGHHHHHH

SEQ ID NO: 3551 - protein, 806 aa, Artificial Sequence
  Description of Artificial Sequence: Synthetic polypeptide
MKIEEGKLVIWINGDKGYNGLAEVGKKFEKDTGIKVTVEHPDKLEEKFPQVAATGDGPDIIFWAHDRFGGYAQSGLLAEITPDKAFQDKLYPFTWDAVRYNGKLIAYPIAVEALSLIYNKDLLPNPPKTWEEIPALDKELKAKGKSALMFNLQEPYFTWPLIAADGGYAFKYENGKYDIKDVGVDNAGAKAGLTFLVDLIKNKHMNADTDYSIAEAAFNKGETAMTINGPWAWSNIDTSKVNYGVTVLPTFKGQPSKPFVGVLSAGINAASPNKELAKEFLENYLLTDEGLEAVNKDKPLGAVALKSYEEELAKDPRIAATMENAQKGEIMPNIPQMSAFWYAVRTAVINAASGRQTVDEALKDAQTGGSGENLYFQSSDNGPQNQRNAPRITFGGPSDSTGSNQNGERSGARSKQRRPQGLPNNTASWFTALTQHGKEDLKFPRGQGVPINTNSSPDDQIGYYRRATRRIRGGDGKMKDLSPRWYFYYLGTGPEAGLPYGANKDGIIWVATEGALNTPKDHIGTRNPANNAAIVLQLPQGTTLPKGFYAEGSRGGSQASSRSSSRSRNSSRNSTPGSSRGTSPARMAGNGGDAALALLLLDRLNQLESKMSGKGQQQQGQTVTKKSAAEASKKPRQKRTATKAYNVTQAFGRRGPEQTQGNFGDQELIRQGTDYKHWPQIAQFAPSASAFFGMSRIGMEVTPSGTWLTYTGAIKLDDTDPNFKDQVILLNKHIDAYKTFPPTEPKKDKKKKADETQALPQRQKKQQTVTLLPAADLDDFSKQLQQSMSSADSTQAGGSGHHHHHH

SEQ ID NO: 3552 - protein, 806 aa, Artificial Sequence
  Description of Artificial Sequence: Synthetic polypeptide
MKIEEGKLVIWINGDKGYNGLAEVGKKFEKDTGIKVTVEHPDKLEEKFPQVAATGDGPDIIFWAHDRFGGYAQSGLLAEITPDKAFQDKLYPFTWDAVRYNGKLIAYPIAVEALSLIYNKDLLPNPPKTWEEIPALDKELKAKGKSALMFNLQEPYFTWPLIAADGGYAFKYENGKYDIKDVGVDNAGAKAGLTFLVDLIKNKHMNADTDYSIAEAAFNKGETAMTINGPWAWSNIDTSKVNYGVTVLPTFKGQPSKPFVGVLSAGINAASPNKELAKEFLENYLLTDEGLEAVNKDKPLGAVALKSYEEELAKDPRIAATMENAQKGEIMPNIPQMSAFWYAVRTAVINAASGRQTVDEALKDAQTGGSGENLYFQSSDNGPQNQRNAPRITFGGPSDSTGSNQNGERSGARSKQRRPQGLPNNTASWFTALTQHGKEDLKFPRGQGVPINTNSSPDDQIGYYRRATRRIRGGDGKMKDLSPRWYFYYLGTGPEAGLPYGANKDGIIWVATEGALNTPKDHIGTRNPANNAAIVLQLPQGTTLPKGFYAEGSRGGSQASSRSSSRSRNSSRNSTPGSSRGTSPARMAGNGGDAALALLLLDRLNQLESKMSGKGQQQQGQTVTKKSAAEASKKPRQKRTATKAYNVTQAFGRRGPEQTQGNFGDQELIRQGTDYKHWPQIAQFAPSTSAFFGMSRIGMEVTPSGTWLTYTGAIKLDDKDPNFKDQVILLNKHIDAYKTFPPTEPKKDKKKKADETQALPQRQKKQQTVTLLPAADLDDFSKQLQQSMSSADSTQAGGSGHHHHHH

SEQ ID NO: 3553 - protein, 806 aa, Artificial Sequence
  Description of Artificial Sequence: Synthetic polypeptide
MKIEEGKLVIWINGDKGYNGLAEVGKKFEKDTGIKVTVEHPDKLEEKFPQVAATGDGPDIIFWAHDRFGGYAQSGLLAEITPDKAFQDKLYPFTWDAVRYNGKLIAYPIAVEALSLIYNKDLLPNPPKTWEEIPALDKELKAKGKSALMFNLQEPYFTWPLIAADGGYAFKYENGKYDIKDVGVDNAGAKAGLTFLVDLIKNKHMNADTDYSIAEAAFNKGETAMTINGPWAWSNIDTSKVNYGVTVLPTFKGQPSKPFVGVLSAGINAASPNKELAKEFLENYLLTDEGLEAVNKDKPLGAVALKSYEEELAKDPRIAATMENAQKGEIMPNIPQMSAFWYAVRTAVINAASGRQTVDEALKDAQTGGSGENLYFQSSDNGPQNQRNAPRITFGGPSDSTGSNQNGERSGARSKQRRPQGLPNNTASWFTALTQHGKEDLKFPRGQGVPINTNSSPDDQIGYYRRATRRIRGGDGKMKDLSPRWYFYYLGTGPEAGLPYGANKDGIIWVATEGALNTPKDHIGTRNPANNAAIVLQLPQGTTLPKGFYAEGSRGGSQASSRSSSRSRNSSRNSTPGSSRGTSPARMAGNGGDAALALLLLDRLNQLESKMSGKGQQQQGQTVTKKSAAEASKKPRQKRTATKAYNVTQAFGTRGPEQTQGNFGDQELIRQGTDYKHWPQIAQFAPSASAFFGMSRIGMEVTPSGTWLTYTGAIKLDDKDPNFKDQVILLNKHIDAYKTFPPTEPKKDKKKKADETQALPQRQKKQQTVTLLPAADLDDFSKQLQQSMSSADSTQAGGSGHHHHHH

SEQ ID NO: 3554 - protein, 806 aa, Artificial Sequence
  Description of Artificial Sequence: Synthetic polypeptide
MKIEEGKLVIWINGDKGYNGLAEVGKKFEKDTGIKVTVEHPDKLEEKFPQVAATGDGPDIIFWAHDRFGGYAQSGLLAEITPDKAFQDKLYPFTWDAVRYNGKLIAYPIAVEALSLIYNKDLLPNPPKTWEEIPALDKELKAKGKSALMFNLQEPYFTWPLIAADGGYAFKYENGKYDIKDVGVDNAGAKAGLTFLVDLIKNKHMNADTDYSIAEAAFNKGETAMTINGPWAWSNIDTSKVNYGVTVLPTFKGQPSKPFVGVLSAGINAASPNKELAKEFLENYLLTDEGLEAVNKDKPLGAVALKSYEEELAKDPRIAATMENAQKGEIMPNIPQMSAFWYAVRTAVINAASGRQTVDEALKDAQTGGSGENLYFQSSDNGPQNQRNAPRITFGGPSDSTGSNQNGERSGARSKQRRPQGLPNNTASWFTALTQHGKEDLKFPRGQGVPINTNSSPDDQIGYYRRATRRIRGGDGKMKDLSPRWYFYYLGTGPEAGLPYGANKDGIIWVATEGALNTPKDHIGTRNPANNAAIGLQLPQGTTLPKGFYAEGSRGGSQASSRSSSRSRNSSRNSTPGSSRGTSPARMAGNGGDAALALLLLDRLNQLESKMSGKGQQQQGQTVTKKSAAEASKKPRQKRTATKAYNVTQAFGRRGPEQTQGNFGDQELIRQGTDYKHWPQIAQFAPSASAFFGMSRIGMEVTPSGTWLTYTGAIKLDDKDPNFKDQVILLNKHIDAYKTFPPTEPKKDKKKKADETQALPQRQKKQQTVTLLPAADLDDFSKQLQQSMSSADSTQAGGSGHHHHHH

SEQ ID NO: 3555 - protein, 806 aa, Artificial Sequence
  Description of Artificial Sequence: Synthetic polypeptide
MKIEEGKLVIWINGDKGYNGLAEVGKKFEKDTGIKVTVEHPDKLEEKFPQVAATGDGPDIIFWAHDRFGGYAQSGLLAEITPDKAFQDKLYPFTWDAVRYNGKLIAYPIAVEALSLIYNKDLLPNPPKTWEEIPALDKELKAKGKSALMFNLQEPYFTWPLIAADGGYAFKYENGKYDIKDVGVDNAGAKAGLTFLVDLIKNKHMNADTDYSIAEAAFNKGETAMTINGPWAWSNIDTSKVNYGVTVLPTFKGQPSKPFVGVLSAGINAASPNKELAKEFLENYLLTDEGLEAVNKDKPLGAVALKSYEEELAKDPRIAATMENAQKGEIMPNIPQMSAFWYAVRTAVINAASGRQTVDEALKDAQTGGSGENLYFQSSDNGPQNQRNAPRITFGGPSDSTGSNQNGERSGARSKQRRPQGLPNNTASWFTALTQHGKEDLKFPRGQGVPINTNSSPDDQIGYYRRATRRIRGGDGKMKDLSPRWYFYYLGTGPEAGLPYGANKDGIIWVATEGALNTPKDHIGTRNPANNAAIVLQLPQGTTLPKGFYAEGSRGGSQASSRSSSRSRNSSRNSTPGSSRGTSPARMAGNGGDAALALLLLDRLNQLESKMSGKGQQQQGQTVTKKSAAEASKKPRQKRTATKAYNVTQAFGRRGPEQTQGNFGDQKLIRQGTDYKHWPQIAQFAPSASAFFGMSRIGMEVTPSGTWLTYTGAIKLDDKDPNFKDQVILLNKHIDAYKTFPPTEPKKDKKKKADETQALPQRQKKQQTVTLLPAADLDDFSKQLQQSMSSADSTQAGGSGHHHHHH

SEQ ID NO: 3556 - protein, 806 aa, Artificial Sequence
  Description of Artificial Sequence: Synthetic polypeptide
MKIEEGKLVIWINGDKGYNGLAEVGKKFEKDTGIKVTVEHPDKLEEKFPQVAATGDGPDIIFWAHDRFGGYAQSGLLAEITPDKAFQDKLYPFTWDAVRYNGKLIAYPIAVEALSLIYNKDLLPNPPKTWEEIPALDKELKAKGKSALMFNLQEPYFTWPLIAADGGYAFKYENGKYDIKDVGVDNAGAKAGLTFLVDLIKNKHMNADTDYSIAEAAFNKGETAMTINGPWAWSNIDTSKVNYGVTVLPTFKGQPSKPFVGVLSAGINAASPNKELAKEFLENYLLTDEGLEAVNKDKPLGAVALKSYEEELAKDPRIAATMENAQKGEIMPNIPQMSAFWYAVRTAVINAASGRQTVDEALKDAQTGGSGENLYFQSSDNGPQNQRNAPRITFGGPSDSTGSNQNGERSGARSKQRRPQGLPNNTASWFTPLTQNGKEDLKFPPGQGVPINTNSSPDDQIGYYRRATRRIRGGDGKMKDLPPKWYFYYLGTGPHADLPYGQKHPGVFWVARPGALNTPKDHIGTRNPANNAAIPLQLPPGTKLPKGFYAEGSRGGSQASSRSSSRSRNSSRNSTPGSSRGTSPARMAGNGGDAALALLLLDRLNQLESKMSGKGQQQQGQTVTKKSAAEASKKPRQKRTATKAYNVTQAFGRRGPEQTQGNFGDQELIRQGTDYKHWPQIAQFAPSASAFFGMSRIGMEVTPSGTWLTYTGAIKLDDKDPNFKDQVILLNKHIDAYKTFPPTEPKKDKKKKADETQALPQRQKKQQTVTLLPAADLDDFSKQLQQSMSSADSTQAGGSGHHHHHH

SEQ ID NO: 3557 - protein, 806 aa, Artificial Sequence
  Description of Artificial Sequence: Synthetic polypeptide
MKIEEGKLVIWINGDKGYNGLAEVGKKFEKDTGIKVTVEHPDKLEEKFPQVAATGDGPDIIFWAHDRFGGYAQSGLLAEITPDKAFQDKLYPFTWDAVRYNGKLIAYPIAVEALSLIYNKDLLPNPPKTWEEIPALDKELKAKGKSALMFNLQEPYFTWPLIAADGGYAFKYENGKYDIKDVGVDNAGAKAGLTFLVDLIKNKHMNADTDYSIAEAAFNKGETAMTINGPWAWSNIDTSKVNYGVTVLPTFKGQPSKPFVGVLSAGINAASPNKELAKEFLENYLLTDEGLEAVNKDKPLGAVALKSYEEELAKDPRIAATMENAQKGEIMPNIPQMSAFWYAVRTAVINAASGRQTVDEALKDAQTGGSGENLYFQSSDNGPQNQRNAPRITFGGPSDSTGSNQNGERSGARSKQRRPQGLPNNTASWFTALTQHGKEDLKFPRGQGVPINTNSSPDDQIGYYRRATRRIRGGDGKMKDLSPRWYFYYLGTGPEAGLPYGANKDGIIWVATEGALNTPKDHIGTRNPANNAAIVLQLPQGTTLPKGFYAEGSRGGSQASSRSSSRSRNSSRNSTPGSSRGTSPARMAGNGGDAALALLLLDRLNQLESKMSGKGQQQQGQTVTKKSAAEASKKPRQKRTATKAYNVTQAFGRRGPEQTQGNFGDQELIRQGTDYKHWPQIAQFAPSASAFFGMSRIGMEVTPSGTWLTYTGAIKLDDKDPNFKNQVILLNKHIDAYKTFPPTEPKKDKKKKADETQALPQRQKKQQTVTLLPAADLDDFSKQLQQSMSSADSTQAGGSGHHHHHH

SEQ ID NO: 3558 - protein, 806 aa, Artificial Sequence
  Description of Artificial Sequence: Synthetic polypeptide
MKIEEGKLVIWINGDKGYNGLAEVGKKFEKDTGIKVTVEHPDKLEEKFPQVAATGDGPDIIFWAHDRFGGYAQSGLLAEITPDKAFQDKLYPFTWDAVRYNGKLIAYPIAVEALSLIYNKDLLPNPPKTWEEIPALDKELKAKGKSALMFNLQEPYFTWPLIAADGGYAFKYENGKYDIKDVGVDNAGAKAGLTFLVDLIKNKHMNADTDYSIAEAAFNKGETAMTINGPWAWSNIDTSKVNYGVTVLPTFKGQPSKPFVGVLSAGINAASPNKELAKEFLENYLLTDEGLEAVNKDKPLGAVALKSYEEELAKDPRIAATMENAQKGEIMPNIPQMSAFWYAVRTAVINAASGRQTVDEALKDAQTGGSGENLYFQSSDNGPQNQRNAPRITFGGPSDSTGSNQNGERSGARSKQRRPQGLPNNTASWFTALTQHGKEDLKFPRGQGVPINTNSSPDDQIGYYRRATRRIRGGDGKMKDLSPRWYFYYLGTGPEAGLPYGANKDGIIWVATEGALNTPKDHIGTRNPANNAAIVLQLPQGTTLPKGFYAEGSRGGSQASSRSSSRSRNSSRNSTPGSSRGTSPARMAGNGGDAALALLLLDRLNQLESKMSGKGQQQQGQTVTKKSAAEASKKPRQKRTATKAYNVTQAFGRRGPEQTQGNFGDQELIRQGTDYKHWPQIAQFAPSASAFFGMSRIGMEVTPSGTWLTYTGAIKLDDKDPNFKKQVILLNKHIDAYKTFPPTEPKKDKKKKADETQALPQRQKKQQTVTLLPAADLDDFSKQLQQSMSSADSTQAGGSGHHHHHH

SEQ ID NO: 3559 - protein, 806 aa, Artificial Sequence
  Description of Artificial Sequence: Synthetic polypeptide
MKIEEGKLVIWINGDKGYNGLAEVGKKFEKDTGIKVTVEHPDKLEEKFPQVAATGDGPDIIFWAHDRFGGYAQSGLLAEITPDKAFQDKLYPFTWDAVRYNGKLIAYPIAVEALSLIYNKDLLPNPPKTWEEIPALDKELKAKGKSALMFNLQEPYFTWPLIAADGGYAFKYENGKYDIKDVGVDNAGAKAGLTFLVDLIKNKHMNADTDYSIAEAAFNKGETAMTINGPWAWSNIDTSKVNYGVTVLPTFKGQPSKPFVGVLSAGINAASPNKELAKEFLENYLLTDEGLEAVNKDKPLGAVALKSYEEELAKDPRIAATMENAQKGEIMPNIPQMSAFWYAVRTAVINAASGRQTVDEALKDAQTGGSGENLYFQSSDNGPQNQRNAPRITFGGPSDSTGSNQNGERSGARSKQRRPQGLPNNTASWFTALTQHGKEDLKFPAGQGVPINTNSSPDDQIGYYRRATRRIRGGDGKMKDLSPRWYFYYLGTGPEAGLPYGANKDGIIWVATEGALNTPKDHIGTRNPANNAAIVLQLPQGTTLPKGFYAEGSRGGSQASSRSSSRSRNSSRNSTPGSSRGTSPARMAGNGGDAALALLLLDRLNQLESKMSGKGQQQQGQTVTKKSAAEASKKPRQKRTATKAYNVTQAFGRRGPEQTQGNFGDQELIRQGTDYKHWPQIAQFAPSASAFFGMSRIGMEVTPSGTWLTYTGAIKLDDKDPNFKDQVILLNKHIDAYKTFPPTEPKKDKKKKADETQALPQRQKKQQTVTLLPAADLDDFSKQLQQSMSSADSTQAGGSGHHHHHH

SEQ ID NO: 3560 - protein, 806 aa, Artificial Sequence
  Description of Artificial Sequence: Synthetic polypeptide
MKIEEGKLVIWINGDKGYNGLAEVGKKFEKDTGIKVTVEHPDKLEEKFPQVAATGDGPDIIFWAHDRFGGYAQSGLLAEITPDKAFQDKLYPFTWDAVRYNGKLIAYPIAVEALSLIYNKDLLPNPPKTWEEIPALDKELKAKGKSALMFNLQEPYFTWPLIAADGGYAFKYENGKYDIKDVGVDNAGAKAGLTFLVDLIKNKHMNADTDYSIAEAAFNKGETAMTINGPWAWSNIDTSKVNYGVTVLPTFKGQPSKPFVGVLSAGINAASPNKELAKEFLENYLLTDEGLEAVNKDKPLGAVALKSYEEELAKDPRIAATMENAQKGEIMPNIPQMSAFWYAVRTAVINAASGRQTVDEALKDAQTGGSGENLYFQSSDNGPQNQRNAPRITFGGPSDSTGSNQNGERSGARSKQRRPQGLPNNTASWFTALTQHGKEDLKFPRGQGVPINTNSSPSDQIGYYRRATRRIRGGDGKMKDLSPRWYFYYLGTGPEAGLPYGANKDGIIWVATEGALNTPKDHIGTRNPANNAAIVLQLPQGTTLPKGFYAEGSRGGSQASSRSSSRSRNSSRNSTPGSSRGTSPARMAGNGGDAALALLLLDRLNQLESKMSGKGQQQQGQTVTKKSAAEASKKPRQKRTATKAYNVTQAFGRRGPEQTQGNFGDQELIRQGTDYKHWPQIAQFAPSASAFFGMSRIGMEVTPSGTWLTYTGAIKLDDKDPNFKDQVILLNKHIDAYKTFPPTEPKKDKKKKADETQALPQRQKKQQTVTLLPAADLDDFSKQLQQSMSSADSTQAGGSGHHHHHH

SEQ ID NO: 3561 - protein, 806 aa, Artificial Sequence
  Description of Artificial Sequence: Synthetic polypeptide
MKIEEGKLVIWINGDKGYNGLAEVGKKFEKDTGIKVTVEHPDKLEEKFPQVAATGDGPDIIFWAHDRFGGYAQSGLLAEITPDKAFQDKLYPFTWDAVRYNGKLIAYPIAVEALSLIYNKDLLPNPPKTWEEIPALDKELKAKGKSALMFNLQEPYFTWPLIAADGGYAFKYENGKYDIKDVGVDNAGAKAGLTFLVDLIKNKHMNADTDYSIAEAAFNKGETAMTINGPWAWSNIDTSKVNYGVTVLPTFKGQPSKPFVGVLSAGINAASPNKELAKEFLENYLLTDEGLEAVNKDKPLGAVALKSYEEELAKDPRIAATMENAQKGEIMPNIPQMSAFWYAVRTAVINAASGRQTVDEALKDAQTGGSGENLYFQSSDNGPQNQRNAPRITFGGPSDSTGSNQNGERSGARSKQRRPQGLPNNTASWFTALTQHGKEDLKFPRGQGVPINTNSSPDDQIGYYRRATRRIRGGDGKMKDLSPRWYFYYLGTGPEAGLPYGANKDGIIWVATEGALNTPKDHIGTRNPANNAAYVLQLPQGTTLPKGFYAEGSRGGSQASSRSSSRSRNSSRNSTPGSSRGTSPARMAGNGGDAALALLLLDRLNQLESKMSGKGQQQQGQTVTKKSAAEASKKPRQKRTATKAYNVTQAFGRRGPEQTQGNFGDQELIRQGTDYKHWPQIAQFAPSASAFFGMSRIGMEVTPSGTWLTYTGAIKLDDKDPNFKDQVILLNKHIDAYKTFPPTEPKKDKKKKADETQALPQRQKKQQTVTLLPAADLDDFSKQLQQSMSSADSTQAGGSGHHHHHH

SEQ ID NO: 3562 - protein, 806 aa, Artificial Sequence
  Description of Artificial Sequence: Synthetic polypeptide
MKIEEGKLVIWINGDKGYNGLAEVGKKFEKDTGIKVTVEHPDKLEEKFPQVAATGDGPDIIFWAHDRFGGYAQSGLLAEITPDKAFQDKLYPFTWDAVRYNGKLIAYPIAVEALSLIYNKDLLPNPPKTWEEIPALDKELKAKGKSALMFNLQEPYFTWPLIAADGGYAFKYENGKYDIKDVGVDNAGAKAGLTFLVDLIKNKHMNADTDYSIAEAAFNKGETAMTINGPWAWSNIDTSKVNYGVTVLPTFKGQPSKPFVGVLSAGINAASPNKELAKEFLENYLLTDEGLEAVNKDKPLGAVALKSYEEELAKDPRIAATMENAQKGEIMPNIPQMSAFWYAVRTAVINAASGRQTVDEALKDAQTGGSGENLYFQSSDNGPQNQRNAPRITFGGPSDSTGSNQNGERSGARSKQRRPQGLPNNTASWFTALTQHGKEDLKFPRGQGVPINTNSSPDDQIGYYRRATRRIRGGDGKMKDLSPRWYFYYLGTGPEAGLPYGANKDGIIWVATEGALNTPKDHIGTRNPANNAAIVLQLPQGTTLPKGFYAEGSRGGSQASSRSSSRSRNSSRNSTPGSSRGTSPARMAGNGGDAALALLLLDRLNQLESKMSGKGQQQQGQTVTKKSAAEASKKPRQKRTATKAYNVTQAFGRRGPEQTQGNFGDQELIRQGTDYKHWPQIAQFAPSASAFFGMSRIKMEVTPSGTWLTYTGAIKLDDKDPNFKDQVILLNKHIDAYKTFPPTEPKKDKKKKADETQALPQRQKKQQTVTLLPAADLDDFSKQLQQSMSSADSTQAGGSGHHHHHH

SEQ ID NO: 3563 - protein, 806 aa, Artificial Sequence
  Description of Artificial Sequence: Synthetic polypeptide
MKIEEGKLVIWINGDKGYNGLAEVGKKFEKDTGIKVTVEHPDKLEEKFPQVAATGDGPDIIFWAHDRFGGYAQSGLLAEITPDKAFQDKLYPFTWDAVRYNGKLIAYPIAVEALSLIYNKDLLPNPPKTWEEIPALDKELKAKGKSALMFNLQEPYFTWPLIAADGGYAFKYENGKYDIKDVGVDNAGAKAGLTFLVDLIKNKHMNADTDYSIAEAAFNKGETAMTINGPWAWSNIDTSKVNYGVTVLPTFKGQPSKPFVGVLSAGINAASPNKELAKEFLENYLLTDEGLEAVNKDKPLGAVALKSYEEELAKDPRIAATMENAQKGEIMPNIPQMSAFWYAVRTAVINAASGRQTVDEALKDAQTGGSGENLYFQSSDNGPQNQRNAPRITFGGPSDSTGSNQNGERSGARSKQRRPQGLPNNTASWFTALTQHGKEDLKFPRGQGVPINANSSPDDQIGYYRRATRRIRGGDGKMKDLSPRWYFYYLGTGPEAGLPYGANKDGIIWVATEGALNTPKDHIGTRNPANNAAIVLQLPQGTTLPKGFYAEGSRGGSQASSRSSSRSRNSSRNSTPGSSRGTSPARMAGNGGDAALALLLLDRLNQLESKMSGKGQQQQGQTVTKKSAAEASKKPRQKRTATKAYNVTQAFGRRGPEQTQGNFGDQELIRQGTDYKHWPQIAQFAPSASAFFGMSRIGMEVTPSGTWLTYTGAIKLDDKDPNFKDQVILLNKHIDAYKTFPPTEPKKDKKKKADETQALPQRQKKQQTVTLLPAADLDDFSKQLQQSMSSADSTQAGGSGHHHHHH

SEQ ID NO: 3564 - protein, 806 aa, Artificial Sequence
  Description of Artificial Sequence: Synthetic polypeptide
MKIEEGKLVIWINGDKGYNGLAEVGKKFEKDTGIKVTVEHPDKLEEKFPQVAATGDGPDIIFWAHDRFGGYAQSGLLAEITPDKAFQDKLYPFTWDAVRYNGKLIAYPIAVEALSLIYNKDLLPNPPKTWEEIPALDKELKAKGKSALMFNLQEPYFTWPLIAADGGYAFKYENGKYDIKDVGVDNAGAKAGLTFLVDLIKNKHMNADTDYSIAEAAFNKGETAMTINGPWAWSNIDTSKVNYGVTVLPTFKGQPSKPFVGVLSAGINAASPNKELAKEFLENYLLTDEGLEAVNKDKPLGAVALKSYEEELAKDPRIAATMENAQKGEIMPNIPQMSAFWYAVRTAVINAASGRQTVDEALKDAQTGGSGENLYFQSSDNGPQNQRNAPRITFGGPSDSTGSNQNGERSGARSKQRRPQGLPNNTASWFTALTQHGKEDLKFPRGQGVPINTNSSPDDQIGYYRRATRRIRGGDGKMKDLSPRWYFYYLGTGPYAGLPYGANKDGIIWVATEGALNTPKDHIGTRNPANNAAIVLQLPQGTTLPKGFYAEGSRGGSQASSRSSSRSRNSSRNSTPGSSRGTSPARMAGNGGDAALALLLLDRLNQLESKMSGKGQQQQGQTVTKKSAAEASKKPRQKRTATKAYNVTQAFGRRGPEQTQGNFGDQELIRQGTDYKHWPQIAQFAPSASAFFGMSRIGMEVTPSGTWLTYTGAIKLDDKDPNFKDQVILLNKHIDAYKTFPPTEPKKDKKKKADETQALPQRQKKQQTVTLLPAADLDDFSKQLQQSMSSADSTQAGGSGHHHHHH

SEQ ID NO: 3565 - protein, 806 aa, Artificial Sequence
  Description of Artificial Sequence: Synthetic polypeptide
MKIEEGKLVIWINGDKGYNGLAEVGKKFEKDTGIKVTVEHPDKLEEKFPQVAATGDGPDIIFWAHDRFGGYAQSGLLAEITPDKAFQDKLYPFTWDAVRYNGKLIAYPIAVEALSLIYNKDLLPNPPKTWEEIPALDKELKAKGKSALMFNLQEPYFTWPLIAADGGYAFKYENGKYDIKDVGVDNAGAKAGLTFLVDLIKNKHMNADTDYSIAEAAFNKGETAMTINGPWAWSNIDTSKVNYGVTVLPTFKGQPSKPFVGVLSAGINAASPNKELAKEFLENYLLTDEGLEAVNKDKPLGAVALKSYEEELAKDPRIAATMENAQKGEIMPNIPQMSAFWYAVRTAVINAASGRQTVDEALKDAQTGGSGENLYFQSSDNGPQNQRNAPRITFGGPSDSTGSNQNGERSGARSKQRRPQGLPNNTASWFTALTQHGKEDLKFPRGQGVPINTNSSPDDQIGYYRRATRRIRGGDGKMKDLSPRWYFYYLGTGPEAGLPYGANKDGIIWVATEGALNTPKDHIGTRNPANNAAIVLQLPQGTTLPKGFYAEGSRGGSQASSRSSSRSRNSSRNSTPGSSRGTSPARMAGNGGDAALALLLLDRLNQLESKMSGKGQQQQGQTVTKKSAAENSKKPRQKRTATKAYNVTQAFGRRGPEQTQGNFGDQELIRQGTDYKHWPQIAQFAPSASAFFGMSRIGMEVTPSGTWLTYTGAIKLDDKDPNFKDQVILLNKHIDAYKTFPPTEPKKDKKKKADETQALPQRQKKQQTVTLLPAADLDDFSKQLQQSMSSADSTQAGGSGHHHHHH

SEQ ID NO: 3566 - protein, 806 aa, Artificial Sequence
  Description of Artificial Sequence: Synthetic polypeptide
MKIEEGKLVIWINGDKGYNGLAEVGKKFEKDTGIKVTVEHPDKLEEKFPQVAATGDGPDIIFWAHDRFGGYAQSGLLAEITPDKAFQDKLYPFTWDAVRYNGKLIAYPIAVEALSLIYNKDLLPNPPKTWEEIPALDKELKAKGKSALMFNLQEPYFTWPLIAADGGYAFKYENGKYDIKDVGVDNAGAKAGLTFLVDLIKNKHMNADTDYSIAEAAFNKGETAMTINGPWAWSNIDTSKVNYGVTVLPTFKGQPSKPFVGVLSAGINAASPNKELAKEFLENYLLTDEGLEAVNKDKPLGAVALKSYEEELAKDPRIAATMENAQKGEIMPNIPQMSAFWYAVRTAVINAASGRQTVDEALKDAQTGGSGENLYFQSSDNGPQNQRNAPRITFGGPSDSTGSNQNGERSGARSKQRRPQGLPNNTASWFTALTQHGKEDLKFPRGQGVPINTNSSPDDQIGYYRRATRRIRGGDGKMKDLSPRWYFYYLGTGPEAGLPYGANKDGIIWVATEGALNTPKDHIGTRNPANNAAIVLQLPQGTTLPKGFYAEGSRGGSQASSRSSERSRNSSRNSTPGESRGTSPARMAGNGGDAALALLLLDRLNQLESKMSGKGQQQQGQTVTKKSAAEASKKPRQKRTATKAYNVTQAFGRRGPEQTQGNFGDQELIRQGTDYKHWPQIAQFAPSASAFFGMSRIGMEVTPSGTWLTYTGAIKLDDKDPNFKDQVILLNKHIDAYKTFPPTEPKKDKKKKADETQALPQRQKKQQTVTLLPAADLDDFSKQLQQSMSSADSTQAGGSGHHHHHH

SEQ ID NO: 3567 - protein, 806 aa, Artificial Sequence
  Description of Artificial Sequence: Synthetic polypeptide
MKIEEGKLVIWINGDKGYNGLAEVGKKFEKDTGIKVTVEHPDKLEEKFPQVAATGDGPDIIFWAHDRFGGYAQSGLLAEITPDKAFQDKLYPFTWDAVRYNGKLIAYPIAVEALSLIYNKDLLPNPPKTWEEIPALDKELKAKGKSALMFNLQEPYFTWPLIAADGGYAFKYENGKYDIKDVGVDNAGAKAGLTFLVDLIKNKHMNADTDYSIAEAAFNKGETAMTINGPWAWSNIDTSKVNYGVTVLPTFKGQPSKPFVGVLSAGINAASPNKELAKEFLENYLLTDEGLEAVNKDKPLGAVALKSYEEELAKDPRIAATMENAQKGEIMPNIPQMSAFWYAVRTAVINAASGRQTVDEALKDAQTGGSGENLYFQSSDNGPQNQRNAPRITFGGPSDSTGSNQNGERSGARSKQRRPQGLPNNTASWFTALTQHGKEDLKFPRGQGVPINTNSSPDDQIGYYRRATRRIRGGDGKMKDLSPRWYFYYLGTGPEAGLPYGANKDGIIWVATEGALNTPKDHIGTRNPANNAAIVLQLPQGTTLPKGFYAEGSRGGSQASSRSSSRSRNSSRNSTPGSSRGTSPARMAGNGGDAALALLLLDRLNQLESKMSGKGQQQQGQTVTKKSAAEASKKPRQKRTATKAYNVTQAFGRRGPEQTQGNFGDQELIRQGTDYKHWPQIAQFAPSASAFFGMSRIDMEVTPSGTWLTYTGAIKLDDKDPNFKDQVILLNKHIDAYKTFPPTEPKKDKKKKADETQALPQRQKKQQTVTLLPAADLDDFSKQLQQSMSSADSTQAGGSGHHHHHH

SEQ ID NO: 3568 - protein, 806 aa, Artificial Sequence
  Description of Artificial Sequence: Synthetic polypeptide
MKIEEGKLVIWINGDKGYNGLAEVGKKFEKDTGIKVTVEHPDKLEEKFPQVAATGDGPDIIFWAHDRFGGYAQSGLLAEITPDKAFQDKLYPFTWDAVRYNGKLIAYPIAVEALSLIYNKDLLPNPPKTWEEIPALDKELKAKGKSALMFNLQEPYFTWPLIAADGGYAFKYENGKYDIKDVGVDNAGAKAGLTFLVDLIKNKHMNADTDYSIAEAAFNKGETAMTINGPWAWSNIDTSKVNYGVTVLPTFKGQPSKPFVGVLSAGINAASPNKELAKEFLENYLLTDEGLEAVNKDKPLGAVALKSYEEELAKDPRIAATMENAQKGEIMPNIPQMSAFWYAVRTAVINAASGRQTVDEALKDAQTGGSGENLYFQSSDNGPQNQRNAPRITFGGPSDSTGSNQNGERSGARSKQRRPQGLPNNTASWFTALTQHGKEDLKFPRGQGVPVNTNSSPDDQIGYYRRATRRIRGGDGKMKDLSPRWYFYYLGTGPEAGLPYGANKDGIIWVATEGALNTPKDHIGTRNPANNAAIVLQLPQGTTLPKGFYAEGSRGGSQASSRSSSRSRNSSRNSTPGSSRGTSPARMAGNGGDAALALLLLDRLNQLESKMSGKGQQQQGQTVTKKSAAEASKKPRQKRTATKAYNVTQAFGRRGPEQTQGNFGDQELIRQGTDYKHWPQIAQFAPSASAFFGMSRIGMEVTPSGTWLTYTGAIKLDDKDPNFKDQVILLNKHIDAYKTFPPTEPKKDKKKKADETQALPQRQKKQQTVTLLPAADLDDFSKQLQQSMSSADSTQAGGSGHHHHHH

SEQ ID NO: 3569 - protein, 806 aa, Artificial Sequence
  Description of Artificial Sequence: Synthetic polypeptide
MKIEEGKLVIWINGDKGYNGLAEVGKKFEKDTGIKVTVEHPDKLEEKFPQVAATGDGPDIIFWAHDRFGGYAQSGLLAEITPDKAFQDKLYPFTWDAVRYNGKLIAYPIAVEALSLIYNKDLLPNPPKTWEEIPALDKELKAKGKSALMFNLQEPYFTWPLIAADGGYAFKYENGKYDIKDVGVDNAGAKAGLTFLVDLIKNKHMNADTDYSIAEAAFNKGETAMTINGPWAWSNIDTSKVNYGVTVLPTFKGQPSKPFVGVLSAGINAASPNKELAKEFLENYLLTDEGLEAVNKDKPLGAVALKSYEEELAKDPRIAATMENAQKGEIMPNIPQMSAFWYAVRTAVINAASGRQTVDEALKDAQTGGSGENLYFQSSDNGPQNQRNAPRITFGGPSDSTGSNQNGERSGARSKQRRPQGLPNNTASWFTALTQHGKEDLKFPRGQGVPINTNSSPDDQIGYYRRATRRIRGGDGKMKDLSPRWYFYYLGTGPEAGLPYGANKEGIIWVATEGALNTPKDHIGTRNPANNAAIVLQLPQGTTLPKGFYAEGSRGGSQASSRSSSRSRNSSRNSTPGSSRGTSPARMAGNGGDAALALLLLDRLNQLESKMSGKGQQQQGQTVTKKSAAEASKKPRQKRTATKAYNVTQAFGRRGPEQTQGNFGDQELIRQGTDYKHWPQIAQFAPSASAFFGMSRIGMEVTPSGTWLTYTGAIKLDDKDPNFKDQVILLNKHIDAYKTFPPTEPKKDKKKKADETQALPQRQKKQQTVTLLPAADLDDFSKQLQQSMSSADSTQAGGSGHHHHHH

SEQ ID NO: 3570 - protein, 806 aa, Artificial Sequence
  Description of Artificial Sequence: Synthetic polypeptide
MKIEEGKLVIWINGDKGYNGLAEVGKKFEKDTGIKVTVEHPDKLEEKFPQVAATGDGPDIIFWAHDRFGGYAQSGLLAEITPDKAFQDKLYPFTWDAVRYNGKLIAYPIAVEALSLIYNKDLLPNPPKTWEEIPALDKELKAKGKSALMFNLQEPYFTWPLIAADGGYAFKYENGKYDIKDVGVDNAGAKAGLTFLVDLIKNKHMNADTDYSIAEAAFNKGETAMTINGPWAWSNIDTSKVNYGVTVLPTFKGQPSKPFVGVLSAGINAASPNKELAKEFLENYLLTDEGLEAVNKDKPLGAVALKSYEEELAKDPRIAATMENAQKGEIMPNIPQMSAFWYAVRTAVINAASGRQTVDEALKDAQTGGSGENLYFQSSDNGPQNQRNAPRITFGGPSDSTGSNQNGERSGARSKQRRPQGLPNNTASWFTALTQHGKEDLKFPRGQGVPINTNSSPDDQIGYYRRATRRIRGGDGKMKDLSPRWYFYYLGTGPEAGLPYGANKDGIIWVATEGALNTPKDHIGTRNPANQAAIVLQLPQGTTLPKGFYAEGSRGGSQASSRSSSRSRNSSRNSTPGSSRGTSPARMAGNGGDAALALLLLDRLNQLESKMSGKGQQQQGQTVTKKSAAEASKKPRQKRTATKAYNVTQAFGRRGPEQTQGNFGDQELIRQGTDYKHWPQIAQFAPSASAFFGMSRIGMEVTPSGTWLTYTGAIKLDDKDPNFKDQVILLNKHIDAYKTFPPTEPKKDKKKKADETQALPQRQKKQQTVTLLPAADLDDFSKQLQQSMSSADSTQAGGSGHHHHHH

SEQ ID NO: 3571 - protein, 806 aa, Artificial Sequence
  Description of Artificial Sequence: Synthetic polypeptide
MKIEEGKLVIWINGDKGYNGLAEVGKKFEKDTGIKVTVEHPDKLEEKFPQVAATGDGPDIIFWAHDRFGGYAQSGLLAEITPDKAFQDKLYPFTWDAVRYNGKLIAYPIAVEALSLIYNKDLLPNPPKTWEEIPALDKELKAKGKSALMFNLQEPYFTWPLIAADGGYAFKYENGKYDIKDVGVDNAGAKAGLTFLVDLIKNKHMNADTDYSIAEAAFNKGETAMTINGPWAWSNIDTSKVNYGVTVLPTFKGQPSKPFVGVLSAGINAASPNKELAKEFLENYLLTDEGLEAVNKDKPLGAVALKSYEEELAKDPRIAATMENAQKGEIMPNIPQMSAFWYAVRTAVINAASGRQTVDEALKDAQTGGSGENLYFQSSDNGPQNQRNAPRITFGGPSDSTGSNQNGERSGARSKQRRPQGLPNNTASWFTALTQHGKEDLKFPRGQGVPINTNSSPDDQIGYYRRATRRIRGGDGKMKDLSPRWYFYYLGTGPEAGLPYGANKDGIIWVATEGALNTPKDHIGTRNPANNAAIVLQLPQGTTLPKGFYAEGSRGGSQASSRSSSRSRNSSRNSTPGSSRGTSPARMAGNGGDAALALLLLDRLNQLESKMSGKGQQQQGQTVTKKSAAEASKKPRQKRTATKAYNVTQAFGRRGPEQTQGNFGDEELIRQGTDYKHWPQIAQFAPSASAFFGMSRIGMEVTPSGTWLTYTGAIKLDDKDPNFKDQVILLNKHIDAYKTFPPTEPKKDKKKKADETQALPQRQKKQQTVTLLPAADLDDFSKQLQQSMSSADSTQAGGSGHHHHHH

SEQ ID NO: 3572 - protein, 806 aa, Artificial Sequence
  Description of Artificial Sequence: Synthetic polypeptide
MKIEEGKLVIWINGDKGYNGLAEVGKKFEKDTGIKVTVEHPDKLEEKFPQVAATGDGPDIIFWAHDRFGGYAQSGLLAEITPDKAFQDKLYPFTWDAVRYNGKLIAYPIAVEALSLIYNKDLLPNPPKTWEEIPALDKELKAKGKSALMFNLQEPYFTWPLIAADGGYAFKYENGKYDIKDVGVDNAGAKAGLTFLVDLIKNKHMNADTDYSIAEAAFNKGETAMTINGPWAWSNIDTSKVNYGVTVLPTFKGQPSKPFVGVLSAGINAASPNKELAKEFLENYLLTDEGLEAVNKDKPLGAVALKSYEEELAKDPRIAATMENAQKGEIMPNIPQMSAFWYAVRTAVINAASGRQTVDEALKDAQTGGSGENLYFQSSDNGPQNQRNAPRITFGGPSDSTGSNQNGERSGARSKQRRPQGLPNNTASWFTALTQHGKEDLKFPRGQGVPINTNSSPDDQIGYYRRATRRIRGGDGKMKDLSPRWYFYYLGTGPEAGLPYGANKDGIIWVATEGALNTPKDHIGTRNPANNAAIVLQLPQGTTLPKGFYAEGSRGGSQASSRSSSRSRNSSRNSTPGSSRGTSPARMAGNGGDAALALLLLDRLNQLESKMSGKGQQQQGQTVTKKSAAEASKKPRQKRTATKAYNVTQAFGRRGPEQTQGNFGDQELLRQGTDYKHWPQIAQFAPSASAFFGMSRIGMEVTPSGTWLTYTGAIKLDDKDPNFKDQVILLNKHIDAYKTFPPTEPKKDKKKKADETQALPQRQKKQQTVTLLPAADLDDFSKQLQQSMSSADSTQAGGSGHHHHHH

SEQ ID NO: 3573 - protein, 806 aa, Artificial Sequence
  Description of Artificial Sequence: Synthetic polypeptide
MKIEEGKLVIWINGDKGYNGLAEVGKKFEKDTGIKVTVEHPDKLEEKFPQVAATGDGPDIIFWAHDRFGGYAQSGLLAEITPDKAFQDKLYPFTWDAVRYNGKLIAYPIAVEALSLIYNKDLLPNPPKTWEEIPALDKELKAKGKSALMFNLQEPYFTWPLIAADGGYAFKYENGKYDIKDVGVDNAGAKAGLTFLVDLIKNKHMNADTDYSIAEAAFNKGETAMTINGPWAWSNIDTSKVNYGVTVLPTFKGQPSKPFVGVLSAGINAASPNKELAKEFLENYLLTDEGLEAVNKDKPLGAVALKSYEEELAKDPRIAATMENAQKGEIMPNIPQMSAFWYAVRTAVINAASGRQTVDEALKDAQTGGSGENLYFQSSDNGPQNQRNAPRITFGGPSDSTGSNQNGERSGARSKQRRPQGLPNNTASWFTALTQHGKEDLKFPRGQGVPINTNSSPDDQIGYYRRATRRIRGGDGKMKDLSPRWYFYYLGTGPEAGLPYGANKDGITWVATEGALNTPKDHIGTRNPANNAAIVLQLPQGTTLPKGFYAEGSRGGSQASSRSSSRSRNSSRNSTPGSSRGTSPARMAGNGGDAALALLLLDRLNQLESKMSGKGQQQQGQTVTKKSAAEASKKPRQKRTATKAYNVTQAFGRRGPEQTQGNFGDQELIRQGTDYKHWPQIAQFAPSASAFFGMSRIGMEVTPSGTWLTYTGAIKLDDKDPNFKDQVILLNKHIDAYKTFPPTEPKKDKKKKADETQALPQRQKKQQTVTLLPAADLDDFSKQLQQSMSSADSTQAGGSGHHHHHH

SEQ ID NO: 3574 - protein, 806 aa, Artificial Sequence
  Description of Artificial Sequence: Synthetic polypeptide
MKIEEGKLVIWINGDKGYNGLAEVGKKFEKDTGIKVTVEHPDKLEEKFPQVAATGDGPDIIFWAHDRFGGYAQSGLLAEITPDKAFQDKLYPFTWDAVRYNGKLIAYPIAVEALSLIYNKDLLPNPPKTWEEIPALDKELKAKGKSALMFNLQEPYFTWPLIAADGGYAFKYENGKYDIKDVGVDNAGAKAGLTFLVDLIKNKHMNADTDYSIAEAAFNKGETAMTINGPWAWSNIDTSKVNYGVTVLPTFKGQPSKPFVGVLSAGINAASPNKELAKEFLENYLLTDEGLEAVNKDKPLGAVALKSYEEELAKDPRIAATMENAQKGEIMPNIPQMSAFWYAVRTAVINAASGRQTVDEALKDAQTGGSGENLYFQSSDNGPQNQRNAPRITFGGPSDSTGSNQNGERSGARSKQRRPQGLPNNTASWFTALTQHGKEDLKFPRGQGVPINTNSSPDDQIGYYRRATRRIRGGDGKMKDLSPRWYFYYLGTGPEAGLPYGANKDGIIWVATEGALNTPKDHIGTRNPANNAAIVLQLPQGTTLPKGFYAEGSRGGSQASSRSSSRSRNSSRNSTPGSSRGTSPARMAGNGGDAALALLLLDRLNQLESKMSGKGQQQQGQTVTKKSAAEASKKPRQKRTATKAYNVTQAFGRRGPEQTQGNFGDQEMIRQGTDYKHWPQIAQFAPSASAFFGMSRIGMEVTPSGTWLTYTGAIKLDDKDPNFKDQVILLNKHIDAYKTFPPTEPKKDKKKKADETQALPQRQKKQQTVTLLPAADLDDFSKQLQQSMSSADSTQAGGSGHHHHHH

SEQ ID NO: 3575 - protein, 806 aa, Artificial Sequence
  Description of Artificial Sequence: Synthetic polypeptide
MKIEEGKLVIWINGDKGYNGLAEVGKKFEKDTGIKVTVEHPDKLEEKFPQVAATGDGPDIIFWAHDRFGGYAQSGLLAEITPDKAFQDKLYPFTWDAVRYNGKLIAYPIAVEALSLIYNKDLLPNPPKTWEEIPALDKELKAKGKSALMFNLQEPYFTWPLIAADGGYAFKYENGKYDIKDVGVDNAGAKAGLTFLVDLIKNKHMNADTDYSIAEAAFNKGETAMTINGPWAWSNIDTSKVNYGVTVLPTFKGQPSKPFVGVLSAGINAASPNKELAKEFLENYLLTDEGLEAVNKDKPLGAVALKSYEEELAKDPRIAATMENAQKGEIMPNIPQMSAFWYAVRTAVINAASGRQTVDEALKDAQTGGSGENLYFQSSDNGPQNQRNAPRITFGGPSDSTGSNQNGERSGARSKQRRPQGLPNNTASWFTALTQHGKEDLKFPRGQGVPINTNSSPDDQIGYYRRATRRIRGGDGKMKDLSPRWYFYYLGTGPEAGLPYGANKDGIIWVATEGALNTPKDHIGTRNPANNAAIVLQLPQGTTLPKGFYAEGSRGGSQASSRSSSRSRNSSRNSTPGSSRGTSPARMAGNGGDAALALLLLDRLNQLESKMSGKGQQQQGQTVTKKSAAEASKKPRQKRTATKAYNVTQAFGRRGPEQTQGNFGDQNLIRQGTDYKHWPQIAQFAPSASAFFGMSRIGMEVTPSGTWLTYTGAIKLDDKDPNFKDQVILLNKHIDAYKTFPPTEPKKDKKKKADETQALPQRQKKQQTVTLLPAADLDDFSKQLQQSMSSADSTQAGGSGHHHHHH

SEQ ID NO: 3576 - protein, 806 aa, Artificial Sequence
  Description of Artificial Sequence: Synthetic polypeptide
MKIEEGKLVIWINGDKGYNGLAEVGKKFEKDTGIKVTVEHPDKLEEKFPQVAATGDGPDIIFWAHDRFGGYAQSGLLAEITPDKAFQDKLYPFTWDAVRYNGKLIAYPIAVEALSLIYNKDLLPNPPKTWEEIPALDKELKAKGKSALMFNLQEPYFTWPLIAADGGYAFKYENGKYDIKDVGVDNAGAKAGLTFLVDLIKNKHMNADTDYSIAEAAFNKGETAMTINGPWAWSNIDTSKVNYGVTVLPTFKGQPSKPFVGVLSAGINAASPNKELAKEFLENYLLTDEGLEAVNKDKPLGAVALKSYEEELAKDPRIAATMENAQKGEIMPNIPQMSAFWYAVRTAVINAASGRQTVDEALKDAQTGGSGENLYFQSSDNGPQNQRNAPRITFGGPSDSTGSNQNGERSGARSKQRRPQGLPNNTASWFTALTQHGKEDLKFPRGQGVPINTNSSPDDQIGYYRRATRRIRGGDGKMKDLSPRWYFYYLGTGPEAGLPYGANKDGIIWVATEGALNTPKDHIGTRNPANNAAIVLQLPAGTTLPKGFYAEGSRGGSQASSRSSSRSRNSSRNSTPGSSRGTSPARMAGNGGDAALALLLLDRLNQLESKMSGKGQQQQGQTVTKKSAAEASKKPRQKRTATKAYNVTQAFGRRGPEQTQGNFGDQELIRQGTDYKHWPQIAQFAPSASAFFGMSRIGMEVTPSGTWLTYTGAIKLDDKDPNFKDQVILLNKHIDAYKTFPPTEPKKDKKKKADETQALPQRQKKQQTVTLLPAADLDDFSKQLQQSMSSADSTQAGGSGHHHHHH

SEQ ID NO: 3577 - protein, 806 aa, Artificial Sequence
  Description of Artificial Sequence: Synthetic polypeptide
MKIEEGKLVIWINGDKGYNGLAEVGKKFEKDTGIKVTVEHPDKLEEKFPQVAATGDGPDIIFWAHDRFGGYAQSGLLAEITPDKAFQDKLYPFTWDAVRYNGKLIAYPIAVEALSLIYNKDLLPNPPKTWEEIPALDKELKAKGKSALMFNLQEPYFTWPLIAADGGYAFKYENGKYDIKDVGVDNAGAKAGLTFLVDLIKNKHMNADTDYSIAEAAFNKGETAMTINGPWAWSNIDTSKVNYGVTVLPTFKGQPSKPFVGVLSAGINAASPNKELAKEFLENYLLTDEGLEAVNKDKPLGAVALKSYEEELAKDPRIAATMENAQKGEIMPNIPQMSAFWYAVRTAVINAASGRQTVDEALKDAQTGGSGENLYFQSSDNGPQNQRNAPRITFGGPSDSTGSNQNGERSGARSKQRRPQGLPNNTASWFTALTQHGKEDLKFPRGQGVPINTNSSPDDQIGYYRRATRRIRGGDGKMKDLPPRWYFYYLGTGPEAGLPYGANKDGIIWVATEGALNTPKDHIGTRNPANNAAIVLQLPQGTTLPKGFYAEGSRGGSQASSRSSSRSRNSSRNSTPGSSRGTSPARMAGNGGDAALALLLLDRLNQLESKMSGKGQQQQGQTVTKKSAAEASKKPRQKRTATKAYNVTQAFGRRGPEQTQGNFGDQELIRQGTDYKHWPQIAQFAPSASAFFGMSRIGMEVTPSGTWLTYTGAIKLDDKDPNFKDQVILLNKHIDAYKTFPPTEPKKDKKKKADETQALPQRQKKQQTVTLLPAADLDDFSKQLQQSMSSADSTQAGGSGHHHHHH

SEQ ID NO: 3578 - protein, 806 aa, Artificial Sequence
  Description of Artificial Sequence: Synthetic polypeptide
MKIEEGKLVIWINGDKGYNGLAEVGKKFEKDTGIKVTVEHPDKLEEKFPQVAATGDGPDIIFWAHDRFGGYAQSGLLAEITPDKAFQDKLYPFTWDAVRYNGKLIAYPIAVEALSLIYNKDLLPNPPKTWEEIPALDKELKAKGKSALMFNLQEPYFTWPLIAADGGYAFKYENGKYDIKDVGVDNAGAKAGLTFLVDLIKNKHMNADTDYSIAEAAFNKGETAMTINGPWAWSNIDTSKVNYGVTVLPTFKGQPSKPFVGVLSAGINAASPNKELAKEFLENYLLTDEGLEAVNKDKPLGAVALKSYEEELAKDPRIAATMENAQKGEIMPNIPQMSAFWYAVRTAVINAASGRQTVDEALKDAQTGGSGENLYFQSSDNGPQNQRNAPRITFGGPSDSTGSNQNGERSGARSKQRRPQGLPNNTASWFTALTQHGKEDLKFPRGQGVPINTNSSPDDQIGYYRRATRRIRGGDGKMKDLSPRWYFYYLGTGPEAGLPYGANKDGIIWVATEGALNTPKDHIGTRNPANNAAIVLQLPQGTTLPKGFYAEGSRGGSQASSRSSSRSRNSSRNSTPGSSRGTSPARMAGNGGDAALALLLLDRLNQLESKMSGKGQQQQGQTVTKKSAAEASKKPRQKRTATKAYNVTQAFGRRGPKQTQGNFGDQELIRQGTDYKHWPQIAQFAPSASAFFGMSRIGMEVTPSGTWLTYTGAIKLDDKDPNFKDQVILLNKHIDAYKTFPPTEPKKDKKKKADETQALPQRQKKQQTVTLLPAADLDDFSKQLQQSMSSADSTQAGGSGHHHHHH

SEQ ID NO: 3579 - protein, 806 aa, Artificial Sequence
  Description of Artificial Sequence: Synthetic polypeptide
MKIEEGKLVIWINGDKGYNGLAEVGKKFEKDTGIKVTVEHPDKLEEKFPQVAATGDGPDIIFWAHDRFGGYAQSGLLAEITPDKAFQDKLYPFTWDAVRYNGKLIAYPIAVEALSLIYNKDLLPNPPKTWEEIPALDKELKAKGKSALMFNLQEPYFTWPLIAADGGYAFKYENGKYDIKDVGVDNAGAKAGLTFLVDLIKNKHMNADTDYSIAEAAFNKGETAMTINGPWAWSNIDTSKVNYGVTVLPTFKGQPSKPFVGVLSAGINAASPNKELAKEFLENYLLTDEGLEAVNKDKPLGAVALKSYEEELAKDPRIAATMENAQKGEIMPNIPQMSAFWYAVRTAVINAASGRQTVDEALKDAQTGGSGENLYFQSSDNGPQNQRNAPRITFGGPSDSTGSNQNGERSGARSKQRRPQGLPNNTASWFTALTQHGKEDLKFPRGQGVPINTNSSPDDQIGYYRRATRRVRGGDGKMKDLSPRWYFYYLGTGPEAGLPYGANKDGIIWVATEGALNTPKDHIGTRNPANNAAIVLQLPQGTTLPKGFYAEGSRGGSQASSRSSSRSRNSSRNSTPGSSRGTSPARMAGNGGDAALALLLLDRLNQLESKMSGKGQQQQGQTVTKKSAAEASKKPRQKRTATKAYNVTQAFGRRGPEQTQGNFGDQELIRQGTDYKHWPQIAQFAPSASAFFGMSRIGMEVTPSGTWLTYTGAIKLDDKDPNFKDQVILLNKHIDAYKTFPPTEPKKDKKKKADETQALPQRQKKQQTVTLLPAADLDDFSKQLQQSMSSADSTQAGGSGHHHHHH

SEQ ID NO: 3580 - protein, 806 aa, Artificial Sequence
  Description of Artificial Sequence: Synthetic polypeptide
MKIEEGKLVIWINGDKGYNGLAEVGKKFEKDTGIKVTVEHPDKLEEKFPQVAATGDGPDIIFWAHDRFGGYAQSGLLAEITPDKAFQDKLYPFTWDAVRYNGKLIAYPIAVEALSLIYNKDLLPNPPKTWEEIPALDKELKAKGKSALMFNLQEPYFTWPLIAADGGYAFKYENGKYDIKDVGVDNAGAKAGLTFLVDLIKNKHMNADTDYSIAEAAFNKGETAMTINGPWAWSNIDTSKVNYGVTVLPTFKGQPSKPFVGVLSAGINAASPNKELAKEFLENYLLTDEGLEAVNKDKPLGAVALKSYEEELAKDPRIAATMENAQKGEIMPNIPQMSAFWYAVRTAVINAASGRQTVDEALKDAQTGGSGENLYFQSSDNGPQNQRNAPRITFGGPSDSTGSNQNGERSGARSKQRRPQGLPNNTASWFTALTQHGKEDLKFPRGQGVPINTNSSPDDQIGYYRRATRRIRGGDGKMKDLSPRWYFYYLGTGPEAGLPYGANKDGIIWVASEGALNTPKDHIGTRNPANNAAIVLQLPQGTTLPKGFYAEGSRGGSQASSRSSSRSRNSSRNSTPGSSRGTSPARMAGNGGDAALALLLLDRLNQLESKMSGKGQQQQGQTVTKKSAAEASKKPRQKRTATKAYNVTQAFGRRGPEQTQGNFGDQELIRQGTDYKHWPQIAQFAPSASAFFGMSRIGMEVTPSGTWLTYTGAIKLDDKDPNFKDQVILLNKHIDAYKTFPPTEPKKDKKKKADETQALPQRQKKQQTVTLLPAADLDDFSKQLQQSMSSADSTQAGGSGHHHHHH

SEQ ID NO: 3581 - protein, 806 aa, Artificial Sequence
  Description of Artificial Sequence: Synthetic polypeptide
MKIEEGKLVIWINGDKGYNGLAEVGKKFEKDTGIKVTVEHPDKLEEKFPQVAATGDGPDIIFWAHDRFGGYAQSGLLAEITPDKAFQDKLYPFTWDAVRYNGKLIAYPIAVEALSLIYNKDLLPNPPKTWEEIPALDKELKAKGKSALMFNLQEPYFTWPLIAADGGYAFKYENGKYDIKDVGVDNAGAKAGLTFLVDLIKNKHMNADTDYSIAEAAFNKGETAMTINGPWAWSNIDTSKVNYGVTVLPTFKGQPSKPFVGVLSAGINAASPNKELAKEFLENYLLTDEGLEAVNKDKPLGAVALKSYEEELAKDPRIAATMENAQKGEIMPNIPQMSAFWYAVRTAVINAASGRQTVDEALKDAQTGGSGENLYFQSSDNGPQNQRNAPRITFGGPSDSTGSNQNGERSGARSKQRRPQGLPNNTASWFTALTQHGKEDLKFPRGQGVPINTNSSPDDQIGYYRRATRRIRGGDGKMKDLSPRWYFYYLGTGPEAGLPFGANKDGIIWVATEGALNTPKDHIGTRNPANNAAIVLQLPQGTTLPKGFYAEGSRGGSQASSRSSSRSRNSSRNSTPGSSRGTSPARMAGNGGDAALALLLLDRLNQLESKMSGKGQQQQGQTVTKKSAAEASKKPRQKRTATKAYNVTQAFGRRGPEQTQGNFGDQELIRQGTDYKHWPQIAQFAPSASAFFGMSRIGMEVTPSGTWLTYTGAIKLDDKDPNFKDQVILLNKHIDAYKTFPPTEPKKDKKKKADETQALPQRQKKQQTVTLLPAADLDDFSKQLQQSMSSADSTQAGGSGHHHHHH

SEQ ID NO: 3582 - protein, 806 aa, Artificial Sequence
  Description of Artificial Sequence: Synthetic polypeptide
MKIEEGKLVIWINGDKGYNGLAEVGKKFEKDTGIKVTVEHPDKLEEKFPQVAATGDGPDIIFWAHDRFGGYAQSGLLAEITPDKAFQDKLYPFTWDAVRYNGKLIAYPIAVEALSLIYNKDLLPNPPKTWEEIPALDKELKAKGKSALMFNLQEPYFTWPLIAADGGYAFKYENGKYDIKDVGVDNAGAKAGLTFLVDLIKNKHMNADTDYSIAEAAFNKGETAMTINGPWAWSNIDTSKVNYGVTVLPTFKGQPSKPFVGVLSAGINAASPNKELAKEFLENYLLTDEGLEAVNKDKPLGAVALKSYEEELAKDPRIAATMENAQKGEIMPNIPQMSAFWYAVRTAVINAASGRQTVDEALKDAQTGGSGENLYFQSSDNGPQNQRNAPRITFGGPSDSTGSNQNGERSGARSKQRRPQGLPNNTASWFTALTQHGKEDLKFPRGQGVPINTNSSPDDQIGYYRRATRRIRGGDGKMKDLSPRWYFYYLGTGPEAGLPYGANKDGIIWVATEGALNTPKDHIGTRNPANNAAIVLQLPQGTTLPKGFYAEGSRGGSQASSRSSSRSRNSSRNSTPGSSRGTSPARMAGNGGDAALALLLLDRLNQLESKMSGKGQQQQGQTVTKKSAAEASKKPRQKRTATKAYNVTQAFGRRGPEQTQGNFGDKELIRQGTDYKHWPQIAQFAPSASAFFGMSRIGMEVTPSGTWLTYTGAIKLDDKDPNFKDQVILLNKHIDAYKTFPPTEPKKDKKKKADETQALPQRQKKQQTVTLLPAADLDDFSKQLQQSMSSADSTQAGGSGHHHHHH

SEQ ID NO: 3583 - protein, 806 aa, Artificial Sequence
  Description of Artificial Sequence: Synthetic polypeptide
MKIEEGKLVIWINGDKGYNGLAEVGKKFEKDTGIKVTVEHPDKLEEKFPQVAATGDGPDIIFWAHDRFGGYAQSGLLAEITPDKAFQDKLYPFTWDAVRYNGKLIAYPIAVEALSLIYNKDLLPNPPKTWEEIPALDKELKAKGKSALMFNLQEPYFTWPLIAADGGYAFKYENGKYDIKDVGVDNAGAKAGLTFLVDLIKNKHMNADTDYSIAEAAFNKGETAMTINGPWAWSNIDTSKVNYGVTVLPTFKGQPSKPFVGVLSAGINAASPNKELAKEFLENYLLTDEGLEAVNKDKPLGAVALKSYEEELAKDPRIAATMENAQKGEIMPNIPQMSAFWYAVRTAVINAASGRQTVDEALKDAQTGGSGENLYFQSSDNGPQNQRNAPRITFGGPSDSTGSNQNGERSGARSKQRRPQGLPNNTASWFTALTQHGKEDLKFPRGQGVPINTNSSPDDQIGYYRRATRRIRGGDGKMKDLSPRWYFYYLGTGPEAGLPYGANKDGIIWVATEGALNTPKDHIGTRNPANNAAIVLQLPQGTTLPEGFYAEGSRGGSQASSRSSSRSRNSSRNSTPGSSRGTSPARMAGNGGDAALALLLLDRLNQLESKMSGKGQQQQGQTVTKKSAAEASKKPRQKRTATKAYNVTQAFGRRGPEQTQGNFGDQELIRQGTDYKHWPQIAQFAPSASAFFGMSRIGMEVTPSGTWLTYTGAIKLDDKDPNFKDQVILLNKHIDAYKTFPPTEPKKDKKKKADETQALPQRQKKQQTVTLLPAADLDDFSKQLQQSMSSADSTQAGGSGHHHHHH

SEQ ID NO: 3584 - protein, 806 aa, Artificial Sequence
  Description of Artificial Sequence: Synthetic polypeptide
MKIEEGKLVIWINGDKGYNGLAEVGKKFEKDTGIKVTVEHPDKLEEKFPQVAATGDGPDIIFWAHDRFGGYAQSGLLAEITPDKAFQDKLYPFTWDAVRYNGKLIAYPIAVEALSLIYNKDLLPNPPKTWEEIPALDKELKAKGKSALMFNLQEPYFTWPLIAADGGYAFKYENGKYDIKDVGVDNAGAKAGLTFLVDLIKNKHMNADTDYSIAEAAFNKGETAMTINGPWAWSNIDTSKVNYGVTVLPTFKGQPSKPFVGVLSAGINAASPNKELAKEFLENYLLTDEGLEAVNKDKPLGAVALKSYEEELAKDPRIAATMENAQKGEIMPNIPQMSAFWYAVRTAVINAASGRQTVDEALKDAQTGGSGENLYFQSSDNGPQNQRNAPRITFGGPSDSTGSNQNGERSGARSKQRRPQGLPNNTASWFTALTQHGKEDLKFPRGQGVPINTNSSPDDQIGYYRRATRRIRGGDGKMKDLSPRWYFYYLGTGPEAGLPYGANKDGIIWVATEGALNTPKDHIGTRNPANNAAIVLQLPQGTTLPKGFYCEGSRGGSQASSRSSSRSRNSSRNSTPGSSRGTSPARMAGNGGDAALALLLLDRLNQLESKMSGKGQQQQGQTVTKKSAAEASKKPRQKRTATKAYNVTQAFGRRGPEQTQGNFGDQELIRQGTDYKHWPQIAQFAPSASAFFGMSRIGMEVTPSGTWLTYTGAIKLDDKDPNFKDQVILLNKHIDAYKTFPPTEPKKDKKKKADETQALPQRQKKQQTVTLLPAADLDDFSKQLQQSMSSADSTQAGGSGHHHHHH

SEQ ID NO: 3585 - protein, 806 aa, Artificial Sequence
  Description of Artificial Sequence: Synthetic polypeptide
MKIEEGKLVIWINGDKGYNGLAEVGKKFEKDTGIKVTVEHPDKLEEKFPQVAATGDGPDIIFWAHDRFGGYAQSGLLAEITPDKAFQDKLYPFTWDAVRYNGKLIAYPIAVEALSLIYNKDLLPNPPKTWEEIPALDKELKAKGKSALMFNLQEPYFTWPLIAADGGYAFKYENGKYDIKDVGVDNAGAKAGLTFLVDLIKNKHMNADTDYSIAEAAFNKGETAMTINGPWAWSNIDTSKVNYGVTVLPTFKGQPSKPFVGVLSAGINAASPNKELAKEFLENYLLTDEGLEAVNKDKPLGAVALKSYEEELAKDPRIAATMENAQKGEIMPNIPQMSAFWYAVRTAVINAASGRQTVDEALKDAQTGGSGENLYFQSSDNGPQNQRNAPRITFGGPSDSTGSNQNGERSGARSKQRRPQGLPNNTASWFTALTQHGKEDLKFPRGQGVPINTNSSPDDQIGYYRRATRRIRGGDGKMKDLSPRWYFYYLGTGPEAGLPYGANKDGIIWVATEGALNTPKDHIGTRNPANNAAIVLQLPQGTELPKGFYAEGSRGGSQASSRSSSRSRNSSRNSTPGSSRGTSPARMAGNGGDAALALLLLDRLNQLESKMSGKGQQQQGQTVTKKSAAEASKKPRQKRTATKAYNVTQAFGRRGPEQTQGNFGDQELIRQGTDYKHWPQIAQFAPSASAFFGMSRIGMEVTPSGTWLTYTGAIKLDDKDPNFKDQVILLNKHIDAYKTFPPTEPKKDKKKKADETQALPQRQKKQQTVTLLPAADLDDFSKQLQQSMSSADSTQAGGSGHHHHHH

SEQ ID NO: 3586 - protein, 806 aa, Artificial Sequence
  Description of Artificial Sequence: Synthetic polypeptide
MKIEEGKLVIWINGDKGYNGLAEVGKKFEKDTGIKVTVEHPDKLEEKFPQVAATGDGPDIIFWAHDRFGGYAQSGLLAEITPDKAFQDKLYPFTWDAVRYNGKLIAYPIAVEALSLIYNKDLLPNPPKTWEEIPALDKELKAKGKSALMFNLQEPYFTWPLIAADGGYAFKYENGKYDIKDVGVDNAGAKAGLTFLVDLIKNKHMNADTDYSIAEAAFNKGETAMTINGPWAWSNIDTSKVNYGVTVLPTFKGQPSKPFVGVLSAGINAASPNKELAKEFLENYLLTDEGLEAVNKDKPLGAVALKSYEEELAKDPRIAATMENAQKGEIMPNIPQMSAFWYAVRTAVINAASGRQTVDEALKDAQTGGSGENLYFQSSDNGPQNQRNAPRITFGGPSDSTGSNQNGERSGARSKQRRPQGLPNNTASWFTALTQHGKEDLKFPRGQGVPINTNSSPDDQIGYYRRATRRIRGGDGKMKDLSPRWYFYYLGTGPEAGLPYGANKDGIIWVATEGALNTPKDHIGTRNPANNAAIVLQLPQGTTLPKGFYAEGSRGGSQASSRSSSRSRNSSRNSTPGSSRGTSPARMAGNGGDAALALLLLDRLNQLESKMSGKGQQQQGQTVTKKSAAEASKKPRQKRTATKAYNVTQAFGRRGPDQTQGNFGDQELIRQGTDYKHWPQIAQFAPSASAFFGMSRIGMEVTPSGTWLTYTGAIKLDDKDPNFKDQVILLNKHIDAYKTFPPTEPKKDKKKKADETQALPQRQKKQQTVTLLPAADLDDFSKQLQQSMSSADSTQAGGSGHHHHHH

SEQ ID NO: 3587 - protein, 806 aa, Artificial Sequence
  Description of Artificial Sequence: Synthetic polypeptide
MKIEEGKLVIWINGDKGYNGLAEVGKKFEKDTGIKVTVEHPDKLEEKFPQVAATGDGPDIIFWAHDRFGGYAQSGLLAEITPDKAFQDKLYPFTWDAVRYNGKLIAYPIAVEALSLIYNKDLLPNPPKTWEEIPALDKELKAKGKSALMFNLQEPYFTWPLIAADGGYAFKYENGKYDIKDVGVDNAGAKAGLTFLVDLIKNKHMNADTDYSIAEAAFNKGETAMTINGPWAWSNIDTSKVNYGVTVLPTFKGQPSKPFVGVLSAGINAASPNKELAKEFLENYLLTDEGLEAVNKDKPLGAVALKSYEEELAKDPRIAATMENAQKGEIMPNIPQMSAFWYAVRTAVINAASGRQTVDEALKDAQTGGSGENLYFQSSDNGPQNQRNAPRITFGGPSDSTGSNQNGERSGARSKQRRPQGLPNNTASWFTALTQHGKEDLKFPRGQGVPINTNSSPDDQIGYYRRATRRIRGGDGKMKDLSPRWYFYYLGTGPEAGLPYGANKDGIIWVATEGALNTPKDHIGTRNPANNAAIVLQLPQGTTLPKGFYAEGSRGGSQASSRSSSRSRNSSRNSTPGSSRGTSPARMAGNGGDAALALLLLDRLNQLESKMSGKGQQQQGQTVTKKSADEASKKPRQKRTATKAYNVTQAFGRRGPEQTQGNFGDQELIRQGTDYKHWPQIAQFAPSASAFFGMSRIGMEVTPSGTWLTYTGAIKLDDKDPNFKDQVILLNKHIDAYKTFPPTEPKKDKKKKADETQALPQRQKKQQTVTLLPAADLDDFSKQLQQSMSSADSTQAGGSGHHHHHH

SEQ ID NO: 3588 - protein, 806 aa, Artificial Sequence
  Description of Artificial Sequence: Synthetic polypeptide
MKIEEGKLVIWINGDKGYNGLAEVGKKFEKDTGIKVTVEHPDKLEEKFPQVAATGDGPDIIFWAHDRFGGYAQSGLLAEITPDKAFQDKLYPFTWDAVRYNGKLIAYPIAVEALSLIYNKDLLPNPPKTWEEIPALDKELKAKGKSALMFNLQEPYFTWPLIAADGGYAFKYENGKYDIKDVGVDNAGAKAGLTFLVDLIKNKHMNADTDYSIAEAAFNKGETAMTINGPWAWSNIDTSKVNYGVTVLPTFKGQPSKPFVGVLSAGINAASPNKELAKEFLENYLLTDEGLEAVNKDKPLGAVALKSYEEELAKDPRIAATMENAQKGEIMPNIPQMSAFWYAVRTAVINAASGRQTVDEALKDAQTGGSGENLYFQSSDNGPQNQRNAPRITFGGPSDSTGSNQNGERSGARSKQRRPQGLPNNTASWFTALTQHGKEDLKFPRGQGVPINNNSSPDDQIGYYRRATRRIRGGDGKMKDLSPRWYFYYLGTGPEAGLPYGANKDGIIWVATEGALNTPKDHIGTRNPANNAAIVLQLPQGTTLPKGFYAEGSRGGSQASSRSSSRSRNSSRNSTPGSSRGTSPARMAGNGGDAALALLLLDRLNQLESKMSGKGQQQQGQTVTKKSAAEASKKPRQKRTATKAYNVTQAFGRRGPEQTQGNFGDQELIRQGTDYKHWPQIAQFAPSASAFFGMSRIGMEVTPSGTWLTYTGAIKLDDKDPNFKDQVILLNKHIDAYKTFPPTEPKKDKKKKADETQALPQRQKKQQTVTLLPAADLDDFSKQLQQSMSSADSTQAGGSGHHHHHH

SEQ ID NO: 3589 - protein, 806 aa, Artificial Sequence
  Description of Artificial Sequence: Synthetic polypeptide
MKIEEGKLVIWINGDKGYNGLAEVGKKFEKDTGIKVTVEHPDKLEEKFPQVAATGDGPDIIFWAHDRFGGYAQSGLLAEITPDKAFQDKLYPFTWDAVRYNGKLIAYPIAVEALSLIYNKDLLPNPPKTWEEIPALDKELKAKGKSALMFNLQEPYFTWPLIAADGGYAFKYENGKYDIKDVGVDNAGAKAGLTFLVDLIKNKHMNADTDYSIAEAAFNKGETAMTINGPWAWSNIDTSKVNYGVTVLPTFKGQPSKPFVGVLSAGINAASPNKELAKEFLENYLLTDEGLEAVNKDKPLGAVALKSYEEELAKDPRIAATMENAQKGEIMPNIPQMSAFWYAVRTAVINAASGRQTVDEALKDAQTGGSGENLYFQSSDNGPQNQRNAPRITFGGPSDSTGSNQNGERSGARSKQRRPQGLPNNTASWFTALTQHGKEDLKFPRGQGVPINTNSSPDDQIGYYRRATRRIRGGDGKMKDLSPRWYFYYLGTGPEAGLPYGANKDGIIWVATEGALNTPKDHIGTRNPANNAAIVLQLPQGTTLPKGFYAEGSRGGSQASSRSSSRSRNSSRNSTPGESRGTSPARMAGNGGDAALALLLLDRLNQLESKMSGKGQQQQGQTVTKKSAAEASKKPRQKRTATKAYNVTQAFGRRGPEQTQGNFGDQELIRQGTDYKHWPQIAQFAPSASAFFGMSRIGMEVTPSGTWLTYTGAIKLDDKDPNFKDQVILLNKHIDAYKTFPPTEPKKDKKKKADETQALPQRQKKQQTVTLLPAADLDDFSKQLQQSMSSADSTQAGGSGHHHHHH

SEQ ID NO: 3590 - protein, 806 aa, Artificial Sequence
  Description of Artificial Sequence: Synthetic polypeptide
MKIEEGKLVIWINGDKGYNGLAEVGKKFEKDTGIKVTVEHPDKLEEKFPQVAATGDGPDIIFWAHDRFGGYAQSGLLAEITPDKAFQDKLYPFTWDAVRYNGKLIAYPIAVEALSLIYNKDLLPNPPKTWEEIPALDKELKAKGKSALMFNLQEPYFTWPLIAADGGYAFKYENGKYDIKDVGVDNAGAKAGLTFLVDLIKNKHMNADTDYSIAEAAFNKGETAMTINGPWAWSNIDTSKVNYGVTVLPTFKGQPSKPFVGVLSAGINAASPNKELAKEFLENYLLTDEGLEAVNKDKPLGAVALKSYEEELAKDPRIAATMENAQKGEIMPNIPQMSAFWYAVRTAVINAASGRQTVDEALKDAQTGGSGENLYFQSSDNGPQNQRNAPRITFGGPSDSTGSNQNGERSGARSKQRRPQGLPNNTASWFTALTQHGKEDLKFPRGQGVPINTNSSPDDQIGYYRRATRRIRGGDGKMKDLSPRWYFYYLGTGPEAGLPYGANKDGIIWVATEGALNTPKDHIGTRNPANNAAIVLQLPQGTTLPKGFYMEGSRGGSQASSRSSSRSRNSSRNSTPGSSRGTSPARMAGNGGDAALALLLLDRLNQLESKMSGKGQQQQGQTVTKKSAAEASKKPRQKRTATKAYNVTQAFGRRGPEQTQGNFGDQELIRQGTDYKHWPQIAQFAPSASAFFGMSRIGMEVTPSGTWLTYTGAIKLDDKDPNFKDQVILLNKHIDAYKTFPPTEPKKDKKKKADETQALPQRQKKQQTVTLLPAADLDDFSKQLQQSMSSADSTQAGGSGHHHHHH

SEQ ID NO: 3591 - protein, 806 aa, Artificial Sequence
  Description of Artificial Sequence: Synthetic polypeptide
MKIEEGKLVIWINGDKGYNGLAEVGKKFEKDTGIKVTVEHPDKLEEKFPQVAATGDGPDIIFWAHDRFGGYAQSGLLAEITPDKAFQDKLYPFTWDAVRYNGKLIAYPIAVEALSLIYNKDLLPNPPKTWEEIPALDKELKAKGKSALMFNLQEPYFTWPLIAADGGYAFKYENGKYDIKDVGVDNAGAKAGLTFLVDLIKNKHMNADTDYSIAEAAFNKGETAMTINGPWAWSNIDTSKVNYGVTVLPTFKGQPSKPFVGVLSAGINAASPNKELAKEFLENYLLTDEGLEAVNKDKPLGAVALKSYEEELAKDPRIAATMENAQKGEIMPNIPQMSAFWYAVRTAVINAASGRQTVDEALKDAQTGGSGENLYFQSSDNGPQNQRNAPRITFGGPSDSTGSNQNGERSGARSKQRRPQGLPNNTASWFTALTQHGKEDLKFPRGQGVPINTNSSPDDQIGYYRRATRRIRGGDGKMKDLSPRWYFYYLGTGPEAGLPYGANKDGIIWVATEGALNTPKDHIGTRNPANNAAIVLQLPQGTTLPKGFYAEGSRGGSQASSRSSSRSRNSSRNSTPGSSRGTSPARMAGNGGDAALALLLLDRLNQLESKMSGKGQQQQGQTVTKKSAAEASKKPRQKRTATKAYNVTQAFGRRGPEQTQGNFGDQELIRQGTDYKHWPQIAQFAPSASAFFGMSRIGMERTPSGTWLTYTGAIKLDDKDPNFKDQVILLNKHIDAYKTFPPTEPKKDKKKKADETQALPQRQKKQQTVTLLPAADLDDFSKQLQQSMSSADSTQAGGSGHHHHHH

SEQ ID NO: 3592 - protein, 806 aa, Artificial Sequence
  Description of Artificial Sequence: Synthetic polypeptide
MKIEEGKLVIWINGDKGYNGLAEVGKKFEKDTGIKVTVEHPDKLEEKFPQVAATGDGPDIIFWAHDRFGGYAQSGLLAEITPDKAFQDKLYPFTWDAVRYNGKLIAYPIAVEALSLIYNKDLLPNPPKTWEEIPALDKELKAKGKSALMFNLQEPYFTWPLIAADGGYAFKYENGKYDIKDVGVDNAGAKAGLTFLVDLIKNKHMNADTDYSIAEAAFNKGETAMTINGPWAWSNIDTSKVNYGVTVLPTFKGQPSKPFVGVLSAGINAASPNKELAKEFLENYLLTDEGLEAVNKDKPLGAVALKSYEEELAKDPRIAATMENAQKGEIMPNIPQMSAFWYAVRTAVINAASGRQTVDEALKDAQTGGSGENLYFQSSDNGPQNQRNAPRITFGGPSDSTGSNQNGERSGARSKQRRPQGLPNNTASWFTALTQHGKEDLSFPRGQGVPINTNSSPDDQIGYYRRATRRIRGGDGKMKDLSPRWYFYYLGTGPEAGLPYGANKDGIIWVATEGALNTPKDHIGTRNPANNAAIVLQLPQGTTLPKGFYAEGSRGGSQASSRSSSRSRNSSRNSTPGSSRGTSPARMAGNGGDAALALLLLDRLNQLESKMSGKGQQQQGQTVTKKSAAEASKKPRQKRTATKAYNVTQAFGRRGPEQTQGNFGDQELIRQGTDYKHWPQIAQFAPSASAFFGMSRIGMEVTPSGTWLTYTGAIKLDDKDPNFKDQVILLNKHIDAYKTFPPTEPKKDKKKKADETQALPQRQKKQQTVTLLPAADLDDFSKQLQQSMSSADSTQAGGSGHHHHHH

SEQ ID NO: 3593 - protein, 806 aa, Artificial Sequence
  Description of Artificial Sequence: Synthetic polypeptide
MKIEEGKLVIWINGDKGYNGLAEVGKKFEKDTGIKVTVEHPDKLEEKFPQVAATGDGPDIIFWAHDRFGGYAQSGLLAEITPDKAFQDKLYPFTWDAVRYNGKLIAYPIAVEALSLIYNKDLLPNPPKTWEEIPALDKELKAKGKSALMFNLQEPYFTWPLIAADGGYAFKYENGKYDIKDVGVDNAGAKAGLTFLVDLIKNKHMNADTDYSIAEAAFNKGETAMTINGPWAWSNIDTSKVNYGVTVLPTFKGQPSKPFVGVLSAGINAASPNKELAKEFLENYLLTDEGLEAVNKDKPLGAVALKSYEEELAKDPRIAATMENAQKGEIMPNIPQMSAFWYAVRTAVINAASGRQTVDEALKDAQTGGSGENLYFQSSDNGPQNQRNAPRITFGGPSDSTGSNQNGERSGARSKQRRPQGLPNNTASWFTALTQHGKEDLKFPRGQGVPINTNSSPDDQIGYYRRATRRIRGGDGKMKDLSPRWYFYYLGTGPEAGLPYGANKDGIIWVATEGALNTPKDHIGTRNPANNAAIVLQLPQGTTLPKGFYAEGSRGGSQASSRSSSRSRNSSRNSTPGSERGTEPARMAGNGGDAALALLLLDRLNQLESKMSGKGQQQQGQTVTKKSAAEASKKPRQKRTATKAYNVTQAFGRRGPEQTQGNFGDQELIRQGTDYKHWPQIAQFAPSASAFFGMSRIGMEVTPSGTWLTYTGAIKLDDKDPNFKDQVILLNKHIDAYKTFPPTEPKKDKKKKADETQALPQRQKKQQTVTLLPAADLDDFSKQLQQSMSSADSTQAGGSGHHHHHH

SEQ ID NO: 3594 - protein, 806 aa, Artificial Sequence
  Description of Artificial Sequence: Synthetic polypeptide
MKIEEGKLVIWINGDKGYNGLAEVGKKFEKDTGIKVTVEHPDKLEEKFPQVAATGDGPDIIFWAHDRFGGYAQSGLLAEITPDKAFQDKLYPFTWDAVRYNGKLIAYPIAVEALSLIYNKDLLPNPPKTWEEIPALDKELKAKGKSALMFNLQEPYFTWPLIAADGGYAFKYENGKYDIKDVGVDNAGAKAGLTFLVDLIKNKHMNADTDYSIAEAAFNKGETAMTINGPWAWSNIDTSKVNYGVTVLPTFKGQPSKPFVGVLSAGINAASPNKELAKEFLENYLLTDEGLEAVNKDKPLGAVALKSYEEELAKDPRIAATMENAQKGEIMPNIPQMSAFWYAVRTAVINAASGRQTVDEALKDAQTGGSGENLYFQSSDNGPQNQRNAPRITFGGPSDSTGSNQNGERSGARSKQRRPQGLPNNTASWFTALTQHGKEDLKFPRGQGVPINTNSSPDDQIGYYRRATRRIRGGDGKMKDLSPRWYFYYLGTGPEAGLPYGANKDGIIWVATEGALTTPKDHIGTRNPANNAAIVLQLPQGTTLPKGFYAEGSRGGSQASSRSSSRSRNSSRNSTPGSSRGTSPARMAGNGGDAALALLLLDRLNQLESKMSGKGQQQQGQTVTKKSAAEASKKPRQKRTATKAYNVTQAFGRRGPEQTQGNFGDQELIRQGTDYKHWPQIAQFAPSASAFFGMSRIGMEVTPSGTWLTYTGAIKLDDKDPNFKDQVILLNKHIDAYKTFPPTEPKKDKKKKADETQALPQRQKKQQTVTLLPAADLDDFSKQLQQSMSSADSTQAGGSGHHHHHH

SEQ ID NO: 3595 - protein, 806 aa, Artificial Sequence
  Description of Artificial Sequence: Synthetic polypeptide
MKIEEGKLVIWINGDKGYNGLAEVGKKFEKDTGIKVTVEHPDKLEEKFPQVAATGDGPDIIFWAHDRFGGYAQSGLLAEITPDKAFQDKLYPFTWDAVRYNGKLIAYPIAVEALSLIYNKDLLPNPPKTWEEIPALDKELKAKGKSALMFNLQEPYFTWPLIAADGGYAFKYENGKYDIKDVGVDNAGAKAGLTFLVDLIKNKHMNADTDYSIAEAAFNKGETAMTINGPWAWSNIDTSKVNYGVTVLPTFKGQPSKPFVGVLSAGINAASPNKELAKEFLENYLLTDEGLEAVNKDKPLGAVALKSYEEELAKDPRIAATMENAQKGEIMPNIPQMSAFWYAVRTAVINAASGRQTVDEALKDAQTGGSGENLYFQSSDNGPQNQRNAPRITFGGPSDSTGSNQNGERSGARSKQRRPQGLPNNTASWFTALTQHGKEDLKFPRGQGVPINTNSSPDDQIGYYRRATRRIRGGDGKMKDLSPRWYFYYLGTGPEAGLPYGANKDGIIWVATEGALNTPKDHIGTRNPANNAAIVLQLPQGTTLPKGFYAEGSRGGSQASSRSSSRSRNSSRNSTPGSSRGTSPARMAGNGGDAALALLLLDRLNQLESKMSGKGQQQQGQTVTKKSAAEASKKPRQKRTATKAYNVTQAFGRRGPEQTQGNFGDQELIRQGTDYKHWPQIAQFAPSASAFFGMSRIGMEWTPSGTWLTYTGAIKLDDKDPNFKDQVILLNKHIDAYKTFPPTEPKKDKKKKADETQALPQRQKKQQTVTLLPAADLDDFSKQLQQSMSSADSTQAGGSGHHHHHH

SEQ ID NO: 3596 - protein, 806 aa, Artificial Sequence
  Description of Artificial Sequence: Synthetic polypeptide
MKIEEGKLVIWINGDKGYNGLAEVGKKFEKDTGIKVTVEHPDKLEEKFPQVAATGDGPDIIFWAHDRFGGYAQSGLLAEITPDKAFQDKLYPFTWDAVRYNGKLIAYPIAVEALSLIYNKDLLPNPPKTWEEIPALDKELKAKGKSALMFNLQEPYFTWPLIAADGGYAFKYENGKYDIKDVGVDNAGAKAGLTFLVDLIKNKHMNADTDYSIAEAAFNKGETAMTINGPWAWSNIDTSKVNYGVTVLPTFKGQPSKPFVGVLSAGINAASPNKELAKEFLENYLLTDEGLEAVNKDKPLGAVALKSYEEELAKDPRIAATMENAQKGEIMPNIPQMSAFWYAVRTAVINAASGRQTVDEALKDAQTGGSGENLYFQSSDNGPQNQRNAPRITFGGPSDSTGSNQNGERSGARSKQRRPQGLPNNTASWFTALTQHGKEDLKFPRGQGVPINTNSSPDDQIGYYRRATRRIRGGDGKMKDLSPRWYFYYLGTGPEAGLPYGANKDGIIWVATEGALNTPKDHIGTRNPANNAAIVLQLPQGTTLPKGFYAEGSRGGSQASSRSSSRSRNSSRNSTPGSSRGTSPARMAGNGGDAALALLLLDRLNQLESKMSGKGQQQQGQTVTKKSAAEASKKPRQKRTATKAYNVTQAFGRRGPEQTQGNFGDQELIRQGTDYKHWPQIAQFAPSASAFFGMSRIGMEVTPSGTWLTYTGAIKLDDNDPNFKDQVILLNKHIDAYKTFPPTEPKKDKKKKADETQALPQRQKKQQTVTLLPAADLDDFSKQLQQSMSSADSTQAGGSGHHHHHH

SEQ ID NO: 3597 - protein, 806 aa, Artificial Sequence
  Description of Artificial Sequence: Synthetic polypeptide
MKIEEGKLVIWINGDKGYNGLAEVGKKFEKDTGIKVTVEHPDKLEEKFPQVAATGDGPDIIFWAHDRFGGYAQSGLLAEITPDKAFQDKLYPFTWDAVRYNGKLIAYPIAVEALSLIYNKDLLPNPPKTWEEIPALDKELKAKGKSALMFNLQEPYFTWPLIAADGGYAFKYENGKYDIKDVGVDNAGAKAGLTFLVDLIKNKHMNADTDYSIAEAAFNKGETAMTINGPWAWSNIDTSKVNYGVTVLPTFKGQPSKPFVGVLSAGINAASPNKELAKEFLENYLLTDEGLEAVNKDKPLGAVALKSYEEELAKDPRIAATMENAQKGEIMPNIPQMSAFWYAVRTAVINAASGRQTVDEALKDAQTGGSGENLYFQSSDNGPQNQRNAPRITFGGPSDSTGSNQNGERSGARSKQRRPQGLPNNTASWFTALTQHGKEDLKFPRGQGVPINTNSSPDDQIGYYRRATRRIRGGDGKMKDLSPRWYFYYLGTGPEAGLPYGANHDGIIWVATEGALNTPKDHIGTRNPANNAAIVLQLPQGTTLPKGFYAEGSRGGSQASSRSSSRSRNSSRNSTPGSSRGTSPARMAGNGGDAALALLLLDRLNQLESKMSGKGQQQQGQTVTKKSAAEASKKPRQKRTATKAYNVTQAFGRRGPEQTQGNFGDQELIRQGTDYKHWPQIAQFAPSASAFFGMSRIGMEVTPSGTWLTYTGAIKLDDKDPNFKDQVILLNKHIDAYKTFPPTEPKKDKKKKADETQALPQRQKKQQTVTLLPAADLDDFSKQLQQSMSSADSTQAGGSGHHHHHH

SEQ ID NO: 3598 - protein, 806 aa, Artificial Sequence
  Description of Artificial Sequence: Synthetic polypeptide
MKIEEGKLVIWINGDKGYNGLAEVGKKFEKDTGIKVTVEHPDKLEEKFPQVAATGDGPDIIFWAHDRFGGYAQSGLLAEITPDKAFQDKLYPFTWDAVRYNGKLIAYPIAVEALSLIYNKDLLPNPPKTWEEIPALDKELKAKGKSALMFNLQEPYFTWPLIAADGGYAFKYENGKYDIKDVGVDNAGAKAGLTFLVDLIKNKHMNADTDYSIAEAAFNKGETAMTINGPWAWSNIDTSKVNYGVTVLPTFKGQPSKPFVGVLSAGINAASPNKELAKEFLENYLLTDEGLEAVNKDKPLGAVALKSYEEELAKDPRIAATMENAQKGEIMPNIPQMSAFWYAVRTAVINAASGRQTVDEALKDAQTGGSGENLYFQSSDNGPQNQRNAPRITFGGPSDSTGSNQNGERSGARSKQRRPQGLPNNTASWFTALTQHGKEDLKFPRGQGVPINPNSSPDDQIGYYRRATRRIRGGDGKMKDLSPRWYFYYLGTGPEAGLPYGANKDGIIWVATEGALNTPKDHIGTRNPANNAAIVLQLPQGTTLPKGFYAEGSRGGSQASSRSSSRSRNSSRNSTPGSSRGTSPARMAGNGGDAALALLLLDRLNQLESKMSGKGQQQQGQTVTKKSAAEASKKPRQKRTATKAYNVTQAFGRRGPEQTQGNFGDQELIRQGTDYKHWPQIAQFAPSASAFFGMSRIGMEVTPSGTWLTYTGAIKLDDKDPNFKDQVILLNKHIDAYKTFPPTEPKKDKKKKADETQALPQRQKKQQTVTLLPAADLDDFSKQLQQSMSSADSTQAGGSGHHHHHH

SEQ ID NO: 3599 - protein, 806 aa, Artificial Sequence
  Description of Artificial Sequence: Synthetic polypeptide
MKIEEGKLVIWINGDKGYNGLAEVGKKFEKDTGIKVTVEHPDKLEEKFPQVAATGDGPDIIFWAHDRFGGYAQSGLLAEITPDKAFQDKLYPFTWDAVRYNGKLIAYPIAVEALSLIYNKDLLPNPPKTWEEIPALDKELKAKGKSALMFNLQEPYFTWPLIAADGGYAFKYENGKYDIKDVGVDNAGAKAGLTFLVDLIKNKHMNADTDYSIAEAAFNKGETAMTINGPWAWSNIDTSKVNYGVTVLPTFKGQPSKPFVGVLSAGINAASPNKELAKEFLENYLLTDEGLEAVNKDKPLGAVALKSYEEELAKDPRIAATMENAQKGEIMPNIPQMSAFWYAVRTAVINAASGRQTVDEALKDAQTGGSGENLYFQSSDNGPQNQRNAPRITFGGPSDSTGSNQNGERSGARSKQRRPQGLPNNTASWFTALTQHGKEDLKFPRGQGVPINTNSSPDDQIGYYRRATRRIRGGDGKMKDLSPRWYFYYLGTGPEAGLPYGANKDGIIWVATEGALNTPKDHIGTRNPANNAAIVLQLPQGTTLPKGFYAEGSRGGSQASSRSSSRSRNSSRNSTPGSSRGTSPARMAGNGGDAALALLLLDRLNQLESKMSGKGQQQQGQTVTKKSAAEASKKPRQKRTATKAYNVTQAFGRRGPEQLQGNFGDQELIRQGTDYKHWPQIAQFAPSASAFFGMSRIGMEVTPSGTWLTYTGAIKLDDKDPNFKDQVILLNKHIDAYKTFPPTEPKKDKKKKADETQALPQRQKKQQTVTLLPAADLDDFSKQLQQSMSSADSTQAGGSGHHHHHH

SEQ ID NO: 3600 - protein, 806 aa, Artificial Sequence
  Description of Artificial Sequence: Synthetic polypeptide
MKIEEGKLVIWINGDKGYNGLAEVGKKFEKDTGIKVTVEHPDKLEEKFPQVAATGDGPDIIFWAHDRFGGYAQSGLLAEITPDKAFQDKLYPFTWDAVRYNGKLIAYPIAVEALSLIYNKDLLPNPPKTWEEIPALDKELKAKGKSALMFNLQEPYFTWPLIAADGGYAFKYENGKYDIKDVGVDNAGAKAGLTFLVDLIKNKHMNADTDYSIAEAAFNKGETAMTINGPWAWSNIDTSKVNYGVTVLPTFKGQPSKPFVGVLSAGINAASPNKELAKEFLENYLLTDEGLEAVNKDKPLGAVALKSYEEELAKDPRIAATMENAQKGEIMPNIPQMSAFWYAVRTAVINAASGRQTVDEALKDAQTGGSGENLYFQSSDNGPQNQRNAPRITFGGPSDSTGSNQNGERSGARSKQRRPQGLPNNTASWFTALTQHGKEDLKFPRGQGVPINTNSSPDDQIGYYRRATRRIRGGDGKMKDLSPRWYFYYLGTGPEAGLPYGANKNGIIWVATEGALNTPKDHIGTRNPANNAAIVLQLPQGTTLPKGFYAEGSRGGSQASSRSSSRSRNSSRNSTPGSSRGTSPARMAGNGGDAALALLLLDRLNQLESKMSGKGQQQQGQTVTKKSAAEASKKPRQKRTATKAYNVTQAFGRRGPEQTQGNFGDQELIRQGTDYKHWPQIAQFAPSASAFFGMSRIGMEVTPSGTWLTYTGAIKLDDKDPNFKDQVILLNKHIDAYKTFPPTEPKKDKKKKADETQALPQRQKKQQTVTLLPAADLDDFSKQLQQSMSSADSTQAGGSGHHHHHH

SEQ ID NO: 3601 - protein, 806 aa, Artificial Sequence
  Description of Artificial Sequence: Synthetic polypeptide
MKIEEGKLVIWINGDKGYNGLAEVGKKFEKDTGIKVTVEHPDKLEEKFPQVAATGDGPDIIFWAHDRFGGYAQSGLLAEITPDKAFQDKLYPFTWDAVRYNGKLIAYPIAVEALSLIYNKDLLPNPPKTWEEIPALDKELKAKGKSALMFNLQEPYFTWPLIAADGGYAFKYENGKYDIKDVGVDNAGAKAGLTFLVDLIKNKHMNADTDYSIAEAAFNKGETAMTINGPWAWSNIDTSKVNYGVTVLPTFKGQPSKPFVGVLSAGINAASPNKELAKEFLENYLLTDEGLEAVNKDKPLGAVALKSYEEELAKDPRIAATMENAQKGEIMPNIPQMSAFWYAVRTAVINAASGRQTVDEALKDAQTGGSGENLYFQSSDNGPQNQRNAPRITFGGPSDSTGSNQNGERSGARSKQRRPQGLPNNTASWFTALTQHGKEDLKFPRGQGVPINTNSSPDDQIGYYRRATRRIRGGDGKMKDLSPRWYFYYLGTGPEAGLPYGANKDGIIWVATEGALNTPKDHIGTRNPANNAAIVLQLPQGTTLPKGFYAEGSRGGSQASSRSSSRSRNSSRNSTPGSSRGTSPARMAGNGGDAALALLLLDRLNQLESKMSGKGQQQQGQTVTKKSAAEASKKPRQKRTATKAYNVTQAFGRRGPEQTQGNFGDQELIRQGTDYKHWPQIAQFAPSASAFFGMSRIGMEETPSGTWLTYTGAIKLDDKDPNFKDQVILLNKHIDAYKTFPPTEPKKDKKKKADETQALPQRQKKQQTVTLLPAADLDDFSKQLQQSMSSADSTQAGGSGHHHHHH

SEQ ID NO: 3602 - protein, 806 aa, Artificial Sequence
  Description of Artificial Sequence: Synthetic polypeptide
MKIEEGKLVIWINGDKGYNGLAEVGKKFEKDTGIKVTVEHPDKLEEKFPQVAATGDGPDIIFWAHDRFGGYAQSGLLAEITPDKAFQDKLYPFTWDAVRYNGKLIAYPIAVEALSLIYNKDLLPNPPKTWEEIPALDKELKAKGKSALMFNLQEPYFTWPLIAADGGYAFKYENGKYDIKDVGVDNAGAKAGLTFLVDLIKNKHMNADTDYSIAEAAFNKGETAMTINGPWAWSNIDTSKVNYGVTVLPTFKGQPSKPFVGVLSAGINAASPNKELAKEFLENYLLTDEGLEAVNKDKPLGAVALKSYEEELAKDPRIAATMENAQKGEIMPNIPQMSAFWYAVRTAVINAASGRQTVDEALKDAQTGGSGENLYFQSSDNGPQNQRNAPRITFGGPSDSTGSNQNGERSGARSKQRRPQGLPNNTASWFTALTQHGKEDLKFPRGQGVPINTNSSPDDQIGYYRRATRRIRGGDGKMKDLSPRWYFYYLGTGPEAGLPYGANKDGIIWVATEGALNTPKDHIGTRNPANNAAIVLQLPQGTTLPKGFYAEGSRGGSQASSRSSSRSRNSSRNSTPGSSRGTSPARMAGNGGDAALALLLLDRLNQLESKMSGKGQQQQGQTVTKKSAAEASKKPRQKRTATKGYNVTQAFGRRGPEQTQGNFGDQDLIKEGTDYKHWPQIAQFAPSASAFFGMSRISTEETPSGTWLTYTGAIKLDKKDPNFKDQVILLNKHIDAYKTFPPTEPKKDKKKKADETQALPQRQKKQQTVTLLPAADLDDFSKQLQQSMSSADSTQAGGSGHHHHHH

SEQ ID NO: 3603 - protein, 806 aa, Artificial Sequence
  Description of Artificial Sequence: Synthetic polypeptide
MKIEEGKLVIWINGDKGYNGLAEVGKKFEKDTGIKVTVEHPDKLEEKFPQVAATGDGPDIIFWAHDRFGGYAQSGLLAEITPDKAFQDKLYPFTWDAVRYNGKLIAYPIAVEALSLIYNKDLLPNPPKTWEEIPALDKELKAKGKSALMFNLQEPYFTWPLIAADGGYAFKYENGKYDIKDVGVDNAGAKAGLTFLVDLIKNKHMNADTDYSIAEAAFNKGETAMTINGPWAWSNIDTSKVNYGVTVLPTFKGQPSKPFVGVLSAGINAASPNKELAKEFLENYLLTDEGLEAVNKDKPLGAVALKSYEEELAKDPRIAATMENAQKGEIMPNIPQMSAFWYAVRTAVINAASGRQTVDEALKDAQTGGSGENLYFQSSDNGPQNQRNAPRITFGGPSDSTGSNQNGERSGARSKQRRPQGLPNNTASWFTALTQHGKEDLKFPRGQGVPINTNSSPDDQIGYYRRATRRIRGGDGKMKDLSPRWYFYYLGTGPEAGLPYGANKDGIIWVATEGALNTPKDHIGTRNPANNAAIVLQLPQGTTLPKGFYAEGSRGGSQASSRSSSRSRNSSRNSTPGSSRGTSPARMAGNGGDAALALLLLDRLNQLESKMSGKGQQQQGQTVTKKSAAEASKKPRQKRTATKAYNVTQAFGRRGPEQTQGNFGDQELIRQGTDYKHWPQIAQFAPSASAFFGMSRIGMELTPSGTWLTYTGAIKLDDKDPNFKDQVILLNKHIDAYKTFPPTEPKKDKKKKADETQALPQRQKKQQTVTLLPAADLDDFSKQLQQSMSSADSTQAGGSGHHHHHH

SEQ ID NO: 3604 - protein, 806 aa, Artificial Sequence
  Description of Artificial Sequence: Synthetic polypeptide
MKIEEGKLVIWINGDKGYNGLAEVGKKFEKDTGIKVTVEHPDKLEEKFPQVAATGDGPDIIFWAHDRFGGYAQSGLLAEITPDKAFQDKLYPFTWDAVRYNGKLIAYPIAVEALSLIYNKDLLPNPPKTWEEIPALDKELKAKGKSALMFNLQEPYFTWPLIAADGGYAFKYENGKYDIKDVGVDNAGAKAGLTFLVDLIKNKHMNADTDYSIAEAAFNKGETAMTINGPWAWSNIDTSKVNYGVTVLPTFKGQPSKPFVGVLSAGINAASPNKELAKEFLENYLLTDEGLEAVNKDKPLGAVALKSYEEELAKDPRIAATMENAQKGEIMPNIPQMSAFWYAVRTAVINAASGRQTVDEALKDAQTGGSGENLYFQSSDNGPQNQRNAPRITFGGPSDSTGSNQNGERSGARSKQRRPQGLPNNTASWFTGLTQHGKEDLKFPPGQGVPINTNSSPDDQIGYYRRATRRIRGGDGKMKDLPPRWYFYYLGTGPEADLPYGQVKPGIVWVAEEGALNTPKDHIGTRNPANNAAIPLQLPPGTTLPKGFYAEGSRGGSQASSRSSSRSRNSSRNSTPGSSRGTSPARMAGNGGDAALALLLLDRLNQLESKMSGKGQQQQGQTVTKKSAAEASKKPRQKRTATKAYNVTQAFGRRGPEQTQGNFGDQELIRQGTDYKHWPQIAQFAPSASAFFGMSRIGMEVTPSGTWLTYTGAIKLDDKDPNFKDQVILLNKHIDAYKTFPPTEPKKDKKKKADETQALPQRQKKQQTVTLLPAADLDDFSKQLQQSMSSADSTQAGGSGHHHHHH

SEQ ID NO: 3605 - protein, 806 aa, Artificial Sequence
  Description of Artificial Sequence: Synthetic polypeptide
MKIEEGKLVIWINGDKGYNGLAEVGKKFEKDTGIKVTVEHPDKLEEKFPQVAATGDGPDIIFWAHDRFGGYAQSGLLAEITPDKAFQDKLYPFTWDAVRYNGKLIAYPIAVEALSLIYNKDLLPNPPKTWEEIPALDKELKAKGKSALMFNLQEPYFTWPLIAADGGYAFKYENGKYDIKDVGVDNAGAKAGLTFLVDLIKNKHMNADTDYSIAEAAFNKGETAMTINGPWAWSNIDTSKVNYGVTVLPTFKGQPSKPFVGVLSAGINAASPNKELAKEFLENYLLTDEGLEAVNKDKPLGAVALKSYEEELAKDPRIAATMENAQKGEIMPNIPQMSAFWYAVRTAVINAASGRQTVDEALKDAQTGGSGENLYFQSSDNGPQNQRNAPRITFGGPSDSTGSNQNGERSGARSKQRRPQGLPNNTASWFTALTQHGKEDLKFPRGQGVPINTNSKPDDQIGYYRRATRRIRGGDGKMKDLSPRWYFYYLGTGPEAGLPYGANKDGIIWVATEGALNTPKDHIGTRNPANNAAIVLQLPQGTTLPKGFYAEGSRGGSQASSRSSSRSRNSSRNSTPGSSRGTSPARMAGNGGDAALALLLLDRLNQLESKMSGKGQQQQGQTVTKKSAAEASKKPRQKRTATKAYNVTQAFGRRGPEQTQGNFGDQELIRQGTDYKHWPQIAQFAPSASAFFGMSRIGMEVTPSGTWLTYTGAIKLDDKDPNFKDQVILLNKHIDAYKTFPPTEPKKDKKKKADETQALPQRQKKQQTVTLLPAADLDDFSKQLQQSMSSADSTQAGGSGHHHHHH

SEQ ID NO: 3606 - protein, 806 aa, Artificial Sequence
  Description of Artificial Sequence: Synthetic polypeptide
MKIEEGKLVIWINGDKGYNGLAEVGKKFEKDTGIKVTVEHPDKLEEKFPQVAATGDGPDIIFWAHDRFGGYAQSGLLAEITPDKAFQDKLYPFTWDAVRYNGKLIAYPIAVEALSLIYNKDLLPNPPKTWEEIPALDKELKAKGKSALMFNLQEPYFTWPLIAADGGYAFKYENGKYDIKDVGVDNAGAKAGLTFLVDLIKNKHMNADTDYSIAEAAFNKGETAMTINGPWAWSNIDTSKVNYGVTVLPTFKGQPSKPFVGVLSAGINAASPNKELAKEFLENYLLTDEGLEAVNKDKPLGAVALKSYEEELAKDPRIAATMENAQKGEIMPNIPQMSAFWYAVRTAVINAASGRQTVDEALKDAQTGGSGENLYFQSSDNGPQNQRNAPRITFGGPSDSTGSNQNGERSGARSKQRRPQGLPNNTASWFTALTQHGKEDLKFPRGQGVPINTNSSPDDQIGYYRRATRRIRGGDGKMKDLSPRWYFYYLGTGPEAGLPYGANKDGIIWVATEGALNTPKDHIGTRNPANNAAIVLQLPQGTTLPKGFYAEGSRGGSQASSRSSSRSRNSSRNSTPGSSRGTSPARMAGNGGDAALALLLLDRLNQLESKMSGKGQQQQGQTVTKKSAAEASKKPRQKRTATKAYNVTQAFGRRGPEQTQGNFGDQELIRQGTDYKHWPQIAQFAPSASAFFGMSRIEMEVTPSGTWLTYTGAIKLDDKDPNFKDQVILLNKHIDAYKTFPPTEPKKDKKKKADETQALPQRQKKQQTVTLLPAADLDDFSKQLQQSMSSADSTQAGGSGHHHHHH

SEQ ID NO: 3607 - protein, 806 aa, Artificial Sequence
  Description of Artificial Sequence: Synthetic polypeptide
MKIEEGKLVIWINGDKGYNGLAEVGKKFEKDTGIKVTVEHPDKLEEKFPQVAATGDGPDIIFWAHDRFGGYAQSGLLAEITPDKAFQDKLYPFTWDAVRYNGKLIAYPIAVEALSLIYNKDLLPNPPKTWEEIPALDKELKAKGKSALMFNLQEPYFTWPLIAADGGYAFKYENGKYDIKDVGVDNAGAKAGLTFLVDLIKNKHMNADTDYSIAEAAFNKGETAMTINGPWAWSNIDTSKVNYGVTVLPTFKGQPSKPFVGVLSAGINAASPNKELAKEFLENYLLTDEGLEAVNKDKPLGAVALKSYEEELAKDPRIAATMENAQKGEIMPNIPQMSAFWYAVRTAVINAASGRQTVDEALKDAQTGGSGENLYFQSSDNGPQNQRNAPRITFGGPSDSTGSNQNGERSGARSKQRRPQGLPNNTASWFTALTQHGKEDLKFPRGQGVPLNTNSSPDDQIGYYRRATRRIRGGDGKMKDLSPRWYFYYLGTGPEAGLPYGANKDGIIWVATEGALNTPKDHIGTRNPANNAAIVLQLPQGTTLPKGFYAEGSRGGSQASSRSSSRSRNSSRNSTPGSSRGTSPARMAGNGGDAALALLLLDRLNQLESKMSGKGQQQQGQTVTKKSAAEASKKPRQKRTATKAYNVTQAFGRRGPEQTQGNFGDQELIRQGTDYKHWPQIAQFAPSASAFFGMSRIGMEVTPSGTWLTYTGAIKLDDKDPNFKDQVILLNKHIDAYKTFPPTEPKKDKKKKADETQALPQRQKKQQTVTLLPAADLDDFSKQLQQSMSSADSTQAGGSGHHHHHH

SEQ ID NO: 3608 - protein, 806 aa, Artificial Sequence
  Description of Artificial Sequence: Synthetic polypeptide
MKIEEGKLVIWINGDKGYNGLAEVGKKFEKDTGIKVTVEHPDKLEEKFPQVAATGDGPDIIFWAHDRFGGYAQSGLLAEITPDKAFQDKLYPFTWDAVRYNGKLIAYPIAVEALSLIYNKDLLPNPPKTWEEIPALDKELKAKGKSALMFNLQEPYFTWPLIAADGGYAFKYENGKYDIKDVGVDNAGAKAGLTFLVDLIKNKHMNADTDYSIAEAAFNKGETAMTINGPWAWSNIDTSKVNYGVTVLPTFKGQPSKPFVGVLSAGINAASPNKELAKEFLENYLLTDEGLEAVNKDKPLGAVALKSYEEELAKDPRIAATMENAQKGEIMPNIPQMSAFWYAVRTAVINAASGRQTVDEALKDAQTGGSGENLYFQSSDNGPQNQRNAPRITFGGPSDSTGSNQNGERSGARSKQRRPQGLPNNTASWFTALTQHGKEDLKFPRGQGVPINTNSSPDDQIGYYRRATRRIRGGDGKMKDLSPRWYFYYLGTGPEAGLPYGANKDGIIWVATEGALNTPKDHIGTRNPANNAAIVLQLPQGTTLPKGFYAEGSRGGSQASSRSSSRSRNSSRNSTPGSSRGTSPARMAGNGGDAALALLLLDRLNQLESKMSGKGQQQQGQTVTKKSAAEMSKKPRQKRTATKGCNVTQCFGPRGPEQTQGNFGDAELVKKGTDYKHWPQIAQFAPSASAFFGMSRISSKEQPSGTWLTYTGAIKLDKDDPNFKDQVILLNKHIDAYKTFPPTEPKKDKKKKADETQALPQRQKKQQTVTLLPAADLDDFSKQLQQSMSSADSTQAGGSGHHHHHH

SEQ ID NO: 3609 - protein, 806 aa, Artificial Sequence
  Description of Artificial Sequence: Synthetic polypeptide
MKIEEGKLVIWINGDKGYNGLAEVGKKFEKDTGIKVTVEHPDKLEEKFPQVAATGDGPDIIFWAHDRFGGYAQSGLLAEITPDKAFQDKLYPFTWDAVRYNGKLIAYPIAVEALSLIYNKDLLPNPPKTWEEIPALDKELKAKGKSALMFNLQEPYFTWPLIAADGGYAFKYENGKYDIKDVGVDNAGAKAGLTFLVDLIKNKHMNADTDYSIAEAAFNKGETAMTINGPWAWSNIDTSKVNYGVTVLPTFKGQPSKPFVGVLSAGINAASPNKELAKEFLENYLLTDEGLEAVNKDKPLGAVALKSYEEELAKDPRIAATMENAQKGEIMPNIPQMSAFWYAVRTAVINAASGRQTVDEALKDAQTGGSGENLYFQSSDNGPQNQRNAPRITFGGPSDSTGSNQNGERSGARSKQRRPQGLPNNTASWFTALTQHGKEDLKFPRGQGVPINTNSSPDDQIGYYRRATRRIRGGDGKMKDLSPRWYFYYLGTGPEAGLPYGANKDGIIWVATEGALNTPKDHIGTRNPANNAAIVLQLPQGTTLPKGFYAEGSRGGSQASSRSSSRSRNSSRNSTPGSSRGTSPARMAGNGGDAALALLLLDRLNQLESKMSGKGQQQQGQTVTKKSAAEASKKPRQKRTATKAYNVTQAFGRRGPEQTQGNFGDQELIRQGTDYKHWPQIAQFAPSASAFFGMSRIGMEVAPSGTWLTYTGAIKLDDKDPNFKDQVILLNKHIDAYKTFPPTEPKKDKKKKADETQALPQRQKKQQTVTLLPAADLDDFSKQLQQSMSSADSTQAGGSGHHHHHH

SEQ ID NO: 3610 - protein, 806 aa, Artificial Sequence
  Description of Artificial Sequence: Synthetic polypeptide
MKIEEGKLVIWINGDKGYNGLAEVGKKFEKDTGIKVTVEHPDKLEEKFPQVAATGDGPDIIFWAHDRFGGYAQSGLLAEITPDKAFQDKLYPFTWDAVRYNGKLIAYPIAVEALSLIYNKDLLPNPPKTWEEIPALDKELKAKGKSALMFNLQEPYFTWPLIAADGGYAFKYENGKYDIKDVGVDNAGAKAGLTFLVDLIKNKHMNADTDYSIAEAAFNKGETAMTINGPWAWSNIDTSKVNYGVTVLPTFKGQPSKPFVGVLSAGINAASPNKELAKEFLENYLLTDEGLEAVNKDKPLGAVALKSYEEELAKDPRIAATMENAQKGEIMPNIPQMSAFWYAVRTAVINAASGRQTVDEALKDAQTGGSGENLYFQSSDNGPQNQRNAPRITFGGPSDSTGSNQNGERSGARSKQRRPQGLPNNTASWFTALTQHGKEDLKFPRGQGVPINTNSSPDDQIGYYRRATRRIRGGDGKMKDLSPRWYFYYLGTGPEAGLPYGANKDGIIWVATEGALNTPKDHIGTRNPANNAAIVLQLPQGTTLPKGFYAEGSRGGSQASSRSSSRSRNSSRNSTPGSSRGTSPARMAGNGGDAALALLLLDRLNQLESKMSGKGQQQQGQTVTKKSAAEASKKPRQKRTATKAYNVTQAFGRRGPNQTQGNFGDQELIRQGTDYKHWPQIAQFAPSASAFFGMSRIGMEVTPSGTWLTYTGAIKLDDKDPNFKDQVILLNKHIDAYKTFPPTEPKKDKKKKADETQALPQRQKKQQTVTLLPAADLDDFSKQLQQSMSSADSTQAGGSGHHHHHH

SEQ ID NO: 3611 - protein, 806 aa, Artificial Sequence
  Description of Artificial Sequence: Synthetic polypeptide
MKIEEGKLVIWINGDKGYNGLAEVGKKFEKDTGIKVTVEHPDKLEEKFPQVAATGDGPDIIFWAHDRFGGYAQSGLLAEITPDKAFQDKLYPFTWDAVRYNGKLIAYPIAVEALSLIYNKDLLPNPPKTWEEIPALDKELKAKGKSALMFNLQEPYFTWPLIAADGGYAFKYENGKYDIKDVGVDNAGAKAGLTFLVDLIKNKHMNADTDYSIAEAAFNKGETAMTINGPWAWSNIDTSKVNYGVTVLPTFKGQPSKPFVGVLSAGINAASPNKELAKEFLENYLLTDEGLEAVNKDKPLGAVALKSYEEELAKDPRIAATMENAQKGEIMPNIPQMSAFWYAVRTAVINAASGRQTVDEALKDAQTGGSGENLYFQSSDNGPQNQRNAPRITFGGPSDSTGSNQNGERSGARSKQRRPQGLPNNTASWFTALTQHGKEDLKFPRGQGVPINTNSSPDDQIGYYRRATRRIRGGDGKMKDLSPRWYFYYLGTGPEAGLPYGANKDGIIWVATEGALNTPKDHIGTRNPANNAAIVLQLPQGTTLPKGFYAEGSRGGSQASSRSSSRSRNSSRNSTPGSSRGTSPARMAGNGGDAALALLLLDRLNQLESKMSGKGQQQQGQTVTKKSAAEASKKPRQKRTATKGYNVTQAFGRRGPEQTQGNFGDQDLNKLGTDYKHWPQIAQFAPSASAFFGMSRIGMEETPSGTWLTYTGAIKLDKKDPNFKDQVILLNKHIDAYKTFPPTEPKKDKKKKADETQALPQRQKKQQTVTLLPAADLDDFSKQLQQSMSSADSTQAGGSGHHHHHH

SEQ ID NO: 3612 - protein, 806 aa, Artificial Sequence
  Description of Artificial Sequence: Synthetic polypeptide
MKIEEGKLVIWINGDKGYNGLAEVGKKFEKDTGIKVTVEHPDKLEEKFPQVAATGDGPDIIFWAHDRFGGYAQSGLLAEITPDKAFQDKLYPFTWDAVRYNGKLIAYPIAVEALSLIYNKDLLPNPPKTWEEIPALDKELKAKGKSALMFNLQEPYFTWPLIAADGGYAFKYENGKYDIKDVGVDNAGAKAGLTFLVDLIKNKHMNADTDYSIAEAAFNKGETAMTINGPWAWSNIDTSKVNYGVTVLPTFKGQPSKPFVGVLSAGINAASPNKELAKEFLENYLLTDEGLEAVNKDKPLGAVALKSYEEELAKDPRIAATMENAQKGEIMPNIPQMSAFWYAVRTAVINAASGRQTVDEALKDAQTGGSGENLYFQSSDNGPQNQRNAPRITFGGPSDSTGSNQNGERSGARSKQRRPQGLPNNTASWFTALTQHGKEDLKFPRGQGVPINTNSSPDDQIGYYRRATRRIRGGDGKMKDLSPRWYFYYLGTGPEAGLPYGANKDGIIWVATEGALNTPKDHIGTRNPANNAAIVLQLPQGTTLPKGFYAEGSRGGSQASSRSSSRSRNSSRNSTPGSSRGTSPARMAGNGGDAALALLLLDRLNQLESKMSGKGQQQQGQTVTKKSAAEASKKPRQKRTATKAYNVTQAFGRRGPEQTQGNFGDQELIRQGTDYKHWPQIAQFAPSASAFFGMSRIGMEVTPDGTWLTYTGAIKLDDKDPNFKDQVILLNKHIDAYKTFPPTEPKKDKKKKADETQALPQRQKKQQTVTLLPAADLDDFSKQLQQSMSSADSTQAGGSGHHHHHH

SEQ ID NO: 3613 - protein, 806 aa, Artificial Sequence
  Description of Artificial Sequence: Synthetic polypeptide
MKIEEGKLVIWINGDKGYNGLAEVGKKFEKDTGIKVTVEHPDKLEEKFPQVAATGDGPDIIFWAHDRFGGYAQSGLLAEITPDKAFQDKLYPFTWDAVRYNGKLIAYPIAVEALSLIYNKDLLPNPPKTWEEIPALDKELKAKGKSALMFNLQEPYFTWPLIAADGGYAFKYENGKYDIKDVGVDNAGAKAGLTFLVDLIKNKHMNADTDYSIAEAAFNKGETAMTINGPWAWSNIDTSKVNYGVTVLPTFKGQPSKPFVGVLSAGINAASPNKELAKEFLENYLLTDEGLEAVNKDKPLGAVALKSYEEELAKDPRIAATMENAQKGEIMPNIPQMSAFWYAVRTAVINAASGRQTVDEALKDAQTGGSGENLYFQSSDNGPQNQRNAPRITFGGPSDSTGSNQNGERSGARSKQRRPQGLPNNTASWFTALTQHGKEDLKFPRGQGVPINTNSSPDDQIGYYRRATRRIRGGDGKMKDLSPRWYFYYLGTGPEAQLPYGANKDGIIWVATEGALNTPKDHIGTRNPANNAAIVLQLPQGTTLPKGFYAEGSRGGSQASSRSSSRSRNSSRNSTPGSSRGTSPARMAGNGGDAALALLLLDRLNQLESKMSGKGQQQQGQTVTKKSAAEASKKPRQKRTATKAYNVTQAFGRRGPEQTQGNFGDQELIRQGTDYKHWPQIAQFAPSASAFFGMSRIGMEVTPSGTWLTYTGAIKLDDKDPNFKDQVILLNKHIDAYKTFPPTEPKKDKKKKADETQALPQRQKKQQTVTLLPAADLDDFSKQLQQSMSSADSTQAGGSGHHHHHH

SEQ ID NO: 3614 - protein, 806 aa, Artificial Sequence
  Description of Artificial Sequence: Synthetic polypeptide
MKIEEGKLVIWINGDKGYNGLAEVGKKFEKDTGIKVTVEHPDKLEEKFPQVAATGDGPDIIFWAHDRFGGYAQSGLLAEITPDKAFQDKLYPFTWDAVRYNGKLIAYPIAVEALSLIYNKDLLPNPPKTWEEIPALDKELKAKGKSALMFNLQEPYFTWPLIAADGGYAFKYENGKYDIKDVGVDNAGAKAGLTFLVDLIKNKHMNADTDYSIAEAAFNKGETAMTINGPWAWSNIDTSKVNYGVTVLPTFKGQPSKPFVGVLSAGINAASPNKELAKEFLENYLLTDEGLEAVNKDKPLGAVALKSYEEELAKDPRIAATMENAQKGEIMPNIPQMSAFWYAVRTAVINAASGRQTVDEALKDAQTGGSGENLYFQSSDNGPQNQRNAPRITFGGPSDSTGSNQNGERSGARSKQRRPQGLPNNTASWFTALTQHGKEDLKFPRGQGVPINTNSSPDDQIGYYRRATRRIRGGDGKMKDLSPRWYFYYLGTGPEAGLPYGANKDGIIWVATNGALNTPKDHIGTRNPANNAAIVLQLPQGTTLPKGFYAEGSRGGSQASSRSSSRSRNSSRNSTPGSSRGTSPARMAGNGGDAALALLLLDRLNQLESKMSGKGQQQQGQTVTKKSAAEASKKPRQKRTATKAYNVTQAFGRRGPEQTQGNFGDQELIRQGTDYKHWPQIAQFAPSASAFFGMSRIGMEVTPSGTWLTYTGAIKLDDKDPNFKDQVILLNKHIDAYKTFPPTEPKKDKKKKADETQALPQRQKKQQTVTLLPAADLDDFSKQLQQSMSSADSTQAGGSGHHHHHH

SEQ ID NO: 3615 - protein, 806 aa, Artificial Sequence
  Description of Artificial Sequence: Synthetic polypeptide
MKIEEGKLVIWINGDKGYNGLAEVGKKFEKDTGIKVTVEHPDKLEEKFPQVAATGDGPDIIFWAHDRFGGYAQSGLLAEITPDKAFQDKLYPFTWDAVRYNGKLIAYPIAVEALSLIYNKDLLPNPPKTWEEIPALDKELKAKGKSALMFNLQEPYFTWPLIAADGGYAFKYENGKYDIKDVGVDNAGAKAGLTFLVDLIKNKHMNADTDYSIAEAAFNKGETAMTINGPWAWSNIDTSKVNYGVTVLPTFKGQPSKPFVGVLSAGINAASPNKELAKEFLENYLLTDEGLEAVNKDKPLGAVALKSYEEELAKDPRIAATMENAQKGEIMPNIPQMSAFWYAVRTAVINAASGRQTVDEALKDAQTGGSGENLYFQSSDNGPQNQRNAPRITFGGPSDSTGSNQNGERSGARSKQRRPQGLPNNTASWFTALTQHGKEDLKFPRGQGVPINTNSSPDDQIGYYRRATRRIRGGDGKMKDLSPRWYFYYLGTGPEAGLPYGANKDGIIWVATEGALNTPKDHIGTRNPANNAAIVLQLPQGTTLPKGFYAEGSRGGSQASSRSSSRSRNSSRNSTPGSSRGTSPARMAGNGGDAALALLLLDRLNQLESKMSGKGQQQQGQTVTKKSAAEASKKPRWKRTATKAYNVTQAFGRRGPEQTQGNFGDQELIRQGTDYKHWPQIAQFAPSASAFFGMSRIGMEVTPSGTWLTYTGAIKLDDKDPNFKDQVILLNKHIDAYKTFPPTEPKKDKKKKADETQALPQRQKKQQTVTLLPAADLDDFSKQLQQSMSSADSTQAGGSGHHHHHH

SEQ ID NO: 3616 - protein, 806 aa, Artificial Sequence
  Description of Artificial Sequence: Synthetic polypeptide
MKIEEGKLVIWINGDKGYNGLAEVGKKFEKDTGIKVTVEHPDKLEEKFPQVAATGDGPDIIFWAHDRFGGYAQSGLLAEITPDKAFQDKLYPFTWDAVRYNGKLIAYPIAVEALSLIYNKDLLPNPPKTWEEIPALDKELKAKGKSALMFNLQEPYFTWPLIAADGGYAFKYENGKYDIKDVGVDNAGAKAGLTFLVDLIKNKHMNADTDYSIAEAAFNKGETAMTINGPWAWSNIDTSKVNYGVTVLPTFKGQPSKPFVGVLSAGINAASPNKELAKEFLENYLLTDEGLEAVNKDKPLGAVALKSYEEELAKDPRIAATMENAQKGEIMPNIPQMSAFWYAVRTAVINAASGRQTVDEALKDAQTGGSGENLYFQSSDNGPQNQRNAPRITFGGPSDSTGSNQNGERSGARSKQRRPQGLPNNTASWFTALTQHGKEDLKFPRGQGAPINTNSSPDDQIGYYRRATRRIRGGDGKMKDLSPRWYFYYLGTGPEAGLPYGANKDGIIWVATEGALNTPKDHIGTRNPANNAAIVLQLPQGTTLPKGFYAEGSRGGSQASSRSSSRSRNSSRNSTPGSSRGTSPARMAGNGGDAALALLLLDRLNQLESKMSGKGQQQQGQTVTKKSAAEASKKPRQKRTATKAYNVTQAFGRRGPEQTQGNFGDQELIRQGTDYKHWPQIAQFAPSASAFFGMSRIGMEVTPSGTWLTYTGAIKLDDKDPNFKDQVILLNKHIDAYKTFPPTEPKKDKKKKADETQALPQRQKKQQTVTLLPAADLDDFSKQLQQSMSSADSTQAGGSGHHHHHH

SEQ ID NO: 3617 - protein, 806 aa, Artificial Sequence
  Description of Artificial Sequence: Synthetic polypeptide
MKIEEGKLVIWINGDKGYNGLAEVGKKFEKDTGIKVTVEHPDKLEEKFPQVAATGDGPDIIFWAHDRFGGYAQSGLLAEITPDKAFQDKLYPFTWDAVRYNGKLIAYPIAVEALSLIYNKDLLPNPPKTWEEIPALDKELKAKGKSALMFNLQEPYFTWPLIAADGGYAFKYENGKYDIKDVGVDNAGAKAGLTFLVDLIKNKHMNADTDYSIAEAAFNKGETAMTINGPWAWSNIDTSKVNYGVTVLPTFKGQPSKPFVGVLSAGINAASPNKELAKEFLENYLLTDEGLEAVNKDKPLGAVALKSYEEELAKDPRIAATMENAQKGEIMPNIPQMSAFWYAVRTAVINAASGRQTVDEALKDAQTGGSGENLYFQSSDNGPQNQRNAPRITFGGPSDSTGSNQNGERSGARSKQRRPQGLPNNTASWFTALTQNGKEDLKFPPGQGVPINTNSSPDDQIGYYRRATRRIRGGDGKMKDLPPRWYFYYLGTGPHADLPYGQKQDGVFWVARPGALNTPKDHIGTRNPANNAAIPLQLPPGTKLPKGFYAEGSRGGSQASSRSSSRSRNSSRNSTPGSSRGTSPARMAGNGGDAALALLLLDRLNQLESKMSGKGQQQQGQTVTKKSAAEASKKPRQKRTATKAYNVTQAFGRRGPEQTQGNFGDQELIRQGTDYKHWPQIAQFAPSASAFFGMSRIGMEVTPSGTWLTYTGAIKLDDKDPNFKDQVILLNKHIDAYKTFPPTEPKKDKKKKADETQALPQRQKKQQTVTLLPAADLDDFSKQLQQSMSSADSTQAGGSGHHHHHH

SEQ ID NO: 3618 - protein, 806 aa, Artificial Sequence
  Description of Artificial Sequence: Synthetic polypeptide
MKIEEGKLVIWINGDKGYNGLAEVGKKFEKDTGIKVTVEHPDKLEEKFPQVAATGDGPDIIFWAHDRFGGYAQSGLLAEITPDKAFQDKLYPFTWDAVRYNGKLIAYPIAVEALSLIYNKDLLPNPPKTWEEIPALDKELKAKGKSALMFNLQEPYFTWPLIAADGGYAFKYENGKYDIKDVGVDNAGAKAGLTFLVDLIKNKHMNADTDYSIAEAAFNKGETAMTINGPWAWSNIDTSKVNYGVTVLPTFKGQPSKPFVGVLSAGINAASPNKELAKEFLENYLLTDEGLEAVNKDKPLGAVALKSYEEELAKDPRIAATMENAQKGEIMPNIPQMSAFWYAVRTAVINAASGRQTVDEALKDAQTGGSGENLYFQSSDNGPQNQRNAPRITFGGPSDSTGSNQNGERSGARSKQRRPQGLPNNTASWFTALTQHGKEDLKFPRGQGVPINTNSSPDDQIGYYRRATRRIRGGDGKMKDLSPRWYFYYLGTGPEAGLPYGANKDGIIWVATEGALNTPKDHIGTRNPANNAAIVLQLPQGTTLPKGFYAEGSRGGSQASSRSSSRSRNSSRNSTPGSSRGTSPARMAGNGGDAALALLLLDRLNQLESKMSGKGQQQQGQTVTKKSAAEMSKKPRQKRTATKECNVTQCFGPRGPEQTQGNFGDDELVKKGTDYKHWPQIAQFAPSASAFFGMSRISSKEQPSGTWLTYTGAIKLDKDDPNFKDQVILLNKHIDAYKTFPPTEPKKDKKKKADETQALPQRQKKQQTVTLLPAADLDDFSKQLQQSMSSADSTQAGGSGHHHHHH

SEQ ID NO: 3619 - protein, 806 aa, Artificial Sequence
  Description of Artificial Sequence: Synthetic polypeptide
MKIEEGKLVIWINGDKGYNGLAEVGKKFEKDTGIKVTVEHPDKLEEKFPQVAATGDGPDIIFWAHDRFGGYAQSGLLAEITPDKAFQDKLYPFTWDAVRYNGKLIAYPIAVEALSLIYNKDLLPNPPKTWEEIPALDKELKAKGKSALMFNLQEPYFTWPLIAADGGYAFKYENGKYDIKDVGVDNAGAKAGLTFLVDLIKNKHMNADTDYSIAEAAFNKGETAMTINGPWAWSNIDTSKVNYGVTVLPTFKGQPSKPFVGVLSAGINAASPNKELAKEFLENYLLTDEGLEAVNKDKPLGAVALKSYEEELAKDPRIAATMENAQKGEIMPNIPQMSAFWYAVRTAVINAASGRQTVDEALKDAQTGGSGENLYFQSSDNGPQNQRNAPRITFGGPSDSTGSNQNGERSGARSKQRRPQGLPNNTASWFTALTQHGKEDLKFPRGQGVPINTNSSPDDQIGYYRRATRRIRGGDGKMKDLSPRWYFYYLGTGPEAGLPYGANKDGIIWVATEGALNTPKDHIGTRNPANNAAIVLQLPQGTTLPKGFYAEGSRGGSQASSRSSSRSRNSSRNSTPGSSRGTSPARMAGNGGDAALALLLLDRLNQLESKMSGKGQQQQGQTVTKKSAAEASKKPRQKRTATKAYNVTQAFGRRGPEQTQGNFGDQELIRQGTDYKYWPQIAQFAPSASAFFGMSRIGMEVTPSGTWLTYTGAIKLDDKDPNFKDQVILLNKHIDAYKTFPPTEPKKDKKKKADETQALPQRQKKQQTVTLLPAADLDDFSKQLQQSMSSADSTQAGGSGHHHHHH

SEQ ID NO: 3620 - protein, 806 aa, Artificial Sequence
  Description of Artificial Sequence: Synthetic polypeptide
MKIEEGKLVIWINGDKGYNGLAEVGKKFEKDTGIKVTVEHPDKLEEKFPQVAATGDGPDIIFWAHDRFGGYAQSGLLAEITPDKAFQDKLYPFTWDAVRYNGKLIAYPIAVEALSLIYNKDLLPNPPKTWEEIPALDKELKAKGKSALMFNLQEPYFTWPLIAADGGYAFKYENGKYDIKDVGVDNAGAKAGLTFLVDLIKNKHMNADTDYSIAEAAFNKGETAMTINGPWAWSNIDTSKVNYGVTVLPTFKGQPSKPFVGVLSAGINAASPNKELAKEFLENYLLTDEGLEAVNKDKPLGAVALKSYEEELAKDPRIAATMENAQKGEIMPNIPQMSAFWYAVRTAVINAASGRQTVDEALKDAQTGGSGENLYFQSSDNGPQNQRNAPRITFGGPSDSTGSNQNGERSGARSKQRRPQGLPNNTASWFTALTQHGKEDLKFPRGQGVPINTNSSPDDQIGYYRRATRRIRGGDGKMKDLSPRWYFYYLGTGPEAGLPYGANKDGIIWVATEGALNTPKDHIGTRNPANNAAIVLQLPQGTTLPKGFYAEGSRGGSQASSRSSSRSRNSSRNSTPGSSRGTSPARMAGNGGDAALALLLLDRLNQLESKMSGKGQQQQGQTVTKKSAAEASKKPRQKRTATKAYNVTQAFGRRGPEQTQGNFGDQELIRQGTDYKHWPQIAQFAPSASAFFGMSRIGMEVTPSGTWLTYTGAIKLDEKDPNFKDQVILLNKHIDAYKTFPPTEPKKDKKKKADETQALPQRQKKQQTVTLLPAADLDDFSKQLQQSMSSADSTQAGGSGHHHHHH

SEQ ID NO: 3621 - protein, 806 aa, Artificial Sequence
  Description of Artificial Sequence: Synthetic polypeptide
MKIEEGKLVIWINGDKGYNGLAEVGKKFEKDTGIKVTVEHPDKLEEKFPQVAATGDGPDIIFWAHDRFGGYAQSGLLAEITPDKAFQDKLYPFTWDAVRYNGKLIAYPIAVEALSLIYNKDLLPNPPKTWEEIPALDKELKAKGKSALMFNLQEPYFTWPLIAADGGYAFKYENGKYDIKDVGVDNAGAKAGLTFLVDLIKNKHMNADTDYSIAEAAFNKGETAMTINGPWAWSNIDTSKVNYGVTVLPTFKGQPSKPFVGVLSAGINAASPNKELAKEFLENYLLTDEGLEAVNKDKPLGAVALKSYEEELAKDPRIAATMENAQKGEIMPNIPQMSAFWYAVRTAVINAASGRQTVDEALKDAQTGGSGENLYFQSSDNGPQNQRNAPRITFGGPSDSTGSNQNGERSGARSKQRRPQGLPNNTASWFTALTQHGKEDLKFPRGQGVPINKNSSPDDQIGYYRRATRRIRGGDGKMKDLSPRWYFYYLGTGPEAGLPYGANKDGIIWVATEGALNTPKDHIGTRNPANNAAIVLQLPQGTTLPKGFYAEGSRGGSQASSRSSSRSRNSSRNSTPGSSRGTSPARMAGNGGDAALALLLLDRLNQLESKMSGKGQQQQGQTVTKKSAAEASKKPRQKRTATKAYNVTQAFGRRGPEQTQGNFGDQELIRQGTDYKHWPQIAQFAPSASAFFGMSRIGMEVTPSGTWLTYTGAIKLDDKDPNFKDQVILLNKHIDAYKTFPPTEPKKDKKKKADETQALPQRQKKQQTVTLLPAADLDDFSKQLQQSMSSADSTQAGGSGHHHHHH

SEQ ID NO: 3622 - protein, 806 aa, Artificial Sequence
  Description of Artificial Sequence: Synthetic polypeptide
MKIEEGKLVIWINGDKGYNGLAEVGKKFEKDTGIKVTVEHPDKLEEKFPQVAATGDGPDIIFWAHDRFGGYAQSGLLAEITPDKAFQDKLYPFTWDAVRYNGKLIAYPIAVEALSLIYNKDLLPNPPKTWEEIPALDKELKAKGKSALMFNLQEPYFTWPLIAADGGYAFKYENGKYDIKDVGVDNAGAKAGLTFLVDLIKNKHMNADTDYSIAEAAFNKGETAMTINGPWAWSNIDTSKVNYGVTVLPTFKGQPSKPFVGVLSAGINAASPNKELAKEFLENYLLTDEGLEAVNKDKPLGAVALKSYEEELAKDPRIAATMENAQKGEIMPNIPQMSAFWYAVRTAVINAASGRQTVDEALKDAQTGGSGENLYFQSSDNGPQNQRNAPRITFGGPSDSTGSNQNGERSGARSKQRRPQGLPNNTASWFTALTQHGKEDLKFPRGQGVPINTNSSPDDQIGYYRRATRRIRGGDGKMKDLSPRWYFYYLGTGPEAGLPYGANKDGIIWVATEGALNTPKDHIGTRNPANNAAIVCQLPQGTTLPKGFYAEGSRGGSQASSRSSSRSRNSSRNSTPGSSRGTSPARMAGNGGDAALALLLLDRLNQLESKMSGKGQQQQGQTVTKKSAAEASKKPRQKRTATKAYNVTQAFGRRGPEQTQGNFGDQELIRQGTDYKHWPQIAQFAPSASAFFGMSRIGMEVTPSGTWLTYTGAIKLDDKDPNFKDQVILLNKHIDAYKTFPPTEPKKDKKKKADETQALPQRQKKQQTVTLLPAADLDDFSKQLQQSMSSADSTQAGGSGHHHHHH

SEQ ID NO: 3623 - protein, 806 aa, Artificial Sequence
  Description of Artificial Sequence: Synthetic polypeptide
MKIEEGKLVIWINGDKGYNGLAEVGKKFEKDTGIKVTVEHPDKLEEKFPQVAATGDGPDIIFWAHDRFGGYAQSGLLAEITPDKAFQDKLYPFTWDAVRYNGKLIAYPIAVEALSLIYNKDLLPNPPKTWEEIPALDKELKAKGKSALMFNLQEPYFTWPLIAADGGYAFKYENGKYDIKDVGVDNAGAKAGLTFLVDLIKNKHMNADTDYSIAEAAFNKGETAMTINGPWAWSNIDTSKVNYGVTVLPTFKGQPSKPFVGVLSAGINAASPNKELAKEFLENYLLTDEGLEAVNKDKPLGAVALKSYEEELAKDPRIAATMENAQKGEIMPNIPQMSAFWYAVRTAVINAASGRQTVDEALKDAQTGGSGENLYFQSSDNGPQNQRNAPRITFGGPSDSTGSNQNGERSGARSKQRRPQGLPNNTASWFTALTQHGKEDLKFPRGQGVPINTNSSPDDQIGYYRRATRRIRGGDGKMKDLSPRWYFYYLGTGPEAGLPYGANKDGIIWVATEGALNTPKDHIGTRNPANNAAIVLQLPQGTTLPKGFYAEGSRGGSQASSRSSSRSRNSSRNSTPGSSRGTSPARMAGNGGDAALALLLLDRLNQLESKMSGKGQQQQGQTVTKKSAAEASKKPRQKRTATKAYNVTQAFGRRGPEQTQGNFGDDELIRQGTDYKHWPQIAQFAPSASAFFGMSRIGMEVTPSGTWLTYTGAIKLDDKDPNFKDQVILLNKHIDAYKTFPPTEPKKDKKKKADETQALPQRQKKQQTVTLLPAADLDDFSKQLQQSMSSADSTQAGGSGHHHHHH

SEQ ID NO: 3624 - protein, 806 aa, Artificial Sequence
  Description of Artificial Sequence: Synthetic polypeptide
MKIEEGKLVIWINGDKGYNGLAEVGKKFEKDTGIKVTVEHPDKLEEKFPQVAATGDGPDIIFWAHDRFGGYAQSGLLAEITPDKAFQDKLYPFTWDAVRYNGKLIAYPIAVEALSLIYNKDLLPNPPKTWEEIPALDKELKAKGKSALMFNLQEPYFTWPLIAADGGYAFKYENGKYDIKDVGVDNAGAKAGLTFLVDLIKNKHMNADTDYSIAEAAFNKGETAMTINGPWAWSNIDTSKVNYGVTVLPTFKGQPSKPFVGVLSAGINAASPNKELAKEFLENYLLTDEGLEAVNKDKPLGAVALKSYEEELAKDPRIAATMENAQKGEIMPNIPQMSAFWYAVRTAVINAASGRQTVDEALKDAQTGGSGENLYFQSSDNGPQNQRNAPRITFGGPSDSTGSNQNGERSGARSKQRRPQGLPNNTASWFTALTQHGKEDLKFPRGQGVPINDNSSPDDQIGYYRRATRRIRGGDGKMKDLSPRWYFYYLGTGPEAGLPYGANKDGIIWVATEGALNTPKDHIGTRNPANNAAIVLQLPQGTTLPKGFYAEGSRGGSQASSRSSSRSRNSSRNSTPGSSRGTSPARMAGNGGDAALALLLLDRLNQLESKMSGKGQQQQGQTVTKKSAAEASKKPRQKRTATKAYNVTQAFGRRGPEQTQGNFGDQELIRQGTDYKHWPQIAQFAPSASAFFGMSRIGMEVTPSGTWLTYTGAIKLDDKDPNFKDQVILLNKHIDAYKTFPPTEPKKDKKKKADETQALPQRQKKQQTVTLLPAADLDDFSKQLQQSMSSADSTQAGGSGHHHHHH

SEQ ID NO: 3625 - protein, 806 aa, Artificial Sequence
  Description of Artificial Sequence: Synthetic polypeptide
MKIEEGKLVIWINGDKGYNGLAEVGKKFEKDTGIKVTVEHPDKLEEKFPQVAATGDGPDIIFWAHDRFGGYAQSGLLAEITPDKAFQDKLYPFTWDAVRYNGKLIAYPIAVEALSLIYNKDLLPNPPKTWEEIPALDKELKAKGKSALMFNLQEPYFTWPLIAADGGYAFKYENGKYDIKDVGVDNAGAKAGLTFLVDLIKNKHMNADTDYSIAEAAFNKGETAMTINGPWAWSNIDTSKVNYGVTVLPTFKGQPSKPFVGVLSAGINAASPNKELAKEFLENYLLTDEGLEAVNKDKPLGAVALKSYEEELAKDPRIAATMENAQKGEIMPNIPQMSAFWYAVRTAVINAASGRQTVDEALKDAQTGGSGENLYFQSSDNGPQNQRNAPRITFGGPSDSTGSNQNGERSGARSKQRRPQGLPNNTASWFTALTQHGKEDLKFPRGQGVPINTNSSPDDQIGYYRRATRRIRGGDGKMKDLSPRWYFYYLGTGPEAGLPYGANKDGIIWVATEGALNTPKDHIGTRNPANNAAIVLQLPQGTTLPKGFYAEGSRGGSQASSRSSSRSRNSSRNSTPGSSRGTSPARMAGNGGDAALALLLLDRLNQLESKMSGKGQQQQGQTVTKKSAAEMSKKPRQKRTATKGCNVTQCFGPRGPEQTQGNFGDAELNKKGVDYKHWPQIAQFAPSASAFFGMSRISSKEQPSGTWLTYTGAIKLDKDDPNFKDQVILLNKHIDAYKTFPPTEPKKDKKKKADETQALPQRQKKQQTVTLLPAADLDDFSKQLQQSMSSADSTQAGGSGHHHHHH

SEQ ID NO: 3626 - protein, 806 aa, Artificial Sequence
  Description of Artificial Sequence: Synthetic polypeptide
MKIEEGKLVIWINGDKGYNGLAEVGKKFEKDTGIKVTVEHPDKLEEKFPQVAATGDGPDIIFWAHDRFGGYAQSGLLAEITPDKAFQDKLYPFTWDAVRYNGKLIAYPIAVEALSLIYNKDLLPNPPKTWEEIPALDKELKAKGKSALMFNLQEPYFTWPLIAADGGYAFKYENGKYDIKDVGVDNAGAKAGLTFLVDLIKNKHMNADTDYSIAEAAFNKGETAMTINGPWAWSNIDTSKVNYGVTVLPTFKGQPSKPFVGVLSAGINAASPNKELAKEFLENYLLTDEGLEAVNKDKPLGAVALKSYEEELAKDPRIAATMENAQKGEIMPNIPQMSAFWYAVRTAVINAASGRQTVDEALKDAQTGGSGENLYFQSSDNGPQNQRNAPRITFGGPSDSTGSNQNGERSGARSKQRRPQGLPNNTASWFTGLTQNGKEDLKFPPGQGVPINTNSSPDDQIGYYRRATRRIRGGDGKMKDLPPRWYFYYLGTGPHADLPYGQKHDGVVWVAKPGALNTPKDHIGTRNPANNAAIPLQLPPGTKLPKGFYAEGSRGGSQASSRSSSRSRNSSRNSTPGSSRGTSPARMAGNGGDAALALLLLDRLNQLESKMSGKGQQQQGQTVTKKSAAEASKKPRQKRTATKAYNVTQAFGRRGPEQTQGNFGDQELIRQGTDYKHWPQIAQFAPSASAFFGMSRIGMEVTPSGTWLTYTGAIKLDDKDPNFKDQVILLNKHIDAYKTFPPTEPKKDKKKKADETQALPQRQKKQQTVTLLPAADLDDFSKQLQQSMSSADSTQAGGSGHHHHHH

SEQ ID NO: 3627 - protein, 806 aa, Artificial Sequence
  Description of Artificial Sequence: Synthetic polypeptide
MKIEEGKLVIWINGDKGYNGLAEVGKKFEKDTGIKVTVEHPDKLEEKFPQVAATGDGPDIIFWAHDRFGGYAQSGLLAEITPDKAFQDKLYPFTWDAVRYNGKLIAYPIAVEALSLIYNKDLLPNPPKTWEEIPALDKELKAKGKSALMFNLQEPYFTWPLIAADGGYAFKYENGKYDIKDVGVDNAGAKAGLTFLVDLIKNKHMNADTDYSIAEAAFNKGETAMTINGPWAWSNIDTSKVNYGVTVLPTFKGQPSKPFVGVLSAGINAASPNKELAKEFLENYLLTDEGLEAVNKDKPLGAVALKSYEEELAKDPRIAATMENAQKGEIMPNIPQMSAFWYAVRTAVINAASGRQTVDEALKDAQTGGSGENLYFQSSDNGPQNQRNAPRITFGGPSDSTGSNQNGERSGARSKQRRPQGLPNNTASWFTALTQHGKEDLKFPRGQGVPINTNSSPDDQIGYYRRATRRIRGGDGKMKDLSPRWYFYYLGTGPEAGLPYGANKDGIIWVATEGALNTPKDHIGTRNPANNEAIVLQLPQGTTLPKGFYAEGSRGGSQASSRSSSRSRNSSRNSTPGSSRGTSPARMAGNGGDAALALLLLDRLNQLESKMSGKGQQQQGQTVTKKSAAEASKKPRQKRTATKAYNVTQAFGRRGPEQTQGNFGDQELIRQGTDYKHWPQIAQFAPSASAFFGMSRIGMEVTPSGTWLTYTGAIKLDDKDPNFKDQVILLNKHIDAYKTFPPTEPKKDKKKKADETQALPQRQKKQQTVTLLPAADLDDFSKQLQQSMSSADSTQAGGSGHHHHHH

SEQ ID NO: 3628 - protein, 806 aa, Artificial Sequence
  Description of Artificial Sequence: Synthetic polypeptide
MKIEEGKLVIWINGDKGYNGLAEVGKKFEKDTGIKVTVEHPDKLEEKFPQVAATGDGPDIIFWAHDRFGGYAQSGLLAEITPDKAFQDKLYPFTWDAVRYNGKLIAYPIAVEALSLIYNKDLLPNPPKTWEEIPALDKELKAKGKSALMFNLQEPYFTWPLIAADGGYAFKYENGKYDIKDVGVDNAGAKAGLTFLVDLIKNKHMNADTDYSIAEAAFNKGETAMTINGPWAWSNIDTSKVNYGVTVLPTFKGQPSKPFVGVLSAGINAASPNKELAKEFLENYLLTDEGLEAVNKDKPLGAVALKSYEEELAKDPRIAATMENAQKGEIMPNIPQMSAFWYAVRTAVINAASGRQTVDEALKDAQTGGSGENLYFQSSDNGPQNQRNAPRITFGGPSDSTGSNQNGERSGARSKQRRPQGLPNNTASWFTALTQHGKEDLKFPRGQGVPINTNSSPDDQIGYYRRATRRIRGGDGKMKDLSPRWYFYYLGTGPEAGLPYGANKDGIIWVATEGALNTPKDHIGTRNPANNAANVLQLPQGTTLPKGFYAEGSRGGSQASSRSSSRSRNSSRNSTPGSSRGTSPARMAGNGGDAALALLLLDRLNQLESKMSGKGQQQQGQTVTKKSAAEASKKPRQKRTATKAYNVTQAFGRRGPEQTQGNFGDQELIRQGTDYKHWPQIAQFAPSASAFFGMSRIGMEVTPSGTWLTYTGAIKLDDKDPNFKDQVILLNKHIDAYKTFPPTEPKKDKKKKADETQALPQRQKKQQTVTLLPAADLDDFSKQLQQSMSSADSTQAGGSGHHHHHH

SEQ ID NO: 3629 - protein, 806 aa, Artificial Sequence
  Description of Artificial Sequence: Synthetic polypeptide
MKIEEGKLVIWINGDKGYNGLAEVGKKFEKDTGIKVTVEHPDKLEEKFPQVAATGDGPDIIFWAHDRFGGYAQSGLLAEITPDKAFQDKLYPFTWDAVRYNGKLIAYPIAVEALSLIYNKDLLPNPPKTWEEIPALDKELKAKGKSALMFNLQEPYFTWPLIAADGGYAFKYENGKYDIKDVGVDNAGAKAGLTFLVDLIKNKHMNADTDYSIAEAAFNKGETAMTINGPWAWSNIDTSKVNYGVTVLPTFKGQPSKPFVGVLSAGINAASPNKELAKEFLENYLLTDEGLEAVNKDKPLGAVALKSYEEELAKDPRIAATMENAQKGEIMPNIPQMSAFWYAVRTAVINAASGRQTVDEALKDAQTGGSGENLYFQSSDNGPQNQRNAPRITFGGPSDSTGSNQNGERSGARSKQRRPQGLPNNTASWFTALTQHGKEDLKFPRGQGVPINTNSSPDDQIGMYRRATRRIRGGDGKMKDLSPRWYFYYLGTGPEAGLPYGANKDGIIWVATEGALNTPKDHIGTRNPANNAAIVLQLPQGTTLPKGFYAEGSRGGSQASSRSSSRSRNSSRNSTPGSSRGTSPARMAGNGGDAALALLLLDRLNQLESKMSGKGQQQQGQTVTKKSAAEASKKPRQKRTATKAYNVTQAFGRRGPEQTQGNFGDQELIRQGTDYKHWPQIAQFAPSASAFFGMSRIGMEVTPSGTWLTYTGAIKLDDKDPNFKDQVILLNKHIDAYKTFPPTEPKKDKKKKADETQALPQRQKKQQTVTLLPAADLDDFSKQLQQSMSSADSTQAGGSGHHHHHH

SEQ ID NO: 3630 - protein, 806 aa, Artificial Sequence
  Description of Artificial Sequence: Synthetic polypeptide
MKIEEGKLVIWINGDKGYNGLAEVGKKFEKDTGIKVTVEHPDKLEEKFPQVAATGDGPDIIFWAHDRFGGYAQSGLLAEITPDKAFQDKLYPFTWDAVRYNGKLIAYPIAVEALSLIYNKDLLPNPPKTWEEIPALDKELKAKGKSALMFNLQEPYFTWPLIAADGGYAFKYENGKYDIKDVGVDNAGAKAGLTFLVDLIKNKHMNADTDYSIAEAAFNKGETAMTINGPWAWSNIDTSKVNYGVTVLPTFKGQPSKPFVGVLSAGINAASPNKELAKEFLENYLLTDEGLEAVNKDKPLGAVALKSYEEELAKDPRIAATMENAQKGEIMPNIPQMSAFWYAVRTAVINAASGRQTVDEALKDAQTGGSGENLYFQSSDNGPQNQRNAPRITFGGPSDSTGSNQNGERSGARSKQRRPQGLPNNTASWFTALTQHGKEDLKFPRGQGVPINTNSSPDDQIGYYRRATRRIRGGDGKMKDLSPRWYFYYLGTGPEAGLPYGANKDGIIWVATEGALNTPKDHIGTRNPANNAAIVLQLPQGTTLPKGFYAEGSRGGSQASSRSSSRSRNSSRNSTPGSSRGTSPARMAGNGGDAALALLLLDRLNQLESKMSGKGQQQQGQTVTKKSAAEASKKPRQKRTATKAYNVTQAFGRRGPEQTQGNFGDQELIRQGTDYKHWPQIAQFAPSASAFFGMSRIGMKVTPSGTWLTYTGAIKLDDKDPNFKDQVILLNKHIDAYKTFPPTEPKKDKKKKADETQALPQRQKKQQTVTLLPAADLDDFSKQLQQSMSSADSTQAGGSGHHHHHH

SEQ ID NO: 3631 - protein, 806 aa, Artificial Sequence
  Description of Artificial Sequence: Synthetic polypeptide
MKIEEGKLVIWINGDKGYNGLAEVGKKFEKDTGIKVTVEHPDKLEEKFPQVAATGDGPDIIFWAHDRFGGYAQSGLLAEITPDKAFQDKLYPFTWDAVRYNGKLIAYPIAVEALSLIYNKDLLPNPPKTWEEIPALDKELKAKGKSALMFNLQEPYFTWPLIAADGGYAFKYENGKYDIKDVGVDNAGAKAGLTFLVDLIKNKHMNADTDYSIAEAAFNKGETAMTINGPWAWSNIDTSKVNYGVTVLPTFKGQPSKPFVGVLSAGINAASPNKELAKEFLENYLLTDEGLEAVNKDKPLGAVALKSYEEELAKDPRIAATMENAQKGEIMPNIPQMSAFWYAVRTAVINAASGRQTVDEALKDAQTGGSGENLYFQSSDNGPQNQRNAPRITFGGPSDSTGSNQNGERSGARSKQRRPQGLPNNTASWFTALTQHGKEDLKFPRGQGVPINTNSSPDDQIGYYRRATRRIRGGDGKMKDLSPRWYFYYLRTGPEAGLPYGANKDGIIWVATEGALNTPKDHIGTRNPANNAAIVLQLPQGTTLPKGFYAEGSRGGSQASSRSSSRSRNSSRNSTPGSSRGTSPARMAGNGGDAALALLLLDRLNQLESKMSGKGQQQQGQTVTKKSAAEASKKPRQKRTATKAYNVTQAFGRRGPEQTQGNFGDQELIRQGTDYKHWPQIAQFAPSASAFFGMSRIGMEVTPSGTWLTYTGAIKLDDKDPNFKDQVILLNKHIDAYKTFPPTEPKKDKKKKADETQALPQRQKKQQTVTLLPAADLDDFSKQLQQSMSSADSTQAGGSGHHHHHH

SEQ ID NO: 3632 - protein, 806 aa, Artificial Sequence
  Description of Artificial Sequence: Synthetic polypeptide
MKIEEGKLVIWINGDKGYNGLAEVGKKFEKDTGIKVTVEHPDKLEEKFPQVAATGDGPDIIFWAHDRFGGYAQSGLLAEITPDKAFQDKLYPFTWDAVRYNGKLIAYPIAVEALSLIYNKDLLPNPPKTWEEIPALDKELKAKGKSALMFNLQEPYFTWPLIAADGGYAFKYENGKYDIKDVGVDNAGAKAGLTFLVDLIKNKHMNADTDYSIAEAAFNKGETAMTINGPWAWSNIDTSKVNYGVTVLPTFKGQPSKPFVGVLSAGINAASPNKELAKEFLENYLLTDEGLEAVNKDKPLGAVALKSYEEELAKDPRIAATMENAQKGEIMPNIPQMSAFWYAVRTAVINAASGRQTVDEALKDAQTGGSGENLYFQSSDNGPQNQRNAPRITFGGPSDSTGSNQNGERSGARSKQRRPQGLPNNTASWFTALTQHGKEDLKFPRGQGVPINTNSSPDDQIGYYRRATRRIRGGDGKMKDLSPRWYFYYLGTGPEAGLPYGANKDGIIWVATEGALNTPKDHIGTRNPANNAAIVLQLPQGTTLPKGFYAEGSRGGSQASSRSSSRSRNSSRNSTPGSSRGTSPARMAGNGGDAALALLLLDRLNQLESKMSGKGQQQQGQTVTKKSAAEMSKKPRQKRTATKGCNVTQCFGPRGPEQTQGNFGDAELIKKGVDYKHWPQIAQFAPSASAFFGMSRISSKETPSGTWLTYTGAIKLDKDDPNFKDQVILLNKHIDAYKTFPPTEPKKDKKKKADETQALPQRQKKQQTVTLLPAADLDDFSKQLQQSMSSADSTQAGGSGHHHHHH

SEQ ID NO: 3633 - protein, 806 aa, Artificial Sequence
  Description of Artificial Sequence: Synthetic polypeptide
MKIEEGKLVIWINGDKGYNGLAEVGKKFEKDTGIKVTVEHPDKLEEKFPQVAATGDGPDIIFWAHDRFGGYAQSGLLAEITPDKAFQDKLYPFTWDAVRYNGKLIAYPIAVEALSLIYNKDLLPNPPKTWEEIPALDKELKAKGKSALMFNLQEPYFTWPLIAADGGYAFKYENGKYDIKDVGVDNAGAKAGLTFLVDLIKNKHMNADTDYSIAEAAFNKGETAMTINGPWAWSNIDTSKVNYGVTVLPTFKGQPSKPFVGVLSAGINAASPNKELAKEFLENYLLTDEGLEAVNKDKPLGAVALKSYEEELAKDPRIAATMENAQKGEIMPNIPQMSAFWYAVRTAVINAASGRQTVDEALKDAQTGGSGENLYFQSSDNGPQNQRNAPRITFGGPSDSTGSNQNGERSGARSKQRRPQGLPNNTASWFTALTQHGKEDLKFPRGQGVPINTNSSPDDQIGYYRRATRRIRGGDGKRKDLSPRWYFYYLGTGPEAGLPYGANKDGIIWVATEGALNTPKDHIGTRNPANNAAIVLQLPQGTTLPKGFYAEGSRGGSQASSRSSSRSRNSSRNSTPGSSRGTSPARMAGNGGDAALALLLLDRLNQLESKMSGKGQQQQGQTVTKKSAAEASKKPRQKRTATKAYNVTQAFGRRGPEQTQGNFGDQELIRQGTDYKHWPQIAQFAPSASAFFGMSRIGMEVTPSGTWLTYTGAIKLDDKDPNFKDQVILLNKHIDAYKTFPPTEPKKDKKKKADETQALPQRQKKQQTVTLLPAADLDDFSKQLQQSMSSADSTQAGGSGHHHHHH

SEQ ID NO: 3634 - protein, 806 aa, Artificial Sequence
  Description of Artificial Sequence: Synthetic polypeptide
MKIEEGKLVIWINGDKGYNGLAEVGKKFEKDTGIKVTVEHPDKLEEKFPQVAATGDGPDIIFWAHDRFGGYAQSGLLAEITPDKAFQDKLYPFTWDAVRYNGKLIAYPIAVEALSLIYNKDLLPNPPKTWEEIPALDKELKAKGKSALMFNLQEPYFTWPLIAADGGYAFKYENGKYDIKDVGVDNAGAKAGLTFLVDLIKNKHMNADTDYSIAEAAFNKGETAMTINGPWAWSNIDTSKVNYGVTVLPTFKGQPSKPFVGVLSAGINAASPNKELAKEFLENYLLTDEGLEAVNKDKPLGAVALKSYEEELAKDPRIAATMENAQKGEIMPNIPQMSAFWYAVRTAVINAASGRQTVDEALKDAQTGGSGENLYFQSSDNGPQNQRNAPRITFGGPSDSTGSNQNGERSGARSKQRRPQGLPNNTASWFTALTQHGKEDLKFPRGQGVPDNTNSSPDDQIGYYRRATRRIRGGDGKMKDLSPRWYFYYLGTGPEAGLPYGANKDGIIWVATEGALNTPKDHIGTRNPANNAAIVLQLPQGTTLPKGFYAEGSRGGSQASSRSSSRSRNSSRNSTPGSSRGTSPARMAGNGGDAALALLLLDRLNQLESKMSGKGQQQQGQTVTKKSAAEASKKPRQKRTATKAYNVTQAFGRRGPEQTQGNFGDQELIRQGTDYKHWPQIAQFAPSASAFFGMSRIGMEVTPSGTWLTYTGAIKLDDKDPNFKDQVILLNKHIDAYKTFPPTEPKKDKKKKADETQALPQRQKKQQTVTLLPAADLDDFSKQLQQSMSSADSTQAGGSGHHHHHH

SEQ ID NO: 3635 - protein, 806 aa, Artificial Sequence
  Description of Artificial Sequence: Synthetic polypeptide
MKIEEGKLVIWINGDKGYNGLAEVGKKFEKDTGIKVTVEHPDKLEEKFPQVAATGDGPDIIFWAHDRFGGYAQSGLLAEITPDKAFQDKLYPFTWDAVRYNGKLIAYPIAVEALSLIYNKDLLPNPPKTWEEIPALDKELKAKGKSALMFNLQEPYFTWPLIAADGGYAFKYENGKYDIKDVGVDNAGAKAGLTFLVDLIKNKHMNADTDYSIAEAAFNKGETAMTINGPWAWSNIDTSKVNYGVTVLPTFKGQPSKPFVGVLSAGINAASPNKELAKEFLENYLLTDEGLEAVNKDKPLGAVALKSYEEELAKDPRIAATMENAQKGEIMPNIPQMSAFWYAVRTAVINAASGRQTVDEALKDAQTGGSGENLYFQSSDNGPQNQRNAPRITFGGPSDSTGSNQNGERSGARSKQRRPQGLPNNTASWFTALTQHGKEDLKFPRGQGVPINTNSSPDDQIGYYRRATRRIRGGDGKMKDLSPRWYFYYLGTGPEAGLPYGANKDGIIWVATEGALNTPKDHIGTRNPANNAAIVLQLPQGTTLPKGFYAEGSRGGSQASSRSSSRSRNSSRNSTPGSSRGTSPARMAGNGGDAALALLLLDRLNQLESKMSGKGQQQQGQTVTKKSAAEASKKPRQKRTATKAYNVTQAFGRRGPEQTQGNFGDQELIRQGTDYKHWPQIAQFAPSASAFFGMSRIGLEVTPSGTWLTYTGAIKLDDKDPNFKDQVILLNKHIDAYKTFPPTEPKKDKKKKADETQALPQRQKKQQTVTLLPAADLDDFSKQLQQSMSSADSTQAGGSGHHHHHH

SEQ ID NO: 3636 - protein, 806 aa, Artificial Sequence
  Description of Artificial Sequence: Synthetic polypeptide
MKIEEGKLVIWINGDKGYNGLAEVGKKFEKDTGIKVTVEHPDKLEEKFPQVAATGDGPDIIFWAHDRFGGYAQSGLLAEITPDKAFQDKLYPFTWDAVRYNGKLIAYPIAVEALSLIYNKDLLPNPPKTWEEIPALDKELKAKGKSALMFNLQEPYFTWPLIAADGGYAFKYENGKYDIKDVGVDNAGAKAGLTFLVDLIKNKHMNADTDYSIAEAAFNKGETAMTINGPWAWSNIDTSKVNYGVTVLPTFKGQPSKPFVGVLSAGINAASPNKELAKEFLENYLLTDEGLEAVNKDKPLGAVALKSYEEELAKDPRIAATMENAQKGEIMPNIPQMSAFWYAVRTAVINAASGRQTVDEALKDAQTGGSGENLYFQSSDNGPQNQRNAPRITFGGPSDSTGSNQNGERSGARSKQRRPQGLPNNTASWFTALTQHGKEDLKFPRGQGVPINTNSSPDDQIGYYRRATRRIRGGDGKMKDLSPRWYFYYLGTGPEATLPYGANKDGIIWVATEGALNTPKDHIGTRNPANNAAIVLQLPQGTTLPKGFYAEGSRGGSQASSRSSSRSRNSSRNSTPGSSRGTSPARMAGNGGDAALALLLLDRLNQLESKMSGKGQQQQGQTVTKKSAAEASKKPRQKRTATKAYNVTQAFGRRGPEQTQGNFGDQELIRQGTDYKHWPQIAQFAPSASAFFGMSRIGMEVTPSGTWLTYTGAIKLDDKDPNFKDQVILLNKHIDAYKTFPPTEPKKDKKKKADETQALPQRQKKQQTVTLLPAADLDDFSKQLQQSMSSADSTQAGGSGHHHHHH

SEQ ID NO: 3637 - protein, 806 aa, Artificial Sequence
  Description of Artificial Sequence: Synthetic polypeptide
MKIEEGKLVIWINGDKGYNGLAEVGKKFEKDTGIKVTVEHPDKLEEKFPQVAATGDGPDIIFWAHDRFGGYAQSGLLAEITPDKAFQDKLYPFTWDAVRYNGKLIAYPIAVEALSLIYNKDLLPNPPKTWEEIPALDKELKAKGKSALMFNLQEPYFTWPLIAADGGYAFKYENGKYDIKDVGVDNAGAKAGLTFLVDLIKNKHMNADTDYSIAEAAFNKGETAMTINGPWAWSNIDTSKVNYGVTVLPTFKGQPSKPFVGVLSAGINAASPNKELAKEFLENYLLTDEGLEAVNKDKPLGAVALKSYEEELAKDPRIAATMENAQKGEIMPNIPQMSAFWYAVRTAVINAASGRQTVDEALKDAQTGGSGENLYFQSSDNGPQNQRNAPRITFGGPSDSTGSNQNGERSGARSKQRRPQGLPNNTASWFTALTQHGKEDLKFPRGQGVPINTNSSPDDQIGYYRRATRRIRGGDGKMKDLSPRWYFYYLGTGPEAGLPYGANKDGIIWVATEGALNTPKDHIGTRNPANNAAIVLQLPQGTTLPKGFYAEGSRGGSQASSRSSSRSRNSSRNSTPGSSRGTSPARMAGNGGDAALALLLLDRLNQLESKMSGKGQQQQGQTVTKKSAAEASKKPRQKRTATKGYNVTQAFGRRGPEQTQGNFGDQDLIKLGTDYKHWPQIAQFAPSASAFFGMSRIGMRETPSGTWLTYTGAIKLDKKDPNFKDQVILLNKHIDAYKTFPPTEPKKDKKKKADETQALPQRQKKQQTVTLLPAADLDDFSKQLQQSMSSADSTQAGGSGHHHHHH

SEQ ID NO: 3638 - protein, 806 aa, Artificial Sequence
  Description of Artificial Sequence: Synthetic polypeptide
MKIEEGKLVIWINGDKGYNGLAEVGKKFEKDTGIKVTVEHPDKLEEKFPQVAATGDGPDIIFWAHDRFGGYAQSGLLAEITPDKAFQDKLYPFTWDAVRYNGKLIAYPIAVEALSLIYNKDLLPNPPKTWEEIPALDKELKAKGKSALMFNLQEPYFTWPLIAADGGYAFKYENGKYDIKDVGVDNAGAKAGLTFLVDLIKNKHMNADTDYSIAEAAFNKGETAMTINGPWAWSNIDTSKVNYGVTVLPTFKGQPSKPFVGVLSAGINAASPNKELAKEFLENYLLTDEGLEAVNKDKPLGAVALKSYEEELAKDPRIAATMENAQKGEIMPNIPQMSAFWYAVRTAVINAASGRQTVDEALKDAQTGGSGENLYFQSSDNGPQNQRNAPRITFGGPSDSTGSNQNGERSGARSKQRRPQGLPNNTASWFTALTQHGKEDLKFPRGQGVPINTNSSPDDQIGYYRRATRRIRGGDGKMKDLSPRWYFYYLGTGPEAGLPYGANKDGIIWVATEGALNTPKDHIGTRNPANNAAIVLQLPQGTTLPKGFYAEGSRGGSQASSRSSSRSRNSSRNSTPGSSRGTSPARMAGNGGDAALALLLLDRLNQLESKMSGKGQQQQGQTVTKKSAAEASKKPRQKRTATKAYNVTQAFGRRGPEQTQGNFGDQELIRQGTDYKHWPQIAQFVPSASAFFGMSRIGMEVTPSGTWLTYTGAIKLDDKDPNFKDQVILLNKHIDAYKTFPPTEPKKDKKKKADETQALPQRQKKQQTVTLLPAADLDDFSKQLQQSMSSADSTQAGGSGHHHHHH

SEQ ID NO: 3639 - protein, 806 aa, Artificial Sequence
  Description of Artificial Sequence: Synthetic polypeptide
MKIEEGKLVIWINGDKGYNGLAEVGKKFEKDTGIKVTVEHPDKLEEKFPQVAATGDGPDIIFWAHDRFGGYAQSGLLAEITPDKAFQDKLYPFTWDAVRYNGKLIAYPIAVEALSLIYNKDLLPNPPKTWEEIPALDKELKAKGKSALMFNLQEPYFTWPLIAADGGYAFKYENGKYDIKDVGVDNAGAKAGLTFLVDLIKNKHMNADTDYSIAEAAFNKGETAMTINGPWAWSNIDTSKVNYGVTVLPTFKGQPSKPFVGVLSAGINAASPNKELAKEFLENYLLTDEGLEAVNKDKPLGAVALKSYEEELAKDPRIAATMENAQKGEIMPNIPQMSAFWYAVRTAVINAASGRQTVDEALKDAQTGGSGENLYFQSSDNGPQNQRNAPRITFGGPSDSTGSNQNGERSGARSKQRRPQGLPNNTASWFTALTQHGKEDLKFPRGQGVPINTNSSPDDQIGYYRRATRRIRGGDGKMKDLSPRWYFYYLGTGPEAGLPYGANKDGIIWVATEGALNTPKDHIGTRNPANNAAIVLQLPQGTTLPKGFYAEGSRGGSQASSRSSSRSRNSSRNSTPGSSRGTSPARMAGNGGDAALALLLLDRLNQLESKMSGKGQQQQGQTVTKKSAAEASKKPRQKRTATKGYNVTQAFGRRGPEQTQGNFGDQDLNKLGTDYKHWPQIAQFAPSASAFFGMSRIGTEETPSGTWLTYTGAIKLDKKDPNFKDQVILLNKHIDAYKTFPPTEPKKDKKKKADETQALPQRQKKQQTVTLLPAADLDDFSKQLQQSMSSADSTQAGGSGHHHHHH

SEQ ID NO: 3640 - protein, 806 aa, Artificial Sequence
  Description of Artificial Sequence: Synthetic polypeptide
MKIEEGKLVIWINGDKGYNGLAEVGKKFEKDTGIKVTVEHPDKLEEKFPQVAATGDGPDIIFWAHDRFGGYAQSGLLAEITPDKAFQDKLYPFTWDAVRYNGKLIAYPIAVEALSLIYNKDLLPNPPKTWEEIPALDKELKAKGKSALMFNLQEPYFTWPLIAADGGYAFKYENGKYDIKDVGVDNAGAKAGLTFLVDLIKNKHMNADTDYSIAEAAFNKGETAMTINGPWAWSNIDTSKVNYGVTVLPTFKGQPSKPFVGVLSAGINAASPNKELAKEFLENYLLTDEGLEAVNKDKPLGAVALKSYEEELAKDPRIAATMENAQKGEIMPNIPQMSAFWYAVRTAVINAASGRQTVDEALKDAQTGGSGENLYFQSSDNGPQNQRNAPRITFGGPSDSTGSNQNGERSGARSKQRRPQGLPNNTASWFTALTQHGKEDLKFPRGQGTPINTNSSPDDQIGYYRRATRRIRGGDGKMKDLSPRWYFYYLGTGPEAGLPYGANKDGIIWVATEGALNTPKDHIGTRNPANNAAIVLQLPQGTTLPKGFYAEGSRGGSQASSRSSSRSRNSSRNSTPGSSRGTSPARMAGNGGDAALALLLLDRLNQLESKMSGKGQQQQGQTVTKKSAAEASKKPRQKRTATKAYNVTQAFGRRGPEQTQGNFGDQELIRQGTDYKHWPQIAQFAPSASAFFGMSRIGMEVTPSGTWLTYTGAIKLDDKDPNFKDQVILLNKHIDAYKTFPPTEPKKDKKKKADETQALPQRQKKQQTVTLLPAADLDDFSKQLQQSMSSADSTQAGGSGHHHHHH

SEQ ID NO: 3641 - protein, 806 aa, Artificial Sequence
  Description of Artificial Sequence: Synthetic polypeptide
MKIEEGKLVIWINGDKGYNGLAEVGKKFEKDTGIKVTVEHPDKLEEKFPQVAATGDGPDIIFWAHDRFGGYAQSGLLAEITPDKAFQDKLYPFTWDAVRYNGKLIAYPIAVEALSLIYNKDLLPNPPKTWEEIPALDKELKAKGKSALMFNLQEPYFTWPLIAADGGYAFKYENGKYDIKDVGVDNAGAKAGLTFLVDLIKNKHMNADTDYSIAEAAFNKGETAMTINGPWAWSNIDTSKVNYGVTVLPTFKGQPSKPFVGVLSAGINAASPNKELAKEFLENYLLTDEGLEAVNKDKPLGAVALKSYEEELAKDPRIAATMENAQKGEIMPNIPQMSAFWYAVRTAVINAASGRQTVDEALKDAQTGGSGENLYFQSSDNGPQNQRNAPRITFGGPSDSTGSNQNGERSGARSKQRRPQGLPNNTASWFTALTQHGKEDLKFPRGQGVPINTNSSPDDQIGYYRRATRRIRGGDGKMKDLSPRWYFYYLGTGPEAGLPYGANKDGIIWVATEGALNTPKDHIGTRNPANNAAIVLQLPQGTTLPKGFYAEGSRGGSQASSRSSSRSRNSSRNSTPGEERGTEPARMAGNGGDAALALLLLDRLNQLESKMSGKGQQQQGQTVTKKSAAEASKKPRQKRTATKAYNVTQAFGRRGPEQTQGNFGDQELIRQGTDYKHWPQIAQFAPSASAFFGMSRIGMEVTPSGTWLTYTGAIKLDDKDPNFKDQVILLNKHIDAYKTFPPTEPKKDKKKKADETQALPQRQKKQQTVTLLPAADLDDFSKQLQQSMSSADSTQAGGSGHHHHHH

SEQ ID NO: 3642 - protein, 806 aa, Artificial Sequence
  Description of Artificial Sequence: Synthetic polypeptide
MKIEEGKLVIWINGDKGYNGLAEVGKKFEKDTGIKVTVEHPDKLEEKFPQVAATGDGPDIIFWAHDRFGGYAQSGLLAEITPDKAFQDKLYPFTWDAVRYNGKLIAYPIAVEALSLIYNKDLLPNPPKTWEEIPALDKELKAKGKSALMFNLQEPYFTWPLIAADGGYAFKYENGKYDIKDVGVDNAGAKAGLTFLVDLIKNKHMNADTDYSIAEAAFNKGETAMTINGPWAWSNIDTSKVNYGVTVLPTFKGQPSKPFVGVLSAGINAASPNKELAKEFLENYLLTDEGLEAVNKDKPLGAVALKSYEEELAKDPRIAATMENAQKGEIMPNIPQMSAFWYAVRTAVINAASGRQTVDEALKDAQTGGSGENLYFQSSDNGPQNQRNAPRITFGGPSDSTGSNQNGERSGARSKQRRPQGLPNNTASWFTPLTQHGKEDLKFPPGQGVPINTNSSPDDQIGYYRRATRRIRGGDGKMKDLPPRWYFYYLGTGPEADLPYGQVKPGIVWVAEEGALNTPKDHIGTRNPANNAAIPLQLPPGTTLPKGFYAEGSRGGSQASSRSSSRSRNSSRNSTPGSSRGTSPARMAGNGGDAALALLLLDRLNQLESKMSGKGQQQQGQTVTKKSAAEASKKPRQKRTATKAYNVTQAFGRRGPEQTQGNFGDQELIRQGTDYKHWPQIAQFAPSASAFFGMSRIGMEVTPSGTWLTYTGAIKLDDKDPNFKDQVILLNKHIDAYKTFPPTEPKKDKKKKADETQALPQRQKKQQTVTLLPAADLDDFSKQLQQSMSSADSTQAGGSGHHHHHH

SEQ ID NO: 3643 - protein, 806 aa, Artificial Sequence
  Description of Artificial Sequence: Synthetic polypeptide
MKIEEGKLVIWINGDKGYNGLAEVGKKFEKDTGIKVTVEHPDKLEEKFPQVAATGDGPDIIFWAHDRFGGYAQSGLLAEITPDKAFQDKLYPFTWDAVRYNGKLIAYPIAVEALSLIYNKDLLPNPPKTWEEIPALDKELKAKGKSALMFNLQEPYFTWPLIAADGGYAFKYENGKYDIKDVGVDNAGAKAGLTFLVDLIKNKHMNADTDYSIAEAAFNKGETAMTINGPWAWSNIDTSKVNYGVTVLPTFKGQPSKPFVGVLSAGINAASPNKELAKEFLENYLLTDEGLEAVNKDKPLGAVALKSYEEELAKDPRIAATMENAQKGEIMPNIPQMSAFWYAVRTAVINAASGRQTVDEALKDAQTGGSGENLYFQSSDNGPQNQRNAPRITFGGPSDSTGSNQNGERSGARSKQRRPQGLPNNTASWFTALTQHGKEDLKFPRGQGVPINTNSSPDDQIGYYRRATRRIRGGDGKMKDLSPRWYFYYLGTGPEAGLPYGAEKDGIIWVATEGALNTPKDHIGTRNPANNAAIVLQLPQGTTLPKGFYAEGSRGGSQASSRSSSRSRNSSRNSTPGSSRGTSPARMAGNGGDAALALLLLDRLNQLESKMSGKGQQQQGQTVTKKSAAEASKKPRQKRTATKAYNVTQAFGRRGPEQTQGNFGDQELIRQGTDYKHWPQIAQFAPSASAFFGMSRIGMEVTPSGTWLTYTGAIKLDDKDPNFKDQVILLNKHIDAYKTFPPTEPKKDKKKKADETQALPQRQKKQQTVTLLPAADLDDFSKQLQQSMSSADSTQAGGSGHHHHHH

SEQ ID NO: 3644 - protein, 806 aa, Artificial Sequence
  Description of Artificial Sequence: Synthetic polypeptide
MKIEEGKLVIWINGDKGYNGLAEVGKKFEKDTGIKVTVEHPDKLEEKFPQVAATGDGPDIIFWAHDRFGGYAQSGLLAEITPDKAFQDKLYPFTWDAVRYNGKLIAYPIAVEALSLIYNKDLLPNPPKTWEEIPALDKELKAKGKSALMFNLQEPYFTWPLIAADGGYAFKYENGKYDIKDVGVDNAGAKAGLTFLVDLIKNKHMNADTDYSIAEAAFNKGETAMTINGPWAWSNIDTSKVNYGVTVLPTFKGQPSKPFVGVLSAGINAASPNKELAKEFLENYLLTDEGLEAVNKDKPLGAVALKSYEEELAKDPRIAATMENAQKGEIMPNIPQMSAFWYAVRTAVINAASGRQTVDEALKDAQTGGSGENLYFQSSDNGPQNQRNAPRITFGGPSDSTGSNQNGERSGARSKQRRPQGLPNNTASWFTALTQHGKEDLKFPRGQGVPINTNSSPDDQIGYYRRATRRIRGGDGKMKDLSPRWYFYYLGTGPEAELPYGANKDGIIWVATEGALNTPKDHIGTRNPANNAAIVLQLPQGTTLPKGFYAEGSRGGSQASSRSSSRSRNSSRNSTPGSSRGTSPARMAGNGGDAALALLLLDRLNQLESKMSGKGQQQQGQTVTKKSAAEASKKPRQKRTATKAYNVTQAFGRRGPEQTQGNFGDQELIRQGTDYKHWPQIAQFAPSASAFFGMSRIGMEVTPSGTWLTYTGAIKLDDKDPNFKDQVILLNKHIDAYKTFPPTEPKKDKKKKADETQALPQRQKKQQTVTLLPAADLDDFSKQLQQSMSSADSTQAGGSGHHHHHH

SEQ ID NO: 3645 - protein, 806 aa, Artificial Sequence
  Description of Artificial Sequence: Synthetic polypeptide
MKIEEGKLVIWINGDKGYNGLAEVGKKFEKDTGIKVTVEHPDKLEEKFPQVAATGDGPDIIFWAHDRFGGYAQSGLLAEITPDKAFQDKLYPFTWDAVRYNGKLIAYPIAVEALSLIYNKDLLPNPPKTWEEIPALDKELKAKGKSALMFNLQEPYFTWPLIAADGGYAFKYENGKYDIKDVGVDNAGAKAGLTFLVDLIKNKHMNADTDYSIAEAAFNKGETAMTINGPWAWSNIDTSKVNYGVTVLPTFKGQPSKPFVGVLSAGINAASPNKELAKEFLENYLLTDEGLEAVNKDKPLGAVALKSYEEELAKDPRIAATMENAQKGEIMPNIPQMSAFWYAVRTAVINAASGRQTVDEALKDAQTGGSGENLYFQSSDNGPQNQRNAPRITFGGPSDSTGSNQNGERSGARSKQRRPQGLPNNTASWFTALTQHGKEDLKFPRGQGVPINTNSSPDDQIGYYRRATRRIRGGDGKMKDLSPRWYFYYLGTGPEAGLPYGANKDGIIWVATEGALNTPKDHIGTRNPANNAAIVLQLPQGTVLPKGFYAEGSRGGSQASSRSSSRSRNSSRNSTPGSSRGTSPARMAGNGGDAALALLLLDRLNQLESKMSGKGQQQQGQTVTKKSAAEASKKPRQKRTATKAYNVTQAFGRRGPEQTQGNFGDQELIRQGTDYKHWPQIAQFAPSASAFFGMSRIGMEVTPSGTWLTYTGAIKLDDKDPNFKDQVILLNKHIDAYKTFPPTEPKKDKKKKADETQALPQRQKKQQTVTLLPAADLDDFSKQLQQSMSSADSTQAGGSGHHHHHH

SEQ ID NO: 3646 - protein, 806 aa, Artificial Sequence
  Description of Artificial Sequence: Synthetic polypeptide
MKIEEGKLVIWINGDKGYNGLAEVGKKFEKDTGIKVTVEHPDKLEEKFPQVAATGDGPDIIFWAHDRFGGYAQSGLLAEITPDKAFQDKLYPFTWDAVRYNGKLIAYPIAVEALSLIYNKDLLPNPPKTWEEIPALDKELKAKGKSALMFNLQEPYFTWPLIAADGGYAFKYENGKYDIKDVGVDNAGAKAGLTFLVDLIKNKHMNADTDYSIAEAAFNKGETAMTINGPWAWSNIDTSKVNYGVTVLPTFKGQPSKPFVGVLSAGINAASPNKELAKEFLENYLLTDEGLEAVNKDKPLGAVALKSYEEELAKDPRIAATMENAQKGEIMPNIPQMSAFWYAVRTAVINAASGRQTVDEALKDAQTGGSGENLYFQSSDNGPQNQRNAPRITFGGPSDSTGSNQNGERSGARSKQRRPQGLPNNTASWFTALTQHGKEDLKFPRGQGVPINTNSSPDDQIGYYRRATRRIRGGDGKMKDLSPNWYFYYLGTGPEAGLPYGANKDGIIWVATEGALNTPKDHIGTRNPANNAAIVLQLPQGTTLPKGFYAEGSRGGSQASSRSSSRSRNSSRNSTPGSSRGTSPARMAGNGGDAALALLLLDRLNQLESKMSGKGQQQQGQTVTKKSAAEASKKPRQKRTATKAYNVTQAFGRRGPEQTQGNFGDQELIRQGTDYKHWPQIAQFAPSASAFFGMSRIGMEVTPSGTWLTYTGAIKLDDKDPNFKDQVILLNKHIDAYKTFPPTEPKKDKKKKADETQALPQRQKKQQTVTLLPAADLDDFSKQLQQSMSSADSTQAGGSGHHHHHH

SEQ ID NO: 3647 - protein, 806 aa, Artificial Sequence
  Description of Artificial Sequence: Synthetic polypeptide
MKIEEGKLVIWINGDKGYNGLAEVGKKFEKDTGIKVTVEHPDKLEEKFPQVAATGDGPDIIFWAHDRFGGYAQSGLLAEITPDKAFQDKLYPFTWDAVRYNGKLIAYPIAVEALSLIYNKDLLPNPPKTWEEIPALDKELKAKGKSALMFNLQEPYFTWPLIAADGGYAFKYENGKYDIKDVGVDNAGAKAGLTFLVDLIKNKHMNADTDYSIAEAAFNKGETAMTINGPWAWSNIDTSKVNYGVTVLPTFKGQPSKPFVGVLSAGINAASPNKELAKEFLENYLLTDEGLEAVNKDKPLGAVALKSYEEELAKDPRIAATMENAQKGEIMPNIPQMSAFWYAVRTAVINAASGRQTVDEALKDAQTGGSGENLYFQSSDNGPQNQRNAPRITFGGPSDSTGSNQNGERSGARSKQRRPQGLPNNTASWFTALTQHGKEDLKFPRGQGVPINTNSSPDDQIGYYRRATRRIRGGDGKMKDLSPRWYFYYLGTGPEAGLPYGANKDGIIWVATEGALNTPKDHIGTRNPANNAAIVLQLPQGTTLPKGFYAEGSRGGSQASSRSSSRSRNSSRNSTPGSSRGTSPARMAGNGGDAALALLLLDRLNQLESKMSGKGQQQQGQTVTKKSAAEASKKPRQKRTATKAYNVTQAFGRRGPEDTQGNFGDQELIRQGTDYKHWPQIAQFAPSASAFFGMSRIGMEVTPSGTWLTYTGAIKLDDKDPNFKDQVILLNKHIDAYKTFPPTEPKKDKKKKADETQALPQRQKKQQTVTLLPAADLDDFSKQLQQSMSSADSTQAGGSGHHHHHH

SEQ ID NO: 3648 - protein, 806 aa, Artificial Sequence
  Description of Artificial Sequence: Synthetic polypeptide
MKIEEGKLVIWINGDKGYNGLAEVGKKFEKDTGIKVTVEHPDKLEEKFPQVAATGDGPDIIFWAHDRFGGYAQSGLLAEITPDKAFQDKLYPFTWDAVRYNGKLIAYPIAVEALSLIYNKDLLPNPPKTWEEIPALDKELKAKGKSALMFNLQEPYFTWPLIAADGGYAFKYENGKYDIKDVGVDNAGAKAGLTFLVDLIKNKHMNADTDYSIAEAAFNKGETAMTINGPWAWSNIDTSKVNYGVTVLPTFKGQPSKPFVGVLSAGINAASPNKELAKEFLENYLLTDEGLEAVNKDKPLGAVALKSYEEELAKDPRIAATMENAQKGEIMPNIPQMSAFWYAVRTAVINAASGRQTVDEALKDAQTGGSGENLYFQSSDNGPQNQRNAPRITFGGPSDSTGSNQNGERSGARSKQRRPQGLPNNTASWFTALTQHGKEDLKFPRGQGVPINTNSSPDDQIGYYRRATRRIRGGDGKMKDLSPRWYFYYLGTGPEAGLPYGANKDGIIWVATEGALNTPKDHIGTRNPANNAAIVLQLPQGTTLPKGFYAEGSRGGSQASSRSSSRSRNSSRNSTPGSSRGTSPARMAGNGGDAALALLLLDRLNQLESKMSGKGQQQQGQTVTKKSAAEMSKKPRQKRTATKGFNVTQCFGPRGPEQTQGNFGDADLIKKGTDYKHWPQIAQFAPSASAFFGMSRISSKETPSGTWLTYTGAIKLDKDDPNFKDQVILLNKHIDAYKTFPPTEPKKDKKKKADETQALPQRQKKQQTVTLLPAADLDDFSKQLQQSMSSADSTQAGGSGHHHHHH

SEQ ID NO: 3649 - protein, 806 aa, Artificial Sequence
  Description of Artificial Sequence: Synthetic polypeptide
MKIEEGKLVIWINGDKGYNGLAEVGKKFEKDTGIKVTVEHPDKLEEKFPQVAATGDGPDIIFWAHDRFGGYAQSGLLAEITPDKAFQDKLYPFTWDAVRYNGKLIAYPIAVEALSLIYNKDLLPNPPKTWEEIPALDKELKAKGKSALMFNLQEPYFTWPLIAADGGYAFKYENGKYDIKDVGVDNAGAKAGLTFLVDLIKNKHMNADTDYSIAEAAFNKGETAMTINGPWAWSNIDTSKVNYGVTVLPTFKGQPSKPFVGVLSAGINAASPNKELAKEFLENYLLTDEGLEAVNKDKPLGAVALKSYEEELAKDPRIAATMENAQKGEIMPNIPQMSAFWYAVRTAVINAASGRQTVDEALKDAQTGGSGENLYFQSSDNGPQNQRNAPRITFGGPSDSTGSNQNGERSGARSKQRRPQGLPNNTASWFTALTQHGKEDLKFPRGQGVPINTNSSPDDQIGYYRRATRRIRGGDGKMKDLSPRWYFYYLGTGPEAGLPYGANKDGIIWVATEGALNTPKDHIGTRNPANNAAIVLQLPQGTTLPKGFYNEGSRGGSQASSRSSSRSRNSSRNSTPGSSRGTSPARMAGNGGDAALALLLLDRLNQLESKMSGKGQQQQGQTVTKKSAAEASKKPRQKRTATKAYNVTQAFGRRGPEQTQGNFGDQELIRQGTDYKHWPQIAQFAPSASAFFGMSRIGMEVTPSGTWLTYTGAIKLDDKDPNFKDQVILLNKHIDAYKTFPPTEPKKDKKKKADETQALPQRQKKQQTVTLLPAADLDDFSKQLQQSMSSADSTQAGGSGHHHHHH

SEQ ID NO: 3650 - protein, 806 aa, Artificial Sequence
  Description of Artificial Sequence: Synthetic polypeptide
MKIEEGKLVIWINGDKGYNGLAEVGKKFEKDTGIKVTVEHPDKLEEKFPQVAATGDGPDIIFWAHDRFGGYAQSGLLAEITPDKAFQDKLYPFTWDAVRYNGKLIAYPIAVEALSLIYNKDLLPNPPKTWEEIPALDKELKAKGKSALMFNLQEPYFTWPLIAADGGYAFKYENGKYDIKDVGVDNAGAKAGLTFLVDLIKNKHMNADTDYSIAEAAFNKGETAMTINGPWAWSNIDTSKVNYGVTVLPTFKGQPSKPFVGVLSAGINAASPNKELAKEFLENYLLTDEGLEAVNKDKPLGAVALKSYEEELAKDPRIAATMENAQKGEIMPNIPQMSAFWYAVRTAVINAASGRQTVDEALKDAQTGGSGENLYFQSSDNGPQNQRNAPRITFGGPSDSTGSNQNGERSGARSKQRRPQGLPNNTASWFTGLTQHGKEDLKFPPGQGVPINTNSSPDDQIGYYRRATRRIRGGDGKMKDLPPRWYFYYLGTGPEADLPYGQVKDGIFWVAEEGALNTPKDHIGTRNPANNAAIPLQLPPGTTLPKGFYAEGSRGGSQASSRSSSRSRNSSRNSTPGSSRGTSPARMAGNGGDAALALLLLDRLNQLESKMSGKGQQQQGQTVTKKSAAEASKKPRQKRTATKAYNVTQAFGRRGPEQTQGNFGDQELIRQGTDYKHWPQIAQFAPSASAFFGMSRIGMEVTPSGTWLTYTGAIKLDDKDPNFKDQVILLNKHIDAYKTFPPTEPKKDKKKKADETQALPQRQKKQQTVTLLPAADLDDFSKQLQQSMSSADSTQAGGSGHHHHHH

SEQ ID NO: 3651 - protein, 806 aa, Artificial Sequence
  Description of Artificial Sequence: Synthetic polypeptide
MKIEEGKLVIWINGDKGYNGLAEVGKKFEKDTGIKVTVEHPDKLEEKFPQVAATGDGPDIIFWAHDRFGGYAQSGLLAEITPDKAFQDKLYPFTWDAVRYNGKLIAYPIAVEALSLIYNKDLLPNPPKTWEEIPALDKELKAKGKSALMFNLQEPYFTWPLIAADGGYAFKYENGKYDIKDVGVDNAGAKAGLTFLVDLIKNKHMNADTDYSIAEAAFNKGETAMTINGPWAWSNIDTSKVNYGVTVLPTFKGQPSKPFVGVLSAGINAASPNKELAKEFLENYLLTDEGLEAVNKDKPLGAVALKSYEEELAKDPRIAATMENAQKGEIMPNIPQMSAFWYAVRTAVINAASGRQTVDEALKDAQTGGSGENLYFQSSDNGPQNQRNAPRITFGGPSDSTGSNQNGERSGARSKQRRPQGLPNNTASWFTPLTQHGKEDLKFPPGQGVPINTNSSPDDQIGYYRRATRRIRGGDGKMKDLPPRWYFYYLGTGPEADLPYGAVKDGIFWVAAEGALNTPKDHIGTRNPANNAAIPLQLPPGTTLPKGFYAEGSRGGSQASSRSSSRSRNSSRNSTPGSSRGTSPARMAGNGGDAALALLLLDRLNQLESKMSGKGQQQQGQTVTKKSAAEASKKPRQKRTATKAYNVTQAFGRRGPEQTQGNFGDQELIRQGTDYKHWPQIAQFAPSASAFFGMSRIGMEVTPSGTWLTYTGAIKLDDKDPNFKDQVILLNKHIDAYKTFPPTEPKKDKKKKADETQALPQRQKKQQTVTLLPAADLDDFSKQLQQSMSSADSTQAGGSGHHHHHH

SEQ ID NO: 3652 - protein, 806 aa, Artificial Sequence
  Description of Artificial Sequence: Synthetic polypeptide
MKIEEGKLVIWINGDKGYNGLAEVGKKFEKDTGIKVTVEHPDKLEEKFPQVAATGDGPDIIFWAHDRFGGYAQSGLLAEITPDKAFQDKLYPFTWDAVRYNGKLIAYPIAVEALSLIYNKDLLPNPPKTWEEIPALDKELKAKGKSALMFNLQEPYFTWPLIAADGGYAFKYENGKYDIKDVGVDNAGAKAGLTFLVDLIKNKHMNADTDYSIAEAAFNKGETAMTINGPWAWSNIDTSKVNYGVTVLPTFKGQPSKPFVGVLSAGINAASPNKELAKEFLENYLLTDEGLEAVNKDKPLGAVALKSYEEELAKDPRIAATMENAQKGEIMPNIPQMSAFWYAVRTAVINAASGRQTVDEALKDAQTGGSGENLYFQSSDNGPQNQRNAPRITFGGPSDSTGSNQNGERSGARSKQRRPQGLPNNTASWFTALTQHGKEDLKFPRGQGVPINTNSSPDDQIGYYRRATRRIRGGDGKMKDLSPRWYFYYLGTGPEAGLPYGANKDGIIWVATEGALNTPKDHIGTRNPANNAAIVLQLPQGTTLPKGFYAEGSRGGSQASSRSSSRSRNSSRNSTPGSSRGTSPARMAGNGGDAALALLLLDRLNQLESKMSGKGQQQQGQTVTKKSAAEASKKPRQKRTATKAYNVTQAFGRRGPEQTQGNFGDQELIRQGTDYKHWPQIAQFAPSASAFFGMSRIGMEVTPSGTWLTYTGAIKLDDKDPNFKDQVILLNEHIDAYKTFPPTEPKKDKKKKADETQALPQRQKKQQTVTLLPAADLDDFSKQLQQSMSSADSTQAGGSGHHHHHH

SEQ ID NO: 3653 - protein, 806 aa, Artificial Sequence
  Description of Artificial Sequence: Synthetic polypeptide
MKIEEGKLVIWINGDKGYNGLAEVGKKFEKDTGIKVTVEHPDKLEEKFPQVAATGDGPDIIFWAHDRFGGYAQSGLLAEITPDKAFQDKLYPFTWDAVRYNGKLIAYPIAVEALSLIYNKDLLPNPPKTWEEIPALDKELKAKGKSALMFNLQEPYFTWPLIAADGGYAFKYENGKYDIKDVGVDNAGAKAGLTFLVDLIKNKHMNADTDYSIAEAAFNKGETAMTINGPWAWSNIDTSKVNYGVTVLPTFKGQPSKPFVGVLSAGINAASPNKELAKEFLENYLLTDEGLEAVNKDKPLGAVALKSYEEELAKDPRIAATMENAQKGEIMPNIPQMSAFWYAVRTAVINAASGRQTVDEALKDAQTGGSGENLYFQSSDNGPQNQRNAPRITFGGPSDSTGSNQNGERSGARSKQRRPQGLPNNTASWFTALTQHGKEDLKFPRGQGVPINTNSSPDDQIGYYRRATRRIRGGDGKMKDLSPRWYFYYLGTGPEAGLPYGANKDGIIWVATEGALNTPKDHIGTRNPANNAAIVLQLPQGTTLPKGFYAEGSRGGSQASSRSSSRSRNSSRNSTPGSSRGTSPARMAGNGGDAALALLLLDRLNQLESKMSGKGQQQQGQTVTKKSAAEASKKPRQKRTATKAYNVTQAFGRRGPEQTQGNFGDQELIRQGTDYKHWPQIAQFAPSASAFFGMSRIGMEVTPSGTWLTYTGSIKLDDKDPNFKDQVILLNKHIDAYKTFPPTEPKKDKKKKADETQALPQRQKKQQTVTLLPAADLDDFSKQLQQSMSSADSTQAGGSGHHHHHH

SEQ ID NO: 3654 - protein, 806 aa, Artificial Sequence
  Description of Artificial Sequence: Synthetic polypeptide
MKIEEGKLVIWINGDKGYNGLAEVGKKFEKDTGIKVTVEHPDKLEEKFPQVAATGDGPDIIFWAHDRFGGYAQSGLLAEITPDKAFQDKLYPFTWDAVRYNGKLIAYPIAVEALSLIYNKDLLPNPPKTWEEIPALDKELKAKGKSALMFNLQEPYFTWPLIAADGGYAFKYENGKYDIKDVGVDNAGAKAGLTFLVDLIKNKHMNADTDYSIAEAAFNKGETAMTINGPWAWSNIDTSKVNYGVTVLPTFKGQPSKPFVGVLSAGINAASPNKELAKEFLENYLLTDEGLEAVNKDKPLGAVALKSYEEELAKDPRIAATMENAQKGEIMPNIPQMSAFWYAVRTAVINAASGRQTVDEALKDAQTGGSGENLYFQSSDNGPQNQRNAPRITFGGPSDSTGSNQNGERSGARSKQRRPQGLPNNTASWFTALTQHGKEDLKFPRGQGVPINTNSSPDDQIGYYRRATRRMRGGDGKMKDLSPRWYFYYLGTGPEAGLPYGANKDGIIWVATEGALNTPKDHIGTRNPANNAAIVLQLPQGTTLPKGFYAEGSRGGSQASSRSSSRSRNSSRNSTPGSSRGTSPARMAGNGGDAALALLLLDRLNQLESKMSGKGQQQQGQTVTKKSAAEASKKPRQKRTATKAYNVTQAFGRRGPEQTQGNFGDQELIRQGTDYKHWPQIAQFAPSASAFFGMSRIGMEVTPSGTWLTYTGAIKLDDKDPNFKDQVILLNKHIDAYKTFPPTEPKKDKKKKADETQALPQRQKKQQTVTLLPAADLDDFSKQLQQSMSSADSTQAGGSGHHHHHH

SEQ ID NO: 3655 - protein, 806 aa, Artificial Sequence
  Description of Artificial Sequence: Synthetic polypeptide
MKIEEGKLVIWINGDKGYNGLAEVGKKFEKDTGIKVTVEHPDKLEEKFPQVAATGDGPDIIFWAHDRFGGYAQSGLLAEITPDKAFQDKLYPFTWDAVRYNGKLIAYPIAVEALSLIYNKDLLPNPPKTWEEIPALDKELKAKGKSALMFNLQEPYFTWPLIAADGGYAFKYENGKYDIKDVGVDNAGAKAGLTFLVDLIKNKHMNADTDYSIAEAAFNKGETAMTINGPWAWSNIDTSKVNYGVTVLPTFKGQPSKPFVGVLSAGINAASPNKELAKEFLENYLLTDEGLEAVNKDKPLGAVALKSYEEELAKDPRIAATMENAQKGEIMPNIPQMSAFWYAVRTAVINAASGRQTVDEALKDAQTGGSGENLYFQSSDNGPQNQRNAPRITFGGPSDSTGSNQNGERSGARSKQRRPQGLPNNTASWFTPLTQHGKEDLKFPPGQGVPINTNSSPDDQIGYYRRATRRIRGGDGKMKDLPPRWYFYYLGTGPEADLPYGQVKDGIFWVAAEGALNTPKDHIGTRNPANNAAIPLQLPPGTTLPKGFYAEGSRGGSQASSRSSSRSRNSSRNSTPGSSRGTSPARMAGNGGDAALALLLLDRLNQLESKMSGKGQQQQGQTVTKKSAAEASKKPRQKRTATKAYNVTQAFGRRGPEQTQGNFGDQELIRQGTDYKHWPQIAQFAPSASAFFGMSRIGMEVTPSGTWLTYTGAIKLDDKDPNFKDQVILLNKHIDAYKTFPPTEPKKDKKKKADETQALPQRQKKQQTVTLLPAADLDDFSKQLQQSMSSADSTQAGGSGHHHHHH

SEQ ID NO: 3656 - protein, 806 aa, Artificial Sequence
  Description of Artificial Sequence: Synthetic polypeptide
MKIEEGKLVIWINGDKGYNGLAEVGKKFEKDTGIKVTVEHPDKLEEKFPQVAATGDGPDIIFWAHDRFGGYAQSGLLAEITPDKAFQDKLYPFTWDAVRYNGKLIAYPIAVEALSLIYNKDLLPNPPKTWEEIPALDKELKAKGKSALMFNLQEPYFTWPLIAADGGYAFKYENGKYDIKDVGVDNAGAKAGLTFLVDLIKNKHMNADTDYSIAEAAFNKGETAMTINGPWAWSNIDTSKVNYGVTVLPTFKGQPSKPFVGVLSAGINAASPNKELAKEFLENYLLTDEGLEAVNKDKPLGAVALKSYEEELAKDPRIAATMENAQKGEIMPNIPQMSAFWYAVRTAVINAASGRQTVDEALKDAQTGGSGENLYFQSSDNGPQNQRNAPRITFGGPSDSTGSNQNGERSGARSKQRRPQGLPNNTASWFTALTQHGKEDLKFPRGQGVPINTNSSPDDQIGYYRRATRRIRGGDGKMKDLSPRWYFYYLGTGPEAGLPYGANKDGIIWVATEGALNTPKDHIGTRNPANNAAIVLQLPQGTTLPKGFYAEGSRGGSQASSRSSSRSRNSSRNSTPGSSRGTSPARMAGNGGDAALALLLLDRLNQLESKMSGKGQQQQGQTVTKKSAAEASKKPRQKRTATKAYNVTQAFGRRGPEQTQGNFGDQELIRQGTDYKHWPQIAQFAPSASAFFGMSRIGMEVTPSGTWLTYTGAITLDDKDPNFKDQVILLNKHIDAYKTFPPTEPKKDKKKKADETQALPQRQKKQQTVTLLPAADLDDFSKQLQQSMSSADSTQAGGSGHHHHHH

SEQ ID NO: 3657 - protein, 806 aa, Artificial Sequence
  Description of Artificial Sequence: Synthetic polypeptide
MKIEEGKLVIWINGDKGYNGLAEVGKKFEKDTGIKVTVEHPDKLEEKFPQVAATGDGPDIIFWAHDRFGGYAQSGLLAEITPDKAFQDKLYPFTWDAVRYNGKLIAYPIAVEALSLIYNKDLLPNPPKTWEEIPALDKELKAKGKSALMFNLQEPYFTWPLIAADGGYAFKYENGKYDIKDVGVDNAGAKAGLTFLVDLIKNKHMNADTDYSIAEAAFNKGETAMTINGPWAWSNIDTSKVNYGVTVLPTFKGQPSKPFVGVLSAGINAASPNKELAKEFLENYLLTDEGLEAVNKDKPLGAVALKSYEEELAKDPRIAATMENAQKGEIMPNIPQMSAFWYAVRTAVINAASGRQTVDEALKDAQTGGSGENLYFQSSDNGPQNQRNAPRITFGGPSDSTGSNQNGERSGARSKQRRPQGLPNNTASWFTGLTQFGKEDLKFPPGQGVPINTNSSPDDQIGYYRRATRRIRGGDGKMKDLPPRWYFYYLGTGPHADLPYGQKQPGVFWVARPGALNTPKDHIGTRNPANNAAIPLQLPPGTKLPKGFYAEGSRGGSQASSRSSSRSRNSSRNSTPGSSRGTSPARMAGNGGDAALALLLLDRLNQLESKMSGKGQQQQGQTVTKKSAAEASKKPRQKRTATKAYNVTQAFGRRGPEQTQGNFGDQELIRQGTDYKHWPQIAQFAPSASAFFGMSRIGMEVTPSGTWLTYTGAIKLDDKDPNFKDQVILLNKHIDAYKTFPPTEPKKDKKKKADETQALPQRQKKQQTVTLLPAADLDDFSKQLQQSMSSADSTQAGGSGHHHHHH

SEQ ID NO: 3658 - protein, 806 aa, Artificial Sequence
  Description of Artificial Sequence: Synthetic polypeptide
MKIEEGKLVIWINGDKGYNGLAEVGKKFEKDTGIKVTVEHPDKLEEKFPQVAATGDGPDIIFWAHDRFGGYAQSGLLAEITPDKAFQDKLYPFTWDAVRYNGKLIAYPIAVEALSLIYNKDLLPNPPKTWEEIPALDKELKAKGKSALMFNLQEPYFTWPLIAADGGYAFKYENGKYDIKDVGVDNAGAKAGLTFLVDLIKNKHMNADTDYSIAEAAFNKGETAMTINGPWAWSNIDTSKVNYGVTVLPTFKGQPSKPFVGVLSAGINAASPNKELAKEFLENYLLTDEGLEAVNKDKPLGAVALKSYEEELAKDPRIAATMENAQKGEIMPNIPQMSAFWYAVRTAVINAASGRQTVDEALKDAQTGGSGENLYFQSSDNGPQNQRNAPRITFGGPSDSTGSNQNGERSGARSKQRRPQGLPNNTASWFTALTQHGKEDLKFPRGQGVPINTNSSPDDQIGYYRRATRRIRGGDGKMKDLSPRWYFYYLGTGPEAGLPYGANKDGIIWVATEGALNTPKDHIGTRNPANNAAIVLQLPQGTTLPKGFYAEGSRGGSQASSRSSSRSRNSSRNSTPGSSRGTSPARMAGNGGDAALALLLLDRLNQLESKMSGKGQQQQGQTVTKKKAAEASKKPRQKRTATKAYNVTQAFGRRGPEQTQGNFGDQELIRQGTDYKHWPQIAQFAPSASAFFGMSRIGMEVTPSGTWLTYTGAIKLDDKDPNFKDQVILLNKHIDAYKTFPPTEPKKDKKKKADETQALPQRQKKQQTVTLLPAADLDDFSKQLQQSMSSADSTQAGGSGHHHHHH

SEQ ID NO: 3659 - protein, 806 aa, Artificial Sequence
  Description of Artificial Sequence: Synthetic polypeptide
MKIEEGKLVIWINGDKGYNGLAEVGKKFEKDTGIKVTVEHPDKLEEKFPQVAATGDGPDIIFWAHDRFGGYAQSGLLAEITPDKAFQDKLYPFTWDAVRYNGKLIAYPIAVEALSLIYNKDLLPNPPKTWEEIPALDKELKAKGKSALMFNLQEPYFTWPLIAADGGYAFKYENGKYDIKDVGVDNAGAKAGLTFLVDLIKNKHMNADTDYSIAEAAFNKGETAMTINGPWAWSNIDTSKVNYGVTVLPTFKGQPSKPFVGVLSAGINAASPNKELAKEFLENYLLTDEGLEAVNKDKPLGAVALKSYEEELAKDPRIAATMENAQKGEIMPNIPQMSAFWYAVRTAVINAASGRQTVDEALKDAQTGGSGENLYFQSSDNGPQNQRNAPRITFGGPSDSTGSNQNGERSGARSKQRRPQGLPNNTASWFTALTQHGKEDLKFPRGQGVPINTNSSPDDQIGYYRRATRRIRGGDGKMKDLSPRWYFYYLGTGPEAGLPYGANKDGIIWVATEGALNTPKDHIGTRNPANNPAIVLQLPQGTTLPKGFYAEGSRGGSQASSRSSSRSRNSSRNSTPGSSRGTSPARMAGNGGDAALALLLLDRLNQLESKMSGKGQQQQGQTVTKKSAAEASKKPRQKRTATKAYNVTQAFGRRGPEQTQGNFGDQELIRQGTDYKHWPQIAQFAPSASAFFGMSRIGMEVTPSGTWLTYTGAIKLDDKDPNFKDQVILLNKHIDAYKTFPPTEPKKDKKKKADETQALPQRQKKQQTVTLLPAADLDDFSKQLQQSMSSADSTQAGGSGHHHHHH

SEQ ID NO: 3660 - protein, 806 aa, Artificial Sequence
  Description of Artificial Sequence: Synthetic polypeptide
MKIEEGKLVIWINGDKGYNGLAEVGKKFEKDTGIKVTVEHPDKLEEKFPQVAATGDGPDIIFWAHDRFGGYAQSGLLAEITPDKAFQDKLYPFTWDAVRYNGKLIAYPIAVEALSLIYNKDLLPNPPKTWEEIPALDKELKAKGKSALMFNLQEPYFTWPLIAADGGYAFKYENGKYDIKDVGVDNAGAKAGLTFLVDLIKNKHMNADTDYSIAEAAFNKGETAMTINGPWAWSNIDTSKVNYGVTVLPTFKGQPSKPFVGVLSAGINAASPNKELAKEFLENYLLTDEGLEAVNKDKPLGAVALKSYEEELAKDPRIAATMENAQKGEIMPNIPQMSAFWYAVRTAVINAASGRQTVDEALKDAQTGGSGENLYFQSSDNGPQNQRNAPRITFGGPSDSTGSNQNGERSGARSKQRRPQGLPNNTASWFTALTQHGKEDLKFPRGQGVPINTNSSPDDQIGYYRRATRRIRGGDGKMKDLSPRWYFYYLGTGPEAGLPYGANKDGIIWVATEGALNTPKDHIGTRNPANNAAIVNQLPQGTTLPKGFYAEGSRGGSQASSRSSSRSRNSSRNSTPGSSRGTSPARMAGNGGDAALALLLLDRLNQLESKMSGKGQQQQGQTVTKKSAAEASKKPRQKRTATKAYNVTQAFGRRGPEQTQGNFGDQELIRQGTDYKHWPQIAQFAPSASAFFGMSRIGMEVTPSGTWLTYTGAIKLDDKDPNFKDQVILLNKHIDAYKTFPPTEPKKDKKKKADETQALPQRQKKQQTVTLLPAADLDDFSKQLQQSMSSADSTQAGGSGHHHHHH

SEQ ID NO: 3661 - protein, 806 aa, Artificial Sequence
  Description of Artificial Sequence: Synthetic polypeptide
MKIEEGKLVIWINGDKGYNGLAEVGKKFEKDTGIKVTVEHPDKLEEKFPQVAATGDGPDIIFWAHDRFGGYAQSGLLAEITPDKAFQDKLYPFTWDAVRYNGKLIAYPIAVEALSLIYNKDLLPNPPKTWEEIPALDKELKAKGKSALMFNLQEPYFTWPLIAADGGYAFKYENGKYDIKDVGVDNAGAKAGLTFLVDLIKNKHMNADTDYSIAEAAFNKGETAMTINGPWAWSNIDTSKVNYGVTVLPTFKGQPSKPFVGVLSAGINAASPNKELAKEFLENYLLTDEGLEAVNKDKPLGAVALKSYEEELAKDPRIAATMENAQKGEIMPNIPQMSAFWYAVRTAVINAASGRQTVDEALKDAQTGGSGENLYFQSSDNGPQNQRNAPRITFGGPSDSTGSNQNGERSGARSKQRRPQGLPNNTASWFTALTQHGKEDLKFPRGQGVPINTNSSPDDQIGYYRRATRRIRGGDGKMKDLSPRWYFYYLGTGPEAGLPYGANKDGIIWVATEGALNTPKDHIGTRNPANNAAIVLQLPQGTTLPKGFYAEGSRGGSQASSRSSSRSRNSSRNSTPGSSRGTSPARMAGNGGDAALALLLLDRLNQLESKMSGKGQQQQGQTVTKKSAAEASKKPRQKRTATKAYNVTQAFGRRGPEQTQGNFGDQELIRQGTDYKHWPQIAQFAPSAAAFFGMSRIGMEVTPSGTWLTYTGAIKLDDKDPNFKDQVILLNKHIDAYKTFPPTEPKKDKKKKADETQALPQRQKKQQTVTLLPAADLDDFSKQLQQSMSSADSTQAGGSGHHHHHH

SEQ ID NO: 3662 - protein, 806 aa, Artificial Sequence
  Description of Artificial Sequence: Synthetic polypeptide
MKIEEGKLVIWINGDKGYNGLAEVGKKFEKDTGIKVTVEHPDKLEEKFPQVAATGDGPDIIFWAHDRFGGYAQSGLLAEITPDKAFQDKLYPFTWDAVRYNGKLIAYPIAVEALSLIYNKDLLPNPPKTWEEIPALDKELKAKGKSALMFNLQEPYFTWPLIAADGGYAFKYENGKYDIKDVGVDNAGAKAGLTFLVDLIKNKHMNADTDYSIAEAAFNKGETAMTINGPWAWSNIDTSKVNYGVTVLPTFKGQPSKPFVGVLSAGINAASPNKELAKEFLENYLLTDEGLEAVNKDKPLGAVALKSYEEELAKDPRIAATMENAQKGEIMPNIPQMSAFWYAVRTAVINAASGRQTVDEALKDAQTGGSGENLYFQSSDNGPQNQRNAPRITFGGPSDSTGSNQNGERSGARSKQRRPQGLPNNTASWFTALTQHGKEDLKFPRGQGVPINTNSSPDDQIGYYRRATRRIRGGDGKMKDLSPRWYFYYLGTGPEAGLPYGANKDGIIWVATEGALNTPKDHIGTRNPANNAAIVLQLPQGTTLPKGFYAEGSRGGSQASSRSSSRSRNSSRNSTPGSSRGTSPARMAGNGGDAALALLLLDRLNQLESKMSGKGQQQQGQTVTKKSAAEASKKPRQKRTATKAYNVTQAFGRRGPEQTQGNFGDQELIRNGTDYKHWPQIAQFAPSASAFFGMSRIGMEVTPSGTWLTYTGAIKLDDKDPNFKDQVILLNKHIDAYKTFPPTEPKKDKKKKADETQALPQRQKKQQTVTLLPAADLDDFSKQLQQSMSSADSTQAGGSGHHHHHH

SEQ ID NO: 3663 - protein, 806 aa, Artificial Sequence
  Description of Artificial Sequence: Synthetic polypeptide
MKIEEGKLVIWINGDKGYNGLAEVGKKFEKDTGIKVTVEHPDKLEEKFPQVAATGDGPDIIFWAHDRFGGYAQSGLLAEITPDKAFQDKLYPFTWDAVRYNGKLIAYPIAVEALSLIYNKDLLPNPPKTWEEIPALDKELKAKGKSALMFNLQEPYFTWPLIAADGGYAFKYENGKYDIKDVGVDNAGAKAGLTFLVDLIKNKHMNADTDYSIAEAAFNKGETAMTINGPWAWSNIDTSKVNYGVTVLPTFKGQPSKPFVGVLSAGINAASPNKELAKEFLENYLLTDEGLEAVNKDKPLGAVALKSYEEELAKDPRIAATMENAQKGEIMPNIPQMSAFWYAVRTAVINAASGRQTVDEALKDAQTGGSGENLYFQSSDNGPQNQRNAPRITFGGPSDSTGSNQNGERSGARSKQRRPQGLPNNTASWFTPLTQHGKEDLKFPPGQGVPINTNSSPDDQIGYYRRATRRIRGGDGKMKDLPPRWYFYYLGTGPEADLPYGAVKPGIFWVAEEGALNTPKDHIGTRNPANNAAIPLQLPPGTTLPKGFYAEGSRGGSQASSRSSSRSRNSSRNSTPGSSRGTSPARMAGNGGDAALALLLLDRLNQLESKMSGKGQQQQGQTVTKKSAAEASKKPRQKRTATKAYNVTQAFGRRGPEQTQGNFGDQELIRQGTDYKHWPQIAQFAPSASAFFGMSRIGMEVTPSGTWLTYTGAIKLDDKDPNFKDQVILLNKHIDAYKTFPPTEPKKDKKKKADETQALPQRQKKQQTVTLLPAADLDDFSKQLQQSMSSADSTQAGGSGHHHHHH

SEQ ID NO: 3664 - protein, 806 aa, Artificial Sequence
  Description of Artificial Sequence: Synthetic polypeptide
MKIEEGKLVIWINGDKGYNGLAEVGKKFEKDTGIKVTVEHPDKLEEKFPQVAATGDGPDIIFWAHDRFGGYAQSGLLAEITPDKAFQDKLYPFTWDAVRYNGKLIAYPIAVEALSLIYNKDLLPNPPKTWEEIPALDKELKAKGKSALMFNLQEPYFTWPLIAADGGYAFKYENGKYDIKDVGVDNAGAKAGLTFLVDLIKNKHMNADTDYSIAEAAFNKGETAMTINGPWAWSNIDTSKVNYGVTVLPTFKGQPSKPFVGVLSAGINAASPNKELAKEFLENYLLTDEGLEAVNKDKPLGAVALKSYEEELAKDPRIAATMENAQKGEIMPNIPQMSAFWYAVRTAVINAASGRQTVDEALKDAQTGGSGENLYFQSSDNGPQNQRNAPRITFGGPSDSTGSNQNGERSGARSKQRRPQGLPNNTASWFTALTQHGKEDLKFPRGQGVPINTNSSPDDQIGYYRRATRRIRGGDGKMKDLSPRWYFYYLGTGPEAGLPYGANKDGIIWVATEGAQNTPKDHIGTRNPANNAAIVLQLPQGTTLPKGFYAEGSRGGSQASSRSSSRSRNSSRNSTPGSSRGTSPARMAGNGGDAALALLLLDRLNQLESKMSGKGQQQQGQTVTKKSAAEASKKPRQKRTATKAYNVTQAFGRRGPEQTQGNFGDQELIRQGTDYKHWPQIAQFAPSASAFFGMSRIGMEVTPSGTWLTYTGAIKLDDKDPNFKDQVILLNKHIDAYKTFPPTEPKKDKKKKADETQALPQRQKKQQTVTLLPAADLDDFSKQLQQSMSSADSTQAGGSGHHHHHH

SEQ ID NO: 3665 - protein, 806 aa, Artificial Sequence
  Description of Artificial Sequence: Synthetic polypeptide
MKIEEGKLVIWINGDKGYNGLAEVGKKFEKDTGIKVTVEHPDKLEEKFPQVAATGDGPDIIFWAHDRFGGYAQSGLLAEITPDKAFQDKLYPFTWDAVRYNGKLIAYPIAVEALSLIYNKDLLPNPPKTWEEIPALDKELKAKGKSALMFNLQEPYFTWPLIAADGGYAFKYENGKYDIKDVGVDNAGAKAGLTFLVDLIKNKHMNADTDYSIAEAAFNKGETAMTINGPWAWSNIDTSKVNYGVTVLPTFKGQPSKPFVGVLSAGINAASPNKELAKEFLENYLLTDEGLEAVNKDKPLGAVALKSYEEELAKDPRIAATMENAQKGEIMPNIPQMSAFWYAVRTAVINAASGRQTVDEALKDAQTGGSGENLYFQSSDNGPQNQRNAPRITFGGPSDSTGSNQNGERSGARSKQRRPQGLPNNTASWFTALTQHGKEDLKFPRGQGVPINTNSSPDDQIGYYRRATRRIRGGDGKMKDLSPRWYFYYLGTGPEAGLPYGANKDGIIWVATEGALNTPKDHIGTRNPANNAAIVLQLPQGTTLPKGFYAEGSRGGSQASSRSSSRSRNSSRNSTPGSSRGTSPARMAGNGGDAALALLLLDRLNQLESKMSGKGQQQQGQTVTKKSAAEMSKKPRQKRTATKGCNVTQCFGPRGPEQTQGNFGDAELNKKGTDYKHWPQIAQFAPSASAFFGMSRISSKETPSGTWLTYTGAIKLDKDDPNFKDQVILLNKHIDAYKTFPPTEPKKDKKKKADETQALPQRQKKQQTVTLLPAADLDDFSKQLQQSMSSADSTQAGGSGHHHHHH

SEQ ID NO: 3666 - protein, 806 aa, Artificial Sequence
  Description of Artificial Sequence: Synthetic polypeptide
MKIEEGKLVIWINGDKGYNGLAEVGKKFEKDTGIKVTVEHPDKLEEKFPQVAATGDGPDIIFWAHDRFGGYAQSGLLAEITPDKAFQDKLYPFTWDAVRYNGKLIAYPIAVEALSLIYNKDLLPNPPKTWEEIPALDKELKAKGKSALMFNLQEPYFTWPLIAADGGYAFKYENGKYDIKDVGVDNAGAKAGLTFLVDLIKNKHMNADTDYSIAEAAFNKGETAMTINGPWAWSNIDTSKVNYGVTVLPTFKGQPSKPFVGVLSAGINAASPNKELAKEFLENYLLTDEGLEAVNKDKPLGAVALKSYEEELAKDPRIAATMENAQKGEIMPNIPQMSAFWYAVRTAVINAASGRQTVDEALKDAQTGGSGENLYFQSSDNGPQNQRNAPRITFGGPSDSTGSNQNGERSGARSKQRRPQGLPNNTASWFTALTQHGKEDLKFPRGQGVPINTNSSPDDQIGYYRRATRRIRGGDGKMKDLSPRWYFYYLGTGPEAGLPYGANKDGIIWVATEGALNTPKDHIGTRNPANYAAIVLQLPQGTTLPKGFYAEGSRGGSQASSRSSSRSRNSSRNSTPGSSRGTSPARMAGNGGDAALALLLLDRLNQLESKMSGKGQQQQGQTVTKKSAAEASKKPRQKRTATKAYNVTQAFGRRGPEQTQGNFGDQELIRQGTDYKHWPQIAQFAPSASAFFGMSRIGMEVTPSGTWLTYTGAIKLDDKDPNFKDQVILLNKHIDAYKTFPPTEPKKDKKKKADETQALPQRQKKQQTVTLLPAADLDDFSKQLQQSMSSADSTQAGGSGHHHHHH

SEQ ID NO: 3667 - protein, 806 aa, Artificial Sequence
  Description of Artificial Sequence: Synthetic polypeptide
MKIEEGKLVIWINGDKGYNGLAEVGKKFEKDTGIKVTVEHPDKLEEKFPQVAATGDGPDIIFWAHDRFGGYAQSGLLAEITPDKAFQDKLYPFTWDAVRYNGKLIAYPIAVEALSLIYNKDLLPNPPKTWEEIPALDKELKAKGKSALMFNLQEPYFTWPLIAADGGYAFKYENGKYDIKDVGVDNAGAKAGLTFLVDLIKNKHMNADTDYSIAEAAFNKGETAMTINGPWAWSNIDTSKVNYGVTVLPTFKGQPSKPFVGVLSAGINAASPNKELAKEFLENYLLTDEGLEAVNKDKPLGAVALKSYEEELAKDPRIAATMENAQKGEIMPNIPQMSAFWYAVRTAVINAASGRQTVDEALKDAQTGGSGENLYFQSSDNGPQNQRNAPRITFGGPSDSTGSNQNGERSGARSKQRRPQGLPNNTASWFTALTQHGKEDLKFPRGQGVPINTNSSPDDQIGYYRRATRRIRGGDGKMKDLSPRWYFYYLGTGPEAGLPYGANKDGIIWVATEGALNTPKDHIGTRNPANNAAIVLQLPQGTTLPKGFYAEGSRGGSQASSRSSSRSRNSSRNSTPGSSRGTSPARMAGNGGDAALALLLLDRLNQLESKMSGKGQQQQGQTVTKKSAAEASKKPRQKRTATKAYNVTQAFGRRGPEQTQGNFGDQELIRQGTDYKHWPQIAQFAPSASAFFGMSRIGMEVTPNGTWLTYTGAIKLDDKDPNFKDQVILLNKHIDAYKTFPPTEPKKDKKKKADETQALPQRQKKQQTVTLLPAADLDDFSKQLQQSMSSADSTQAGGSGHHHHHH

SEQ ID NO: 3668 - protein, 806 aa, Artificial Sequence
  Description of Artificial Sequence: Synthetic polypeptide
MKIEEGKLVIWINGDKGYNGLAEVGKKFEKDTGIKVTVEHPDKLEEKFPQVAATGDGPDIIFWAHDRFGGYAQSGLLAEITPDKAFQDKLYPFTWDAVRYNGKLIAYPIAVEALSLIYNKDLLPNPPKTWEEIPALDKELKAKGKSALMFNLQEPYFTWPLIAADGGYAFKYENGKYDIKDVGVDNAGAKAGLTFLVDLIKNKHMNADTDYSIAEAAFNKGETAMTINGPWAWSNIDTSKVNYGVTVLPTFKGQPSKPFVGVLSAGINAASPNKELAKEFLENYLLTDEGLEAVNKDKPLGAVALKSYEEELAKDPRIAATMENAQKGEIMPNIPQMSAFWYAVRTAVINAASGRQTVDEALKDAQTGGSGENLYFQSSDNGPQNQRNAPRITFGGPSDSTGSNQNGERSGARSKQRRPQGLPNNTASWFTALTQHGKEDLKFPRGQGVPINTNSSPDDQIGYYRRATRRIRGGDGKMKDLSPRWYFYYLGTGPEAGLPYGANKDGIIWVATEGALNTPKDHIGTRNPANFAAIVLQLPQGTTLPKGFYAEGSRGGSQASSRSSSRSRNSSRNSTPGSSRGTSPARMAGNGGDAALALLLLDRLNQLESKMSGKGQQQQGQTVTKKSAAEASKKPRQKRTATKAYNVTQAFGRRGPEQTQGNFGDQELIRQGTDYKHWPQIAQFAPSASAFFGMSRIGMEVTPSGTWLTYTGAIKLDDKDPNFKDQVILLNKHIDAYKTFPPTEPKKDKKKKADETQALPQRQKKQQTVTLLPAADLDDFSKQLQQSMSSADSTQAGGSGHHHHHH

SEQ ID NO: 3669 - protein, 806 aa, Artificial Sequence
  Description of Artificial Sequence: Synthetic polypeptide
MKIEEGKLVIWINGDKGYNGLAEVGKKFEKDTGIKVTVEHPDKLEEKFPQVAATGDGPDIIFWAHDRFGGYAQSGLLAEITPDKAFQDKLYPFTWDAVRYNGKLIAYPIAVEALSLIYNKDLLPNPPKTWEEIPALDKELKAKGKSALMFNLQEPYFTWPLIAADGGYAFKYENGKYDIKDVGVDNAGAKAGLTFLVDLIKNKHMNADTDYSIAEAAFNKGETAMTINGPWAWSNIDTSKVNYGVTVLPTFKGQPSKPFVGVLSAGINAASPNKELAKEFLENYLLTDEGLEAVNKDKPLGAVALKSYEEELAKDPRIAATMENAQKGEIMPNIPQMSAFWYAVRTAVINAASGRQTVDEALKDAQTGGSGENLYFQSSDNGPQNQRNAPRITFGGPSDSTGSNQNGERSGARSKQRRPQGLPNNTASWFTGLTQNGKEDLKFPPGQGVPINTNSSPDDQIGYYRRATRRIRGGDGKMKDLPPRWYFYYLGTGPHADLPYGQKQDGVFWVARPGALNTPKDHIGTRNPANNAAIPLQLPPGTKLPKGFYAEGSRGGSQASSRSSSRSRNSSRNSTPGSSRGTSPARMAGNGGDAALALLLLDRLNQLESKMSGKGQQQQGQTVTKKSAAEASKKPRQKRTATKAYNVTQAFGRRGPEQTQGNFGDQELIRQGTDYKHWPQIAQFAPSASAFFGMSRIGMEVTPSGTWLTYTGAIKLDDKDPNFKDQVILLNKHIDAYKTFPPTEPKKDKKKKADETQALPQRQKKQQTVTLLPAADLDDFSKQLQQSMSSADSTQAGGSGHHHHHH

SEQ ID NO: 3670 - protein, 806 aa, Artificial Sequence
  Description of Artificial Sequence: Synthetic polypeptide
MKIEEGKLVIWINGDKGYNGLAEVGKKFEKDTGIKVTVEHPDKLEEKFPQVAATGDGPDIIFWAHDRFGGYAQSGLLAEITPDKAFQDKLYPFTWDAVRYNGKLIAYPIAVEALSLIYNKDLLPNPPKTWEEIPALDKELKAKGKSALMFNLQEPYFTWPLIAADGGYAFKYENGKYDIKDVGVDNAGAKAGLTFLVDLIKNKHMNADTDYSIAEAAFNKGETAMTINGPWAWSNIDTSKVNYGVTVLPTFKGQPSKPFVGVLSAGINAASPNKELAKEFLENYLLTDEGLEAVNKDKPLGAVALKSYEEELAKDPRIAATMENAQKGEIMPNIPQMSAFWYAVRTAVINAASGRQTVDEALKDAQTGGSGENLYFQSSDNGPQNQRNAPRITFGGPSDSTGSNQNGERSGARSKQRRPQGLPNNTASWFTALTQHGKEDLKFPRGQGVPINTNSSPDDQIGYYRRATRRIRGGDGKMKDLSPRWYFYYLGTGPEAGLPYGANKDGIIWVATEGALNTPKDHIGTRNPANNAAIVTQLPQGTTLPKGFYAEGSRGGSQASSRSSSRSRNSSRNSTPGSSRGTSPARMAGNGGDAALALLLLDRLNQLESKMSGKGQQQQGQTVTKKSAAEASKKPRQKRTATKAYNVTQAFGRRGPEQTQGNFGDQELIRQGTDYKHWPQIAQFAPSASAFFGMSRIGMEVTPSGTWLTYTGAIKLDDKDPNFKDQVILLNKHIDAYKTFPPTEPKKDKKKKADETQALPQRQKKQQTVTLLPAADLDDFSKQLQQSMSSADSTQAGGSGHHHHHH

SEQ ID NO: 3671 - protein, 806 aa, Artificial Sequence
  Description of Artificial Sequence: Synthetic polypeptide
MKIEEGKLVIWINGDKGYNGLAEVGKKFEKDTGIKVTVEHPDKLEEKFPQVAATGDGPDIIFWAHDRFGGYAQSGLLAEITPDKAFQDKLYPFTWDAVRYNGKLIAYPIAVEALSLIYNKDLLPNPPKTWEEIPALDKELKAKGKSALMFNLQEPYFTWPLIAADGGYAFKYENGKYDIKDVGVDNAGAKAGLTFLVDLIKNKHMNADTDYSIAEAAFNKGETAMTINGPWAWSNIDTSKVNYGVTVLPTFKGQPSKPFVGVLSAGINAASPNKELAKEFLENYLLTDEGLEAVNKDKPLGAVALKSYEEELAKDPRIAATMENAQKGEIMPNIPQMSAFWYAVRTAVINAASGRQTVDEALKDAQTGGSGENLYFQSSDNGPQNQRNAPRITFGGPSDSTGSNQNGERSGARSKQRRPQGLPNNTASWFTALTQHGKEDLKFPRGQGVPINTNSSPDDQIGEYRRATRRIRGGDGKMKDLSPRWYFYYLGTGPEAGLPYGANKDGIIWVATEGALNTPKDHIGTRNPANNAAIVLQLPQGTTLPKGFYAEGSRGGSQASSRSSSRSRNSSRNSTPGSSRGTSPARMAGNGGDAALALLLLDRLNQLESKMSGKGQQQQGQTVTKKSAAEASKKPRQKRTATKAYNVTQAFGRRGPEQTQGNFGDQELIRQGTDYKHWPQIAQFAPSASAFFGMSRIGMEVTPSGTWLTYTGAIKLDDKDPNFKDQVILLNKHIDAYKTFPPTEPKKDKKKKADETQALPQRQKKQQTVTLLPAADLDDFSKQLQQSMSSADSTQAGGSGHHHHHH

SEQ ID NO: 3672 - protein, 806 aa, Artificial Sequence
  Description of Artificial Sequence: Synthetic polypeptide
MKIEEGKLVIWINGDKGYNGLAEVGKKFEKDTGIKVTVEHPDKLEEKFPQVAATGDGPDIIFWAHDRFGGYAQSGLLAEITPDKAFQDKLYPFTWDAVRYNGKLIAYPIAVEALSLIYNKDLLPNPPKTWEEIPALDKELKAKGKSALMFNLQEPYFTWPLIAADGGYAFKYENGKYDIKDVGVDNAGAKAGLTFLVDLIKNKHMNADTDYSIAEAAFNKGETAMTINGPWAWSNIDTSKVNYGVTVLPTFKGQPSKPFVGVLSAGINAASPNKELAKEFLENYLLTDEGLEAVNKDKPLGAVALKSYEEELAKDPRIAATMENAQKGEIMPNIPQMSAFWYAVRTAVINAASGRQTVDEALKDAQTGGSGENLYFQSSDNGPQNQRNAPRITFGGPSDSTGSNQNGERSGARSKQRRPQGLPNNTASWFTALTQHGKEDLKFPRGQGVPINTNSSPDDQIGYYRRATRRIRGGDGKMKDLSPRWYFYYLGTGPEAGLPYGASKDGIIWVATEGALNTPKDHIGTRNPANNAAIVLQLPQGTTLPKGFYAEGSRGGSQASSRSSSRSRNSSRNSTPGSSRGTSPARMAGNGGDAALALLLLDRLNQLESKMSGKGQQQQGQTVTKKSAAEASKKPRQKRTATKAYNVTQAFGRRGPEQTQGNFGDQELIRQGTDYKHWPQIAQFAPSASAFFGMSRIGMEVTPSGTWLTYTGAIKLDDKDPNFKDQVILLNKHIDAYKTFPPTEPKKDKKKKADETQALPQRQKKQQTVTLLPAADLDDFSKQLQQSMSSADSTQAGGSGHHHHHH

SEQ ID NO: 3673 - protein, 806 aa, Artificial Sequence
  Description of Artificial Sequence: Synthetic polypeptide
MKIEEGKLVIWINGDKGYNGLAEVGKKFEKDTGIKVTVEHPDKLEEKFPQVAATGDGPDIIFWAHDRFGGYAQSGLLAEITPDKAFQDKLYPFTWDAVRYNGKLIAYPIAVEALSLIYNKDLLPNPPKTWEEIPALDKELKAKGKSALMFNLQEPYFTWPLIAADGGYAFKYENGKYDIKDVGVDNAGAKAGLTFLVDLIKNKHMNADTDYSIAEAAFNKGETAMTINGPWAWSNIDTSKVNYGVTVLPTFKGQPSKPFVGVLSAGINAASPNKELAKEFLENYLLTDEGLEAVNKDKPLGAVALKSYEEELAKDPRIAATMENAQKGEIMPNIPQMSAFWYAVRTAVINAASGRQTVDEALKDAQTGGSGENLYFQSSDNGPQNQRNAPRITFGGPSDSTGSNQNGERSGARSKQRRPQGLPNNTASWFTALTQHGKEDLKFPRGQGVPINTNSSPDDQIGYYRRATRRIRGGDGKMKDLSPRWYFYYLGTGPEAGLPYGANKDGIIWVATEGALNTPKDHIGTRNPANNAAIHLQLPQGTTLPKGFYAEGSRGGSQASSRSSSRSRNSSRNSTPGSSRGTSPARMAGNGGDAALALLLLDRLNQLESKMSGKGQQQQGQTVTKKSAAEASKKPRQKRTATKAYNVTQAFGRRGPEQTQGNFGDQELIRQGTDYKHWPQIAQFAPSASAFFGMSRIGMEVTPSGTWLTYTGAIKLDDKDPNFKDQVILLNKHIDAYKTFPPTEPKKDKKKKADETQALPQRQKKQQTVTLLPAADLDDFSKQLQQSMSSADSTQAGGSGHHHHHH

SEQ ID NO: 3674 - protein, 806 aa, Artificial Sequence
  Description of Artificial Sequence: Synthetic polypeptide
MKIEEGKLVIWINGDKGYNGLAEVGKKFEKDTGIKVTVEHPDKLEEKFPQVAATGDGPDIIFWAHDRFGGYAQSGLLAEITPDKAFQDKLYPFTWDAVRYNGKLIAYPIAVEALSLIYNKDLLPNPPKTWEEIPALDKELKAKGKSALMFNLQEPYFTWPLIAADGGYAFKYENGKYDIKDVGVDNAGAKAGLTFLVDLIKNKHMNADTDYSIAEAAFNKGETAMTINGPWAWSNIDTSKVNYGVTVLPTFKGQPSKPFVGVLSAGINAASPNKELAKEFLENYLLTDEGLEAVNKDKPLGAVALKSYEEELAKDPRIAATMENAQKGEIMPNIPQMSAFWYAVRTAVINAASGRQTVDEALKDAQTGGSGENLYFQSSDNGPQNQRNAPRITFGGPSDSTGSNQNGERSGARSKQRRPQGLPNNTASWFTALTQHGKEDLKFPRGQGVPINTNSSPDDQIGYYRRATRRIRGGDGKMKDLSPRWYFYYLGTGPEAGLPYGANKDGIIWVATEGALNTPKDHIGTRNPANNAAIMLQLPQGTTLPKGFYAEGSRGGSQASSRSSSRSRNSSRNSTPGSSRGTSPARMAGNGGDAALALLLLDRLNQLESKMSGKGQQQQGQTVTKKSAAEASKKPRQKRTATKAYNVTQAFGRRGPEQTQGNFGDQELIRQGTDYKHWPQIAQFAPSASAFFGMSRIGMEVTPSGTWLTYTGAIKLDDKDPNFKDQVILLNKHIDAYKTFPPTEPKKDKKKKADETQALPQRQKKQQTVTLLPAADLDDFSKQLQQSMSSADSTQAGGSGHHHHHH

SEQ ID NO: 3675 - protein, 806 aa, Artificial Sequence
  Description of Artificial Sequence: Synthetic polypeptide
MKIEEGKLVIWINGDKGYNGLAEVGKKFEKDTGIKVTVEHPDKLEEKFPQVAATGDGPDIIFWAHDRFGGYAQSGLLAEITPDKAFQDKLYPFTWDAVRYNGKLIAYPIAVEALSLIYNKDLLPNPPKTWEEIPALDKELKAKGKSALMFNLQEPYFTWPLIAADGGYAFKYENGKYDIKDVGVDNAGAKAGLTFLVDLIKNKHMNADTDYSIAEAAFNKGETAMTINGPWAWSNIDTSKVNYGVTVLPTFKGQPSKPFVGVLSAGINAASPNKELAKEFLENYLLTDEGLEAVNKDKPLGAVALKSYEEELAKDPRIAATMENAQKGEIMPNIPQMSAFWYAVRTAVINAASGRQTVDEALKDAQTGGSGENLYFQSSDNGPQNQRNAPRITFGGPSDSTGSNQNGERSGARSKQRRPQGLPNNTASWFTGLTQHGKEDLKFPPGQGVPINTNSSPDDQIGYYRRATRRIRGGDGKMKDLPPRWYFYYLGTGPEADLPYGQVKDGIFWVAAEGALNTPKDHIGTRNPANNAAIPLQLPPGTTLPKGFYAEGSRGGSQASSRSSSRSRNSSRNSTPGSSRGTSPARMAGNGGDAALALLLLDRLNQLESKMSGKGQQQQGQTVTKKSAAEASKKPRQKRTATKAYNVTQAFGRRGPEQTQGNFGDQELIRQGTDYKHWPQIAQFAPSASAFFGMSRIGMEVTPSGTWLTYTGAIKLDDKDPNFKDQVILLNKHIDAYKTFPPTEPKKDKKKKADETQALPQRQKKQQTVTLLPAADLDDFSKQLQQSMSSADSTQAGGSGHHHHHH

SEQ ID NO: 3676 - protein, 806 aa, Artificial Sequence
  Description of Artificial Sequence: Synthetic polypeptide
MKIEEGKLVIWINGDKGYNGLAEVGKKFEKDTGIKVTVEHPDKLEEKFPQVAATGDGPDIIFWAHDRFGGYAQSGLLAEITPDKAFQDKLYPFTWDAVRYNGKLIAYPIAVEALSLIYNKDLLPNPPKTWEEIPALDKELKAKGKSALMFNLQEPYFTWPLIAADGGYAFKYENGKYDIKDVGVDNAGAKAGLTFLVDLIKNKHMNADTDYSIAEAAFNKGETAMTINGPWAWSNIDTSKVNYGVTVLPTFKGQPSKPFVGVLSAGINAASPNKELAKEFLENYLLTDEGLEAVNKDKPLGAVALKSYEEELAKDPRIAATMENAQKGEIMPNIPQMSAFWYAVRTAVINAASGRQTVDEALKDAQTGGSGENLYFQSSDNGPQNQRNAPRITFGGPSDSTGSNQNGERSGARSKQRRPQGLPNNTASWFTALTQHGKEDLKFPRGQGVPINTNSSPDDQIGHYRRATRRIRGGDGKMKDLSPRWYFYYLGTGPEAGLPYGANKDGIIWVATEGALNTPKDHIGTRNPANNAAIVLQLPQGTTLPKGFYAEGSRGGSQASSRSSSRSRNSSRNSTPGSSRGTSPARMAGNGGDAALALLLLDRLNQLESKMSGKGQQQQGQTVTKKSAAEASKKPRQKRTATKAYNVTQAFGRRGPEQTQGNFGDQELIRQGTDYKHWPQIAQFAPSASAFFGMSRIGMEVTPSGTWLTYTGAIKLDDKDPNFKDQVILLNKHIDAYKTFPPTEPKKDKKKKADETQALPQRQKKQQTVTLLPAADLDDFSKQLQQSMSSADSTQAGGSGHHHHHH

SEQ ID NO: 3677 - protein, 806 aa, Artificial Sequence
  Description of Artificial Sequence: Synthetic polypeptide
MKIEEGKLVIWINGDKGYNGLAEVGKKFEKDTGIKVTVEHPDKLEEKFPQVAATGDGPDIIFWAHDRFGGYAQSGLLAEITPDKAFQDKLYPFTWDAVRYNGKLIAYPIAVEALSLIYNKDLLPNPPKTWEEIPALDKELKAKGKSALMFNLQEPYFTWPLIAADGGYAFKYENGKYDIKDVGVDNAGAKAGLTFLVDLIKNKHMNADTDYSIAEAAFNKGETAMTINGPWAWSNIDTSKVNYGVTVLPTFKGQPSKPFVGVLSAGINAASPNKELAKEFLENYLLTDEGLEAVNKDKPLGAVALKSYEEELAKDPRIAATMENAQKGEIMPNIPQMSAFWYAVRTAVINAASGRQTVDEALKDAQTGGSGENLYFQSSDNGPQNQRNAPRITFGGPSDSTGSNQNGERSGARSKQRRPQGLPNNTASWFTALTQHGKEDLKFPRGQGVPINTNSSPDDQIGYYRRATRRIRGGDGKMKDLSPRWYFYYLGTGPEAGLPYGANKDGIIWVATEGALNTPKDHIGTRNPANNAAIVLQLPQGTTLPKGFYAEGSRGGSQASSRSSSRSRNSSRNSTPGSSRGTEPARMAGNGGDAALALLLLDRLNQLESKMSGKGQQQQGQTVTKKSAAEASKKPRQKRTATKAYNVTQAFGRRGPEQTQGNFGDQELIRQGTDYKHWPQIAQFAPSASAFFGMSRIGMEVTPSGTWLTYTGAIKLDDKDPNFKDQVILLNKHIDAYKTFPPTEPKKDKKKKADETQALPQRQKKQQTVTLLPAADLDDFSKQLQQSMSSADSTQAGGSGHHHHHH

SEQ ID NO: 3678 - protein, 806 aa, Artificial Sequence
  Description of Artificial Sequence: Synthetic polypeptide
MKIEEGKLVIWINGDKGYNGLAEVGKKFEKDTGIKVTVEHPDKLEEKFPQVAATGDGPDIIFWAHDRFGGYAQSGLLAEITPDKAFQDKLYPFTWDAVRYNGKLIAYPIAVEALSLIYNKDLLPNPPKTWEEIPALDKELKAKGKSALMFNLQEPYFTWPLIAADGGYAFKYENGKYDIKDVGVDNAGAKAGLTFLVDLIKNKHMNADTDYSIAEAAFNKGETAMTINGPWAWSNIDTSKVNYGVTVLPTFKGQPSKPFVGVLSAGINAASPNKELAKEFLENYLLTDEGLEAVNKDKPLGAVALKSYEEELAKDPRIAATMENAQKGEIMPNIPQMSAFWYAVRTAVINAASGRQTVDEALKDAQTGGSGENLYFQSSDNGPQNQRNAPRITFGGPSDSTGSNQNGERSGARSKQRRPQGLPNNTASWFTALTQHGKEDLKFPRGQGVPINTNSSPDDQIGYYRRATRRIRGGDGKMKDLSPRWYFYYLGTGPEAGLPYGANKDGIIWVATEGALNTPKDHIGTRNPANNAAIVLQLPQGTTLPKGFYAEGSRGGSQASSRSSSRSRNSSRNSTPGSSRGTSPARMAGNGGDAALALLLLDRLNQLESKMSGKGQQQQGQTVTKKSAAEMSKKPRQKRTATKAYNVTQAFGRRGPEQTQGNFGDQELIRQGTDYKHWPQIAQFAPSASAFFGMSRIGMEVTPSGTWLTYTGAIKLDDKDPNFKDQVILLNKHIDAYKTFPPTEPKKDKKKKADETQALPQRQKKQQTVTLLPAADLDDFSKQLQQSMSSADSTQAGGSGHHHHHH

SEQ ID NO: 3679 - protein, 806 aa, Artificial Sequence
  Description of Artificial Sequence: Synthetic polypeptide
MKIEEGKLVIWINGDKGYNGLAEVGKKFEKDTGIKVTVEHPDKLEEKFPQVAATGDGPDIIFWAHDRFGGYAQSGLLAEITPDKAFQDKLYPFTWDAVRYNGKLIAYPIAVEALSLIYNKDLLPNPPKTWEEIPALDKELKAKGKSALMFNLQEPYFTWPLIAADGGYAFKYENGKYDIKDVGVDNAGAKAGLTFLVDLIKNKHMNADTDYSIAEAAFNKGETAMTINGPWAWSNIDTSKVNYGVTVLPTFKGQPSKPFVGVLSAGINAASPNKELAKEFLENYLLTDEGLEAVNKDKPLGAVALKSYEEELAKDPRIAATMENAQKGEIMPNIPQMSAFWYAVRTAVINAASGRQTVDEALKDAQTGGSGENLYFQSSDNGPQNQRNAPRITFGGPSDSTGSNQNGERSGARSKQRRPQGLPNNTASWFTALTQHGKEDLKFPRGQGVPINTNSSPDDQIGYYRRATRRIRGGDGKMKDLSPRWYFYYLGTGPEAGLPYGANKDGIIWVATEGALNTPKDHIGTRNPANNAAIVLQLPQGTTLPKGFYAEGSRGGSQASSRSSSRSRNSSRNSTPGSSRGTSPARMAGNGGDAALALLLLDRLNQLESKMSGKGQQQQGQTVTKKSAAEASKKPRQKRTATKAYNVTQAFGRRGPEQTQGNFGDQELIRQGTDYKHWPQIAQFAPSASAFFGMSRIGMENTPSGTWLTYTGAIKLDDKDPNFKDQVILLNKHIDAYKTFPPTEPKKDKKKKADETQALPQRQKKQQTVTLLPAADLDDFSKQLQQSMSSADSTQAGGSGHHHHHH

SEQ ID NO: 3680 - protein, 806 aa, Artificial Sequence
  Description of Artificial Sequence: Synthetic polypeptide
MKIEEGKLVIWINGDKGYNGLAEVGKKFEKDTGIKVTVEHPDKLEEKFPQVAATGDGPDIIFWAHDRFGGYAQSGLLAEITPDKAFQDKLYPFTWDAVRYNGKLIAYPIAVEALSLIYNKDLLPNPPKTWEEIPALDKELKAKGKSALMFNLQEPYFTWPLIAADGGYAFKYENGKYDIKDVGVDNAGAKAGLTFLVDLIKNKHMNADTDYSIAEAAFNKGETAMTINGPWAWSNIDTSKVNYGVTVLPTFKGQPSKPFVGVLSAGINAASPNKELAKEFLENYLLTDEGLEAVNKDKPLGAVALKSYEEELAKDPRIAATMENAQKGEIMPNIPQMSAFWYAVRTAVINAASGRQTVDEALKDAQTGGSGENLYFQSSDNGPQNQRNAPRITFGGPSDSTGSNQNGERSGARSKQRRPQGLPNNTASWFTALTQHGKEDLKFPRGQGVPINTNSSPDDQIGYYRRATRRIRGGDGKMKDLSPRWYFYYLGTGPEAGLPYGANKDGIIWVAHEGALNTPKDHIGTRNPANNAAIVLQLPQGTTLPKGFYAEGSRGGSQASSRSSSRSRNSSRNSTPGSSRGTSPARMAGNGGDAALALLLLDRLNQLESKMSGKGQQQQGQTVTKKSAAEASKKPRQKRTATKAYNVTQAFGRRGPEQTQGNFGDQELIRQGTDYKHWPQIAQFAPSASAFFGMSRIGMEVTPSGTWLTYTGAIKLDDKDPNFKDQVILLNKHIDAYKTFPPTEPKKDKKKKADETQALPQRQKKQQTVTLLPAADLDDFSKQLQQSMSSADSTQAGGSGHHHHHH

SEQ ID NO: 3681 - protein, 806 aa, Artificial Sequence
  Description of Artificial Sequence: Synthetic polypeptide
MKIEEGKLVIWINGDKGYNGLAEVGKKFEKDTGIKVTVEHPDKLEEKFPQVAATGDGPDIIFWAHDRFGGYAQSGLLAEITPDKAFQDKLYPFTWDAVRYNGKLIAYPIAVEALSLIYNKDLLPNPPKTWEEIPALDKELKAKGKSALMFNLQEPYFTWPLIAADGGYAFKYENGKYDIKDVGVDNAGAKAGLTFLVDLIKNKHMNADTDYSIAEAAFNKGETAMTINGPWAWSNIDTSKVNYGVTVLPTFKGQPSKPFVGVLSAGINAASPNKELAKEFLENYLLTDEGLEAVNKDKPLGAVALKSYEEELAKDPRIAATMENAQKGEIMPNIPQMSAFWYAVRTAVINAASGRQTVDEALKDAQTGGSGENLYFQSSDNGPQNQRNAPRITFGGPSDSTGSNQNGERSGARSKQRRPQGLPNNTASWFTALTQHGKEDLKFPRGQGVPINTNSSPDDQIGYYRRATRRIRGGDGKMKDLSPRWYFYYLGTGPEAGLPYGANKDGIIWVAQEGALNTPKDHIGTRNPANNAAIVLQLPQGTTLPKGFYAEGSRGGSQASSRSSSRSRNSSRNSTPGSSRGTSPARMAGNGGDAALALLLLDRLNQLESKMSGKGQQQQGQTVTKKSAAEASKKPRQKRTATKAYNVTQAFGRRGPEQTQGNFGDQELIRQGTDYKHWPQIAQFAPSASAFFGMSRIGMEVTPSGTWLTYTGAIKLDDKDPNFKDQVILLNKHIDAYKTFPPTEPKKDKKKKADETQALPQRQKKQQTVTLLPAADLDDFSKQLQQSMSSADSTQAGGSGHHHHHH

SEQ ID NO: 3682 - protein, 806 aa, Artificial Sequence
  Description of Artificial Sequence: Synthetic polypeptide
MKIEEGKLVIWINGDKGYNGLAEVGKKFEKDTGIKVTVEHPDKLEEKFPQVAATGDGPDIIFWAHDRFGGYAQSGLLAEITPDKAFQDKLYPFTWDAVRYNGKLIAYPIAVEALSLIYNKDLLPNPPKTWEEIPALDKELKAKGKSALMFNLQEPYFTWPLIAADGGYAFKYENGKYDIKDVGVDNAGAKAGLTFLVDLIKNKHMNADTDYSIAEAAFNKGETAMTINGPWAWSNIDTSKVNYGVTVLPTFKGQPSKPFVGVLSAGINAASPNKELAKEFLENYLLTDEGLEAVNKDKPLGAVALKSYEEELAKDPRIAATMENAQKGEIMPNIPQMSAFWYAVRTAVINAASGRQTVDEALKDAQTGGSGENLYFQSSDNGPQNQRNAPRITFGGPSDSTGSNQNGERSGARSKQRRPQGLPNNTASWFTALTQHGKEDLKFPRGQGVPINTNSSPDDQIGYYRRAVRRIRGGDGKMKDLSPRWYFYYLGTGPEAGLPYGANKDGIIWVATEGALNTPKDHIGTRNPANNAAIVLQLPQGTTLPKGFYAEGSRGGSQASSRSSSRSRNSSRNSTPGSSRGTSPARMAGNGGDAALALLLLDRLNQLESKMSGKGQQQQGQTVTKKSAAEASKKPRQKRTATKAYNVTQAFGRRGPEQTQGNFGDQELIRQGTDYKHWPQIAQFAPSASAFFGMSRIGMEVTPSGTWLTYTGAIKLDDKDPNFKDQVILLNKHIDAYKTFPPTEPKKDKKKKADETQALPQRQKKQQTVTLLPAADLDDFSKQLQQSMSSADSTQAGGSGHHHHHH

SEQ ID NO: 3683 - protein, 806 aa, Artificial Sequence
  Description of Artificial Sequence: Synthetic polypeptide
MKIEEGKLVIWINGDKGYNGLAEVGKKFEKDTGIKVTVEHPDKLEEKFPQVAATGDGPDIIFWAHDRFGGYAQSGLLAEITPDKAFQDKLYPFTWDAVRYNGKLIAYPIAVEALSLIYNKDLLPNPPKTWEEIPALDKELKAKGKSALMFNLQEPYFTWPLIAADGGYAFKYENGKYDIKDVGVDNAGAKAGLTFLVDLIKNKHMNADTDYSIAEAAFNKGETAMTINGPWAWSNIDTSKVNYGVTVLPTFKGQPSKPFVGVLSAGINAASPNKELAKEFLENYLLTDEGLEAVNKDKPLGAVALKSYEEELAKDPRIAATMENAQKGEIMPNIPQMSAFWYAVRTAVINAASGRQTVDEALKDAQTGGSGENLYFQSSDNGPQNQRNAPRITFGGPSDSTGSNQNGERSGARSKQRRPQGLPNNTASWFTALTQHGKEDLKFPRGQGVPINTNSSPDDQIGYYRRATRRIRGGDGKMKDLSPRWYFYYLGTGPEAGLPYGANKDGIIWVATEGALNTPKDHIGTRNPANNAAIVLQLPQGTTLPKGFYAEGSRGGSQASSRSSSRSRNSSRNSTPGSSRGTSPARMAGNGGDAALALLLLDRLNQLESKMSGKGQQQQGQTVTKKSAAEASKKPRQKRTATKAYNVTQAFGRRGPEQTQGNFGDSELIRQGTDYKHWPQIAQFAPSASAFFGMSRIGMEVTPSGTWLTYTGAIKLDDKDPNFKDQVILLNKHIDAYKTFPPTEPKKDKKKKADETQALPQRQKKQQTVTLLPAADLDDFSKQLQQSMSSADSTQAGGSGHHHHHH

SEQ ID NO: 3684 - protein, 806 aa, Artificial Sequence
  Description of Artificial Sequence: Synthetic polypeptide
MKIEEGKLVIWINGDKGYNGLAEVGKKFEKDTGIKVTVEHPDKLEEKFPQVAATGDGPDIIFWAHDRFGGYAQSGLLAEITPDKAFQDKLYPFTWDAVRYNGKLIAYPIAVEALSLIYNKDLLPNPPKTWEEIPALDKELKAKGKSALMFNLQEPYFTWPLIAADGGYAFKYENGKYDIKDVGVDNAGAKAGLTFLVDLIKNKHMNADTDYSIAEAAFNKGETAMTINGPWAWSNIDTSKVNYGVTVLPTFKGQPSKPFVGVLSAGINAASPNKELAKEFLENYLLTDEGLEAVNKDKPLGAVALKSYEEELAKDPRIAATMENAQKGEIMPNIPQMSAFWYAVRTAVINAASGRQTVDEALKDAQTGGSGENLYFQSSDNGPQNQRNAPRITFGGPSDSTGSNQNGERSGARSKQRRPQGLPNNTASWFTALTQHGKEDLKFPRGQGVPINTNSSPDDQIGYYRRATRRIRGGDGKMKDLSPRWYFYYLGTGPEAGLPYGAIKDGIIWVATEGALNTPKDHIGTRNPANNAAIVLQLPQGTTLPKGFYAEGSRGGSQASSRSSSRSRNSSRNSTPGSSRGTSPARMAGNGGDAALALLLLDRLNQLESKMSGKGQQQQGQTVTKKSAAEASKKPRQKRTATKAYNVTQAFGRRGPEQTQGNFGDQELIRQGTDYKHWPQIAQFAPSASAFFGMSRIGMEVTPSGTWLTYTGAIKLDDKDPNFKDQVILLNKHIDAYKTFPPTEPKKDKKKKADETQALPQRQKKQQTVTLLPAADLDDFSKQLQQSMSSADSTQAGGSGHHHHHH

SEQ ID NO: 3685 - protein, 806 aa, Artificial Sequence
  Description of Artificial Sequence: Synthetic polypeptide
MKIEEGKLVIWINGDKGYNGLAEVGKKFEKDTGIKVTVEHPDKLEEKFPQVAATGDGPDIIFWAHDRFGGYAQSGLLAEITPDKAFQDKLYPFTWDAVRYNGKLIAYPIAVEALSLIYNKDLLPNPPKTWEEIPALDKELKAKGKSALMFNLQEPYFTWPLIAADGGYAFKYENGKYDIKDVGVDNAGAKAGLTFLVDLIKNKHMNADTDYSIAEAAFNKGETAMTINGPWAWSNIDTSKVNYGVTVLPTFKGQPSKPFVGVLSAGINAASPNKELAKEFLENYLLTDEGLEAVNKDKPLGAVALKSYEEELAKDPRIAATMENAQKGEIMPNIPQMSAFWYAVRTAVINAASGRQTVDEALKDAQTGGSGENLYFQSSDNGPQNQRNAPRITFGGPSDSTGSNQNGERSGARSKQRRPQGLPNNTASWFTALTQHGKEDLKFPRGQGVPINTNSSPDDQIGYYRRATRRIRGGDGKMKDLSPRWYFYYLGTGPEAGLPYGANKDGIYWVATEGALNTPKDHIGTRNPANNAAIVLQLPQGTTLPKGFYAEGSRGGSQASSRSSSRSRNSSRNSTPGSSRGTSPARMAGNGGDAALALLLLDRLNQLESKMSGKGQQQQGQTVTKKSAAEASKKPRQKRTATKAYNVTQAFGRRGPEQTQGNFGDQELIRQGTDYKHWPQIAQFAPSASAFFGMSRIGMEVTPSGTWLTYTGAIKLDDKDPNFKDQVILLNKHIDAYKTFPPTEPKKDKKKKADETQALPQRQKKQQTVTLLPAADLDDFSKQLQQSMSSADSTQAGGSGHHHHHH

SEQ ID NO: 3686 - protein, 806 aa, Artificial Sequence
  Description of Artificial Sequence: Synthetic polypeptide
MKIEEGKLVIWINGDKGYNGLAEVGKKFEKDTGIKVTVEHPDKLEEKFPQVAATGDGPDIIFWAHDRFGGYAQSGLLAEITPDKAFQDKLYPFTWDAVRYNGKLIAYPIAVEALSLIYNKDLLPNPPKTWEEIPALDKELKAKGKSALMFNLQEPYFTWPLIAADGGYAFKYENGKYDIKDVGVDNAGAKAGLTFLVDLIKNKHMNADTDYSIAEAAFNKGETAMTINGPWAWSNIDTSKVNYGVTVLPTFKGQPSKPFVGVLSAGINAASPNKELAKEFLENYLLTDEGLEAVNKDKPLGAVALKSYEEELAKDPRIAATMENAQKGEIMPNIPQMSAFWYAVRTAVINAASGRQTVDEALKDAQTGGSGENLYFQSSDNGPQNQRNAPRITFGGPSDSTGSNQNGERSGARSKQRRPQGLPNNTASWFTGLTQFGKEDLKFPPGQGVPINTNSSPDDQIGYYRRATRRIRGGDGKMKDLPPKWYFYYLGTGPHADLPYGQKHDGVFWVARPGALNTPKDHIGTRNPANNAAIPLQLPPGTKLPKGFYAEGSRGGSQASSRSSSRSRNSSRNSTPGSSRGTSPARMAGNGGDAALALLLLDRLNQLESKMSGKGQQQQGQTVTKKSAAEASKKPRQKRTATKAYNVTQAFGRRGPEQTQGNFGDQELIRQGTDYKHWPQIAQFAPSASAFFGMSRIGMEVTPSGTWLTYTGAIKLDDKDPNFKDQVILLNKHIDAYKTFPPTEPKKDKKKKADETQALPQRQKKQQTVTLLPAADLDDFSKQLQQSMSSADSTQAGGSGHHHHHH

SEQ ID NO: 3687 - protein, 806 aa, Artificial Sequence
  Description of Artificial Sequence: Synthetic polypeptide
MKIEEGKLVIWINGDKGYNGLAEVGKKFEKDTGIKVTVEHPDKLEEKFPQVAATGDGPDIIFWAHDRFGGYAQSGLLAEITPDKAFQDKLYPFTWDAVRYNGKLIAYPIAVEALSLIYNKDLLPNPPKTWEEIPALDKELKAKGKSALMFNLQEPYFTWPLIAADGGYAFKYENGKYDIKDVGVDNAGAKAGLTFLVDLIKNKHMNADTDYSIAEAAFNKGETAMTINGPWAWSNIDTSKVNYGVTVLPTFKGQPSKPFVGVLSAGINAASPNKELAKEFLENYLLTDEGLEAVNKDKPLGAVALKSYEEELAKDPRIAATMENAQKGEIMPNIPQMSAFWYAVRTAVINAASGRQTVDEALKDAQTGGSGENLYFQSSDNGPQNQRNAPRITFGGPSDSTGSNQNGERSGARSKQRRPQGLPNNTASWFTALTQHGKEDLKFPRGQGVPINTNSSPDDQIGYYRRATRRIRGGDGKMKDLSPRWYFYYLGTGPEAGLPYGANKDGIIWVATEGALNTPKDHIGTRNPANNAAIVLQLPQGTTLPKNFYAEGSRGGSQASSRSSSRSRNSSRNSTPGSSRGTSPARMAGNGGDAALALLLLDRLNQLESKMSGKGQQQQGQTVTKKSAAEASKKPRQKRTATKAYNVTQAFGRRGPEQTQGNFGDQELIRQGTDYKHWPQIAQFAPSASAFFGMSRIGMEVTPSGTWLTYTGAIKLDDKDPNFKDQVILLNKHIDAYKTFPPTEPKKDKKKKADETQALPQRQKKQQTVTLLPAADLDDFSKQLQQSMSSADSTQAGGSGHHHHHH

SEQ ID NO: 3688 - protein, 806 aa, Artificial Sequence
  Description of Artificial Sequence: Synthetic polypeptide
MKIEEGKLVIWINGDKGYNGLAEVGKKFEKDTGIKVTVEHPDKLEEKFPQVAATGDGPDIIFWAHDRFGGYAQSGLLAEITPDKAFQDKLYPFTWDAVRYNGKLIAYPIAVEALSLIYNKDLLPNPPKTWEEIPALDKELKAKGKSALMFNLQEPYFTWPLIAADGGYAFKYENGKYDIKDVGVDNAGAKAGLTFLVDLIKNKHMNADTDYSIAEAAFNKGETAMTINGPWAWSNIDTSKVNYGVTVLPTFKGQPSKPFVGVLSAGINAASPNKELAKEFLENYLLTDEGLEAVNKDKPLGAVALKSYEEELAKDPRIAATMENAQKGEIMPNIPQMSAFWYAVRTAVINAASGRQTVDEALKDAQTGGSGENLYFQSSDNGPQNQRNAPRITFGGPSDSTGSNQNGERSGARSKQRRPQGLPNNTASWFTGLTQFGKEDLKFPPGQGVPINTNSSPDDQIGYYRRATRRIRGGDGKMKDLPPRWYFYYLGTGPHADLPYGQKQPGVVWVARPGALNTPKDHIGTRNPANNAAIPLQLPPGTKLPKGFYAEGSRGGSQASSRSSSRSRNSSRNSTPGSSRGTSPARMAGNGGDAALALLLLDRLNQLESKMSGKGQQQQGQTVTKKSAAEASKKPRQKRTATKAYNVTQAFGRRGPEQTQGNFGDQELIRQGTDYKHWPQIAQFAPSASAFFGMSRIGMEVTPSGTWLTYTGAIKLDDKDPNFKDQVILLNKHIDAYKTFPPTEPKKDKKKKADETQALPQRQKKQQTVTLLPAADLDDFSKQLQQSMSSADSTQAGGSGHHHHHH

SEQ ID NO: 3689 - protein, 806 aa, Artificial Sequence
  Description of Artificial Sequence: Synthetic polypeptide
MKIEEGKLVIWINGDKGYNGLAEVGKKFEKDTGIKVTVEHPDKLEEKFPQVAATGDGPDIIFWAHDRFGGYAQSGLLAEITPDKAFQDKLYPFTWDAVRYNGKLIAYPIAVEALSLIYNKDLLPNPPKTWEEIPALDKELKAKGKSALMFNLQEPYFTWPLIAADGGYAFKYENGKYDIKDVGVDNAGAKAGLTFLVDLIKNKHMNADTDYSIAEAAFNKGETAMTINGPWAWSNIDTSKVNYGVTVLPTFKGQPSKPFVGVLSAGINAASPNKELAKEFLENYLLTDEGLEAVNKDKPLGAVALKSYEEELAKDPRIAATMENAQKGEIMPNIPQMSAFWYAVRTAVINAASGRQTVDEALKDAQTGGSGENLYFQSSDNGPQNQRNAPRITFGGPSDSTGSNQNGERSGARSKQRRPQGLPNNTASWFTALTQHGKEDLKFPRGQGVPINTNSSPDDQIGYYRRATRRIRGGDGKMKDLSPRWYFYYLGTGPEAGLPYGANKDGIIWVATEGALNTPKDHIGNRNPANNAAIVLQLPQGTTLPKGFYAEGSRGGSQASSRSSSRSRNSSRNSTPGSSRGTSPARMAGNGGDAALALLLLDRLNQLESKMSGKGQQQQGQTVTKKSAAEASKKPRQKRTATKAYNVTQAFGRRGPEQTQGNFGDQELIRQGTDYKHWPQIAQFAPSASAFFGMSRIGMEVTPSGTWLTYTGAIKLDDKDPNFKDQVILLNKHIDAYKTFPPTEPKKDKKKKADETQALPQRQKKQQTVTLLPAADLDDFSKQLQQSMSSADSTQAGGSGHHHHHH

SEQ ID NO: 3690 - protein, 806 aa, Artificial Sequence
  Description of Artificial Sequence: Synthetic polypeptide
MKIEEGKLVIWINGDKGYNGLAEVGKKFEKDTGIKVTVEHPDKLEEKFPQVAATGDGPDIIFWAHDRFGGYAQSGLLAEITPDKAFQDKLYPFTWDAVRYNGKLIAYPIAVEALSLIYNKDLLPNPPKTWEEIPALDKELKAKGKSALMFNLQEPYFTWPLIAADGGYAFKYENGKYDIKDVGVDNAGAKAGLTFLVDLIKNKHMNADTDYSIAEAAFNKGETAMTINGPWAWSNIDTSKVNYGVTVLPTFKGQPSKPFVGVLSAGINAASPNKELAKEFLENYLLTDEGLEAVNKDKPLGAVALKSYEEELAKDPRIAATMENAQKGEIMPNIPQMSAFWYAVRTAVINAASGRQTVDEALKDAQTGGSGENLYFQSSDNGPQNQRNAPRITFGGPSDSTGSNQNGERSGARSKQRRPQGLPNNTASWFTALTQHGKEDLKFPRGQGVPINTNSSPDDQIGYYRRATRRIRGGDGKMKDLSPRWYFYYLGTGPEAGLPYGANKDGIIWVATEGALNTPKDHIGTRNPANNAAIVLQLPQGTTLPKGFYAEGSRGGSQASSRSSSRSRNSSRNSTPGSSRGTSPARMAGNGGDAALALLLLDRLNQLESKMSGKGQQQQGQTVTKKSAAEASKKPRQKRTATKAYNVTQAYGRRGPEQTQGNFGDQELIRQGTDYKHWPQIAQFAPSASAFFGMSRIGMEVTPSGTWLTYTGAIKLDDKDPNFKDQVILLNKHIDAYKTFPPTEPKKDKKKKADETQALPQRQKKQQTVTLLPAADLDDFSKQLQQSMSSADSTQAGGSGHHHHHH

SEQ ID NO: 3691 - protein, 806 aa, Artificial Sequence
  Description of Artificial Sequence: Synthetic polypeptide
MKIEEGKLVIWINGDKGYNGLAEVGKKFEKDTGIKVTVEHPDKLEEKFPQVAATGDGPDIIFWAHDRFGGYAQSGLLAEITPDKAFQDKLYPFTWDAVRYNGKLIAYPIAVEALSLIYNKDLLPNPPKTWEEIPALDKELKAKGKSALMFNLQEPYFTWPLIAADGGYAFKYENGKYDIKDVGVDNAGAKAGLTFLVDLIKNKHMNADTDYSIAEAAFNKGETAMTINGPWAWSNIDTSKVNYGVTVLPTFKGQPSKPFVGVLSAGINAASPNKELAKEFLENYLLTDEGLEAVNKDKPLGAVALKSYEEELAKDPRIAATMENAQKGEIMPNIPQMSAFWYAVRTAVINAASGRQTVDEALKDAQTGGSGENLYFQSSDNGPQNQRNAPRITFGGPSDSTGSNQNGERSGARSKQRRPQGLPNNTASWFTALTQHGKEDLKFPRGQGVPINTNSSPDDQIGGYRRATRRIRGGDGKMKDLSPRWYFYYLGTGPEAGLPYGANKDGIIWVATEGALNTPKDHIGTRNPANNAAIVLQLPQGTTLPKGFYAEGSRGGSQASSRSSSRSRNSSRNSTPGSSRGTSPARMAGNGGDAALALLLLDRLNQLESKMSGKGQQQQGQTVTKKSAAEASKKPRQKRTATKAYNVTQAFGRRGPEQTQGNFGDQELIRQGTDYKHWPQIAQFAPSASAFFGMSRIGMEVTPSGTWLTYTGAIKLDDKDPNFKDQVILLNKHIDAYKTFPPTEPKKDKKKKADETQALPQRQKKQQTVTLLPAADLDDFSKQLQQSMSSADSTQAGGSGHHHHHH

SEQ ID NO: 3692 - protein, 806 aa, Artificial Sequence
  Description of Artificial Sequence: Synthetic polypeptide
MKIEEGKLVIWINGDKGYNGLAEVGKKFEKDTGIKVTVEHPDKLEEKFPQVAATGDGPDIIFWAHDRFGGYAQSGLLAEITPDKAFQDKLYPFTWDAVRYNGKLIAYPIAVEALSLIYNKDLLPNPPKTWEEIPALDKELKAKGKSALMFNLQEPYFTWPLIAADGGYAFKYENGKYDIKDVGVDNAGAKAGLTFLVDLIKNKHMNADTDYSIAEAAFNKGETAMTINGPWAWSNIDTSKVNYGVTVLPTFKGQPSKPFVGVLSAGINAASPNKELAKEFLENYLLTDEGLEAVNKDKPLGAVALKSYEEELAKDPRIAATMENAQKGEIMPNIPQMSAFWYAVRTAVINAASGRQTVDEALKDAQTGGSGENLYFQSSDNGPQNQRNAPRITFGGPSDSTGSNQNGERSGARSKQRRPQGLPNNTASWFTALTQHGKEDLKFPRGQGVPINTNSSPDDQIGYYRRATRRIRGGDGKMKDLSPRWYFYYLGTGPEAGLPYGANKDGIIWVATEGALNKPKDHIGTRNPANNAAIVLQLPQGTTLPKGFYAEGSRGGSQASSRSSSRSRNSSRNSTPGSSRGTSPARMAGNGGDAALALLLLDRLNQLESKMSGKGQQQQGQTVTKKSAAEASKKPRQKRTATKAYNVTQAFGRRGPEQTQGNFGDQELIRQGTDYKHWPQIAQFAPSASAFFGMSRIGMEVTPSGTWLTYTGAIKLDDKDPNFKDQVILLNKHIDAYKTFPPTEPKKDKKKKADETQALPQRQKKQQTVTLLPAADLDDFSKQLQQSMSSADSTQAGGSGHHHHHH

SEQ ID NO: 3693 - protein, 806 aa, Artificial Sequence
  Description of Artificial Sequence: Synthetic polypeptide
MKIEEGKLVIWINGDKGYNGLAEVGKKFEKDTGIKVTVEHPDKLEEKFPQVAATGDGPDIIFWAHDRFGGYAQSGLLAEITPDKAFQDKLYPFTWDAVRYNGKLIAYPIAVEALSLIYNKDLLPNPPKTWEEIPALDKELKAKGKSALMFNLQEPYFTWPLIAADGGYAFKYENGKYDIKDVGVDNAGAKAGLTFLVDLIKNKHMNADTDYSIAEAAFNKGETAMTINGPWAWSNIDTSKVNYGVTVLPTFKGQPSKPFVGVLSAGINAASPNKELAKEFLENYLLTDEGLEAVNKDKPLGAVALKSYEEELAKDPRIAATMENAQKGEIMPNIPQMSAFWYAVRTAVINAASGRQTVDEALKDAQTGGSGENLYFQSSDNGPQNQRNAPRITFGGPSDSTGSNQNGERSGARSKQRRPQGLPNNTASWFTALTQHGKEDLKFPRGQGVPINTNSSPDDQIGYYRRATRRIRGGDGKMKDLSPRWYFYYLGTGPEAGLPYGANKDGIIWVATEGALNTPKDHIGTRNPANNAAIVLQLPQGTTLPKGFYAEGSRGGSQASSRSSSRSRNSSRNSTPGSSRGTSPARMAGNGGDAALALLLLDRLNQLESKMSGKGQQQQGQTVTKKSAAEASKKPRQKRTATKAYNVTQAFGRRGPEQTQGNFGDQELIRQGTDYKHWPQIAQFAPSASAFFGMSRITMEVTPSGTWLTYTGAIKLDDKDPNFKDQVILLNKHIDAYKTFPPTEPKKDKKKKADETQALPQRQKKQQTVTLLPAADLDDFSKQLQQSMSSADSTQAGGSGHHHHHH

SEQ ID NO: 3694 - protein, 806 aa, Artificial Sequence
  Description of Artificial Sequence: Synthetic polypeptide
MKIEEGKLVIWINGDKGYNGLAEVGKKFEKDTGIKVTVEHPDKLEEKFPQVAATGDGPDIIFWAHDRFGGYAQSGLLAEITPDKAFQDKLYPFTWDAVRYNGKLIAYPIAVEALSLIYNKDLLPNPPKTWEEIPALDKELKAKGKSALMFNLQEPYFTWPLIAADGGYAFKYENGKYDIKDVGVDNAGAKAGLTFLVDLIKNKHMNADTDYSIAEAAFNKGETAMTINGPWAWSNIDTSKVNYGVTVLPTFKGQPSKPFVGVLSAGINAASPNKELAKEFLENYLLTDEGLEAVNKDKPLGAVALKSYEEELAKDPRIAATMENAQKGEIMPNIPQMSAFWYAVRTAVINAASGRQTVDEALKDAQTGGSGENLYFQSSDNGPQNQRNAPRITFGGPSDSTGSNQNGERSGARSKQRRPQGLPNNTASWFTPLTQHGKEDLKFPPGQGVPINTNSSPDDQIGYYRRATRRIRGGDGKMKDLPPRWYFYYLGTGPEADLPYGQVKPGIFWVAEEGALNTPKDHIGTRNPANNAAIPLQLPPGTTLPKGFYAEGSRGGSQASSRSSSRSRNSSRNSTPGSSRGTSPARMAGNGGDAALALLLLDRLNQLESKMSGKGQQQQGQTVTKKSAAEASKKPRQKRTATKAYNVTQAFGRRGPEQTQGNFGDQELIRQGTDYKHWPQIAQFAPSASAFFGMSRIGMEVTPSGTWLTYTGAIKLDDKDPNFKDQVILLNKHIDAYKTFPPTEPKKDKKKKADETQALPQRQKKQQTVTLLPAADLDDFSKQLQQSMSSADSTQAGGSGHHHHHH

SEQ ID NO: 3695 - protein, 806 aa, Artificial Sequence
  Description of Artificial Sequence: Synthetic polypeptide
MKIEEGKLVIWINGDKGYNGLAEVGKKFEKDTGIKVTVEHPDKLEEKFPQVAATGDGPDIIFWAHDRFGGYAQSGLLAEITPDKAFQDKLYPFTWDAVRYNGKLIAYPIAVEALSLIYNKDLLPNPPKTWEEIPALDKELKAKGKSALMFNLQEPYFTWPLIAADGGYAFKYENGKYDIKDVGVDNAGAKAGLTFLVDLIKNKHMNADTDYSIAEAAFNKGETAMTINGPWAWSNIDTSKVNYGVTVLPTFKGQPSKPFVGVLSAGINAASPNKELAKEFLENYLLTDEGLEAVNKDKPLGAVALKSYEEELAKDPRIAATMENAQKGEIMPNIPQMSAFWYAVRTAVINAASGRQTVDEALKDAQTGGSGENLYFQSSDNGPQNQRNAPRITFGGPSDSTGSNQNGERSGARSKQRRPQGLPNNTASWFTALTQHGKEDLKFPRGQGVPINTNSSPDDQIGYYRRATRRIRGGDGKMKDLSPRWYFYYLGTGPEAGLPYGANKDGIIWVATEGALNTPKDHIGTRNPANNAAIVLQLPQGTTLPKGFYAEGSRGGSQASSRSSSRSRNSSRNSTPGSSRGTSPARMAGNGGDAALALLLLDRLNQLESKMSGKGQQQQGQTVTKKSAAEASKKPRQKRTATKAYNVTQAFGRRGPEQTQGNFGDQELIRQGTDYKHWPQIAQFAPSASAFFGMSRIGMEYTPSGTWLTYTGAIKLDDKDPNFKDQVILLNKHIDAYKTFPPTEPKKDKKKKADETQALPQRQKKQQTVTLLPAADLDDFSKQLQQSMSSADSTQAGGSGHHHHHH

SEQ ID NO: 3696 - protein, 806 aa, Artificial Sequence
  Description of Artificial Sequence: Synthetic polypeptide
MKIEEGKLVIWINGDKGYNGLAEVGKKFEKDTGIKVTVEHPDKLEEKFPQVAATGDGPDIIFWAHDRFGGYAQSGLLAEITPDKAFQDKLYPFTWDAVRYNGKLIAYPIAVEALSLIYNKDLLPNPPKTWEEIPALDKELKAKGKSALMFNLQEPYFTWPLIAADGGYAFKYENGKYDIKDVGVDNAGAKAGLTFLVDLIKNKHMNADTDYSIAEAAFNKGETAMTINGPWAWSNIDTSKVNYGVTVLPTFKGQPSKPFVGVLSAGINAASPNKELAKEFLENYLLTDEGLEAVNKDKPLGAVALKSYEEELAKDPRIAATMENAQKGEIMPNIPQMSAFWYAVRTAVINAASGRQTVDEALKDAQTGGSGENLYFQSSDNGPQNQRNAPRITFGGPSDSTGSNQNGERSGARSKQRRPQGLPNNTASWFTGLTQNGKEDLKFPPGQGVPINTNSSPDDQIGYYRRATRRIRGGDGKMKDLPPKWYFYYLGTGPHADLPYGQKKDGVFWVARPGALNTPKDHIGTRNPANNAAIPLQLPPGTKLPKGFYAEGSRGGSQASSRSSSRSRNSSRNSTPGSSRGTSPARMAGNGGDAALALLLLDRLNQLESKMSGKGQQQQGQTVTKKSAAEASKKPRQKRTATKAYNVTQAFGRRGPEQTQGNFGDQELIRQGTDYKHWPQIAQFAPSASAFFGMSRIGMEVTPSGTWLTYTGAIKLDDKDPNFKDQVILLNKHIDAYKTFPPTEPKKDKKKKADETQALPQRQKKQQTVTLLPAADLDDFSKQLQQSMSSADSTQAGGSGHHHHHH

SEQ ID NO: 3697 - protein, 806 aa, Artificial Sequence
  Description of Artificial Sequence: Synthetic polypeptide
MKIEEGKLVIWINGDKGYNGLAEVGKKFEKDTGIKVTVEHPDKLEEKFPQVAATGDGPDIIFWAHDRFGGYAQSGLLAEITPDKAFQDKLYPFTWDAVRYNGKLIAYPIAVEALSLIYNKDLLPNPPKTWEEIPALDKELKAKGKSALMFNLQEPYFTWPLIAADGGYAFKYENGKYDIKDVGVDNAGAKAGLTFLVDLIKNKHMNADTDYSIAEAAFNKGETAMTINGPWAWSNIDTSKVNYGVTVLPTFKGQPSKPFVGVLSAGINAASPNKELAKEFLENYLLTDEGLEAVNKDKPLGAVALKSYEEELAKDPRIAATMENAQKGEIMPNIPQMSAFWYAVRTAVINAASGRQTVDEALKDAQTGGSGENLYFQSSDNGPQNQRNAPRITFGGPSDSTGSNQNGERSGARSKQRRPQGLPNNTASWFTALTQHGKEDLKFPRGQGVPINTNSSPDDQIGYYRRATRRIRGGDGKMKDLSPRWYFYYLGTGPEAGLPYGANKDGIIWVATEGALNTPKDHIGTRNPANNAAIVLQLPQGTTLPKGFYAEGSRGGSQASSRSSSRSRNSSRNSTPGSSRGTSPARMAGNGGDAALALLLLDRLNQLESKMSGKGQQQQGQTVTKKSAAEASKKPRQKRTATKAYNVTQAFGRRGPEQTQGNFGDQELIRQGTDYKHWPQIAQFAPSASAFFGMSRIGMEVTPSGTWLTYTGKIKLDDKDPNFKDQVILLNKHIDAYKTFPPTEPKKDKKKKADETQALPQRQKKQQTVTLLPAADLDDFSKQLQQSMSSADSTQAGGSGHHHHHH

SEQ ID NO: 3698 - protein, 806 aa, Artificial Sequence
  Description of Artificial Sequence: Synthetic polypeptide
MKIEEGKLVIWINGDKGYNGLAEVGKKFEKDTGIKVTVEHPDKLEEKFPQVAATGDGPDIIFWAHDRFGGYAQSGLLAEITPDKAFQDKLYPFTWDAVRYNGKLIAYPIAVEALSLIYNKDLLPNPPKTWEEIPALDKELKAKGKSALMFNLQEPYFTWPLIAADGGYAFKYENGKYDIKDVGVDNAGAKAGLTFLVDLIKNKHMNADTDYSIAEAAFNKGETAMTINGPWAWSNIDTSKVNYGVTVLPTFKGQPSKPFVGVLSAGINAASPNKELAKEFLENYLLTDEGLEAVNKDKPLGAVALKSYEEELAKDPRIAATMENAQKGEIMPNIPQMSAFWYAVRTAVINAASGRQTVDEALKDAQTGGSGENLYFQSSDNGPQNQRNAPRITFGGPSDSTGSNQNGERSGARSKQRRPQGLPNNTASWFTPLTQHGKEDLKFPPGQGVPINTNSSPDDQIGYYRRATRRIRGGDGKMKDLPPRWYFYYLGTGPEADLPYGQVKDGIVWVAEEGALNTPKDHIGTRNPANNAAIPLQLPPGTTLPKGFYAEGSRGGSQASSRSSSRSRNSSRNSTPGSSRGTSPARMAGNGGDAALALLLLDRLNQLESKMSGKGQQQQGQTVTKKSAAEASKKPRQKRTATKAYNVTQAFGRRGPEQTQGNFGDQELIRQGTDYKHWPQIAQFAPSASAFFGMSRIGMEVTPSGTWLTYTGAIKLDDKDPNFKDQVILLNKHIDAYKTFPPTEPKKDKKKKADETQALPQRQKKQQTVTLLPAADLDDFSKQLQQSMSSADSTQAGGSGHHHHHH

SEQ ID NO: 3699 - protein, 806 aa, Artificial Sequence
  Description of Artificial Sequence: Synthetic polypeptide
MKIEEGKLVIWINGDKGYNGLAEVGKKFEKDTGIKVTVEHPDKLEEKFPQVAATGDGPDIIFWAHDRFGGYAQSGLLAEITPDKAFQDKLYPFTWDAVRYNGKLIAYPIAVEALSLIYNKDLLPNPPKTWEEIPALDKELKAKGKSALMFNLQEPYFTWPLIAADGGYAFKYENGKYDIKDVGVDNAGAKAGLTFLVDLIKNKHMNADTDYSIAEAAFNKGETAMTINGPWAWSNIDTSKVNYGVTVLPTFKGQPSKPFVGVLSAGINAASPNKELAKEFLENYLLTDEGLEAVNKDKPLGAVALKSYEEELAKDPRIAATMENAQKGEIMPNIPQMSAFWYAVRTAVINAASGRQTVDEALKDAQTGGSGENLYFQSSDNGPQNQRNAPRITFGGPSDSTGSNQNGERSGARSKQRRPQGLPNNTASWFTALTQHGKEDLKFPRGQGVPINSNSSPDDQIGYYRRATRRIRGGDGKMKDLSPRWYFYYLGTGPEAGLPYGANKDGIIWVATEGALNTPKDHIGTRNPANNAAIVLQLPQGTTLPKGFYAEGSRGGSQASSRSSSRSRNSSRNSTPGSSRGTSPARMAGNGGDAALALLLLDRLNQLESKMSGKGQQQQGQTVTKKSAAEASKKPRQKRTATKAYNVTQAFGRRGPEQTQGNFGDQELIRQGTDYKHWPQIAQFAPSASAFFGMSRIGMEVTPSGTWLTYTGAIKLDDKDPNFKDQVILLNKHIDAYKTFPPTEPKKDKKKKADETQALPQRQKKQQTVTLLPAADLDDFSKQLQQSMSSADSTQAGGSGHHHHHH

SEQ ID NO: 3700 - protein, 806 aa, Artificial Sequence
  Description of Artificial Sequence: Synthetic polypeptide
MKIEEGKLVIWINGDKGYNGLAEVGKKFEKDTGIKVTVEHPDKLEEKFPQVAATGDGPDIIFWAHDRFGGYAQSGLLAEITPDKAFQDKLYPFTWDAVRYNGKLIAYPIAVEALSLIYNKDLLPNPPKTWEEIPALDKELKAKGKSALMFNLQEPYFTWPLIAADGGYAFKYENGKYDIKDVGVDNAGAKAGLTFLVDLIKNKHMNADTDYSIAEAAFNKGETAMTINGPWAWSNIDTSKVNYGVTVLPTFKGQPSKPFVGVLSAGINAASPNKELAKEFLENYLLTDEGLEAVNKDKPLGAVALKSYEEELAKDPRIAATMENAQKGEIMPNIPQMSAFWYAVRTAVINAASGRQTVDEALKDAQTGGSGENLYFQSSDNGPQNQRNAPRITFGGPSDSTGSNQNGERSGARSKQRRPQGLPNNTASWFTALTQHGKEDLKFPRGQGVPINTNSSPDDQIGYYRRATRRIRGGDGKMKDLSPRWYFYYLGTGPEAGLPYGANKDGIIWVATEGALNTPKDHIGTRNPANNAAIVLQLPQGTTLPKGFYAEGSRGGSQASSRSSSRSRNSSRNSTPGSSRGTSPARMAGNGGDAALALLLLDRLNQLESKMSGKGQQQQGQTVTKKSAAEASKKPRQKRTATKGYNVTQAFGRRGPEQTQGNFGDQDLNREGTDYKHWPQIAQFAPSASAFFGMSRISTEETPSGTWLTYTGAIKLDKKDPNFKDQVILLNKHIDAYKTFPPTEPKKDKKKKADETQALPQRQKKQQTVTLLPAADLDDFSKQLQQSMSSADSTQAGGSGHHHHHH

SEQ ID NO: 3701 - protein, 806 aa, Artificial Sequence
  Description of Artificial Sequence: Synthetic polypeptide
MKIEEGKLVIWINGDKGYNGLAEVGKKFEKDTGIKVTVEHPDKLEEKFPQVAATGDGPDIIFWAHDRFGGYAQSGLLAEITPDKAFQDKLYPFTWDAVRYNGKLIAYPIAVEALSLIYNKDLLPNPPKTWEEIPALDKELKAKGKSALMFNLQEPYFTWPLIAADGGYAFKYENGKYDIKDVGVDNAGAKAGLTFLVDLIKNKHMNADTDYSIAEAAFNKGETAMTINGPWAWSNIDTSKVNYGVTVLPTFKGQPSKPFVGVLSAGINAASPNKELAKEFLENYLLTDEGLEAVNKDKPLGAVALKSYEEELAKDPRIAATMENAQKGEIMPNIPQMSAFWYAVRTAVINAASGRQTVDEALKDAQTGGSGENLYFQSSDNGPQNQRNAPRITFGGPSDSTGSNQNGERSGARSKQRRPQGLPNNTASWFTALTQHGKEDLKFPRGQGVPINTNSSPDDQIGYYRRATRRIRGGDGKMKDLSPRWYFYYLGTGPEAGLPYGANKDGIIWVATEGALNTPKDHIGTRNPANNAAIVLQLPQGTTLPKGFYAEGSRGGSQASSRSSSRSRNSSRNSTPGSSRGTSPARMAGNGGDAALALLLLDRLNQLESKMSGKGQQQQGQTVTKKSAAEMSKKPRQKRTATKGYNVTQCFGPRGPEQTQGNFGDAELNKKGVDYKHWPQIAQFAPSASAFFGMSRISSKETPSGTWLTYTGAIKLDKDDPNFKDQVILLNKHIDAYKTFPPTEPKKDKKKKADETQALPQRQKKQQTVTLLPAADLDDFSKQLQQSMSSADSTQAGGSGHHHHHH

SEQ ID NO: 3702 - protein, 806 aa, Artificial Sequence
  Description of Artificial Sequence: Synthetic polypeptide
MKIEEGKLVIWINGDKGYNGLAEVGKKFEKDTGIKVTVEHPDKLEEKFPQVAATGDGPDIIFWAHDRFGGYAQSGLLAEITPDKAFQDKLYPFTWDAVRYNGKLIAYPIAVEALSLIYNKDLLPNPPKTWEEIPALDKELKAKGKSALMFNLQEPYFTWPLIAADGGYAFKYENGKYDIKDVGVDNAGAKAGLTFLVDLIKNKHMNADTDYSIAEAAFNKGETAMTINGPWAWSNIDTSKVNYGVTVLPTFKGQPSKPFVGVLSAGINAASPNKELAKEFLENYLLTDEGLEAVNKDKPLGAVALKSYEEELAKDPRIAATMENAQKGEIMPNIPQMSAFWYAVRTAVINAASGRQTVDEALKDAQTGGSGENLYFQSSDNGPQNQRNAPRITFGGPSDSTGSNQNGERSGARSKQRRPQGLPNNTASWFTALTQHGKEDLKFPRGQGVPINTNSSPDDQIGYYRRATRRIRGGDGKMKDLSPRWYFYYLGTGPEAGLPYGANKDGIIWVATEGALNTPKDHIGTRNPANNAAIVLQLPQGTTLPKGFYAEGSRGGSQASSRSSSRSRNSSRNSTPGSSRGTSPARMAGNGGDAALALLLLDRLNQLESKMSGKGQQQQGQTVTKKSAAEASKKPRQKRTATKAYNVTQAFGERGPEQTQGNFGDQELIRQGTDYKHWPQIAQFAPSASAFFGMSRIGMEVTPSGTWLTYTGAIKLDDKDPNFKDQVILLNKHIDAYKTFPPTEPKKDKKKKADETQALPQRQKKQQTVTLLPAADLDDFSKQLQQSMSSADSTQAGGSGHHHHHH

SEQ ID NO: 3703 - protein, 806 aa, Artificial Sequence
  Description of Artificial Sequence: Synthetic polypeptide
MKIEEGKLVIWINGDKGYNGLAEVGKKFEKDTGIKVTVEHPDKLEEKFPQVAATGDGPDIIFWAHDRFGGYAQSGLLAEITPDKAFQDKLYPFTWDAVRYNGKLIAYPIAVEALSLIYNKDLLPNPPKTWEEIPALDKELKAKGKSALMFNLQEPYFTWPLIAADGGYAFKYENGKYDIKDVGVDNAGAKAGLTFLVDLIKNKHMNADTDYSIAEAAFNKGETAMTINGPWAWSNIDTSKVNYGVTVLPTFKGQPSKPFVGVLSAGINAASPNKELAKEFLENYLLTDEGLEAVNKDKPLGAVALKSYEEELAKDPRIAATMENAQKGEIMPNIPQMSAFWYAVRTAVINAASGRQTVDEALKDAQTGGSGENLYFQSSDNGPQNQRNAPRITFGGPSDSTGSNQNGERSGARSKQRRPQGLPNNTASWFTALTQHGKEDLKFPRGQGVPINTNSSPDDQIGYYRRATRRIRGGDGKMKDLSPRWYFYYLGTGPEAGLPYGANKDGIIWVATEGALNTPKDHIGTRNPANNAAIVLQLPQGTTLPKGFYAEGSRGGSQASSRSSSRSRNSSRNSTPGSSRGTSPARMAGNGGDAALALLLLDRLNQLESKMSGKGQQQQGQTVTKKSAAEASKKPRQKRTATKAYNVTQAFGRRGPEQTQGNFGDQELIRQGTDYKHWPQIAQFAPSASAFFGMSRIGMVVTPSGTWLTYTGAIKLDDKDPNFKDQVILLNKHIDAYKTFPPTEPKKDKKKKADETQALPQRQKKQQTVTLLPAADLDDFSKQLQQSMSSADSTQAGGSGHHHHHH

SEQ ID NO: 3704 - protein, 806 aa, Artificial Sequence
  Description of Artificial Sequence: Synthetic polypeptide
MKIEEGKLVIWINGDKGYNGLAEVGKKFEKDTGIKVTVEHPDKLEEKFPQVAATGDGPDIIFWAHDRFGGYAQSGLLAEITPDKAFQDKLYPFTWDAVRYNGKLIAYPIAVEALSLIYNKDLLPNPPKTWEEIPALDKELKAKGKSALMFNLQEPYFTWPLIAADGGYAFKYENGKYDIKDVGVDNAGAKAGLTFLVDLIKNKHMNADTDYSIAEAAFNKGETAMTINGPWAWSNIDTSKVNYGVTVLPTFKGQPSKPFVGVLSAGINAASPNKELAKEFLENYLLTDEGLEAVNKDKPLGAVALKSYEEELAKDPRIAATMENAQKGEIMPNIPQMSAFWYAVRTAVINAASGRQTVDEALKDAQTGGSGENLYFQSSDNGPQNQRNAPRITFGGPSDSTGSNQNGERSGARSKQRRPQGLPNNTASWFTALTQHGKEDLKFPRGQGVPINTNSSPDDQIGYYRRATRRIRGGDGKMKDLSPRWYFYYLGTGPEAGLPYGANKDGIIWVATEGALNTPKDHIGTRNPANNAAIVLQLPQGTTLPKGFYAEGSRGGSQASSRSSSRSRNSSRNSTPGSSRGTSPARMAGNGGDAALALLLLDRLNQLESKMSGKGQQQQGQTVTKKSAAEMSKKPRQKRTATKGYNVTQCFGPRGPEQTQGNFGDAELNKKGTDYKHWPQIAQFAPSASAFFGMSRISSKETPSGTWLTYTGAIKLDKDDPNFKDQVILLNKHIDAYKTFPPTEPKKDKKKKADETQALPQRQKKQQTVTLLPAADLDDFSKQLQQSMSSADSTQAGGSGHHHHHH

SEQ ID NO: 3705 - protein, 806 aa, Artificial Sequence
  Description of Artificial Sequence: Synthetic polypeptide
MKIEEGKLVIWINGDKGYNGLAEVGKKFEKDTGIKVTVEHPDKLEEKFPQVAATGDGPDIIFWAHDRFGGYAQSGLLAEITPDKAFQDKLYPFTWDAVRYNGKLIAYPIAVEALSLIYNKDLLPNPPKTWEEIPALDKELKAKGKSALMFNLQEPYFTWPLIAADGGYAFKYENGKYDIKDVGVDNAGAKAGLTFLVDLIKNKHMNADTDYSIAEAAFNKGETAMTINGPWAWSNIDTSKVNYGVTVLPTFKGQPSKPFVGVLSAGINAASPNKELAKEFLENYLLTDEGLEAVNKDKPLGAVALKSYEEELAKDPRIAATMENAQKGEIMPNIPQMSAFWYAVRTAVINAASGRQTVDEALKDAQTGGSGENLYFQSSDNGPQNQRNAPRITFGGPSDSTGSNQNGERSGARSKQRRPQGLPNNTASWFTPLTQHGKEDLKFPPGQGVPINTNSSPDDQIGYYRRATRRIRGGDGKMKDLPPRWYFYYLGTGPEADLPYGQVKDGIVWVAAEGALNTPKDHIGTRNPANNAAIPLQLPPGTTLPKGFYAEGSRGGSQASSRSSSRSRNSSRNSTPGSSRGTSPARMAGNGGDAALALLLLDRLNQLESKMSGKGQQQQGQTVTKKSAAEASKKPRQKRTATKAYNVTQAFGRRGPEQTQGNFGDQELIRQGTDYKHWPQIAQFAPSASAFFGMSRIGMEVTPSGTWLTYTGAIKLDDKDPNFKDQVILLNKHIDAYKTFPPTEPKKDKKKKADETQALPQRQKKQQTVTLLPAADLDDFSKQLQQSMSSADSTQAGGSGHHHHHH

SEQ ID NO: 3706 - protein, 806 aa, Artificial Sequence
  Description of Artificial Sequence: Synthetic polypeptide
MKIEEGKLVIWINGDKGYNGLAEVGKKFEKDTGIKVTVEHPDKLEEKFPQVAATGDGPDIIFWAHDRFGGYAQSGLLAEITPDKAFQDKLYPFTWDAVRYNGKLIAYPIAVEALSLIYNKDLLPNPPKTWEEIPALDKELKAKGKSALMFNLQEPYFTWPLIAADGGYAFKYENGKYDIKDVGVDNAGAKAGLTFLVDLIKNKHMNADTDYSIAEAAFNKGETAMTINGPWAWSNIDTSKVNYGVTVLPTFKGQPSKPFVGVLSAGINAASPNKELAKEFLENYLLTDEGLEAVNKDKPLGAVALKSYEEELAKDPRIAATMENAQKGEIMPNIPQMSAFWYAVRTAVINAASGRQTVDEALKDAQTGGSGENLYFQSSDNGPQNQRNAPRITFGGPSDSTGSNQNGERSGARSKQRRPQGLPNNTASWFTALTQHGKEDLKFPRGQGVPINTNSSPDDQIGYYRRATRRIRGGDGKMKDLSPRWYFYYLGTGPEAGLPYGANKDGIIWVATEGALNTPKDHIGTRNPANKAAIVLQLPQGTTLPKGFYAEGSRGGSQASSRSSSRSRNSSRNSTPGSSRGTSPARMAGNGGDAALALLLLDRLNQLESKMSGKGQQQQGQTVTKKSAAEASKKPRQKRTATKAYNVTQAFGRRGPEQTQGNFGDQELIRQGTDYKHWPQIAQFAPSASAFFGMSRIGMEVTPSGTWLTYTGAIKLDDKDPNFKDQVILLNKHIDAYKTFPPTEPKKDKKKKADETQALPQRQKKQQTVTLLPAADLDDFSKQLQQSMSSADSTQAGGSGHHHHHH

SEQ ID NO: 3707 - protein, 806 aa, Artificial Sequence
  Description of Artificial Sequence: Synthetic polypeptide
MKIEEGKLVIWINGDKGYNGLAEVGKKFEKDTGIKVTVEHPDKLEEKFPQVAATGDGPDIIFWAHDRFGGYAQSGLLAEITPDKAFQDKLYPFTWDAVRYNGKLIAYPIAVEALSLIYNKDLLPNPPKTWEEIPALDKELKAKGKSALMFNLQEPYFTWPLIAADGGYAFKYENGKYDIKDVGVDNAGAKAGLTFLVDLIKNKHMNADTDYSIAEAAFNKGETAMTINGPWAWSNIDTSKVNYGVTVLPTFKGQPSKPFVGVLSAGINAASPNKELAKEFLENYLLTDEGLEAVNKDKPLGAVALKSYEEELAKDPRIAATMENAQKGEIMPNIPQMSAFWYAVRTAVINAASGRQTVDEALKDAQTGGSGENLYFQSSDNGPQNQRNAPRITFGGPSDSTGSNQNGERSGARSKQRRPQGLPNNTASWFTALTQHGKEDLKFPRGQGVPINTNSSPDDQIGYYRRATRRIRGGDGKMKDLSPRWYFYYLGTGPEADLPYGANKDGIIWVATEGALNTPKDHIGTRNPANNAAIVLQLPQGTTLPKGFYAEGSRGGSQASSRSSSRSRNSSRNSTPGSSRGTSPARMAGNGGDAALALLLLDRLNQLESKMSGKGQQQQGQTVTKKSAAEASKKPRQKRTATKAYNVTQAFGRRGPEQTQGNFGDQELIRQGTDYKHWPQIAQFAPSASAFFGMSRIGMEVTPSGTWLTYTGAIKLDDKDPNFKDQVILLNKHIDAYKTFPPTEPKKDKKKKADETQALPQRQKKQQTVTLLPAADLDDFSKQLQQSMSSADSTQAGGSGHHHHHH

SEQ ID NO: 3708 - protein, 806 aa, Artificial Sequence
  Description of Artificial Sequence: Synthetic polypeptide
MKIEEGKLVIWINGDKGYNGLAEVGKKFEKDTGIKVTVEHPDKLEEKFPQVAATGDGPDIIFWAHDRFGGYAQSGLLAEITPDKAFQDKLYPFTWDAVRYNGKLIAYPIAVEALSLIYNKDLLPNPPKTWEEIPALDKELKAKGKSALMFNLQEPYFTWPLIAADGGYAFKYENGKYDIKDVGVDNAGAKAGLTFLVDLIKNKHMNADTDYSIAEAAFNKGETAMTINGPWAWSNIDTSKVNYGVTVLPTFKGQPSKPFVGVLSAGINAASPNKELAKEFLENYLLTDEGLEAVNKDKPLGAVALKSYEEELAKDPRIAATMENAQKGEIMPNIPQMSAFWYAVRTAVINAASGRQTVDEALKDAQTGGSGENLYFQSSDNGPQNQRNAPRITFGGPSDSTGSNQNGERSGARSKQRRPQGLPNNTASWFTALTQHGKEDLKFPRGQGVPINTNSSPDDQIGYYRRATRRIRGGDGKMKDLSPRWYFYYLGTGPEAGLPYGANKDGIIWVATEGALNTPKDHIGTRNPANNAAIVLQLPQGTTLPKGFYAEGSRGGSQASSRSSSRSRNSSRNSTPGSSRGTSPARMAGNGGDAALALLLLDRLNQLESKMSGKGQQQQGQTVTKKNAAEASKKPRQKRTATKAYNVTQAFGRRGPEQTQGNFGDQELIRQGTDYKHWPQIAQFAPSASAFFGMSRIGMEVTPSGTWLTYTGAIKLDDKDPNFKDQVILLNKHIDAYKTFPPTEPKKDKKKKADETQALPQRQKKQQTVTLLPAADLDDFSKQLQQSMSSADSTQAGGSGHHHHHH

SEQ ID NO: 3709 - protein, 806 aa, Artificial Sequence
  Description of Artificial Sequence: Synthetic polypeptide
MKIEEGKLVIWINGDKGYNGLAEVGKKFEKDTGIKVTVEHPDKLEEKFPQVAATGDGPDIIFWAHDRFGGYAQSGLLAEITPDKAFQDKLYPFTWDAVRYNGKLIAYPIAVEALSLIYNKDLLPNPPKTWEEIPALDKELKAKGKSALMFNLQEPYFTWPLIAADGGYAFKYENGKYDIKDVGVDNAGAKAGLTFLVDLIKNKHMNADTDYSIAEAAFNKGETAMTINGPWAWSNIDTSKVNYGVTVLPTFKGQPSKPFVGVLSAGINAASPNKELAKEFLENYLLTDEGLEAVNKDKPLGAVALKSYEEELAKDPRIAATMENAQKGEIMPNIPQMSAFWYAVRTAVINAASGRQTVDEALKDAQTGGSGENLYFQSSDNGPQNQRNAPRITFGGPSDSTGSNQNGERSGARSKQRRPQGLPNNTASWFTALTQHGKEDLKFPRGQGVPINTNSSPDDQIGYYRRATRRIRGGDGKMKDLSPRWYFYYLGTGPEASLPYGANKDGIIWVATEGALNTPKDHIGTRNPANNAAIVLQLPQGTTLPKGFYAEGSRGGSQASSRSSSRSRNSSRNSTPGSSRGTSPARMAGNGGDAALALLLLDRLNQLESKMSGKGQQQQGQTVTKKSAAEASKKPRQKRTATKAYNVTQAFGRRGPEQTQGNFGDQELIRQGTDYKHWPQIAQFAPSASAFFGMSRIGMEVTPSGTWLTYTGAIKLDDKDPNFKDQVILLNKHIDAYKTFPPTEPKKDKKKKADETQALPQRQKKQQTVTLLPAADLDDFSKQLQQSMSSADSTQAGGSGHHHHHH

SEQ ID NO: 3710 - protein, 806 aa, Artificial Sequence
  Description of Artificial Sequence: Synthetic polypeptide
MKIEEGKLVIWINGDKGYNGLAEVGKKFEKDTGIKVTVEHPDKLEEKFPQVAATGDGPDIIFWAHDRFGGYAQSGLLAEITPDKAFQDKLYPFTWDAVRYNGKLIAYPIAVEALSLIYNKDLLPNPPKTWEEIPALDKELKAKGKSALMFNLQEPYFTWPLIAADGGYAFKYENGKYDIKDVGVDNAGAKAGLTFLVDLIKNKHMNADTDYSIAEAAFNKGETAMTINGPWAWSNIDTSKVNYGVTVLPTFKGQPSKPFVGVLSAGINAASPNKELAKEFLENYLLTDEGLEAVNKDKPLGAVALKSYEEELAKDPRIAATMENAQKGEIMPNIPQMSAFWYAVRTAVINAASGRQTVDEALKDAQTGGSGENLYFQSSDNGPQNQRNAPRITFGGPSDSTGSNQNGERSGARSKQRRPQGLPNNTASWFTALTQHGKEDLKFPRGQGVPINTNSSPDDQIGYYRRATRRIRGGDGKMKDLSPRWYFYYLGTGPEAGLPYGANKDGIIWVATEGALNTPKDHIGTRNPANNAAIVLQLPQGTTLPKGFYAEGSRGGSQASSRSSSRSRNSSRNSTPGSSRGTSPARMAGNGGDAALALLLLDRLNQLESKMSGKGQQQQGQTVTKKSAAEMSKKPRQKRTATKGCNVTQCFGPRGPEQTQGNFGDAELNKKGTDYKHWPQIAQFAPSASAFFGMSRISSKEQPSGTWLTYTGAIKLDKDDPNFKDQVILLNKHIDAYKTFPPTEPKKDKKKKADETQALPQRQKKQQTVTLLPAADLDDFSKQLQQSMSSADSTQAGGSGHHHHHH

SEQ ID NO: 3711 - protein, 806 aa, Artificial Sequence
  Description of Artificial Sequence: Synthetic polypeptide
MKIEEGKLVIWINGDKGYNGLAEVGKKFEKDTGIKVTVEHPDKLEEKFPQVAATGDGPDIIFWAHDRFGGYAQSGLLAEITPDKAFQDKLYPFTWDAVRYNGKLIAYPIAVEALSLIYNKDLLPNPPKTWEEIPALDKELKAKGKSALMFNLQEPYFTWPLIAADGGYAFKYENGKYDIKDVGVDNAGAKAGLTFLVDLIKNKHMNADTDYSIAEAAFNKGETAMTINGPWAWSNIDTSKVNYGVTVLPTFKGQPSKPFVGVLSAGINAASPNKELAKEFLENYLLTDEGLEAVNKDKPLGAVALKSYEEELAKDPRIAATMENAQKGEIMPNIPQMSAFWYAVRTAVINAASGRQTVDEALKDAQTGGSGENLYFQSSDNGPQNQRNAPRITFGGPSDSTGSNQNGERSGARSKQRRPQGLPNNTASWFTALTQHGKEDLKFPRGQGVPINTNSSPDDQIGYYRRATRRIRGGDGKMKDLSPRWYFYYLGTGPEAGLPYGANKDGIIWVATEGALNTPKDHIGTRNPANNAAIVLQLPQGTTLPKGFYAEGSRGGSQASSRSSSRSRNSSRNSTPGSSRGTSPARMAGNGGDAALALLLLDRLNQLESKMSGKGQQQQGQTVTKKSAAEMSKKPRQKRTATKGYNVTQCFGPRGPEQTQGNFGDADLIKKGTDYKHWPQIAQFAPSASAFFGMSRISSKEQPSGTWLTYTGAIKLDKDDPNFKDQVILLNKHIDAYKTFPPTEPKKDKKKKADETQALPQRQKKQQTVTLLPAADLDDFSKQLQQSMSSADSTQAGGSGHHHHHH

SEQ ID NO: 3712 - protein, 806 aa, Artificial Sequence
  Description of Artificial Sequence: Synthetic polypeptide
MKIEEGKLVIWINGDKGYNGLAEVGKKFEKDTGIKVTVEHPDKLEEKFPQVAATGDGPDIIFWAHDRFGGYAQSGLLAEITPDKAFQDKLYPFTWDAVRYNGKLIAYPIAVEALSLIYNKDLLPNPPKTWEEIPALDKELKAKGKSALMFNLQEPYFTWPLIAADGGYAFKYENGKYDIKDVGVDNAGAKAGLTFLVDLIKNKHMNADTDYSIAEAAFNKGETAMTINGPWAWSNIDTSKVNYGVTVLPTFKGQPSKPFVGVLSAGINAASPNKELAKEFLENYLLTDEGLEAVNKDKPLGAVALKSYEEELAKDPRIAATMENAQKGEIMPNIPQMSAFWYAVRTAVINAASGRQTVDEALKDAQTGGSGENLYFQSSDNGPQNQRNAPRITFGGPSDSTGSNQNGERSGARSKQRRPQGLPNNTASWFTALTQHGKEDLKFPRGQGVPINTNSSPDDQIGYYRRATRRIRGGDGKMKDLSPRWYFYYLGTGPEAGLPYGANKDGIIWVATEGALNTPKDHIGTRNPANNAAIVLQLPQGTTLPKGFYAEGSRGGSQASSRSSSRSRNSSRNSTPGSSRGTSPARMAGNGGDAALALLLLDRLNQLESKMSGKGQQQQGQTVTKKSAAEASKKPRQKRTATKAYNVTQAFGRRGPRQTQGNFGDQELIRQGTDYKHWPQIAQFAPSASAFFGMSRIGMEVTPSGTWLTYTGAIKLDDKDPNFKDQVILLNKHIDAYKTFPPTEPKKDKKKKADETQALPQRQKKQQTVTLLPAADLDDFSKQLQQSMSSADSTQAGGSGHHHHHH

SEQ ID NO: 3713 - protein, 806 aa, Artificial Sequence
  Description of Artificial Sequence: Synthetic polypeptide
MKIEEGKLVIWINGDKGYNGLAEVGKKFEKDTGIKVTVEHPDKLEEKFPQVAATGDGPDIIFWAHDRFGGYAQSGLLAEITPDKAFQDKLYPFTWDAVRYNGKLIAYPIAVEALSLIYNKDLLPNPPKTWEEIPALDKELKAKGKSALMFNLQEPYFTWPLIAADGGYAFKYENGKYDIKDVGVDNAGAKAGLTFLVDLIKNKHMNADTDYSIAEAAFNKGETAMTINGPWAWSNIDTSKVNYGVTVLPTFKGQPSKPFVGVLSAGINAASPNKELAKEFLENYLLTDEGLEAVNKDKPLGAVALKSYEEELAKDPRIAATMENAQKGEIMPNIPQMSAFWYAVRTAVINAASGRQTVDEALKDAQTGGSGENLYFQSSDNGPQNQRNAPRITFGGPSDSTGSNQNGERSGARSKQRRPQGLPNNTASWFTALTQHGKEDLKFPRGQGVPINTNSSPDDQIGYYRRATRRIRGGDGKMKDLSPRWYFYYLGTGPEAGLPYGANKDGIIWVATEGALNTPKDHIGTRNPANNAAIELQLPQGTTLPKGFYAEGSRGGSQASSRSSSRSRNSSRNSTPGSSRGTSPARMAGNGGDAALALLLLDRLNQLESKMSGKGQQQQGQTVTKKSAAEASKKPRQKRTATKAYNVTQAFGRRGPEQTQGNFGDQELIRQGTDYKHWPQIAQFAPSASAFFGMSRIGMEVTPSGTWLTYTGAIKLDDKDPNFKDQVILLNKHIDAYKTFPPTEPKKDKKKKADETQALPQRQKKQQTVTLLPAADLDDFSKQLQQSMSSADSTQAGGSGHHHHHH

SEQ ID NO: 3714 - protein, 806 aa, Artificial Sequence
  Description of Artificial Sequence: Synthetic polypeptide
MKIEEGKLVIWINGDKGYNGLAEVGKKFEKDTGIKVTVEHPDKLEEKFPQVAATGDGPDIIFWAHDRFGGYAQSGLLAEITPDKAFQDKLYPFTWDAVRYNGKLIAYPIAVEALSLIYNKDLLPNPPKTWEEIPALDKELKAKGKSALMFNLQEPYFTWPLIAADGGYAFKYENGKYDIKDVGVDNAGAKAGLTFLVDLIKNKHMNADTDYSIAEAAFNKGETAMTINGPWAWSNIDTSKVNYGVTVLPTFKGQPSKPFVGVLSAGINAASPNKELAKEFLENYLLTDEGLEAVNKDKPLGAVALKSYEEELAKDPRIAATMENAQKGEIMPNIPQMSAFWYAVRTAVINAASGRQTVDEALKDAQTGGSGENLYFQSSDNGPQNQRNAPRITFGGPSDSTGSNQNGERSGARSKQRRPQGLPNNTASWFTALTQHGKEDLKFPRGQGVPINTNSSPDDQIGYYRRATRRIRGGDGKMKDLSPRWYFYYLGTGPEAGLPYGANKDGIIWVATEGALNTPKDHIGTRNPANNAAIVLQLPQGTTLPKGFYAEGSRGGSQASSRSSSRSRNSSRNSTPGSSRGTSPARMAGNGGDAALALLLLDRLNQLESKMSGKGQQQQGQTVTKKSAAEMSKKPRQKRTATKGCNVTQCFGPRGPEQTQGNFGDADLVKKGTDYKHWPQIAQFAPSASAFFGMSRISSKETPSGTWLTYTGAIKLDKDDPNFKDQVILLNKHIDAYKTFPPTEPKKDKKKKADETQALPQRQKKQQTVTLLPAADLDDFSKQLQQSMSSADSTQAGGSGHHHHHH

SEQ ID NO: 3715 - protein, 806 aa, Artificial Sequence
  Description of Artificial Sequence: Synthetic polypeptide
MKIEEGKLVIWINGDKGYNGLAEVGKKFEKDTGIKVTVEHPDKLEEKFPQVAATGDGPDIIFWAHDRFGGYAQSGLLAEITPDKAFQDKLYPFTWDAVRYNGKLIAYPIAVEALSLIYNKDLLPNPPKTWEEIPALDKELKAKGKSALMFNLQEPYFTWPLIAADGGYAFKYENGKYDIKDVGVDNAGAKAGLTFLVDLIKNKHMNADTDYSIAEAAFNKGETAMTINGPWAWSNIDTSKVNYGVTVLPTFKGQPSKPFVGVLSAGINAASPNKELAKEFLENYLLTDEGLEAVNKDKPLGAVALKSYEEELAKDPRIAATMENAQKGEIMPNIPQMSAFWYAVRTAVINAASGRQTVDEALKDAQTGGSGENLYFQSSDNGPQNQRNAPRITFGGPSDSTGSNQNGERSGARSKQRRPQGLPNNTASWFTALTQHGKEDLKFPRGQGVPINTNSSPDDQIGYYRRATRRIRGGDGKMKDLSPRWYFYYLGTGPEAGLPYGANKDGIIWVATEGALNTPKDHIGTRNPANNAAIVLQLPQGTTLPKGFYAEGSRGGSQASSRSSSRSRNSSRNSTPGSSRGTSPARMAGNGGDAALALLLLDRLNQLESKMSGKGQQQQGQTVTKKSAAEASKKPRQKRTATKAYNVTQAFGARGPEQTQGNFGDQELIRQGTDYKHWPQIAQFAPSASAFFGMSRIGMEVTPSGTWLTYTGAIKLDDKDPNFKDQVILLNKHIDAYKTFPPTEPKKDKKKKADETQALPQRQKKQQTVTLLPAADLDDFSKQLQQSMSSADSTQAGGSGHHHHHH

SEQ ID NO: 3716 - protein, 806 aa, Artificial Sequence
  Description of Artificial Sequence: Synthetic polypeptide
MKIEEGKLVIWINGDKGYNGLAEVGKKFEKDTGIKVTVEHPDKLEEKFPQVAATGDGPDIIFWAHDRFGGYAQSGLLAEITPDKAFQDKLYPFTWDAVRYNGKLIAYPIAVEALSLIYNKDLLPNPPKTWEEIPALDKELKAKGKSALMFNLQEPYFTWPLIAADGGYAFKYENGKYDIKDVGVDNAGAKAGLTFLVDLIKNKHMNADTDYSIAEAAFNKGETAMTINGPWAWSNIDTSKVNYGVTVLPTFKGQPSKPFVGVLSAGINAASPNKELAKEFLENYLLTDEGLEAVNKDKPLGAVALKSYEEELAKDPRIAATMENAQKGEIMPNIPQMSAFWYAVRTAVINAASGRQTVDEALKDAQTGGSGENLYFQSSDNGPQNQRNAPRITFGGPSDSTGSNQNGERSGARSKQRRPQGLPNNTASWFTALTQHGKEDLKFPRGQGVPINTNSSPDDQIGPYRRATRRIRGGDGKMKDLSPRWYFYYLGTGPEAGLPYGANKDGIIWVATEGALNTPKDHIGTRNPANNAAIVLQLPQGTTLPKGFYAEGSRGGSQASSRSSSRSRNSSRNSTPGSSRGTSPARMAGNGGDAALALLLLDRLNQLESKMSGKGQQQQGQTVTKKSAAEASKKPRQKRTATKAYNVTQAFGRRGPEQTQGNFGDQELIRQGTDYKHWPQIAQFAPSASAFFGMSRIGMEVTPSGTWLTYTGAIKLDDKDPNFKDQVILLNKHIDAYKTFPPTEPKKDKKKKADETQALPQRQKKQQTVTLLPAADLDDFSKQLQQSMSSADSTQAGGSGHHHHHH

SEQ ID NO: 3717 - protein, 806 aa, Artificial Sequence
  Description of Artificial Sequence: Synthetic polypeptide
MKIEEGKLVIWINGDKGYNGLAEVGKKFEKDTGIKVTVEHPDKLEEKFPQVAATGDGPDIIFWAHDRFGGYAQSGLLAEITPDKAFQDKLYPFTWDAVRYNGKLIAYPIAVEALSLIYNKDLLPNPPKTWEEIPALDKELKAKGKSALMFNLQEPYFTWPLIAADGGYAFKYENGKYDIKDVGVDNAGAKAGLTFLVDLIKNKHMNADTDYSIAEAAFNKGETAMTINGPWAWSNIDTSKVNYGVTVLPTFKGQPSKPFVGVLSAGINAASPNKELAKEFLENYLLTDEGLEAVNKDKPLGAVALKSYEEELAKDPRIAATMENAQKGEIMPNIPQMSAFWYAVRTAVINAASGRQTVDEALKDAQTGGSGENLYFQSSDNGPQNQRNAPRITFGGPSDSTGSNQNGERSGARSKQRRPQGLPNNTASWFTALTQHGKEDLKFPRGQGVPINTNSSPDDQIGYYRRATRRIRGGDGKMKDLSPRWYFYYLGTGPEAGLPYGANKDGIIWVATEGALNTPKDHIGTRNPANNAAIVLQLPQGTTLPKGFYAEGSRGGSQASSRSSSRSRNSSRNSTPGSSRGTSPARMAGNGGDAALALLLLDRLNQLESKMSGKGQQQQGQTVTKKSAAEMSKKPRQKRTATKGCNVTQCFGPRGPEQTQGNFGDADLNKKGTDYKHWPQIAQFAPSASAFFGMSRISSKETPSGTWLTYTGAIKLDKDDPNFKDQVILLNKHIDAYKTFPPTEPKKDKKKKADETQALPQRQKKQQTVTLLPAADLDDFSKQLQQSMSSADSTQAGGSGHHHHHH

SEQ ID NO: 3718 - protein, 806 aa, Artificial Sequence
  Description of Artificial Sequence: Synthetic polypeptide
MKIEEGKLVIWINGDKGYNGLAEVGKKFEKDTGIKVTVEHPDKLEEKFPQVAATGDGPDIIFWAHDRFGGYAQSGLLAEITPDKAFQDKLYPFTWDAVRYNGKLIAYPIAVEALSLIYNKDLLPNPPKTWEEIPALDKELKAKGKSALMFNLQEPYFTWPLIAADGGYAFKYENGKYDIKDVGVDNAGAKAGLTFLVDLIKNKHMNADTDYSIAEAAFNKGETAMTINGPWAWSNIDTSKVNYGVTVLPTFKGQPSKPFVGVLSAGINAASPNKELAKEFLENYLLTDEGLEAVNKDKPLGAVALKSYEEELAKDPRIAATMENAQKGEIMPNIPQMSAFWYAVRTAVINAASGRQTVDEALKDAQTGGSGENLYFQSSDNGPQNQRNAPRITFGGPSDSTGSNQNGERSGARSKQRRPQGLPNNTASWFTALTQHGKEDLKFPRGQGVPINTNSSPDDQIGYYRRATRRIRGGDGKMKDLSPRWYFYYLGTGPEAGLPYGANKDGIIWVATEGALNTPKDHIGTRNPANNAAIVLQLPQGTTLPKGFYAEGSRGGSQASSRSSSRSRNSSRNSTPGSSRGTSPARMAGNGGDAALALLLLDRLNQLESKMSGKGQQQQGQTVTKKSAAEASKKPRQKRTATKAYNVTQAFGRRGPEQTQGNFGDQELIRQGTDYKHWPQIAQFAPSASAFFGMSRIGMEKTPSGTWLTYTGAIKLDDKDPNFKDQVILLNKHIDAYKTFPPTEPKKDKKKKADETQALPQRQKKQQTVTLLPAADLDDFSKQLQQSMSSADSTQAGGSGHHHHHH

SEQ ID NO: 3719 - protein, 806 aa, Artificial Sequence
  Description of Artificial Sequence: Synthetic polypeptide
MKIEEGKLVIWINGDKGYNGLAEVGKKFEKDTGIKVTVEHPDKLEEKFPQVAATGDGPDIIFWAHDRFGGYAQSGLLAEITPDKAFQDKLYPFTWDAVRYNGKLIAYPIAVEALSLIYNKDLLPNPPKTWEEIPALDKELKAKGKSALMFNLQEPYFTWPLIAADGGYAFKYENGKYDIKDVGVDNAGAKAGLTFLVDLIKNKHMNADTDYSIAEAAFNKGETAMTINGPWAWSNIDTSKVNYGVTVLPTFKGQPSKPFVGVLSAGINAASPNKELAKEFLENYLLTDEGLEAVNKDKPLGAVALKSYEEELAKDPRIAATMENAQKGEIMPNIPQMSAFWYAVRTAVINAASGRQTVDEALKDAQTGGSGENLYFQSSDNGPQNQRNAPRITFGGPSDSTGSNQNGERSGARSKQRRPQGLPNNTASWFTALTQHGKEDLKFPRGQGVPINTNSSPDDQIGYYRRATRRIRGGDGKMKDLSPRWYFYYLGTGPEAGLPYGANKDGIIWVHTEGALNTPKDHIGTRNPANNAAIVLQLPQGTTLPKGFYAEGSRGGSQASSRSSSRSRNSSRNSTPGSSRGTSPARMAGNGGDAALALLLLDRLNQLESKMSGKGQQQQGQTVTKKSAAEASKKPRQKRTATKAYNVTQAFGRRGPEQTQGNFGDQELIRQGTDYKHWPQIAQFAPSASAFFGMSRIGMEVTPSGTWLTYTGAIKLDDKDPNFKDQVILLNKHIDAYKTFPPTEPKKDKKKKADETQALPQRQKKQQTVTLLPAADLDDFSKQLQQSMSSADSTQAGGSGHHHHHH

SEQ ID NO: 3720 - protein, 806 aa, Artificial Sequence
  Description of Artificial Sequence: Synthetic polypeptide
MKIEEGKLVIWINGDKGYNGLAEVGKKFEKDTGIKVTVEHPDKLEEKFPQVAATGDGPDIIFWAHDRFGGYAQSGLLAEITPDKAFQDKLYPFTWDAVRYNGKLIAYPIAVEALSLIYNKDLLPNPPKTWEEIPALDKELKAKGKSALMFNLQEPYFTWPLIAADGGYAFKYENGKYDIKDVGVDNAGAKAGLTFLVDLIKNKHMNADTDYSIAEAAFNKGETAMTINGPWAWSNIDTSKVNYGVTVLPTFKGQPSKPFVGVLSAGINAASPNKELAKEFLENYLLTDEGLEAVNKDKPLGAVALKSYEEELAKDPRIAATMENAQKGEIMPNIPQMSAFWYAVRTAVINAASGRQTVDEALKDAQTGGSGENLYFQSSDNGPQNQRNAPRITFGGPSDSTGSNQNGERSGARSKQRRPQGLPNNTASWFTALTQHGKEDLKFPRGQGVPINTNSSPDDQIGYYRRATRRIRGGDGKMKDLSPRWYFYYLGTGPEAGLPYGANKDGIIWVATEGALNTPKDHIGTRNPANNAAIVLQLPQGTTLPKGFYAEGSRGGSQASSRSSSRSRNSSRNSTPGSSRGTSPARMAGNGGDAALALLLLDRLNQLESKMSGKGQQQQGQTVTKKSAAEASKVPRQKRTATKAYNVTQAFGRRGPEQTQGNFGDQELIRQGTDYKHWPQIAQFAPSASAFFGMSRIGMEVTPSGTWLTYTGAIKLDDKDPNFKDQVILLNKHIDAYKTFPPTEPKKDKKKKADETQALPQRQKKQQTVTLLPAADLDDFSKQLQQSMSSADSTQAGGSGHHHHHH

SEQ ID NO: 3721 - protein, 806 aa, Artificial Sequence
  Description of Artificial Sequence: Synthetic polypeptide
MKIEEGKLVIWINGDKGYNGLAEVGKKFEKDTGIKVTVEHPDKLEEKFPQVAATGDGPDIIFWAHDRFGGYAQSGLLAEITPDKAFQDKLYPFTWDAVRYNGKLIAYPIAVEALSLIYNKDLLPNPPKTWEEIPALDKELKAKGKSALMFNLQEPYFTWPLIAADGGYAFKYENGKYDIKDVGVDNAGAKAGLTFLVDLIKNKHMNADTDYSIAEAAFNKGETAMTINGPWAWSNIDTSKVNYGVTVLPTFKGQPSKPFVGVLSAGINAASPNKELAKEFLENYLLTDEGLEAVNKDKPLGAVALKSYEEELAKDPRIAATMENAQKGEIMPNIPQMSAFWYAVRTAVINAASGRQTVDEALKDAQTGGSGENLYFQSSDNGPQNQRNAPRITFGGPSDSTGSNQNGERSGARSKQRRPQGLPNNTASWFTALTQHGKEDLKFPKGQGVPINTNSKPDDQIGYWRRQTRRYRGGDGQMKDLNPRWYFYYLGTGPEAGLPYGANKDGIIWVATEGALNTPKDHIGTRNPANNAAIVLQLPQGTTLPKGFYAEGSRGGSQASSRSSSRSRNSSRNSTPGSSRGTSPARMAGNGGDAALALLLLDRLNQLESKMSGKGQQQQGQTVTKKSAAEASKKPRQKRTATKAYNVTQAFGRRGPEQTQGNFGDQELIRQGTDYKHWPQIAQFAPSASAFFGMSRIGMEVTPSGTWLTYTGAIKLDDKDPNFKDQVILLNKHIDAYKTFPPTEPKKDKKKKADETQALPQRQKKQQTVTLLPAADLDDFSKQLQQSMSSADSTQAGGSGHHHHHH

SEQ ID NO: 3722 - protein, 806 aa, Artificial Sequence
  Description of Artificial Sequence: Synthetic polypeptide
MKIEEGKLVIWINGDKGYNGLAEVGKKFEKDTGIKVTVEHPDKLEEKFPQVAATGDGPDIIFWAHDRFGGYAQSGLLAEITPDKAFQDKLYPFTWDAVRYNGKLIAYPIAVEALSLIYNKDLLPNPPKTWEEIPALDKELKAKGKSALMFNLQEPYFTWPLIAADGGYAFKYENGKYDIKDVGVDNAGAKAGLTFLVDLIKNKHMNADTDYSIAEAAFNKGETAMTINGPWAWSNIDTSKVNYGVTVLPTFKGQPSKPFVGVLSAGINAASPNKELAKEFLENYLLTDEGLEAVNKDKPLGAVALKSYEEELAKDPRIAATMENAQKGEIMPNIPQMSAFWYAVRTAVINAASGRQTVDEALKDAQTGGSGENLYFQSSDNGPQNQRNAPRITFGGPSDSTGSNQNGERSGARSKQRRPQGLPNNTASWFTALTQHGKEDLKFPRGQGVPINTNSSPDDQIGYYRRATRRIRGGDGKMKDLSPRWYFYYLGTGPEAGLPYGANKDGIIWVATEGALNTPKDHIGTRNPANNAADVLQLPQGTTLPKGFYAEGSRGGSQASSRSSSRSRNSSRNSTPGSSRGTSPARMAGNGGDAALALLLLDRLNQLESKMSGKGQQQQGQTVTKKSAAEASKKPRQKRTATKAYNVTQAFGRRGPEQTQGNFGDQELIRQGTDYKHWPQIAQFAPSASAFFGMSRIGMEVTPSGTWLTYTGAIKLDDKDPNFKDQVILLNKHIDAYKTFPPTEPKKDKKKKADETQALPQRQKKQQTVTLLPAADLDDFSKQLQQSMSSADSTQAGGSGHHHHHH

SEQ ID NO: 3723 - protein, 806 aa, Artificial Sequence
  Description of Artificial Sequence: Synthetic polypeptide
MKIEEGKLVIWINGDKGYNGLAEVGKKFEKDTGIKVTVEHPDKLEEKFPQVAATGDGPDIIFWAHDRFGGYAQSGLLAEITPDKAFQDKLYPFTWDAVRYNGKLIAYPIAVEALSLIYNKDLLPNPPKTWEEIPALDKELKAKGKSALMFNLQEPYFTWPLIAADGGYAFKYENGKYDIKDVGVDNAGAKAGLTFLVDLIKNKHMNADTDYSIAEAAFNKGETAMTINGPWAWSNIDTSKVNYGVTVLPTFKGQPSKPFVGVLSAGINAASPNKELAKEFLENYLLTDEGLEAVNKDKPLGAVALKSYEEELAKDPRIAATMENAQKGEIMPNIPQMSAFWYAVRTAVINAASGRQTVDEALKDAQTGGSGENLYFQSSDNGPQNQRNAPRITFGGPSDSTGSNQNGERSGARSKQRRPQGLPNNTASWFTALTQHGKEDLKFPRGQGVPINTNSSPDDQIGYYRRATRRIRGGDGKMKDLSPRWYFYYLGTGPEAGLPYGANKDGIIWVATEGALNTPKDHIGTRNPANNAAIVLQLPQGTTLPKGFYAEGSRGGSQASSRSSSRSRNSSRNSTPGSSRGTSPARMAGNGGDAALALLLLDRLNQLESKMSGKGQQQQGQTVTKKSAAEASKKPRQKRTATKDYNVTQAFGRRGPEQTQGNFGDQDLIKLGTDYKHWPQIAQFAPSASAFFGMSRISTRETPSGTWLTYTGAIKLDKKDPNFKDQVILLNKHIDAYKTFPPTEPKKDKKKKADETQALPQRQKKQQTVTLLPAADLDDFSKQLQQSMSSADSTQAGGSGHHHHHH

SEQ ID NO: 3724 - protein, 806 aa, Artificial Sequence
  Description of Artificial Sequence: Synthetic polypeptide
MKIEEGKLVIWINGDKGYNGLAEVGKKFEKDTGIKVTVEHPDKLEEKFPQVAATGDGPDIIFWAHDRFGGYAQSGLLAEITPDKAFQDKLYPFTWDAVRYNGKLIAYPIAVEALSLIYNKDLLPNPPKTWEEIPALDKELKAKGKSALMFNLQEPYFTWPLIAADGGYAFKYENGKYDIKDVGVDNAGAKAGLTFLVDLIKNKHMNADTDYSIAEAAFNKGETAMTINGPWAWSNIDTSKVNYGVTVLPTFKGQPSKPFVGVLSAGINAASPNKELAKEFLENYLLTDEGLEAVNKDKPLGAVALKSYEEELAKDPRIAATMENAQKGEIMPNIPQMSAFWYAVRTAVINAASGRQTVDEALKDAQTGGSGENLYFQSSDNGPQNQRNAPRITFGGPSDSTGSNQNGERSGARSKQRRPQGLPNNTASWFTALTQHGKEDLKFPRGQGVPINTNSSPDDQIGYYRRATRRIRGGDGKMKDLSPRWYFYYLGTGPEAGLPYGANKDGIIWVATEGALNTPKDHIGTRNPANNAAIVLQLPQGTTLPKGFYAEGSRGGSQASSRSSERSRNSSRNSTPGSSRGTSPARMAGNGGDAALALLLLDRLNQLESKMSGKGQQQQGQTVTKKSAAEASKKPRQKRTATKAYNVTQAFGRRGPEQTQGNFGDQELIRQGTDYKHWPQIAQFAPSASAFFGMSRIGMEVTPSGTWLTYTGAIKLDDKDPNFKDQVILLNKHIDAYKTFPPTEPKKDKKKKADETQALPQRQKKQQTVTLLPAADLDDFSKQLQQSMSSADSTQAGGSGHHHHHH

SEQ ID NO: 3725 - protein, 806 aa, Artificial Sequence
  Description of Artificial Sequence: Synthetic polypeptide
MKIEEGKLVIWINGDKGYNGLAEVGKKFEKDTGIKVTVEHPDKLEEKFPQVAATGDGPDIIFWAHDRFGGYAQSGLLAEITPDKAFQDKLYPFTWDAVRYNGKLIAYPIAVEALSLIYNKDLLPNPPKTWEEIPALDKELKAKGKSALMFNLQEPYFTWPLIAADGGYAFKYENGKYDIKDVGVDNAGAKAGLTFLVDLIKNKHMNADTDYSIAEAAFNKGETAMTINGPWAWSNIDTSKVNYGVTVLPTFKGQPSKPFVGVLSAGINAASPNKELAKEFLENYLLTDEGLEAVNKDKPLGAVALKSYEEELAKDPRIAATMENAQKGEIMPNIPQMSAFWYAVRTAVINAASGRQTVDEALKDAQTGGSGENLYFQSSDNGPQNQRNAPRITFGGPSDSTGSNQNGERSGARSKQRRPQGLPNNTASWFTALTQHGKEDLKFPRGQGVPINTNSSPDDQIGYYRRATRRIRGGDGKMKDLSPRWYFNYLGTGPEAGLPYGANKDGIIWVATEGALNTPKDHIGTRNPANNAAIVLQLPQGTTLPKGFYAEGSRGGSQASSRSSSRSRNSSRNSTPGSSRGTSPARMAGNGGDAALALLLLDRLNQLESKMSGKGQQQQGQTVTKKSAAEASKKPRQKRTATKAYNVTQAFGRRGPEQTQGNFGDQELIRQGTDYKHWPQIAQFAPSASAFFGMSRIGMEVTPSGTWLTYTGAIKLDDKDPNFKDQVILLNKHIDAYKTFPPTEPKKDKKKKADETQALPQRQKKQQTVTLLPAADLDDFSKQLQQSMSSADSTQAGGSGHHHHHH

SEQ ID NO: 3726 - protein, 806 aa, Artificial Sequence
  Description of Artificial Sequence: Synthetic polypeptide
MKIEEGKLVIWINGDKGYNGLAEVGKKFEKDTGIKVTVEHPDKLEEKFPQVAATGDGPDIIFWAHDRFGGYAQSGLLAEITPDKAFQDKLYPFTWDAVRYNGKLIAYPIAVEALSLIYNKDLLPNPPKTWEEIPALDKELKAKGKSALMFNLQEPYFTWPLIAADGGYAFKYENGKYDIKDVGVDNAGAKAGLTFLVDLIKNKHMNADTDYSIAEAAFNKGETAMTINGPWAWSNIDTSKVNYGVTVLPTFKGQPSKPFVGVLSAGINAASPNKELAKEFLENYLLTDEGLEAVNKDKPLGAVALKSYEEELAKDPRIAATMENAQKGEIMPNIPQMSAFWYAVRTAVINAASGRQTVDEALKDAQTGGSGENLYFQSSDNGPQNQRNAPRITFGGPSDSTGSNQNGERSGARSKQRRPQGLPNNTASWFTALTQHGKEDLKFPRGQGVPINTNSSPDDQIGYYRRATRRIRGGDGKMKDLSPRWYFYYLGTGPEAGLPYGANKDGIIWVATEGALNTPKDHIGTRNPANNAAIVLQLPQGTTLPKGFYAEGSRGGSQASSRSSSRSRNSSRNSTPGSSRGTSPARMAGNGGDAALALLLLDRLNQLESKMSGKGQQQQGQTVTKKSAAEASKKPRQKRTATKAYNVTQAFGRRGPEQTQGNFGDQELIRQGTDYKHWPQIAQFAPSASAFFGMSRIGMESTPSGTWLTYTGAIKLDDKDPNFKDQVILLNKHIDAYKTFPPTEPKKDKKKKADETQALPQRQKKQQTVTLLPAADLDDFSKQLQQSMSSADSTQAGGSGHHHHHH

SEQ ID NO: 3727 - protein, 806 aa, Artificial Sequence
  Description of Artificial Sequence: Synthetic polypeptide
MKIEEGKLVIWINGDKGYNGLAEVGKKFEKDTGIKVTVEHPDKLEEKFPQVAATGDGPDIIFWAHDRFGGYAQSGLLAEITPDKAFQDKLYPFTWDAVRYNGKLIAYPIAVEALSLIYNKDLLPNPPKTWEEIPALDKELKAKGKSALMFNLQEPYFTWPLIAADGGYAFKYENGKYDIKDVGVDNAGAKAGLTFLVDLIKNKHMNADTDYSIAEAAFNKGETAMTINGPWAWSNIDTSKVNYGVTVLPTFKGQPSKPFVGVLSAGINAASPNKELAKEFLENYLLTDEGLEAVNKDKPLGAVALKSYEEELAKDPRIAATMENAQKGEIMPNIPQMSAFWYAVRTAVINAASGRQTVDEALKDAQTGGSGENLYFQSSDNGPQNQRNAPRITFGGPSDSTGSNQNGERSGARSKQRRPQGLPNNTASWFTALTQHGKEDLKFPRGQGVPINTNSSPDDQIGYYRRATRRIRGGDGKMKDLSPRWYFYYLGTGPEAGLPYGANKDGIIWVATEGALNTPKDHIGTRNPANNAAIVLQLPQGTTLPKGFYAEGSRGGSQASSRSSSRSRNSSRNSTPGSSRGTSPARMAGNGGDAALALLLLDRLNQLESKMSGKGQQQQGQTVTKKSAAEASKKPRQKRTATKGYNVTQAFGRRGPEQTQGNFGDQDLNKLGTDYKHWPQIAQFAPSASAFFGMSRISTRETPSGTWLTYTGAIKLDKKDPNFKDQVILLNKHIDAYKTFPPTEPKKDKKKKADETQALPQRQKKQQTVTLLPAADLDDFSKQLQQSMSSADSTQAGGSGHHHHHH

SEQ ID NO: 3728 - protein, 806 aa, Artificial Sequence
  Description of Artificial Sequence: Synthetic polypeptide
MKIEEGKLVIWINGDKGYNGLAEVGKKFEKDTGIKVTVEHPDKLEEKFPQVAATGDGPDIIFWAHDRFGGYAQSGLLAEITPDKAFQDKLYPFTWDAVRYNGKLIAYPIAVEALSLIYNKDLLPNPPKTWEEIPALDKELKAKGKSALMFNLQEPYFTWPLIAADGGYAFKYENGKYDIKDVGVDNAGAKAGLTFLVDLIKNKHMNADTDYSIAEAAFNKGETAMTINGPWAWSNIDTSKVNYGVTVLPTFKGQPSKPFVGVLSAGINAASPNKELAKEFLENYLLTDEGLEAVNKDKPLGAVALKSYEEELAKDPRIAATMENAQKGEIMPNIPQMSAFWYAVRTAVINAASGRQTVDEALKDAQTGGSGENLYFQSSDNGPQNQRNAPRITFGGPSDSTGSNQNGERSGARSKQRRPQGLPNNTASWFTALTQHGKEDLKFPRGQGVPINTNSSPDDQIGYYRRATRRIRGGDGKMKDLSPRWYFYYLGTGPEAGLPYGANKDGIIWVATEGALNTPKDHIGTRNPANNAAIVLQLPQGTTLPKGFYAEGSRGGSQASSRSSSRSRNSSRNSTPGSSRGTSPARMAGNGGDAALALLLLDRLNQLESKMSGKGQQQQGQTVTKKSAAEASKKPRQKRTATKAYNVTQAFGRRGPEQTQGNFGDQELVRQGTDYKHWPQIAQFAPSASAFFGMSRIGMEVTPSGTWLTYTGAIKLDDKDPNFKDQVILLNKHIDAYKTFPPTEPKKDKKKKADETQALPQRQKKQQTVTLLPAADLDDFSKQLQQSMSSADSTQAGGSGHHHHHH

SEQ ID NO: 3729 - protein, 806 aa, Artificial Sequence
  Description of Artificial Sequence: Synthetic polypeptide
MKIEEGKLVIWINGDKGYNGLAEVGKKFEKDTGIKVTVEHPDKLEEKFPQVAATGDGPDIIFWAHDRFGGYAQSGLLAEITPDKAFQDKLYPFTWDAVRYNGKLIAYPIAVEALSLIYNKDLLPNPPKTWEEIPALDKELKAKGKSALMFNLQEPYFTWPLIAADGGYAFKYENGKYDIKDVGVDNAGAKAGLTFLVDLIKNKHMNADTDYSIAEAAFNKGETAMTINGPWAWSNIDTSKVNYGVTVLPTFKGQPSKPFVGVLSAGINAASPNKELAKEFLENYLLTDEGLEAVNKDKPLGAVALKSYEEELAKDPRIAATMENAQKGEIMPNIPQMSAFWYAVRTAVINAASGRQTVDEALKDAQTGGSGENLYFQSSDNGPQNQRNAPRITFGGPSDSTGSNQNGERSGARSKQRRPQGLPNNTASWFTALTQHGKEDLKFPRGQGVPINTNSSPDDQIGYYRRATRRIRGGDGKMKDLSPRWYFYYLGTGPEAGLPYGANKDGIIWVATEGALNTPKDHIGTRNPANNAAIVLQLPQGTTLPKGFYAEGSRGGSQASSRSSSRSRNSSRNSTPGSSRGTSPARMAGNGGDAALALLLLDRLNQLESKMSGKGQQQQGQTVTKKSAAEASKKPRQKRTATKAYNVTQAFGRRGPEQTQGNFGDQELIRQGTDYKHWPQIAQFLPSASAFFGMSRIGMEVTPSGTWLTYTGAIKLDDKDPNFKDQVILLNKHIDAYKTFPPTEPKKDKKKKADETQALPQRQKKQQTVTLLPAADLDDFSKQLQQSMSSADSTQAGGSGHHHHHH

SEQ ID NO: 3730 - protein, 806 aa, Artificial Sequence
  Description of Artificial Sequence: Synthetic polypeptide
MKIEEGKLVIWINGDKGYNGLAEVGKKFEKDTGIKVTVEHPDKLEEKFPQVAATGDGPDIIFWAHDRFGGYAQSGLLAEITPDKAFQDKLYPFTWDAVRYNGKLIAYPIAVEALSLIYNKDLLPNPPKTWEEIPALDKELKAKGKSALMFNLQEPYFTWPLIAADGGYAFKYENGKYDIKDVGVDNAGAKAGLTFLVDLIKNKHMNADTDYSIAEAAFNKGETAMTINGPWAWSNIDTSKVNYGVTVLPTFKGQPSKPFVGVLSAGINAASPNKELAKEFLENYLLTDEGLEAVNKDKPLGAVALKSYEEELAKDPRIAATMENAQKGEIMPNIPQMSAFWYAVRTAVINAASGRQTVDEALKDAQTGGSGENLYFQSSDNGPQNQRNAPRITFGGPSDSTGSNQNGERSGARSKQRRPQGLPNNTASWFTALTQHGKEDLKFPRGQGVPINTNSSPDDQIGYYRRATRRIRGGDGKMKDLSPRWYFYYLGTGPEAGLPYGANKSGIIWVATEGALNTPKDHIGTRNPANNAAIVLQLPQGTTLPKGFYAEGSRGGSQASSRSSSRSRNSSRNSTPGSSRGTSPARMAGNGGDAALALLLLDRLNQLESKMSGKGQQQQGQTVTKKSAAEASKKPRQKRTATKAYNVTQAFGRRGPEQTQGNFGDQELIRQGTDYKHWPQIAQFAPSASAFFGMSRIGMEVTPSGTWLTYTGAIKLDDKDPNFKDQVILLNKHIDAYKTFPPTEPKKDKKKKADETQALPQRQKKQQTVTLLPAADLDDFSKQLQQSMSSADSTQAGGSGHHHHHH

SEQ ID NO: 3731 - protein, 806 aa, Artificial Sequence
  Description of Artificial Sequence: Synthetic polypeptide
MKIEEGKLVIWINGDKGYNGLAEVGKKFEKDTGIKVTVEHPDKLEEKFPQVAATGDGPDIIFWAHDRFGGYAQSGLLAEITPDKAFQDKLYPFTWDAVRYNGKLIAYPIAVEALSLIYNKDLLPNPPKTWEEIPALDKELKAKGKSALMFNLQEPYFTWPLIAADGGYAFKYENGKYDIKDVGVDNAGAKAGLTFLVDLIKNKHMNADTDYSIAEAAFNKGETAMTINGPWAWSNIDTSKVNYGVTVLPTFKGQPSKPFVGVLSAGINAASPNKELAKEFLENYLLTDEGLEAVNKDKPLGAVALKSYEEELAKDPRIAATMENAQKGEIMPNIPQMSAFWYAVRTAVINAASGRQTVDEALKDAQTGGSGENLYFQSSDNGPQNQRNAPRITFGGPSDSTGSNQNGERSGARSKQRRPQGLPNNTASWFTALTQHGKEDLKFPRGQGVPINTNSSPDDQIGYYRRATRRIRGGDGKMKDLSPRWYFYYLGTGPEAGLPYGANKDGIIWVATEGALNTPKDHIGTRNPANNAAIVLQLPQGTTLPKGFYAEGSRGGSQASSRSSSRSRNSSRNSTPGSERGTSPARMAGNGGDAALALLLLDRLNQLESKMSGKGQQQQGQTVTKKSAAEASKKPRQKRTATKAYNVTQAFGRRGPEQTQGNFGDQELIRQGTDYKHWPQIAQFAPSASAFFGMSRIGMEVTPSGTWLTYTGAIKLDDKDPNFKDQVILLNKHIDAYKTFPPTEPKKDKKKKADETQALPQRQKKQQTVTLLPAADLDDFSKQLQQSMSSADSTQAGGSGHHHHHH

SEQ ID NO: 3732 - protein, 806 aa, Artificial Sequence
  Description of Artificial Sequence: Synthetic polypeptide
MKIEEGKLVIWINGDKGYNGLAEVGKKFEKDTGIKVTVEHPDKLEEKFPQVAATGDGPDIIFWAHDRFGGYAQSGLLAEITPDKAFQDKLYPFTWDAVRYNGKLIAYPIAVEALSLIYNKDLLPNPPKTWEEIPALDKELKAKGKSALMFNLQEPYFTWPLIAADGGYAFKYENGKYDIKDVGVDNAGAKAGLTFLVDLIKNKHMNADTDYSIAEAAFNKGETAMTINGPWAWSNIDTSKVNYGVTVLPTFKGQPSKPFVGVLSAGINAASPNKELAKEFLENYLLTDEGLEAVNKDKPLGAVALKSYEEELAKDPRIAATMENAQKGEIMPNIPQMSAFWYAVRTAVINAASGRQTVDEALKDAQTGGSGENLYFQSSDNGPQNQRNAPRITFGGPSDSTGSNQNGERSGARSKQRRPQGLPNNTASWFTALTQHGKEDLKFPRGQGVPINTNSSPDDQIGYYRRATRRIRGGDGKMKDLDPRWYFYYLGTGPEAGLPYGANKDGIIWVATEGALNTPKDHIGTRNPANNAAIVLQLPQGTTLPKGFYAEGSRGGSQASSRSSSRSRNSSRNSTPGSSRGTSPARMAGNGGDAALALLLLDRLNQLESKMSGKGQQQQGQTVTKKSAAEASKKPRQKRTATKAYNVTQAFGRRGPEQTQGNFGDQELIRQGTDYKHWPQIAQFAPSASAFFGMSRIGMEVTPSGTWLTYTGAIKLDDKDPNFKDQVILLNKHIDAYKTFPPTEPKKDKKKKADETQALPQRQKKQQTVTLLPAADLDDFSKQLQQSMSSADSTQAGGSGHHHHHH

SEQ ID NO: 3733 - protein, 806 aa, Artificial Sequence
  Description of Artificial Sequence: Synthetic polypeptide
MKIEEGKLVIWINGDKGYNGLAEVGKKFEKDTGIKVTVEHPDKLEEKFPQVAATGDGPDIIFWAHDRFGGYAQSGLLAEITPDKAFQDKLYPFTWDAVRYNGKLIAYPIAVEALSLIYNKDLLPNPPKTWEEIPALDKELKAKGKSALMFNLQEPYFTWPLIAADGGYAFKYENGKYDIKDVGVDNAGAKAGLTFLVDLIKNKHMNADTDYSIAEAAFNKGETAMTINGPWAWSNIDTSKVNYGVTVLPTFKGQPSKPFVGVLSAGINAASPNKELAKEFLENYLLTDEGLEAVNKDKPLGAVALKSYEEELAKDPRIAATMENAQKGEIMPNIPQMSAFWYAVRTAVINAASGRQTVDEALKDAQTGGSGENLYFQSSDNGPQNQRNAPRITFGGPSDSTGSNQNGERSGARSKQRRPQGLPNNTASWFTALTQHGKEDLKFPRGQGVPINTNSSPDDQIGYYRRATRRIRGGDGKMKDLSPRWYFYYLGTGPEAGLPYGANKDGIIWVATEGALNTPKDHIGTRNPANNAAAVLQLPQGTTLPKGFYAEGSRGGSQASSRSSSRSRNSSRNSTPGSSRGTSPARMAGNGGDAALALLLLDRLNQLESKMSGKGQQQQGQTVTKKSAAEASKKPRQKRTATKAYNVTQAFGRRGPEQTQGNFGDQELIRQGTDYKHWPQIAQFAPSASAFFGMSRIGMEVTPSGTWLTYTGAIKLDDKDPNFKDQVILLNKHIDAYKTFPPTEPKKDKKKKADETQALPQRQKKQQTVTLLPAADLDDFSKQLQQSMSSADSTQAGGSGHHHHHH

SEQ ID NO: 3734 - protein, 806 aa, Artificial Sequence
  Description of Artificial Sequence: Synthetic polypeptide
MKIEEGKLVIWINGDKGYNGLAEVGKKFEKDTGIKVTVEHPDKLEEKFPQVAATGDGPDIIFWAHDRFGGYAQSGLLAEITPDKAFQDKLYPFTWDAVRYNGKLIAYPIAVEALSLIYNKDLLPNPPKTWEEIPALDKELKAKGKSALMFNLQEPYFTWPLIAADGGYAFKYENGKYDIKDVGVDNAGAKAGLTFLVDLIKNKHMNADTDYSIAEAAFNKGETAMTINGPWAWSNIDTSKVNYGVTVLPTFKGQPSKPFVGVLSAGINAASPNKELAKEFLENYLLTDEGLEAVNKDKPLGAVALKSYEEELAKDPRIAATMENAQKGEIMPNIPQMSAFWYAVRTAVINAASGRQTVDEALKDAQTGGSGENLYFQSSDNGPQNQRNAPRITFGGPSDSTGSNQNGERSGARSKQRRPQGLPNNTASWFTALTQHGKEDLKFPRGQGVPINTNSSPDDQIGYYRRATRRIRGGDGKMKDLSPRWYFYYLGTGPEAGLPYGANKDGIIWVATEGALNTPKDHIGTRNPANNAAIVLQLPQGTTLPKGFYAEGSRGGSQASSRSSSRSRNSSRNSTPGSSRGTSPARMAGNGGDAALALLLLDRLNQLESKMSGKGQQQQGQTVTKKSAAEMSKKPRQKRTATKECNVTQCFGPRGPEQTQGNFGDAELNKKGVDYKHWPQIAQFAPSASAFFGMSRISSKETPSGTWLTYTGAIKLDKDDPNFKDQVILLNKHIDAYKTFPPTEPKKDKKKKADETQALPQRQKKQQTVTLLPAADLDDFSKQLQQSMSSADSTQAGGSGHHHHHH

SEQ ID NO: 3735 - protein, 806 aa, Artificial Sequence
  Description of Artificial Sequence: Synthetic polypeptide
MKIEEGKLVIWINGDKGYNGLAEVGKKFEKDTGIKVTVEHPDKLEEKFPQVAATGDGPDIIFWAHDRFGGYAQSGLLAEITPDKAFQDKLYPFTWDAVRYNGKLIAYPIAVEALSLIYNKDLLPNPPKTWEEIPALDKELKAKGKSALMFNLQEPYFTWPLIAADGGYAFKYENGKYDIKDVGVDNAGAKAGLTFLVDLIKNKHMNADTDYSIAEAAFNKGETAMTINGPWAWSNIDTSKVNYGVTVLPTFKGQPSKPFVGVLSAGINAASPNKELAKEFLENYLLTDEGLEAVNKDKPLGAVALKSYEEELAKDPRIAATMENAQKGEIMPNIPQMSAFWYAVRTAVINAASGRQTVDEALKDAQTGGSGENLYFQSSDNGPQNQRNAPRITFGGPSDSTGSNQNGERSGARSKQRRPQGLPNNTASWFTALTQHGKEDLKFPRGQGVPINTNSSPDDQIGYYRRATRRIRGGDGKMKDLSPRWYFYYLGTGPEAGLPYGANKDGIIWVATEGALNTPKDHIGTRNPANNAAIVLQLPQGTTLPKGFYAEGSRGGSQASSRSSSRSRNSSRNSTPGSSRGTSPARMAGNGGDAALALLLLDRLNQLESKMSGKGQQQQGQTVTKKSAAEASKKPRQKRTATKAYNVTQAFGRRGPEQTQGNFGDQELIRQGTDYKHWPQIAQFAPSASAFFGMSRIGMEVTPSGTWLTYTGAIKLDDKDPNFKEQVILLNKHIDAYKTFPPTEPKKDKKKKADETQALPQRQKKQQTVTLLPAADLDDFSKQLQQSMSSADSTQAGGSGHHHHHH

SEQ ID NO: 3736 - protein, 806 aa, Artificial Sequence
  Description of Artificial Sequence: Synthetic polypeptide
MKIEEGKLVIWINGDKGYNGLAEVGKKFEKDTGIKVTVEHPDKLEEKFPQVAATGDGPDIIFWAHDRFGGYAQSGLLAEITPDKAFQDKLYPFTWDAVRYNGKLIAYPIAVEALSLIYNKDLLPNPPKTWEEIPALDKELKAKGKSALMFNLQEPYFTWPLIAADGGYAFKYENGKYDIKDVGVDNAGAKAGLTFLVDLIKNKHMNADTDYSIAEAAFNKGETAMTINGPWAWSNIDTSKVNYGVTVLPTFKGQPSKPFVGVLSAGINAASPNKELAKEFLENYLLTDEGLEAVNKDKPLGAVALKSYEEELAKDPRIAATMENAQKGEIMPNIPQMSAFWYAVRTAVINAASGRQTVDEALKDAQTGGSGENLYFQSSDNGPQNQRNAPRITFGGPSDSTGSNQNGERSGARSKQRRPQGLPNNTASWFTALTQHGKEDLKFPRGQGVPINTNSSPDDQIGYYRRATRRIRGGDGKMKDLSPRWYFYYLGTGPEAGLPYGANKDGIIWVATEGALNTPKDHIGTRNPANNAAIVVQLPQGTTLPKGFYAEGSRGGSQASSRSSSRSRNSSRNSTPGSSRGTSPARMAGNGGDAALALLLLDRLNQLESKMSGKGQQQQGQTVTKKSAAEASKKPRQKRTATKAYNVTQAFGRRGPEQTQGNFGDQELIRQGTDYKHWPQIAQFAPSASAFFGMSRIGMEVTPSGTWLTYTGAIKLDDKDPNFKDQVILLNKHIDAYKTFPPTEPKKDKKKKADETQALPQRQKKQQTVTLLPAADLDDFSKQLQQSMSSADSTQAGGSGHHHHHH

SEQ ID NO: 3737 - protein, 806 aa, Artificial Sequence
  Description of Artificial Sequence: Synthetic polypeptide
MKIEEGKLVIWINGDKGYNGLAEVGKKFEKDTGIKVTVEHPDKLEEKFPQVAATGDGPDIIFWAHDRFGGYAQSGLLAEITPDKAFQDKLYPFTWDAVRYNGKLIAYPIAVEALSLIYNKDLLPNPPKTWEEIPALDKELKAKGKSALMFNLQEPYFTWPLIAADGGYAFKYENGKYDIKDVGVDNAGAKAGLTFLVDLIKNKHMNADTDYSIAEAAFNKGETAMTINGPWAWSNIDTSKVNYGVTVLPTFKGQPSKPFVGVLSAGINAASPNKELAKEFLENYLLTDEGLEAVNKDKPLGAVALKSYEEELAKDPRIAATMENAQKGEIMPNIPQMSAFWYAVRTAVINAASGRQTVDEALKDAQTGGSGENLYFQSSDNGPQNQRNAPRITFGGPSDSTGSNQNGERSGARSKQRRPQGLPNNTASWFTALTQHGKEDLKFPRGQGVPINTNSSPDDQIGYYRRATRRIRGGDGKMKDLSPRWYFYYLGTGPEAGLPYGANKDGIIWVATEGALNTPKDHIGTRNPANNAAIVLQLPQGTTLPKGFYAEGSRGGSQASSRSSSRSRNSSRNSTPGSSRGTSPARMAGNGGDAALALLLLDRLNQLESKMSGKGQQQQGQTVTKKSAAEASKKPRQKRTATKVYNVTQAFGRRGPEQTQGNFGDQELIRQGTDYKHWPQIAQFAPSASAFFGMSRIGMEVTPSGTWLTYTGAIKLDDKDPNFKDQVILLNKHIDAYKTFPPTEPKKDKKKKADETQALPQRQKKQQTVTLLPAADLDDFSKQLQQSMSSADSTQAGGSGHHHHHH

SEQ ID NO: 3738 - protein, 806 aa, Artificial Sequence
  Description of Artificial Sequence: Synthetic polypeptide
MKIEEGKLVIWINGDKGYNGLAEVGKKFEKDTGIKVTVEHPDKLEEKFPQVAATGDGPDIIFWAHDRFGGYAQSGLLAEITPDKAFQDKLYPFTWDAVRYNGKLIAYPIAVEALSLIYNKDLLPNPPKTWEEIPALDKELKAKGKSALMFNLQEPYFTWPLIAADGGYAFKYENGKYDIKDVGVDNAGAKAGLTFLVDLIKNKHMNADTDYSIAEAAFNKGETAMTINGPWAWSNIDTSKVNYGVTVLPTFKGQPSKPFVGVLSAGINAASPNKELAKEFLENYLLTDEGLEAVNKDKPLGAVALKSYEEELAKDPRIAATMENAQKGEIMPNIPQMSAFWYAVRTAVINAASGRQTVDEALKDAQTGGSGENLYFQSSDNGPQNQRNAPRITFGGPSDSTGSNQNGERSGARSKQRRPQGLPNNTASWFTALTQHGKEDLKFPRGQGVPINTNSSPDDQIGYYRRATRRIRGGDGKMKDLSPRWYFYYLGTGPEAGLPYGANKDGIIWVATEGALNTPKDHIGTRNPANNAAIVLQLPQGTTLPKGFYAEGSRGGSQASSRSSSRSRNSSRNSTPGSSRGTSPARMAGNGGDAALALLLLDRLNQLESKMSGKGQQQQGQTVTKKSAAEASKKPRQKRTATKAYNVTQAFGRRGPEQTQGNFGDQDLIRQGTDYKHWPQIAQFAPSASAFFGMSRIGMEVTPSGTWLTYTGAIKLDDKDPNFKDQVILLNKHIDAYKTFPPTEPKKDKKKKADETQALPQRQKKQQTVTLLPAADLDDFSKQLQQSMSSADSTQAGGSGHHHHHH

SEQ ID NO: 3739 - protein, 806 aa, Artificial Sequence
  Description of Artificial Sequence: Synthetic polypeptide
MKIEEGKLVIWINGDKGYNGLAEVGKKFEKDTGIKVTVEHPDKLEEKFPQVAATGDGPDIIFWAHDRFGGYAQSGLLAEITPDKAFQDKLYPFTWDAVRYNGKLIAYPIAVEALSLIYNKDLLPNPPKTWEEIPALDKELKAKGKSALMFNLQEPYFTWPLIAADGGYAFKYENGKYDIKDVGVDNAGAKAGLTFLVDLIKNKHMNADTDYSIAEAAFNKGETAMTINGPWAWSNIDTSKVNYGVTVLPTFKGQPSKPFVGVLSAGINAASPNKELAKEFLENYLLTDEGLEAVNKDKPLGAVALKSYEEELAKDPRIAATMENAQKGEIMPNIPQMSAFWYAVRTAVINAASGRQTVDEALKDAQTGGSGENLYFQSSDNGPQNQRNAPRITFGGPSDSTGSNQNGERSGARSKQRRPQGLPNNTASWFTALTQHGKEDLKFPRGQGVPINTNSSPDDQIGYYRRATRRIRGGDGKMKDLSPKWYFYYLGTGPEAGLPYGANKDGIIWVATEGALNTPKDHIGTRNPANNAAIVLQLPQGTTLPKGFYAEGSRGGSQASSRSSSRSRNSSRNSTPGSSRGTSPARMAGNGGDAALALLLLDRLNQLESKMSGKGQQQQGQTVTKKSAAEASKKPRQKRTATKAYNVTQAFGRRGPEQTQGNFGDQELIRQGTDYKHWPQIAQFAPSASAFFGMSRIGMEVTPSGTWLTYTGAIKLDDKDPNFKDQVILLNKHIDAYKTFPPTEPKKDKKKKADETQALPQRQKKQQTVTLLPAADLDDFSKQLQQSMSSADSTQAGGSGHHHHHH

SEQ ID NO: 3740 - protein, 806 aa, Artificial Sequence
  Description of Artificial Sequence: Synthetic polypeptide
MKIEEGKLVIWINGDKGYNGLAEVGKKFEKDTGIKVTVEHPDKLEEKFPQVAATGDGPDIIFWAHDRFGGYAQSGLLAEITPDKAFQDKLYPFTWDAVRYNGKLIAYPIAVEALSLIYNKDLLPNPPKTWEEIPALDKELKAKGKSALMFNLQEPYFTWPLIAADGGYAFKYENGKYDIKDVGVDNAGAKAGLTFLVDLIKNKHMNADTDYSIAEAAFNKGETAMTINGPWAWSNIDTSKVNYGVTVLPTFKGQPSKPFVGVLSAGINAASPNKELAKEFLENYLLTDEGLEAVNKDKPLGAVALKSYEEELAKDPRIAATMENAQKGEIMPNIPQMSAFWYAVRTAVINAASGRQTVDEALKDAQTGGSGENLYFQSSDNGPQNQRNAPRITFGGPSDSTGSNQNGERSGARSKQRRPQGLPNNTASWFTALTQHGKEDLKFPRGQGVPINTNSSPDDQIGYYRRATRRIRGGDGKMKDLSPRWYFYYLGTGPEAGLPYGANKDGIIWVATEGALNTPKDHIGTRNPANNAAGVLQLPQGTTLPKGFYAEGSRGGSQASSRSSSRSRNSSRNSTPGSSRGTSPARMAGNGGDAALALLLLDRLNQLESKMSGKGQQQQGQTVTKKSAAEASKKPRQKRTATKAYNVTQAFGRRGPEQTQGNFGDQELIRQGTDYKHWPQIAQFAPSASAFFGMSRIGMEVTPSGTWLTYTGAIKLDDKDPNFKDQVILLNKHIDAYKTFPPTEPKKDKKKKADETQALPQRQKKQQTVTLLPAADLDDFSKQLQQSMSSADSTQAGGSGHHHHHH

SEQ ID NO: 3741 - protein, 806 aa, Artificial Sequence
  Description of Artificial Sequence: Synthetic polypeptide
MKIEEGKLVIWINGDKGYNGLAEVGKKFEKDTGIKVTVEHPDKLEEKFPQVAATGDGPDIIFWAHDRFGGYAQSGLLAEITPDKAFQDKLYPFTWDAVRYNGKLIAYPIAVEALSLIYNKDLLPNPPKTWEEIPALDKELKAKGKSALMFNLQEPYFTWPLIAADGGYAFKYENGKYDIKDVGVDNAGAKAGLTFLVDLIKNKHMNADTDYSIAEAAFNKGETAMTINGPWAWSNIDTSKVNYGVTVLPTFKGQPSKPFVGVLSAGINAASPNKELAKEFLENYLLTDEGLEAVNKDKPLGAVALKSYEEELAKDPRIAATMENAQKGEIMPNIPQMSAFWYAVRTAVINAASGRQTVDEALKDAQTGGSGENLYFQSSDNGPQNQRNAPRITFGGPSDSTGSNQNGERSGARSKQRRPQGLPNNTASWFTALTQHGKEDLKFPRGQGVPINTNSSPDDQIGYYRRATRRIRGGDGKMKDLSPRWYFYYLGTGPEAGLPYGDNKDGIIWVATEGALNTPKDHIGTRNPANNAAIVLQLPQGTTLPKGFYAEGSRGGSQASSRSSSRSRNSSRNSTPGSSRGTSPARMAGNGGDAALALLLLDRLNQLESKMSGKGQQQQGQTVTKKSAAEASKKPRQKRTATKAYNVTQAFGRRGPEQTQGNFGDQELIRQGTDYKHWPQIAQFAPSASAFFGMSRIGMEVTPSGTWLTYTGAIKLDDKDPNFKDQVILLNKHIDAYKTFPPTEPKKDKKKKADETQALPQRQKKQQTVTLLPAADLDDFSKQLQQSMSSADSTQAGGSGHHHHHH

SEQ ID NO: 3742 - protein, 806 aa, Artificial Sequence
  Description of Artificial Sequence: Synthetic polypeptide
MKIEEGKLVIWINGDKGYNGLAEVGKKFEKDTGIKVTVEHPDKLEEKFPQVAATGDGPDIIFWAHDRFGGYAQSGLLAEITPDKAFQDKLYPFTWDAVRYNGKLIAYPIAVEALSLIYNKDLLPNPPKTWEEIPALDKELKAKGKSALMFNLQEPYFTWPLIAADGGYAFKYENGKYDIKDVGVDNAGAKAGLTFLVDLIKNKHMNADTDYSIAEAAFNKGETAMTINGPWAWSNIDTSKVNYGVTVLPTFKGQPSKPFVGVLSAGINAASPNKELAKEFLENYLLTDEGLEAVNKDKPLGAVALKSYEEELAKDPRIAATMENAQKGEIMPNIPQMSAFWYAVRTAVINAASGRQTVDEALKDAQTGGSGENLYFQSSDNGPQNQRNAPRITFGGPSDSTGSNQNGERSGARSKQRRPQGLPNNTASWFTGLTQHGKEDLKFPRGQGVPINTNSSPDDQIGYYRRATRRIRGGDGKMKDLSPRWYFYYLGTGPEAGLPYGANKDGIIWVATEGALNTPKDHIGTRNPANNAAIVLQLPQGTTLPKGFYAEGSRGGSQASSRSSSRSRNSSRNSTPGSSRGTSPARMAGNGGDAALALLLLDRLNQLESKMSGKGQQQQGQTVTKKSAAEASKKPRQKRTATKAYNVTQAFGRRGPEQTQGNFGDQELIRQGTDYKHWPQIAQFAPSASAFFGMSRIGMEVTPSGTWLTYTGAIKLDDKDPNFKDQVILLNKHIDAYKTFPPTEPKKDKKKKADETQALPQRQKKQQTVTLLPAADLDDFSKQLQQSMSSADSTQAGGSGHHHHHH

SEQ ID NO: 3743 - protein, 806 aa, Artificial Sequence
  Description of Artificial Sequence: Synthetic polypeptide
MKIEEGKLVIWINGDKGYNGLAEVGKKFEKDTGIKVTVEHPDKLEEKFPQVAATGDGPDIIFWAHDRFGGYAQSGLLAEITPDKAFQDKLYPFTWDAVRYNGKLIAYPIAVEALSLIYNKDLLPNPPKTWEEIPALDKELKAKGKSALMFNLQEPYFTWPLIAADGGYAFKYENGKYDIKDVGVDNAGAKAGLTFLVDLIKNKHMNADTDYSIAEAAFNKGETAMTINGPWAWSNIDTSKVNYGVTVLPTFKGQPSKPFVGVLSAGINAASPNKELAKEFLENYLLTDEGLEAVNKDKPLGAVALKSYEEELAKDPRIAATMENAQKGEIMPNIPQMSAFWYAVRTAVINAASGRQTVDEALKDAQTGGSGENLYFQSSDNGPQNQRNAPRITFGGPSDSTGSNQNGERSGARSKQRRPQGLPNNTASWFTALTQHGKEDLKFPRGQGVPINTNSSPDDQIGYYRRATRRIRGGDGKMKDLSPRWYFYYLGTGPEAGLPYGANKDGIIWVATEGALNTPKDHIGTRNPANNAAIVLQLPQGTTLPKGFYAEGSRGGSQASSRSSSRSRNSSRNSTPGSSRGTSPARMAGNGGDAALALLLLDRLNQLESKMSGKGQQQQGQTVTKKSAAEASKKPRQKRTATKAYNVTQAFGRRGPEQTQGNFGDQELIRQGTDYKKWPQIAQFAPSASAFFGMSRIGMEVTPSGTWLTYTGAIKLDDKDPNFKDQVILLNKHIDAYKTFPPTEPKKDKKKKADETQALPQRQKKQQTVTLLPAADLDDFSKQLQQSMSSADSTQAGGSGHHHHHH

SEQ ID NO: 3744 - protein, 806 aa, Artificial Sequence
  Description of Artificial Sequence: Synthetic polypeptide
MKIEEGKLVIWINGDKGYNGLAEVGKKFEKDTGIKVTVEHPDKLEEKFPQVAATGDGPDIIFWAHDRFGGYAQSGLLAEITPDKAFQDKLYPFTWDAVRYNGKLIAYPIAVEALSLIYNKDLLPNPPKTWEEIPALDKELKAKGKSALMFNLQEPYFTWPLIAADGGYAFKYENGKYDIKDVGVDNAGAKAGLTFLVDLIKNKHMNADTDYSIAEAAFNKGETAMTINGPWAWSNIDTSKVNYGVTVLPTFKGQPSKPFVGVLSAGINAASPNKELAKEFLENYLLTDEGLEAVNKDKPLGAVALKSYEEELAKDPRIAATMENAQKGEIMPNIPQMSAFWYAVRTAVINAASGRQTVDEALKDAQTGGSGENLYFQSSDNGPQNQRNAPRITFGGPSDSTGSNQNGERSGARSKQRRPQGLPNNTASWFTALTQHGKEDLKFPRGQGVPINTNSSPDDQIGNYRRATRRIRGGDGKMKDLSPRWYFYYLGTGPEAGLPYGANKDGIIWVATEGALNTPKDHIGTRNPANNAAIVLQLPQGTTLPKGFYAEGSRGGSQASSRSSSRSRNSSRNSTPGSSRGTSPARMAGNGGDAALALLLLDRLNQLESKMSGKGQQQQGQTVTKKSAAEASKKPRQKRTATKAYNVTQAFGRRGPEQTQGNFGDQELIRQGTDYKHWPQIAQFAPSASAFFGMSRIGMEVTPSGTWLTYTGAIKLDDKDPNFKDQVILLNKHIDAYKTFPPTEPKKDKKKKADETQALPQRQKKQQTVTLLPAADLDDFSKQLQQSMSSADSTQAGGSGHHHHHH

SEQ ID NO: 3745 - protein, 806 aa, Artificial Sequence
  Description of Artificial Sequence: Synthetic polypeptide
MKIEEGKLVIWINGDKGYNGLAEVGKKFEKDTGIKVTVEHPDKLEEKFPQVAATGDGPDIIFWAHDRFGGYAQSGLLAEITPDKAFQDKLYPFTWDAVRYNGKLIAYPIAVEALSLIYNKDLLPNPPKTWEEIPALDKELKAKGKSALMFNLQEPYFTWPLIAADGGYAFKYENGKYDIKDVGVDNAGAKAGLTFLVDLIKNKHMNADTDYSIAEAAFNKGETAMTINGPWAWSNIDTSKVNYGVTVLPTFKGQPSKPFVGVLSAGINAASPNKELAKEFLENYLLTDEGLEAVNKDKPLGAVALKSYEEELAKDPRIAATMENAQKGEIMPNIPQMSAFWYAVRTAVINAASGRQTVDEALKDAQTGGSGENLYFQSSDNGPQNQRNAPRITFGGPSDSTGSNQNGERSGARSKQRRPQGLPNNTASWFTALTQHGKEDLKFPRGQGVPINTNSSPDDQIGYYRRCTRRIRGGDGKMKDLSPRWYFYYLGTGPEAGLPYGANKDGIIWVATEGALNTPKDHIGTRNPANNAAIVLQLPQGTTLPKGFYAEGSRGGSQASSRSSSRSRNSSRNSTPGSSRGTSPARMAGNGGDAALALLLLDRLNQLESKMSGKGQQQQGQTVTKKSAAEASKKPRQKRTATKAYNVTQAFGRRGPEQTQGNFGDQELIRQGTDYKHWPQIAQFAPSASAFFGMSRIGMEVTPSGTWLTYTGAIKLDDKDPNFKDQVILLNKHIDAYKTFPPTEPKKDKKKKADETQALPQRQKKQQTVTLLPAADLDDFSKQLQQSMSSADSTQAGGSGHHHHHH

SEQ ID NO: 3746 - protein, 806 aa, Artificial Sequence
  Description of Artificial Sequence: Synthetic polypeptide
MKIEEGKLVIWINGDKGYNGLAEVGKKFEKDTGIKVTVEHPDKLEEKFPQVAATGDGPDIIFWAHDRFGGYAQSGLLAEITPDKAFQDKLYPFTWDAVRYNGKLIAYPIAVEALSLIYNKDLLPNPPKTWEEIPALDKELKAKGKSALMFNLQEPYFTWPLIAADGGYAFKYENGKYDIKDVGVDNAGAKAGLTFLVDLIKNKHMNADTDYSIAEAAFNKGETAMTINGPWAWSNIDTSKVNYGVTVLPTFKGQPSKPFVGVLSAGINAASPNKELAKEFLENYLLTDEGLEAVNKDKPLGAVALKSYEEELAKDPRIAATMENAQKGEIMPNIPQMSAFWYAVRTAVINAASGRQTVDEALKDAQTGGSGENLYFQSSDNGPQNQRNAPRITFGGPSDSTGSNQNGERSGARSKQRRPQGLPNNTASWFTALTQHGKEDLKFPPGQGVPINPNSKPDDQIGYYRRQTRRYRGGDGQMKDLPPRWYFYYLGTGPEAGLPYGANKDGIIWVATEGALNTPKDHIGTRNPANNAAIVLQLPQGTTLPKGFYAEGSRGGSQASSRSSSRSRNSSRNSTPGSSRGTSPARMAGNGGDAALALLLLDRLNQLESKMSGKGQQQQGQTVTKKSAAEASKKPRQKRTATKAYNVTQAFGRRGPEQTQGNFGDQELIRQGTDYKHWPQIAQFAPSASAFFGMSRIGMEVTPSGTWLTYTGAIKLDDKDPNFKDQVILLNKHIDAYKTFPPTEPKKDKKKKADETQALPQRQKKQQTVTLLPAADLDDFSKQLQQSMSSADSTQAGGSGHHHHHH

SEQ ID NO: 3747 - protein, 806 aa, Artificial Sequence
  Description of Artificial Sequence: Synthetic polypeptide
MKIEEGKLVIWINGDKGYNGLAEVGKKFEKDTGIKVTVEHPDKLEEKFPQVAATGDGPDIIFWAHDRFGGYAQSGLLAEITPDKAFQDKLYPFTWDAVRYNGKLIAYPIAVEALSLIYNKDLLPNPPKTWEEIPALDKELKAKGKSALMFNLQEPYFTWPLIAADGGYAFKYENGKYDIKDVGVDNAGAKAGLTFLVDLIKNKHMNADTDYSIAEAAFNKGETAMTINGPWAWSNIDTSKVNYGVTVLPTFKGQPSKPFVGVLSAGINAASPNKELAKEFLENYLLTDEGLEAVNKDKPLGAVALKSYEEELAKDPRIAATMENAQKGEIMPNIPQMSAFWYAVRTAVINAASGRQTVDEALKDAQTGGSGENLYFQSSDNGPQNQRNAPRITFGGPSDSTGSNQNGERSGARSKQRRPQGLPNNTASWFTALTQHGKEDLKFPRGQGVPINTNSSPDDQIGYYRRATRRIRGGDGKMKDLSPRWYFYYLGTGPEAGLPYGANKDGIIWVATEGALNTPKDHIGTRNPANNAAIVLQLPQGTTLPKGFYAEGSRGGSQASSRSSSRSRNSSRNSTPGSSRGTSPARMAGNGGDAALALLLLDRLNQLESKMSGKGQQQQGQTVTKKSAAEASKKPRQKRTATKAYNVTQAFGRRGPEQTQGNFGDQELIRQGTDYKHWPQIAQFAPSASAFFFMSRIGMEVTPSGTWLTYTGAIKLDDKDPNFKDQVILLNKHIDAYKTFPPTEPKKDKKKKADETQALPQRQKKQQTVTLLPAADLDDFSKQLQQSMSSADSTQAGGSGHHHHHH

SEQ ID NO: 3748 - protein, 806 aa, Artificial Sequence
  Description of Artificial Sequence: Synthetic polypeptide
MKIEEGKLVIWINGDKGYNGLAEVGKKFEKDTGIKVTVEHPDKLEEKFPQVAATGDGPDIIFWAHDRFGGYAQSGLLAEITPDKAFQDKLYPFTWDAVRYNGKLIAYPIAVEALSLIYNKDLLPNPPKTWEEIPALDKELKAKGKSALMFNLQEPYFTWPLIAADGGYAFKYENGKYDIKDVGVDNAGAKAGLTFLVDLIKNKHMNADTDYSIAEAAFNKGETAMTINGPWAWSNIDTSKVNYGVTVLPTFKGQPSKPFVGVLSAGINAASPNKELAKEFLENYLLTDEGLEAVNKDKPLGAVALKSYEEELAKDPRIAATMENAQKGEIMPNIPQMSAFWYAVRTAVINAASGRQTVDEALKDAQTGGSGENLYFQSSDNGPQNQRNAPRITFGGPSDSTGSNQNGERSGARSKQRRPQGLPNNTASWFTALTQHGKEDLKFPRGQGVPINTNSSPDDQIGYYRRATRRIRGGDGKMKDLSPRWYFYYLGTGPEAGLPYGANKDGIIWVATEGALNTPKDHIGTRNPANNAAIVLQLPQGTTLPKGFYAEGSRGGSQASSRSSSRSRNSSRNSTPGSSRGTSPARMAGNGGDAALALLLLDRLNQLESKMSGKGQQQQGQTVTKKSAAEASKKPRQKRTATKAYNVTQAFGRRGPEQTQGNFGDQELIRQGTDYKHWPQIAQFAPSASAFFGMSRIGMEVSPSGTWLTYTGAIKLDDKDPNFKDQVILLNKHIDAYKTFPPTEPKKDKKKKADETQALPQRQKKQQTVTLLPAADLDDFSKQLQQSMSSADSTQAGGSGHHHHHH

SEQ ID NO: 3749 - protein, 806 aa, Artificial Sequence
  Description of Artificial Sequence: Synthetic polypeptide
MKIEEGKLVIWINGDKGYNGLAEVGKKFEKDTGIKVTVEHPDKLEEKFPQVAATGDGPDIIFWAHDRFGGYAQSGLLAEITPDKAFQDKLYPFTWDAVRYNGKLIAYPIAVEALSLIYNKDLLPNPPKTWEEIPALDKELKAKGKSALMFNLQEPYFTWPLIAADGGYAFKYENGKYDIKDVGVDNAGAKAGLTFLVDLIKNKHMNADTDYSIAEAAFNKGETAMTINGPWAWSNIDTSKVNYGVTVLPTFKGQPSKPFVGVLSAGINAASPNKELAKEFLENYLLTDEGLEAVNKDKPLGAVALKSYEEELAKDPRIAATMENAQKGEIMPNIPQMSAFWYAVRTAVINAASGRQTVDEALKDAQTGGSGENLYFQSSDNGPQNQRNAPRITFGGPSDSTGSNQNGERSGARSKQRRPQGLPNNTASWFTALTQHGKEDLKFPRGQGVPINTNSSPDDQIGYYRRATRRIRGGDGKMKDLSPRWYFYYLGTGPEAGLPYGANKDGIIWVATEGALNTPKDHIGTRNPANNAAIVLQLPQGTTLPKGFYAEGSRGGSQASSRSSSRSRNSSRNSTPGSSRGTSPARMAGNGGDAALALLLLDRLNQLESKMSGKGQQQQGQTVTKKSAAEASKKPRQKRTATKAYNVTQAFGRRGPEQTQGNFGDQELIRQGTDYKHWPQIAQFAPSASAFFGMSRIGMEVTPSGTWLTYTGAIKLDDKDPNFKDQVILLNQHIDAYKTFPPTEPKKDKKKKADETQALPQRQKKQQTVTLLPAADLDDFSKQLQQSMSSADSTQAGGSGHHHHHH

SEQ ID NO: 3750 - protein, 806 aa, Artificial Sequence
  Description of Artificial Sequence: Synthetic polypeptide
MKIEEGKLVIWINGDKGYNGLAEVGKKFEKDTGIKVTVEHPDKLEEKFPQVAATGDGPDIIFWAHDRFGGYAQSGLLAEITPDKAFQDKLYPFTWDAVRYNGKLIAYPIAVEALSLIYNKDLLPNPPKTWEEIPALDKELKAKGKSALMFNLQEPYFTWPLIAADGGYAFKYENGKYDIKDVGVDNAGAKAGLTFLVDLIKNKHMNADTDYSIAEAAFNKGETAMTINGPWAWSNIDTSKVNYGVTVLPTFKGQPSKPFVGVLSAGINAASPNKELAKEFLENYLLTDEGLEAVNKDKPLGAVALKSYEEELAKDPRIAATMENAQKGEIMPNIPQMSAFWYAVRTAVINAASGRQTVDEALKDAQTGGSGENLYFQSSDNGPQNQRNAPRITFGGPSDSTGSNQNGERSGARSKQRRPQGLPNNTASWFTALTQHGKEDLKFPRGQGVPINTNSSPDDQIGYYRRATRRIRGGDGKMKDLSPRWYFYYLGTGPEAGLPYGANKDGIIWVATEGALNTPKDHIGTRNPANNAAIVLQLPQGTTLPKGFYAEGSRGGSQASSRSSSRSRNSSRNSTPGSSRGTSPARMAGNGGDAALALLLLDRLNQLESKMSGKGQQQQGQTVTKKSAAEMSKKPRQKRTATKGCNVTQCFGPRGPEQTQGNFGDADLIKKGTDYKHWPQIAQFAPSASAFFGMSRISSKETPSGTWLTYTGAIKLDKDDPNFKDQVILLNKHIDAYKTFPPTEPKKDKKKKADETQALPQRQKKQQTVTLLPAADLDDFSKQLQQSMSSADSTQAGGSGHHHHHH

SEQ ID NO: 3751 - protein, 806 aa, Artificial Sequence
  Description of Artificial Sequence: Synthetic polypeptide
MKIEEGKLVIWINGDKGYNGLAEVGKKFEKDTGIKVTVEHPDKLEEKFPQVAATGDGPDIIFWAHDRFGGYAQSGLLAEITPDKAFQDKLYPFTWDAVRYNGKLIAYPIAVEALSLIYNKDLLPNPPKTWEEIPALDKELKAKGKSALMFNLQEPYFTWPLIAADGGYAFKYENGKYDIKDVGVDNAGAKAGLTFLVDLIKNKHMNADTDYSIAEAAFNKGETAMTINGPWAWSNIDTSKVNYGVTVLPTFKGQPSKPFVGVLSAGINAASPNKELAKEFLENYLLTDEGLEAVNKDKPLGAVALKSYEEELAKDPRIAATMENAQKGEIMPNIPQMSAFWYAVRTAVINAASGRQTVDEALKDAQTGGSGENLYFQSSDNGPQNQRNAPRITFGGPSDSTGSNQNGERSGARSKQRRPQGLPNNTASWFTPLVQFGKEDLKFPPGQGVPINTNSSPDDQIGYYRRATRRIRGGDGKMKDLPPKWYFYYLGTGPHADLPYGQKHPGVVWVARPGALNTPKDHIGTRNPANNAAIPLQLPPGTKLPKGFYAEGSRGGSQASSRSSSRSRNSSRNSTPGSSRGTSPARMAGNGGDAALALLLLDRLNQLESKMSGKGQQQQGQTVTKKSAAEASKKPRQKRTATKAYNVTQAFGRRGPEQTQGNFGDQELIRQGTDYKHWPQIAQFAPSASAFFGMSRIGMEVTPSGTWLTYTGAIKLDDKDPNFKDQVILLNKHIDAYKTFPPTEPKKDKKKKADETQALPQRQKKQQTVTLLPAADLDDFSKQLQQSMSSADSTQAGGSGHHHHHH

SEQ ID NO: 3752 - protein, 806 aa, Artificial Sequence
  Description of Artificial Sequence: Synthetic polypeptide
MKIEEGKLVIWINGDKGYNGLAEVGKKFEKDTGIKVTVEHPDKLEEKFPQVAATGDGPDIIFWAHDRFGGYAQSGLLAEITPDKAFQDKLYPFTWDAVRYNGKLIAYPIAVEALSLIYNKDLLPNPPKTWEEIPALDKELKAKGKSALMFNLQEPYFTWPLIAADGGYAFKYENGKYDIKDVGVDNAGAKAGLTFLVDLIKNKHMNADTDYSIAEAAFNKGETAMTINGPWAWSNIDTSKVNYGVTVLPTFKGQPSKPFVGVLSAGINAASPNKELAKEFLENYLLTDEGLEAVNKDKPLGAVALKSYEEELAKDPRIAATMENAQKGEIMPNIPQMSAFWYAVRTAVINAASGRQTVDEALKDAQTGGSGENLYFQSSDNGPQNQRNAPRITFGGPSDSTGSNQNGERSGARSKQRRPQGLPNNTASWFTALTQHGKEDLKFPRGQGVPINTNSSPDDQIGYYRRATRRIRGGDGKMKDLSPRWYFYYLGTGPEAGLPYGANKDGIIWVATEGALNTPKDHIGTRNPANHAAIVLQLPQGTTLPKGFYAEGSRGGSQASSRSSSRSRNSSRNSTPGSSRGTSPARMAGNGGDAALALLLLDRLNQLESKMSGKGQQQQGQTVTKKSAAEASKKPRQKRTATKAYNVTQAFGRRGPEQTQGNFGDQELIRQGTDYKHWPQIAQFAPSASAFFGMSRIGMEVTPSGTWLTYTGAIKLDDKDPNFKDQVILLNKHIDAYKTFPPTEPKKDKKKKADETQALPQRQKKQQTVTLLPAADLDDFSKQLQQSMSSADSTQAGGSGHHHHHH

SEQ ID NO: 3753 - protein, 806 aa, Artificial Sequence
  Description of Artificial Sequence: Synthetic polypeptide
MKIEEGKLVIWINGDKGYNGLAEVGKKFEKDTGIKVTVEHPDKLEEKFPQVAATGDGPDIIFWAHDRFGGYAQSGLLAEITPDKAFQDKLYPFTWDAVRYNGKLIAYPIAVEALSLIYNKDLLPNPPKTWEEIPALDKELKAKGKSALMFNLQEPYFTWPLIAADGGYAFKYENGKYDIKDVGVDNAGAKAGLTFLVDLIKNKHMNADTDYSIAEAAFNKGETAMTINGPWAWSNIDTSKVNYGVTVLPTFKGQPSKPFVGVLSAGINAASPNKELAKEFLENYLLTDEGLEAVNKDKPLGAVALKSYEEELAKDPRIAATMENAQKGEIMPNIPQMSAFWYAVRTAVINAASGRQTVDEALKDAQTGGSGENLYFQSSDNGPQNQRNAPRITFGGPSDSTGSNQNGERSGARSKQRRPQGLPNNTASWFTALTQHGKEDLKFPRGQGVPINTNSSPDDQIGYYRRATRRIRGGDGKMKDLSPRWYFYYLGTGPEAGLPYGANKDGIIWVATEGALNTPKDHIGTRNPANNAAIVLQLPQGTTLPKGFYAEGSRGGSQASSRSSSRSRNSSRNSTPGSSRGTSPARMAGNGGDAALALLLLDRLNQLESKMSGKGQQQQGQTVTKKSAAEASKKPRQKRTATKAYNVTQAFGRRGPEQTQGNFGDQELIRQGTDYKHWPQIAQFAPSASAFFGMSRIGMEVTPSGTWLTYTGTIKLDDKDPNFKDQVILLNKHIDAYKTFPPTEPKKDKKKKADETQALPQRQKKQQTVTLLPAADLDDFSKQLQQSMSSADSTQAGGSGHHHHHH

SEQ ID NO: 3754 - protein, 806 aa, Artificial Sequence
  Description of Artificial Sequence: Synthetic polypeptide
MKIEEGKLVIWINGDKGYNGLAEVGKKFEKDTGIKVTVEHPDKLEEKFPQVAATGDGPDIIFWAHDRFGGYAQSGLLAEITPDKAFQDKLYPFTWDAVRYNGKLIAYPIAVEALSLIYNKDLLPNPPKTWEEIPALDKELKAKGKSALMFNLQEPYFTWPLIAADGGYAFKYENGKYDIKDVGVDNAGAKAGLTFLVDLIKNKHMNADTDYSIAEAAFNKGETAMTINGPWAWSNIDTSKVNYGVTVLPTFKGQPSKPFVGVLSAGINAASPNKELAKEFLENYLLTDEGLEAVNKDKPLGAVALKSYEEELAKDPRIAATMENAQKGEIMPNIPQMSAFWYAVRTAVINAASGRQTVDEALKDAQTGGSGENLYFQSSDNGPQNQRNAPRITFGGPSDSTGSNQNGERSGARSKQRRPQGLPNNTASWFTALTQHGKEDLKFPRGQGVPINTNSSPDDQIGYYRRATRRIRGGDGKMKDLSPRWYFYYLGTGPEAGLPYGANKDGIIWVATEGALNTPKDHIGTRNPANNAAIVLQLPQGTTLPKGFYAEGSRGGSQASSRSSSRSRNSSRNSTPGSSRGTSPARMAGNGGDAALALLLLDRLNQLESKMSGKGQQQQGQTVTKKSAAEASKKPRQKRTATKEYNVTQAFGRRGPEQTQGNFGDQELIRQGTDYKHWPQIAQFAPSASAFFGMSRIGMEVTPSGTWLTYTGAIKLDDKDPNFKDQVILLNKHIDAYKTFPPTEPKKDKKKKADETQALPQRQKKQQTVTLLPAADLDDFSKQLQQSMSSADSTQAGGSGHHHHHH

SEQ ID NO: 3755 - protein, 806 aa, Artificial Sequence
  Description of Artificial Sequence: Synthetic polypeptide
MKIEEGKLVIWINGDKGYNGLAEVGKKFEKDTGIKVTVEHPDKLEEKFPQVAATGDGPDIIFWAHDRFGGYAQSGLLAEITPDKAFQDKLYPFTWDAVRYNGKLIAYPIAVEALSLIYNKDLLPNPPKTWEEIPALDKELKAKGKSALMFNLQEPYFTWPLIAADGGYAFKYENGKYDIKDVGVDNAGAKAGLTFLVDLIKNKHMNADTDYSIAEAAFNKGETAMTINGPWAWSNIDTSKVNYGVTVLPTFKGQPSKPFVGVLSAGINAASPNKELAKEFLENYLLTDEGLEAVNKDKPLGAVALKSYEEELAKDPRIAATMENAQKGEIMPNIPQMSAFWYAVRTAVINAASGRQTVDEALKDAQTGGSGENLYFQSSDNGPQNQRNAPRITFGGPSDSTGSNQNGERSGARSKQRRPQGLPNNTASWFTALTQHGKEDLKFPRGQGVPINTNSSPDDQIGYYRRATRRIRGGDGKMKDLSPRWYFYYLGTGPEAGLPYGANKDGIIWVATEGALNTPKDHIGTRNPANNAAIVLQLPQGTTLPKGFYAEGSRGGSQASSRSSSRSRNSSRNSTPGSSRGTSPARMAGNGGDAALALLLLDRLNQLESKMSGKGQQQQGQTVTKKSAAEASKKPRQKRTATKGYNVTQAFGRRGPEQTQGNFGDQDLIREGTDYKHWPQIAQFAPSASAFFGMSRIGTEETPSGTWLTYTGAIKLDKKDPNFKDQVILLNKHIDAYKTFPPTEPKKDKKKKADETQALPQRQKKQQTVTLLPAADLDDFSKQLQQSMSSADSTQAGGSGHHHHHH

SEQ ID NO: 3756 - protein, 806 aa, Artificial Sequence
  Description of Artificial Sequence: Synthetic polypeptide
MKIEEGKLVIWINGDKGYNGLAEVGKKFEKDTGIKVTVEHPDKLEEKFPQVAATGDGPDIIFWAHDRFGGYAQSGLLAEITPDKAFQDKLYPFTWDAVRYNGKLIAYPIAVEALSLIYNKDLLPNPPKTWEEIPALDKELKAKGKSALMFNLQEPYFTWPLIAADGGYAFKYENGKYDIKDVGVDNAGAKAGLTFLVDLIKNKHMNADTDYSIAEAAFNKGETAMTINGPWAWSNIDTSKVNYGVTVLPTFKGQPSKPFVGVLSAGINAASPNKELAKEFLENYLLTDEGLEAVNKDKPLGAVALKSYEEELAKDPRIAATMENAQKGEIMPNIPQMSAFWYAVRTAVINAASGRQTVDEALKDAQTGGSGENLYFQSSDNGPQNQRNAPRITFGGPSDSTGSNQNGERSGARSKQRRPQGLPNNTASWFTALTQHGKEDLKFPRGQGVPINTNSSPDDQIGYYRRATRRIRGGDGKMKDLSPRWYFYYLGTGPEAGLPYGANKDGIIWVATEGALNTPKDHIGTRNPANNAAIVLQLPQGTTLPKGFYAEGSRGGSQASSRSSSRSRNSSRNSTPGSSRGTSPARMAGNGGDAALALLLLDRLNQLESKMSGKGQQQQGQTVTKKSAAEASKKPRQKRTATKAYNVTQAFGRRGPEQTQGNFGDQELIRQGTDYKHWPQLAQFAPSASAFFGMSRIGMEVTPSGTWLTYTGAIKLDDKDPNFKDQVILLNKHIDAYKTFPPTEPKKDKKKKADETQALPQRQKKQQTVTLLPAADLDDFSKQLQQSMSSADSTQAGGSGHHHHHH

SEQ ID NO: 3757 - protein, 806 aa, Artificial Sequence
  Description of Artificial Sequence: Synthetic polypeptide
MKIEEGKLVIWINGDKGYNGLAEVGKKFEKDTGIKVTVEHPDKLEEKFPQVAATGDGPDIIFWAHDRFGGYAQSGLLAEITPDKAFQDKLYPFTWDAVRYNGKLIAYPIAVEALSLIYNKDLLPNPPKTWEEIPALDKELKAKGKSALMFNLQEPYFTWPLIAADGGYAFKYENGKYDIKDVGVDNAGAKAGLTFLVDLIKNKHMNADTDYSIAEAAFNKGETAMTINGPWAWSNIDTSKVNYGVTVLPTFKGQPSKPFVGVLSAGINAASPNKELAKEFLENYLLTDEGLEAVNKDKPLGAVALKSYEEELAKDPRIAATMENAQKGEIMPNIPQMSAFWYAVRTAVINAASGRQTVDEALKDAQTGGSGENLYFQSSDNGPQNQRNAPRITFGGPSDSTGSNQNGERSGARSKQRRPQGLPNNTASWFTALTQHGKEDLKFPRGQGVPINTNSSPDDQIGYYRRATRRIRGGDGKMKDLSPRWYFYYLGTGPEAGLPYGANKDGIIWVATEGALNTPKDHIGTRNPANNAAIVLQLPQGTTLPKGFYAEGSRGGSQASSRSSSRSRNSSRNSTPGSSRGTSPARMAGNGGDAALALLLLDRLNQLESKMSGKGQQQQGQTVTKKSAAEASKKPRQKRTATKGYNVTQAFGRRGPEQTQGNFGDQDLIREGTDYKHWPQIAQFAPSASAFFGMSRISTEETPSGTWLTYTGAIKLDKKDPNFKDQVILLNKHIDAYKTFPPTEPKKDKKKKADETQALPQRQKKQQTVTLLPAADLDDFSKQLQQSMSSADSTQAGGSGHHHHHH

SEQ ID NO: 3758 - protein, 806 aa, Artificial Sequence
  Description of Artificial Sequence: Synthetic polypeptide
MKIEEGKLVIWINGDKGYNGLAEVGKKFEKDTGIKVTVEHPDKLEEKFPQVAATGDGPDIIFWAHDRFGGYAQSGLLAEITPDKAFQDKLYPFTWDAVRYNGKLIAYPIAVEALSLIYNKDLLPNPPKTWEEIPALDKELKAKGKSALMFNLQEPYFTWPLIAADGGYAFKYENGKYDIKDVGVDNAGAKAGLTFLVDLIKNKHMNADTDYSIAEAAFNKGETAMTINGPWAWSNIDTSKVNYGVTVLPTFKGQPSKPFVGVLSAGINAASPNKELAKEFLENYLLTDEGLEAVNKDKPLGAVALKSYEEELAKDPRIAATMENAQKGEIMPNIPQMSAFWYAVRTAVINAASGRQTVDEALKDAQTGGSGENLYFQSSDNGPQNQRNAPRITFGGPSDSTGSNQNGERSGARSKQRRPQGLPNNTASWFTALTQHGKEDLKFPKGQGVPINTNSKPDDQIGYWRRETRRYRGGDGQMKDLDPRWYFYYLGTGPEAGLPYGANKDGIIWVATEGALNTPKDHIGTRNPANNAAIVLQLPQGTTLPKGFYAEGSRGGSQASSRSSSRSRNSSRNSTPGSSRGTSPARMAGNGGDAALALLLLDRLNQLESKMSGKGQQQQGQTVTKKSAAEASKKPRQKRTATKAYNVTQAFGRRGPEQTQGNFGDQELIRQGTDYKHWPQIAQFAPSASAFFGMSRIGMEVTPSGTWLTYTGAIKLDDKDPNFKDQVILLNKHIDAYKTFPPTEPKKDKKKKADETQALPQRQKKQQTVTLLPAADLDDFSKQLQQSMSSADSTQAGGSGHHHHHH

SEQ ID NO: 3759 - protein, 806 aa, Artificial Sequence
  Description of Artificial Sequence: Synthetic polypeptide
MKIEEGKLVIWINGDKGYNGLAEVGKKFEKDTGIKVTVEHPDKLEEKFPQVAATGDGPDIIFWAHDRFGGYAQSGLLAEITPDKAFQDKLYPFTWDAVRYNGKLIAYPIAVEALSLIYNKDLLPNPPKTWEEIPALDKELKAKGKSALMFNLQEPYFTWPLIAADGGYAFKYENGKYDIKDVGVDNAGAKAGLTFLVDLIKNKHMNADTDYSIAEAAFNKGETAMTINGPWAWSNIDTSKVNYGVTVLPTFKGQPSKPFVGVLSAGINAASPNKELAKEFLENYLLTDEGLEAVNKDKPLGAVALKSYEEELAKDPRIAATMENAQKGEIMPNIPQMSAFWYAVRTAVINAASGRQTVDEALKDAQTGGSGENLYFQSSDNGPQNQRNAPRITFGGPSDSTGSNQNGERSGARSKQRRPQGLPNNTASWFTALTQHGKEDLKFPRGQGVPINTNSSPDDQIGYYRRATRRIRGGDGKMKDLSPRWYFYYLGTGPEAGLPYGANKDGIIWVATEGALNTPKDHIGTRNPANNAAIVLQLPQGTTLPKGFYAEGSRGGSQASSRSSSRSRNSSRNSTPGSSRGTSPARMAGNGGDAALALLLLDRLNQLESKMSGKGQQQQGQTVTKKSAAEASKKPRQKRTATKGYNVTQAFGRRGPEQTQGNFGDQDLIKLGTDYKHWPQIAQFAPSASAFFGMSRISTEETPSGTWLTYTGAIKLDKKDPNFKDQVILLNKHIDAYKTFPPTEPKKDKKKKADETQALPQRQKKQQTVTLLPAADLDDFSKQLQQSMSSADSTQAGGSGHHHHHH

SEQ ID NO: 3760 - protein, 806 aa, Artificial Sequence
  Description of Artificial Sequence: Synthetic polypeptide
MKIEEGKLVIWINGDKGYNGLAEVGKKFEKDTGIKVTVEHPDKLEEKFPQVAATGDGPDIIFWAHDRFGGYAQSGLLAEITPDKAFQDKLYPFTWDAVRYNGKLIAYPIAVEALSLIYNKDLLPNPPKTWEEIPALDKELKAKGKSALMFNLQEPYFTWPLIAADGGYAFKYENGKYDIKDVGVDNAGAKAGLTFLVDLIKNKHMNADTDYSIAEAAFNKGETAMTINGPWAWSNIDTSKVNYGVTVLPTFKGQPSKPFVGVLSAGINAASPNKELAKEFLENYLLTDEGLEAVNKDKPLGAVALKSYEEELAKDPRIAATMENAQKGEIMPNIPQMSAFWYAVRTAVINAASGRQTVDEALKDAQTGGSGENLYFQSSDNGPQNQRNAPRITFGGPSDSTGSNQNGERSGARSKQRRPQGLPNNTASWFTALTQHGKEDLKFPRGQGVPINTNSSPDDQIGYYRRATRRIRGGDGKMKDLSPRWYFYYLGTGPEAGLPYGANKDGIIWVATEGAMNTPKDHIGTRNPANNAAIVLQLPQGTTLPKGFYAEGSRGGSQASSRSSSRSRNSSRNSTPGSSRGTSPARMAGNGGDAALALLLLDRLNQLESKMSGKGQQQQGQTVTKKSAAEASKKPRQKRTATKAYNVTQAFGRRGPEQTQGNFGDQELIRQGTDYKHWPQIAQFAPSASAFFGMSRIGMEVTPSGTWLTYTGAIKLDDKDPNFKDQVILLNKHIDAYKTFPPTEPKKDKKKKADETQALPQRQKKQQTVTLLPAADLDDFSKQLQQSMSSADSTQAGGSGHHHHHH

SEQ ID NO: 3761 - protein, 806 aa, Artificial Sequence
  Description of Artificial Sequence: Synthetic polypeptide
MKIEEGKLVIWINGDKGYNGLAEVGKKFEKDTGIKVTVEHPDKLEEKFPQVAATGDGPDIIFWAHDRFGGYAQSGLLAEITPDKAFQDKLYPFTWDAVRYNGKLIAYPIAVEALSLIYNKDLLPNPPKTWEEIPALDKELKAKGKSALMFNLQEPYFTWPLIAADGGYAFKYENGKYDIKDVGVDNAGAKAGLTFLVDLIKNKHMNADTDYSIAEAAFNKGETAMTINGPWAWSNIDTSKVNYGVTVLPTFKGQPSKPFVGVLSAGINAASPNKELAKEFLENYLLTDEGLEAVNKDKPLGAVALKSYEEELAKDPRIAATMENAQKGEIMPNIPQMSAFWYAVRTAVINAASGRQTVDEALKDAQTGGSGENLYFQSSDNGPQNQRNAPRITFGGPSDSTGSNQNGERSGARSKQRRPQGLPNNTASWFTALTQHGKEDLKFPRGQGVPINTNSSPDDQIGYYRRATRRIRGGDGKMKDLSPRWYFYYLGTGPEAGLPYGANKDGIIWVATEGALNTPKDHIGTRNPANNAAIVLQLPQGTTLPKGFYAEGSRGGSQASSRSSSRSRNSSRNSTPGSSRGTSPARMAGNGGDAALALLLLDRLNQLESKMSGKGQQQQGQTVTKKSAAEASKKPRQKRTATKAYNVTQAFGRRGPEQTQGNFGDQELIRQGVDYKHWPQIAQFAPSASAFFGMSRIGMEVTPSGTWLTYTGAIKLDDKDPNFKDQVILLNKHIDAYKTFPPTEPKKDKKKKADETQALPQRQKKQQTVTLLPAADLDDFSKQLQQSMSSADSTQAGGSGHHHHHH

SEQ ID NO: 3762 - protein, 806 aa, Artificial Sequence
  Description of Artificial Sequence: Synthetic polypeptide
MKIEEGKLVIWINGDKGYNGLAEVGKKFEKDTGIKVTVEHPDKLEEKFPQVAATGDGPDIIFWAHDRFGGYAQSGLLAEITPDKAFQDKLYPFTWDAVRYNGKLIAYPIAVEALSLIYNKDLLPNPPKTWEEIPALDKELKAKGKSALMFNLQEPYFTWPLIAADGGYAFKYENGKYDIKDVGVDNAGAKAGLTFLVDLIKNKHMNADTDYSIAEAAFNKGETAMTINGPWAWSNIDTSKVNYGVTVLPTFKGQPSKPFVGVLSAGINAASPNKELAKEFLENYLLTDEGLEAVNKDKPLGAVALKSYEEELAKDPRIAATMENAQKGEIMPNIPQMSAFWYAVRTAVINAASGRQTVDEALKDAQTGGSGENLYFQSSDNGPQNQRNAPRITFGGPSDSTGSNQNGERSGARSKQRRPQGLPNNTASWFTALTQHGKEDLKFPRGQGVPINTNSSPDDQIGYYRRATRRIRGGDGKMKDLSPRWYFYYLGTGPEAGLPYGANKDGIIWVAGEGALNTPKDHIGTRNPANNAAIVLQLPQGTTLPKGFYAEGSRGGSQASSRSSSRSRNSSRNSTPGSSRGTSPARMAGNGGDAALALLLLDRLNQLESKMSGKGQQQQGQTVTKKSAAEASKKPRQKRTATKAYNVTQAFGRRGPEQTQGNFGDQELIRQGTDYKHWPQIAQFAPSASAFFGMSRIGMEVTPSGTWLTYTGAIKLDDKDPNFKDQVILLNKHIDAYKTFPPTEPKKDKKKKADETQALPQRQKKQQTVTLLPAADLDDFSKQLQQSMSSADSTQAGGSGHHHHHH

SEQ ID NO: 3763 - protein, 806 aa, Artificial Sequence
  Description of Artificial Sequence: Synthetic polypeptide
MKIEEGKLVIWINGDKGYNGLAEVGKKFEKDTGIKVTVEHPDKLEEKFPQVAATGDGPDIIFWAHDRFGGYAQSGLLAEITPDKAFQDKLYPFTWDAVRYNGKLIAYPIAVEALSLIYNKDLLPNPPKTWEEIPALDKELKAKGKSALMFNLQEPYFTWPLIAADGGYAFKYENGKYDIKDVGVDNAGAKAGLTFLVDLIKNKHMNADTDYSIAEAAFNKGETAMTINGPWAWSNIDTSKVNYGVTVLPTFKGQPSKPFVGVLSAGINAASPNKELAKEFLENYLLTDEGLEAVNKDKPLGAVALKSYEEELAKDPRIAATMENAQKGEIMPNIPQMSAFWYAVRTAVINAASGRQTVDEALKDAQTGGSGENLYFQSSDNGPQNQRNAPRITFGGPSDSTGSNQNGERSGARSKQRRPQGLPNNTASWFTALTQHGKEDLKFPRGQGVPINTNSSPDDQIGYYRRATRRIRGGDGKMKDLSPRWYFYYLGTGPEAGLPYGANKDGIIWVATEGALNTPKDHIGTRNPANNAAIVLQLPQGTTLPKGFYAEGSRGGSQASSRSSSRSRNSSRNSTPGSSRGTSPARMAGNGGDAALALLLLDRLNQLESKMSGKGQQQQGQTVTKKSAAEASKKPRQKRTATKAYNVTQAFGRRGPEQTQGNFGDQELIRQGTDYKGWPQIAQFAPSASAFFGMSRIGMEVTPSGTWLTYTGAIKLDDKDPNFKDQVILLNKHIDAYKTFPPTEPKKDKKKKADETQALPQRQKKQQTVTLLPAADLDDFSKQLQQSMSSADSTQAGGSGHHHHHH

SEQ ID NO: 3764 - protein, 806 aa, Artificial Sequence
  Description of Artificial Sequence: Synthetic polypeptide
MKIEEGKLVIWINGDKGYNGLAEVGKKFEKDTGIKVTVEHPDKLEEKFPQVAATGDGPDIIFWAHDRFGGYAQSGLLAEITPDKAFQDKLYPFTWDAVRYNGKLIAYPIAVEALSLIYNKDLLPNPPKTWEEIPALDKELKAKGKSALMFNLQEPYFTWPLIAADGGYAFKYENGKYDIKDVGVDNAGAKAGLTFLVDLIKNKHMNADTDYSIAEAAFNKGETAMTINGPWAWSNIDTSKVNYGVTVLPTFKGQPSKPFVGVLSAGINAASPNKELAKEFLENYLLTDEGLEAVNKDKPLGAVALKSYEEELAKDPRIAATMENAQKGEIMPNIPQMSAFWYAVRTAVINAASGRQTVDEALKDAQTGGSGENLYFQSSDNGPQNQRNAPRITFGGPSDSTGSNQNGERSGARSKQRRPQGLPNNTASWFTALTQHGKEDLKFPRGQGVPINTNSSPDDQIGYYRRATRRIRGGDGKMKDLSPRWYFYYLGTGPEAGLPYGANKDGIIWVAKEGALNTPKDHIGTRNPANNAAIVLQLPQGTTLPKGFYAEGSRGGSQASSRSSSRSRNSSRNSTPGSSRGTSPARMAGNGGDAALALLLLDRLNQLESKMSGKGQQQQGQTVTKKSAAEASKKPRQKRTATKAYNVTQAFGRRGPEQTQGNFGDQELIRQGTDYKHWPQIAQFAPSASAFFGMSRIGMEVTPSGTWLTYTGAIKLDDKDPNFKDQVILLNKHIDAYKTFPPTEPKKDKKKKADETQALPQRQKKQQTVTLLPAADLDDFSKQLQQSMSSADSTQAGGSGHHHHHH

SEQ ID NO: 3765 - protein, 806 aa, Artificial Sequence
  Description of Artificial Sequence: Synthetic polypeptide
MKIEEGKLVIWINGDKGYNGLAEVGKKFEKDTGIKVTVEHPDKLEEKFPQVAATGDGPDIIFWAHDRFGGYAQSGLLAEITPDKAFQDKLYPFTWDAVRYNGKLIAYPIAVEALSLIYNKDLLPNPPKTWEEIPALDKELKAKGKSALMFNLQEPYFTWPLIAADGGYAFKYENGKYDIKDVGVDNAGAKAGLTFLVDLIKNKHMNADTDYSIAEAAFNKGETAMTINGPWAWSNIDTSKVNYGVTVLPTFKGQPSKPFVGVLSAGINAASPNKELAKEFLENYLLTDEGLEAVNKDKPLGAVALKSYEEELAKDPRIAATMENAQKGEIMPNIPQMSAFWYAVRTAVINAASGRQTVDEALKDAQTGGSGENLYFQSSDNGPQNQRNAPRITFGGPSDSTGSNQNGERSGARSKQRRPQGLPNNTASWFTALTQHGKEDLKFPRGQGVPINTNSSPDDQIGYYRRATRRIRGGDGKMKDLSPRWYFYYLGTGPEAGLPYGANKDGIIWVATEGALNTPKDHIGTRNPANNAATVLQLPQGTTLPKGFYAEGSRGGSQASSRSSSRSRNSSRNSTPGSSRGTSPARMAGNGGDAALALLLLDRLNQLESKMSGKGQQQQGQTVTKKSAAEASKKPRQKRTATKAYNVTQAFGRRGPEQTQGNFGDQELIRQGTDYKHWPQIAQFAPSASAFFGMSRIGMEVTPSGTWLTYTGAIKLDDKDPNFKDQVILLNKHIDAYKTFPPTEPKKDKKKKADETQALPQRQKKQQTVTLLPAADLDDFSKQLQQSMSSADSTQAGGSGHHHHHH

SEQ ID NO: 3766 - protein, 806 aa, Artificial Sequence
  Description of Artificial Sequence: Synthetic polypeptide
MKIEEGKLVIWINGDKGYNGLAEVGKKFEKDTGIKVTVEHPDKLEEKFPQVAATGDGPDIIFWAHDRFGGYAQSGLLAEITPDKAFQDKLYPFTWDAVRYNGKLIAYPIAVEALSLIYNKDLLPNPPKTWEEIPALDKELKAKGKSALMFNLQEPYFTWPLIAADGGYAFKYENGKYDIKDVGVDNAGAKAGLTFLVDLIKNKHMNADTDYSIAEAAFNKGETAMTINGPWAWSNIDTSKVNYGVTVLPTFKGQPSKPFVGVLSAGINAASPNKELAKEFLENYLLTDEGLEAVNKDKPLGAVALKSYEEELAKDPRIAATMENAQKGEIMPNIPQMSAFWYAVRTAVINAASGRQTVDEALKDAQTGGSGENLYFQSSDNGPQNQRNAPRITFGGPSDSTGSNQNGERSGARSKQRRPQGLPNNTASWFTALTQHGKEDLKFPRGQGVPINTNSSPDDQIGYYRRATRRIRGGDGKMKDLSPRWYFYYLGTGPEAGLPYGANKDGIIWVATEGALNTPKDHIGTRNPANNAAIVLQLPEGTTLPKGFYAEGSRGGSQASSRSSSRSRNSSRNSTPGSSRGTSPARMAGNGGDAALALLLLDRLNQLESKMSGKGQQQQGQTVTKKSAAEASKKPRQKRTATKAYNVTQAFGRRGPEQTQGNFGDQELIRQGTDYKHWPQIAQFAPSASAFFGMSRIGMEVTPSGTWLTYTGAIKLDDKDPNFKDQVILLNKHIDAYKTFPPTEPKKDKKKKADETQALPQRQKKQQTVTLLPAADLDDFSKQLQQSMSSADSTQAGGSGHHHHHH

SEQ ID NO: 3767 - protein, 806 aa, Artificial Sequence
  Description of Artificial Sequence: Synthetic polypeptide
MKIEEGKLVIWINGDKGYNGLAEVGKKFEKDTGIKVTVEHPDKLEEKFPQVAATGDGPDIIFWAHDRFGGYAQSGLLAEITPDKAFQDKLYPFTWDAVRYNGKLIAYPIAVEALSLIYNKDLLPNPPKTWEEIPALDKELKAKGKSALMFNLQEPYFTWPLIAADGGYAFKYENGKYDIKDVGVDNAGAKAGLTFLVDLIKNKHMNADTDYSIAEAAFNKGETAMTINGPWAWSNIDTSKVNYGVTVLPTFKGQPSKPFVGVLSAGINAASPNKELAKEFLENYLLTDEGLEAVNKDKPLGAVALKSYEEELAKDPRIAATMENAQKGEIMPNIPQMSAFWYAVRTAVINAASGRQTVDEALKDAQTGGSGENLYFQSSDNGPQNQRNAPRITFGGPSDSTGSNQNGERSGARSKQRRPQGLPNNTASWFTALTQHGKEDLKFPRGQGVPINTNSSPDDQIGYYRRLTRRIRGGDGKMKDLSPRWYFYYLGTGPEAGLPYGANKDGIIWVATEGALNTPKDHIGTRNPANNAAIVLQLPQGTTLPKGFYAEGSRGGSQASSRSSSRSRNSSRNSTPGSSRGTSPARMAGNGGDAALALLLLDRLNQLESKMSGKGQQQQGQTVTKKSAAEASKKPRQKRTATKAYNVTQAFGRRGPEQTQGNFGDQELIRQGTDYKHWPQIAQFAPSASAFFGMSRIGMEVTPSGTWLTYTGAIKLDDKDPNFKDQVILLNKHIDAYKTFPPTEPKKDKKKKADETQALPQRQKKQQTVTLLPAADLDDFSKQLQQSMSSADSTQAGGSGHHHHHH

SEQ ID NO: 3768 - protein, 806 aa, Artificial Sequence
  Description of Artificial Sequence: Synthetic polypeptide
MKIEEGKLVIWINGDKGYNGLAEVGKKFEKDTGIKVTVEHPDKLEEKFPQVAATGDGPDIIFWAHDRFGGYAQSGLLAEITPDKAFQDKLYPFTWDAVRYNGKLIAYPIAVEALSLIYNKDLLPNPPKTWEEIPALDKELKAKGKSALMFNLQEPYFTWPLIAADGGYAFKYENGKYDIKDVGVDNAGAKAGLTFLVDLIKNKHMNADTDYSIAEAAFNKGETAMTINGPWAWSNIDTSKVNYGVTVLPTFKGQPSKPFVGVLSAGINAASPNKELAKEFLENYLLTDEGLEAVNKDKPLGAVALKSYEEELAKDPRIAATMENAQKGEIMPNIPQMSAFWYAVRTAVINAASGRQTVDEALKDAQTGGSGENLYFQSSDNGPQNQRNAPRITFGGPSDSTGSNQNGERSGARSKQRRPQGLPNNTASWFTALTQHGKEDLKFPRGQGVPINTNSSPDDQIGYYRRATRRIRGGDGKMKDLSPRWYFYYLGTGPEAGLPYGANKDGIIWVATEGALNTPKDHIGTRNPANNAAIVLQLPQGTTLPKGFYAEGSRGGSQASSRSSSRSRNSSRNSTPGSSRGTSPARMAGNGGDAALALLLLDRLNQLESKMSGKGQQQQGQTVTKKSAAEASKKPRQKRTATKDYNVTQAFGRRGPEQTQGNFGDQDLNKLGTDYKHWPQIAQFAPSASAFFGMSRISTRETPSGTWLTYTGAIKLDKKDPNFKDQVILLNKHIDAYKTFPPTEPKKDKKKKADETQALPQRQKKQQTVTLLPAADLDDFSKQLQQSMSSADSTQAGGSGHHHHHH

SEQ ID NO: 3769 - protein, 806 aa, Artificial Sequence
  Description of Artificial Sequence: Synthetic polypeptide
MKIEEGKLVIWINGDKGYNGLAEVGKKFEKDTGIKVTVEHPDKLEEKFPQVAATGDGPDIIFWAHDRFGGYAQSGLLAEITPDKAFQDKLYPFTWDAVRYNGKLIAYPIAVEALSLIYNKDLLPNPPKTWEEIPALDKELKAKGKSALMFNLQEPYFTWPLIAADGGYAFKYENGKYDIKDVGVDNAGAKAGLTFLVDLIKNKHMNADTDYSIAEAAFNKGETAMTINGPWAWSNIDTSKVNYGVTVLPTFKGQPSKPFVGVLSAGINAASPNKELAKEFLENYLLTDEGLEAVNKDKPLGAVALKSYEEELAKDPRIAATMENAQKGEIMPNIPQMSAFWYAVRTAVINAASGRQTVDEALKDAQTGGSGENLYFQSSDNGPQNQRNAPRITFGGPSDSTGSNQNGERSGARSKQRRPQGLPNNTASWFTALTQQGKEDLKFPRGQGVPINTNSSPDDQIGYYRRATRRIRGGDGKMKDLSPRWYFYYLGTGPEAGLPYGANKDGIIWVATEGALNTPKDHIGTRNPANNAAIVLQLPQGTTLPKGFYAEGSRGGSQASSRSSSRSRNSSRNSTPGSSRGTSPARMAGNGGDAALALLLLDRLNQLESKMSGKGQQQQGQTVTKKSAAEASKKPRQKRTATKAYNVTQAFGRRGPEQTQGNFGDQELIRQGTDYKHWPQIAQFAPSASAFFGMSRIGMEVTPSGTWLTYTGAIKLDDKDPNFKDQVILLNKHIDAYKTFPPTEPKKDKKKKADETQALPQRQKKQQTVTLLPAADLDDFSKQLQQSMSSADSTQAGGSGHHHHHH

SEQ ID NO: 3770 - protein, 806 aa, Artificial Sequence
  Description of Artificial Sequence: Synthetic polypeptide
MKIEEGKLVIWINGDKGYNGLAEVGKKFEKDTGIKVTVEHPDKLEEKFPQVAATGDGPDIIFWAHDRFGGYAQSGLLAEITPDKAFQDKLYPFTWDAVRYNGKLIAYPIAVEALSLIYNKDLLPNPPKTWEEIPALDKELKAKGKSALMFNLQEPYFTWPLIAADGGYAFKYENGKYDIKDVGVDNAGAKAGLTFLVDLIKNKHMNADTDYSIAEAAFNKGETAMTINGPWAWSNIDTSKVNYGVTVLPTFKGQPSKPFVGVLSAGINAASPNKELAKEFLENYLLTDEGLEAVNKDKPLGAVALKSYEEELAKDPRIAATMENAQKGEIMPNIPQMSAFWYAVRTAVINAASGRQTVDEALKDAQTGGSGENLYFQSSDNGPQNQRNAPRITFGGPSDSTGSNQNGERSGARSKQRRPQGLPNNTASWFTALTQHGKEDLKFPRGQGVPINTNSSPDDQIGYYRRATRRIRGGDGKMKDLSPRWYFYYLGTGPEAGLPYGANKDGIIWVATEGALNTPKDHIGTRNPANNAAIVLQLPQGTTLPKGFYAEGSRGGSQASSRSSSRSRNSSRNSTPGSSRGTSPARMAGNGGDAALALLLLDRLNQLESKMSGKGQQQQGQTVTKKSAAEASKKPRQKRTATKNYNVTQAFGRRGPEQTQGNFGDQELIRQGTDYKHWPQIAQFAPSASAFFGMSRIGMEVTPSGTWLTYTGAIKLDDKDPNFKDQVILLNKHIDAYKTFPPTEPKKDKKKKADETQALPQRQKKQQTVTLLPAADLDDFSKQLQQSMSSADSTQAGGSGHHHHHH

SEQ ID NO: 3771 - protein, 806 aa, Artificial Sequence
  Description of Artificial Sequence: Synthetic polypeptide
MKIEEGKLVIWINGDKGYNGLAEVGKKFEKDTGIKVTVEHPDKLEEKFPQVAATGDGPDIIFWAHDRFGGYAQSGLLAEITPDKAFQDKLYPFTWDAVRYNGKLIAYPIAVEALSLIYNKDLLPNPPKTWEEIPALDKELKAKGKSALMFNLQEPYFTWPLIAADGGYAFKYENGKYDIKDVGVDNAGAKAGLTFLVDLIKNKHMNADTDYSIAEAAFNKGETAMTINGPWAWSNIDTSKVNYGVTVLPTFKGQPSKPFVGVLSAGINAASPNKELAKEFLENYLLTDEGLEAVNKDKPLGAVALKSYEEELAKDPRIAATMENAQKGEIMPNIPQMSAFWYAVRTAVINAASGRQTVDEALKDAQTGGSGENLYFQSSDNGPQNQRNAPRITFGGPSDSTGSNQNGERSGARSKQRRPQGLPNNTASWFTALTQHGKEDLKFPRGQGVPINTNSSPDDQIGYYRRATRRIRGGDGKMKDLSPRWYFYYLGTGPEAGLPYGANKDGIIWVATEGAKNTPKDHIGTRNPANNAAIVLQLPQGTTLPKGFYAEGSRGGSQASSRSSSRSRNSSRNSTPGSSRGTSPARMAGNGGDAALALLLLDRLNQLESKMSGKGQQQQGQTVTKKSAAEASKKPRQKRTATKAYNVTQAFGRRGPEQTQGNFGDQELIRQGTDYKHWPQIAQFAPSASAFFGMSRIGMEVTPSGTWLTYTGAIKLDDKDPNFKDQVILLNKHIDAYKTFPPTEPKKDKKKKADETQALPQRQKKQQTVTLLPAADLDDFSKQLQQSMSSADSTQAGGSGHHHHHH

SEQ ID NO: 3772 - protein, 806 aa, Artificial Sequence
  Description of Artificial Sequence: Synthetic polypeptide
MKIEEGKLVIWINGDKGYNGLAEVGKKFEKDTGIKVTVEHPDKLEEKFPQVAATGDGPDIIFWAHDRFGGYAQSGLLAEITPDKAFQDKLYPFTWDAVRYNGKLIAYPIAVEALSLIYNKDLLPNPPKTWEEIPALDKELKAKGKSALMFNLQEPYFTWPLIAADGGYAFKYENGKYDIKDVGVDNAGAKAGLTFLVDLIKNKHMNADTDYSIAEAAFNKGETAMTINGPWAWSNIDTSKVNYGVTVLPTFKGQPSKPFVGVLSAGINAASPNKELAKEFLENYLLTDEGLEAVNKDKPLGAVALKSYEEELAKDPRIAATMENAQKGEIMPNIPQMSAFWYAVRTAVINAASGRQTVDEALKDAQTGGSGENLYFQSSDNGPQNQRNAPRITFGGPSDSTGSNQNGERSGARSKQRRPQGLPNNTASWFTALTQHGKEDLKFPRGQGVPINTNSSPDDQIGYYRRATRRIRGGDGKMKDLSPRWYFYYLGTGPEAGLPYGANKDGIIWVATEGALNTPKDHIGTRNPANNAAIVLQLPQGTTLPKGFYAEGSRGGSQASSRSSSRSRNSSRNSTPGSSRGTSPARMAGNGGDAALALLLLDRLNQLESKMSGKGQQQQGQTVTKKSAAEASKKPRQKRTATKDYNVTQAFGRRGPEQTQGNFGDQDLNKLGTDYKHWPQIAQFAPSASAFFGMSRISTEETPSGTWLTYTGAIKLDKKDPNFKDQVILLNKHIDAYKTFPPTEPKKDKKKKADETQALPQRQKKQQTVTLLPAADLDDFSKQLQQSMSSADSTQAGGSGHHHHHH

SEQ ID NO: 3773 - protein, 806 aa, Artificial Sequence
  Description of Artificial Sequence: Synthetic polypeptide
MKIEEGKLVIWINGDKGYNGLAEVGKKFEKDTGIKVTVEHPDKLEEKFPQVAATGDGPDIIFWAHDRFGGYAQSGLLAEITPDKAFQDKLYPFTWDAVRYNGKLIAYPIAVEALSLIYNKDLLPNPPKTWEEIPALDKELKAKGKSALMFNLQEPYFTWPLIAADGGYAFKYENGKYDIKDVGVDNAGAKAGLTFLVDLIKNKHMNADTDYSIAEAAFNKGETAMTINGPWAWSNIDTSKVNYGVTVLPTFKGQPSKPFVGVLSAGINAASPNKELAKEFLENYLLTDEGLEAVNKDKPLGAVALKSYEEELAKDPRIAATMENAQKGEIMPNIPQMSAFWYAVRTAVINAASGRQTVDEALKDAQTGGSGENLYFQSSDNGPQNQRNAPRITFGGPSDSTGSNQNGERSGARSKQRRPQGLPNNTASWFTALTQHGKEDLKFPRGQGVPINTNSSPDDQIGYYRRATRRIRGGDGKMKDLSPRWYFYYLGTGPEAGLPYGANKDGIIWVATEGALNTPKDHIGTRNPANNAAILLQLPQGTTLPKGFYAEGSRGGSQASSRSSSRSRNSSRNSTPGSSRGTSPARMAGNGGDAALALLLLDRLNQLESKMSGKGQQQQGQTVTKKSAAEASKKPRQKRTATKAYNVTQAFGRRGPEQTQGNFGDQELIRQGTDYKHWPQIAQFAPSASAFFGMSRIGMEVTPSGTWLTYTGAIKLDDKDPNFKDQVILLNKHIDAYKTFPPTEPKKDKKKKADETQALPQRQKKQQTVTLLPAADLDDFSKQLQQSMSSADSTQAGGSGHHHHHH

SEQ ID NO: 3774 - protein, 806 aa, Artificial Sequence
  Description of Artificial Sequence: Synthetic polypeptide
MKIEEGKLVIWINGDKGYNGLAEVGKKFEKDTGIKVTVEHPDKLEEKFPQVAATGDGPDIIFWAHDRFGGYAQSGLLAEITPDKAFQDKLYPFTWDAVRYNGKLIAYPIAVEALSLIYNKDLLPNPPKTWEEIPALDKELKAKGKSALMFNLQEPYFTWPLIAADGGYAFKYENGKYDIKDVGVDNAGAKAGLTFLVDLIKNKHMNADTDYSIAEAAFNKGETAMTINGPWAWSNIDTSKVNYGVTVLPTFKGQPSKPFVGVLSAGINAASPNKELAKEFLENYLLTDEGLEAVNKDKPLGAVALKSYEEELAKDPRIAATMENAQKGEIMPNIPQMSAFWYAVRTAVINAASGRQTVDEALKDAQTGGSGENLYFQSSDNGPQNQRNAPRITFGGPSDSTGSNQNGERSGARSKQRRPQGLPNNTASWFTALTQHGKEDLKFPEGQGVPINTNSSPDDQIGYYRRATRRIRGGDGKMKDLSPRWYFYYLGTGPEAGLPYGANKDGIIWVATEGALNTPKDHIGTRNPANNAAIVLQLPQGTTLPKGFYAEGSRGGSQASSRSSSRSRNSSRNSTPGSSRGTSPARMAGNGGDAALALLLLDRLNQLESKMSGKGQQQQGQTVTKKSAAEASKKPRQKRTATKAYNVTQAFGRRGPEQTQGNFGDQELIRQGTDYKHWPQIAQFAPSASAFFGMSRIGMEVTPSGTWLTYTGAIKLDDKDPNFKDQVILLNKHIDAYKTFPPTEPKKDKKKKADETQALPQRQKKQQTVTLLPAADLDDFSKQLQQSMSSADSTQAGGSGHHHHHH

SEQ ID NO: 3775 - protein, 806 aa, Artificial Sequence
  Description of Artificial Sequence: Synthetic polypeptide
MKIEEGKLVIWINGDKGYNGLAEVGKKFEKDTGIKVTVEHPDKLEEKFPQVAATGDGPDIIFWAHDRFGGYAQSGLLAEITPDKAFQDKLYPFTWDAVRYNGKLIAYPIAVEALSLIYNKDLLPNPPKTWEEIPALDKELKAKGKSALMFNLQEPYFTWPLIAADGGYAFKYENGKYDIKDVGVDNAGAKAGLTFLVDLIKNKHMNADTDYSIAEAAFNKGETAMTINGPWAWSNIDTSKVNYGVTVLPTFKGQPSKPFVGVLSAGINAASPNKELAKEFLENYLLTDEGLEAVNKDKPLGAVALKSYEEELAKDPRIAATMENAQKGEIMPNIPQMSAFWYAVRTAVINAASGRQTVDEALKDAQTGGSGENLYFQSSDNGPQNQRNAPRITFGGPSDSTGSNQNGERSGARSKQRRPQGLPNNTASWFTALTQHGKEDLKFPRGQGVPINTNSSPDDQIGYYRRATRRIRGGDGKMKDLSPRWYFYYLGTGPEAGLPYGANKDGIIWVATEGALNTPKDHIGTRNPANNAAIVLQLPQGTTLPKGFYAEGSRGGSQASSRSSSRSRNSSRNSTPGSSRGTSPARMAGNGGDAALALLLLDRLNQLESKMSGKGQQQQGQTVTKKSAAEASKKPRQKRTATKGYNVTQAFGRRGPEQTQGNFGDQDLIKLGTDYKHWPQIAQFAPSASAFFGMSRIGMEETPSGTWLTYTGAIKLDKKDPNFKDQVILLNKHIDAYKTFPPTEPKKDKKKKADETQALPQRQKKQQTVTLLPAADLDDFSKQLQQSMSSADSTQAGGSGHHHHHH

SEQ ID NO: 3776 - protein, 806 aa, Artificial Sequence
  Description of Artificial Sequence: Synthetic polypeptide
MKIEEGKLVIWINGDKGYNGLAEVGKKFEKDTGIKVTVEHPDKLEEKFPQVAATGDGPDIIFWAHDRFGGYAQSGLLAEITPDKAFQDKLYPFTWDAVRYNGKLIAYPIAVEALSLIYNKDLLPNPPKTWEEIPALDKELKAKGKSALMFNLQEPYFTWPLIAADGGYAFKYENGKYDIKDVGVDNAGAKAGLTFLVDLIKNKHMNADTDYSIAEAAFNKGETAMTINGPWAWSNIDTSKVNYGVTVLPTFKGQPSKPFVGVLSAGINAASPNKELAKEFLENYLLTDEGLEAVNKDKPLGAVALKSYEEELAKDPRIAATMENAQKGEIMPNIPQMSAFWYAVRTAVINAASGRQTVDEALKDAQTGGSGENLYFQSSDNGPQNQRNAPRITFGGPSDSTGSNQNGERSGARSKQRRPQGLPNNTASWFTALTQHGKEDLKFPRGQGVPINTNSSPDDQIGYYRRATRRIRGGDGKMKDLSPRWYFYYLGTGPEAGLPYGANKDGIIWVATEGALNTPKDHIGTRNPANNAAIVLQLPQGTTIPKGFYAEGSRGGSQASSRSSSRSRNSSRNSTPGSSRGTSPARMAGNGGDAALALLLLDRLNQLESKMSGKGQQQQGQTVTKKSAAEASKKPRQKRTATKAYNVTQAFGRRGPEQTQGNFGDQELIRQGTDYKHWPQIAQFAPSASAFFGMSRIGMEVTPSGTWLTYTGAIKLDDKDPNFKDQVILLNKHIDAYKTFPPTEPKKDKKKKADETQALPQRQKKQQTVTLLPAADLDDFSKQLQQSMSSADSTQAGGSGHHHHHH

SEQ ID NO: 3777 - protein, 806 aa, Artificial Sequence
  Description of Artificial Sequence: Synthetic polypeptide
MKIEEGKLVIWINGDKGYNGLAEVGKKFEKDTGIKVTVEHPDKLEEKFPQVAATGDGPDIIFWAHDRFGGYAQSGLLAEITPDKAFQDKLYPFTWDAVRYNGKLIAYPIAVEALSLIYNKDLLPNPPKTWEEIPALDKELKAKGKSALMFNLQEPYFTWPLIAADGGYAFKYENGKYDIKDVGVDNAGAKAGLTFLVDLIKNKHMNADTDYSIAEAAFNKGETAMTINGPWAWSNIDTSKVNYGVTVLPTFKGQPSKPFVGVLSAGINAASPNKELAKEFLENYLLTDEGLEAVNKDKPLGAVALKSYEEELAKDPRIAATMENAQKGEIMPNIPQMSAFWYAVRTAVINAASGRQTVDEALKDAQTGGSGENLYFQSSDNGPQNQRNAPRITFGGPSDSTGSNQNGERSGARSKQRRPQGLPNNTASWFTALTQHGKEDLKFPRGQGVPINTNSSPDDQIGRYRRATRRIRGGDGKMKDLSPRWYFYYLGTGPEAGLPYGANKDGIIWVATEGALNTPKDHIGTRNPANNAAIVLQLPQGTTLPKGFYAEGSRGGSQASSRSSSRSRNSSRNSTPGSSRGTSPARMAGNGGDAALALLLLDRLNQLESKMSGKGQQQQGQTVTKKSAAEASKKPRQKRTATKAYNVTQAFGRRGPEQTQGNFGDQELIRQGTDYKHWPQIAQFAPSASAFFGMSRIGMEVTPSGTWLTYTGAIKLDDKDPNFKDQVILLNKHIDAYKTFPPTEPKKDKKKKADETQALPQRQKKQQTVTLLPAADLDDFSKQLQQSMSSADSTQAGGSGHHHHHH

SEQ ID NO: 3778 - protein, 806 aa, Artificial Sequence
  Description of Artificial Sequence: Synthetic polypeptide
MKIEEGKLVIWINGDKGYNGLAEVGKKFEKDTGIKVTVEHPDKLEEKFPQVAATGDGPDIIFWAHDRFGGYAQSGLLAEITPDKAFQDKLYPFTWDAVRYNGKLIAYPIAVEALSLIYNKDLLPNPPKTWEEIPALDKELKAKGKSALMFNLQEPYFTWPLIAADGGYAFKYENGKYDIKDVGVDNAGAKAGLTFLVDLIKNKHMNADTDYSIAEAAFNKGETAMTINGPWAWSNIDTSKVNYGVTVLPTFKGQPSKPFVGVLSAGINAASPNKELAKEFLENYLLTDEGLEAVNKDKPLGAVALKSYEEELAKDPRIAATMENAQKGEIMPNIPQMSAFWYAVRTAVINAASGRQTVDEALKDAQTGGSGENLYFQSSDNGPQNQRNAPRITFGGPSDSTGSNQNGERSGARSKQRRPQGLPNNTASWFTPLTQFGKEDLKFPPGQGVPINTNSSPDDQIGYYRRATRRIRGGDGKMKDLPPKWYFYYLGTGPHADLPYGHKHDGVVWVARPGALNTPKDHIGTRNPANNAAIPLQLPPGTKLPKGFYAEGSRGGSQASSRSSSRSRNSSRNSTPGSSRGTSPARMAGNGGDAALALLLLDRLNQLESKMSGKGQQQQGQTVTKKSAAEASKKPRQKRTATKAYNVTQAFGRRGPEQTQGNFGDQELIRQGTDYKHWPQIAQFAPSASAFFGMSRIGMEVTPSGTWLTYTGAIKLDDKDPNFKDQVILLNKHIDAYKTFPPTEPKKDKKKKADETQALPQRQKKQQTVTLLPAADLDDFSKQLQQSMSSADSTQAGGSGHHHHHH

SEQ ID NO: 3779 - protein, 806 aa, Artificial Sequence
  Description of Artificial Sequence: Synthetic polypeptide
MKIEEGKLVIWINGDKGYNGLAEVGKKFEKDTGIKVTVEHPDKLEEKFPQVAATGDGPDIIFWAHDRFGGYAQSGLLAEITPDKAFQDKLYPFTWDAVRYNGKLIAYPIAVEALSLIYNKDLLPNPPKTWEEIPALDKELKAKGKSALMFNLQEPYFTWPLIAADGGYAFKYENGKYDIKDVGVDNAGAKAGLTFLVDLIKNKHMNADTDYSIAEAAFNKGETAMTINGPWAWSNIDTSKVNYGVTVLPTFKGQPSKPFVGVLSAGINAASPNKELAKEFLENYLLTDEGLEAVNKDKPLGAVALKSYEEELAKDPRIAATMENAQKGEIMPNIPQMSAFWYAVRTAVINAASGRQTVDEALKDAQTGGSGENLYFQSSDNGPQNQRNAPRITFGGPSDSTGSNQNGERSGARSKQRRPQGLPNNTASWFTALTQHGKEDLKFPRGQGVPINTNSSPDDQIGYYRRATRRIRGGDGKMKDLSPRWYFYYHGTGPEAGLPYGANKDGIIWVATEGALNTPKDHIGTRNPANNAAIVLQLPQGTTLPKGFYAEGSRGGSQASSRSSSRSRNSSRNSTPGSSRGTSPARMAGNGGDAALALLLLDRLNQLESKMSGKGQQQQGQTVTKKSAAEASKKPRQKRTATKAYNVTQAFGRRGPEQTQGNFGDQELIRQGTDYKHWPQIAQFAPSASAFFGMSRIGMEVTPSGTWLTYTGAIKLDDKDPNFKDQVILLNKHIDAYKTFPPTEPKKDKKKKADETQALPQRQKKQQTVTLLPAADLDDFSKQLQQSMSSADSTQAGGSGHHHHHH

SEQ ID NO: 3780 - protein, 806 aa, Artificial Sequence
  Description of Artificial Sequence: Synthetic polypeptide
MKIEEGKLVIWINGDKGYNGLAEVGKKFEKDTGIKVTVEHPDKLEEKFPQVAATGDGPDIIFWAHDRFGGYAQSGLLAEITPDKAFQDKLYPFTWDAVRYNGKLIAYPIAVEALSLIYNKDLLPNPPKTWEEIPALDKELKAKGKSALMFNLQEPYFTWPLIAADGGYAFKYENGKYDIKDVGVDNAGAKAGLTFLVDLIKNKHMNADTDYSIAEAAFNKGETAMTINGPWAWSNIDTSKVNYGVTVLPTFKGQPSKPFVGVLSAGINAASPNKELAKEFLENYLLTDEGLEAVNKDKPLGAVALKSYEEELAKDPRIAATMENAQKGEIMPNIPQMSAFWYAVRTAVINAASGRQTVDEALKDAQTGGSGENLYFQSSDNGPQNQRNAPRITFGGPSDSTGSNQNGERSGARSKQRRPQGLPNNTASWFTALTQHGKEDLKFPRGQGVPINTNSSPDDQIGYYRRATRRIRGGDGKMKDLSPRWYFYYLGTGPEAGLPYGANKDGIIWVATEGALNTPKDHIGTRDPANNAAIVLQLPQGTTLPKGFYAEGSRGGSQASSRSSSRSRNSSRNSTPGSSRGTSPARMAGNGGDAALALLLLDRLNQLESKMSGKGQQQQGQTVTKKSAAEASKKPRQKRTATKAYNVTQAFGRRGPEQTQGNFGDQELIRQGTDYKHWPQIAQFAPSASAFFGMSRIGMEVTPSGTWLTYTGAIKLDDKDPNFKDQVILLNKHIDAYKTFPPTEPKKDKKKKADETQALPQRQKKQQTVTLLPAADLDDFSKQLQQSMSSADSTQAGGSGHHHHHH

SEQ ID NO: 3781 - protein, 806 aa, Artificial Sequence
  Description of Artificial Sequence: Synthetic polypeptide
MKIEEGKLVIWINGDKGYNGLAEVGKKFEKDTGIKVTVEHPDKLEEKFPQVAATGDGPDIIFWAHDRFGGYAQSGLLAEITPDKAFQDKLYPFTWDAVRYNGKLIAYPIAVEALSLIYNKDLLPNPPKTWEEIPALDKELKAKGKSALMFNLQEPYFTWPLIAADGGYAFKYENGKYDIKDVGVDNAGAKAGLTFLVDLIKNKHMNADTDYSIAEAAFNKGETAMTINGPWAWSNIDTSKVNYGVTVLPTFKGQPSKPFVGVLSAGINAASPNKELAKEFLENYLLTDEGLEAVNKDKPLGAVALKSYEEELAKDPRIAATMENAQKGEIMPNIPQMSAFWYAVRTAVINAASGRQTVDEALKDAQTGGSGENLYFQSSDNGPQNQRNAPRITFGGPSDSTGSNQNGERSGARSKQRRPQGLPNNTASWFTALTQHGKEDLKFPRGQGVPINTNSSPDDQIGYYRRATRRIRGGDGKMKDLSPYWYFYYLGTGPEAGLPYGANKDGIIWVATEGALNTPKDHIGTRNPANNAAIVLQLPQGTTLPKGFYAEGSRGGSQASSRSSSRSRNSSRNSTPGSSRGTSPARMAGNGGDAALALLLLDRLNQLESKMSGKGQQQQGQTVTKKSAAEASKKPRQKRTATKAYNVTQAFGRRGPEQTQGNFGDQELIRQGTDYKHWPQIAQFAPSASAFFGMSRIGMEVTPSGTWLTYTGAIKLDDKDPNFKDQVILLNKHIDAYKTFPPTEPKKDKKKKADETQALPQRQKKQQTVTLLPAADLDDFSKQLQQSMSSADSTQAGGSGHHHHHH

SEQ ID NO: 3782 - protein, 806 aa, Artificial Sequence
  Description of Artificial Sequence: Synthetic polypeptide
MKIEEGKLVIWINGDKGYNGLAEVGKKFEKDTGIKVTVEHPDKLEEKFPQVAATGDGPDIIFWAHDRFGGYAQSGLLAEITPDKAFQDKLYPFTWDAVRYNGKLIAYPIAVEALSLIYNKDLLPNPPKTWEEIPALDKELKAKGKSALMFNLQEPYFTWPLIAADGGYAFKYENGKYDIKDVGVDNAGAKAGLTFLVDLIKNKHMNADTDYSIAEAAFNKGETAMTINGPWAWSNIDTSKVNYGVTVLPTFKGQPSKPFVGVLSAGINAASPNKELAKEFLENYLLTDEGLEAVNKDKPLGAVALKSYEEELAKDPRIAATMENAQKGEIMPNIPQMSAFWYAVRTAVINAASGRQTVDEALKDAQTGGSGENLYFQSSDNGPQNQRNAPRITFGGPSDSTGSNQNGERSGARSKQRRPQGLPNNTASWFTALTQHGKEDLKFPRGQGVPINTNSSPDDQIGYYRRATRRIRGGDGKMKDLSPRWYFYYLGTGPEAGLPYGANKDGIIWVAAEGALNTPKDHIGTRNPANNAAIVLQLPQGTTLPKGFYAEGSRGGSQASSRSSSRSRNSSRNSTPGSSRGTSPARMAGNGGDAALALLLLDRLNQLESKMSGKGQQQQGQTVTKKSAAEASKKPRQKRTATKAYNVTQAFGRRGPEQTQGNFGDQELIRQGTDYKHWPQIAQFAPSASAFFGMSRIGMEVTPSGTWLTYTGAIKLDDKDPNFKDQVILLNKHIDAYKTFPPTEPKKDKKKKADETQALPQRQKKQQTVTLLPAADLDDFSKQLQQSMSSADSTQAGGSGHHHHHH

SEQ ID NO: 3783 - protein, 806 aa, Artificial Sequence
  Description of Artificial Sequence: Synthetic polypeptide
MKIEEGKLVIWINGDKGYNGLAEVGKKFEKDTGIKVTVEHPDKLEEKFPQVAATGDGPDIIFWAHDRFGGYAQSGLLAEITPDKAFQDKLYPFTWDAVRYNGKLIAYPIAVEALSLIYNKDLLPNPPKTWEEIPALDKELKAKGKSALMFNLQEPYFTWPLIAADGGYAFKYENGKYDIKDVGVDNAGAKAGLTFLVDLIKNKHMNADTDYSIAEAAFNKGETAMTINGPWAWSNIDTSKVNYGVTVLPTFKGQPSKPFVGVLSAGINAASPNKELAKEFLENYLLTDEGLEAVNKDKPLGAVALKSYEEELAKDPRIAATMENAQKGEIMPNIPQMSAFWYAVRTAVINAASGRQTVDEALKDAQTGGSGENLYFQSSDNGPQNQRNAPRITFGGPSDSTGSNQNGERSGARSKQRRPQGLPNNTASWFTALTQHGKEDLKFPKGQGVPINTNSKPDDQIGYYRREVRRYRGGDGQMKDLNPRWYFYYLGTGPEAGLPYGANKDGIIWVATEGALNTPKDHIGTRNPANNAAIVLQLPQGTTLPKGFYAEGSRGGSQASSRSSSRSRNSSRNSTPGSSRGTSPARMAGNGGDAALALLLLDRLNQLESKMSGKGQQQQGQTVTKKSAAEASKKPRQKRTATKAYNVTQAFGRRGPEQTQGNFGDQELIRQGTDYKHWPQIAQFAPSASAFFGMSRIGMEVTPSGTWLTYTGAIKLDDKDPNFKDQVILLNKHIDAYKTFPPTEPKKDKKKKADETQALPQRQKKQQTVTLLPAADLDDFSKQLQQSMSSADSTQAGGSGHHHHHH

SEQ ID NO: 3784 - protein, 806 aa, Artificial Sequence
  Description of Artificial Sequence: Synthetic polypeptide
MKIEEGKLVIWINGDKGYNGLAEVGKKFEKDTGIKVTVEHPDKLEEKFPQVAATGDGPDIIFWAHDRFGGYAQSGLLAEITPDKAFQDKLYPFTWDAVRYNGKLIAYPIAVEALSLIYNKDLLPNPPKTWEEIPALDKELKAKGKSALMFNLQEPYFTWPLIAADGGYAFKYENGKYDIKDVGVDNAGAKAGLTFLVDLIKNKHMNADTDYSIAEAAFNKGETAMTINGPWAWSNIDTSKVNYGVTVLPTFKGQPSKPFVGVLSAGINAASPNKELAKEFLENYLLTDEGLEAVNKDKPLGAVALKSYEEELAKDPRIAATMENAQKGEIMPNIPQMSAFWYAVRTAVINAASGRQTVDEALKDAQTGGSGENLYFQSSDNGPQNQRNAPRITFGGPSDSTGSNQNGERSGARSKQRRPQGLPNNTASWFTALTQHGKEDLKFPRGQGVPINTNSSPDDQIGYYRRATRRIRGGDGKMKDLSPRWYFYYLGTGPEAGLPYGANKDGIIWVATEGALNTPKDHIGTRNPANNAAIVLQLPQGTTLPKGFYAEGSRGGSQASSRSSSRSRNSSRNSTPGSSRGTSPARMAGNGGDAALALLLLDRLNQLESKMSGKGQQQQGQTVTKKSAAEASKKPRQKRTATKAYNVTQAFGRRGPEQTQGNFGDQELIRQGTDYKHWPQIAQFAPSASAFFGMSRIGMEVTPSGTWLTYTGAIKLDDKDPNFKDQVKLLNKHIDAYKTFPPTEPKKDKKKKADETQALPQRQKKQQTVTLLPAADLDDFSKQLQQSMSSADSTQAGGSGHHHHHH

SEQ ID NO: 3785 - protein, 806 aa, Artificial Sequence
  Description of Artificial Sequence: Synthetic polypeptide
MKIEEGKLVIWINGDKGYNGLAEVGKKFEKDTGIKVTVEHPDKLEEKFPQVAATGDGPDIIFWAHDRFGGYAQSGLLAEITPDKAFQDKLYPFTWDAVRYNGKLIAYPIAVEALSLIYNKDLLPNPPKTWEEIPALDKELKAKGKSALMFNLQEPYFTWPLIAADGGYAFKYENGKYDIKDVGVDNAGAKAGLTFLVDLIKNKHMNADTDYSIAEAAFNKGETAMTINGPWAWSNIDTSKVNYGVTVLPTFKGQPSKPFVGVLSAGINAASPNKELAKEFLENYLLTDEGLEAVNKDKPLGAVALKSYEEELAKDPRIAATMENAQKGEIMPNIPQMSAFWYAVRTAVINAASGRQTVDEALKDAQTGGSGENLYFQSSDNGPQNQRNAPRITFGGPSDSTGSNQNGERSGARSKQRRPQGLPNNTASWFTALTQHGKEDLKFPRGQGVPINTNSSPDDQIGYYRRATRRIRGGDGKMKDLSPRWYFYYLGTGPEAGLPYGANKDGIIWVATEGALNTPKDHIGTRNPANNAAIVLQLPQGTTLPKGFYAEGSRGGSQASSRSSSRSRNSSRNSTPGSSRGTSPARMAGNGGDAALALLLLDRLNQLESKMSGKGQQQQGQTVTKKSAAEASKKPRQKRTPTKAYNVTQAFGRRGPEQTQGNFGDQELIRQGTDYKHWPQIAQFAPSASAFFGMSRIGMEVTPSGTWLTYTGAIKLDDKDPNFKDQVILLNKHIDAYKTFPPTEPKKDKKKKADETQALPQRQKKQQTVTLLPAADLDDFSKQLQQSMSSADSTQAGGSGHHHHHH

SEQ ID NO: 3786 - protein, 806 aa, Artificial Sequence
  Description of Artificial Sequence: Synthetic polypeptide
MKIEEGKLVIWINGDKGYNGLAEVGKKFEKDTGIKVTVEHPDKLEEKFPQVAATGDGPDIIFWAHDRFGGYAQSGLLAEITPDKAFQDKLYPFTWDAVRYNGKLIAYPIAVEALSLIYNKDLLPNPPKTWEEIPALDKELKAKGKSALMFNLQEPYFTWPLIAADGGYAFKYENGKYDIKDVGVDNAGAKAGLTFLVDLIKNKHMNADTDYSIAEAAFNKGETAMTINGPWAWSNIDTSKVNYGVTVLPTFKGQPSKPFVGVLSAGINAASPNKELAKEFLENYLLTDEGLEAVNKDKPLGAVALKSYEEELAKDPRIAATMENAQKGEIMPNIPQMSAFWYAVRTAVINAASGRQTVDEALKDAQTGGSGENLYFQSSDNGPQNQRNAPRITFGGPSDSTGSNQNGERSGARSKQRRPQGLPNNTASWFTALTQHGKEDLKFPRGQGVPINTNSSPDDQIGYYRRATRRIRGGDGKMKDLSPRWYFYYLGTGPEAGLPYGANKDGIIWVATEGALNTPKDHIGTRNPANNAAIVLQLPQGTTLPKGFYAEGSRGGSQASSRSSSRSRNSSRNSTPGSSRGTSPARMAGNGGDAALALLLLDRLNQLESKMSGKGQQQQGQTVTKKSAAEASKKPRQKRTATKAYNVTQAFGRRGPEQTQGNFGDQELIRQGTDYKHWPQIAQFAPSASAFFGMSRIGMEVTPSGVWLTYTGAIKLDDKDPNFKDQVILLNKHIDAYKTFPPTEPKKDKKKKADETQALPQRQKKQQTVTLLPAADLDDFSKQLQQSMSSADSTQAGGSGHHHHHH

SEQ ID NO: 3787 - protein, 806 aa, Artificial Sequence
  Description of Artificial Sequence: Synthetic polypeptide
MKIEEGKLVIWINGDKGYNGLAEVGKKFEKDTGIKVTVEHPDKLEEKFPQVAATGDGPDIIFWAHDRFGGYAQSGLLAEITPDKAFQDKLYPFTWDAVRYNGKLIAYPIAVEALSLIYNKDLLPNPPKTWEEIPALDKELKAKGKSALMFNLQEPYFTWPLIAADGGYAFKYENGKYDIKDVGVDNAGAKAGLTFLVDLIKNKHMNADTDYSIAEAAFNKGETAMTINGPWAWSNIDTSKVNYGVTVLPTFKGQPSKPFVGVLSAGINAASPNKELAKEFLENYLLTDEGLEAVNKDKPLGAVALKSYEEELAKDPRIAATMENAQKGEIMPNIPQMSAFWYAVRTAVINAASGRQTVDEALKDAQTGGSGENLYFQSSDNGPQNQRNAPRITFGGPSDSTGSNQNGERSGARSKQRRPQGLPNNTASWFTALTQNGKEDLKFPRGQGVPINTNSSPDDQIGYYRRATRRIRGGDGKMKDLSPRWYFYYLGTGPEAGLPYGANKDGIIWVATEGALNTPKDHIGTRNPANNAAIVLQLPQGTTLPKGFYAEGSRGGSQASSRSSSRSRNSSRNSTPGSSRGTSPARMAGNGGDAALALLLLDRLNQLESKMSGKGQQQQGQTVTKKSAAEASKKPRQKRTATKAYNVTQAFGRRGPEQTQGNFGDQELIRQGTDYKHWPQIAQFAPSASAFFGMSRIGMEVTPSGTWLTYTGAIKLDDKDPNFKDQVILLNKHIDAYKTFPPTEPKKDKKKKADETQALPQRQKKQQTVTLLPAADLDDFSKQLQQSMSSADSTQAGGSGHHHHHH

SEQ ID NO: 3788 - protein, 806 aa, Artificial Sequence
  Description of Artificial Sequence: Synthetic polypeptide
MKIEEGKLVIWINGDKGYNGLAEVGKKFEKDTGIKVTVEHPDKLEEKFPQVAATGDGPDIIFWAHDRFGGYAQSGLLAEITPDKAFQDKLYPFTWDAVRYNGKLIAYPIAVEALSLIYNKDLLPNPPKTWEEIPALDKELKAKGKSALMFNLQEPYFTWPLIAADGGYAFKYENGKYDIKDVGVDNAGAKAGLTFLVDLIKNKHMNADTDYSIAEAAFNKGETAMTINGPWAWSNIDTSKVNYGVTVLPTFKGQPSKPFVGVLSAGINAASPNKELAKEFLENYLLTDEGLEAVNKDKPLGAVALKSYEEELAKDPRIAATMENAQKGEIMPNIPQMSAFWYAVRTAVINAASGRQTVDEALKDAQTGGSGENLYFQSSDNGPQNQRNAPRITFGGPSDSTGSNQNGERSGARSKQRRPQGLPNNTASWFTALTQHGKEDLKFPRGQGVPINTNSSPDDQIGYYRRATRRIRGGDGKMKDLSPRWYFYYLGTGPEAGLPYGANKDGIIWVATEGALNTPKDHIGTRNPANNAAIVLQLPQGTTLPKGFYAEGSRGGSQASSRSSSRSRNSSRNSTPGSSRGTSPARMAGNGGDAALALLLLDRLNQLESKMSGKGQQQQGQTVTKKSAAEASKKPRQKRTATKAYNVTQAFGRRGPEQTQGNFGDQELIRQGTDYKHWPQIAQFAPSASAFFGMSRIGMEVTPSGTWLTYTGAIKLDSKDPNFKDQVILLNKHIDAYKTFPPTEPKKDKKKKADETQALPQRQKKQQTVTLLPAADLDDFSKQLQQSMSSADSTQAGGSGHHHHHH

SEQ ID NO: 3789 - protein, 806 aa, Artificial Sequence
  Description of Artificial Sequence: Synthetic polypeptide
MKIEEGKLVIWINGDKGYNGLAEVGKKFEKDTGIKVTVEHPDKLEEKFPQVAATGDGPDIIFWAHDRFGGYAQSGLLAEITPDKAFQDKLYPFTWDAVRYNGKLIAYPIAVEALSLIYNKDLLPNPPKTWEEIPALDKELKAKGKSALMFNLQEPYFTWPLIAADGGYAFKYENGKYDIKDVGVDNAGAKAGLTFLVDLIKNKHMNADTDYSIAEAAFNKGETAMTINGPWAWSNIDTSKVNYGVTVLPTFKGQPSKPFVGVLSAGINAASPNKELAKEFLENYLLTDEGLEAVNKDKPLGAVALKSYEEELAKDPRIAATMENAQKGEIMPNIPQMSAFWYAVRTAVINAASGRQTVDEALKDAQTGGSGENLYFQSSDNGPQNQRNAPRITFGGPSDSTGSNQNGERSGARSKQRRPQGLPNNTASWFTALTQHGKEDLKFPRGQGVPINTNSSPDDQIGYYRRITRRIRGGDGKMKDLSPRWYFYYLGTGPEAGLPYGANKDGIIWVATEGALNTPKDHIGTRNPANNAAIVLQLPQGTTLPKGFYAEGSRGGSQASSRSSSRSRNSSRNSTPGSSRGTSPARMAGNGGDAALALLLLDRLNQLESKMSGKGQQQQGQTVTKKSAAEASKKPRQKRTATKAYNVTQAFGRRGPEQTQGNFGDQELIRQGTDYKHWPQIAQFAPSASAFFGMSRIGMEVTPSGTWLTYTGAIKLDDKDPNFKDQVILLNKHIDAYKTFPPTEPKKDKKKKADETQALPQRQKKQQTVTLLPAADLDDFSKQLQQSMSSADSTQAGGSGHHHHHH

SEQ ID NO: 3790 - protein, 806 aa, Artificial Sequence
  Description of Artificial Sequence: Synthetic polypeptide
MKIEEGKLVIWINGDKGYNGLAEVGKKFEKDTGIKVTVEHPDKLEEKFPQVAATGDGPDIIFWAHDRFGGYAQSGLLAEITPDKAFQDKLYPFTWDAVRYNGKLIAYPIAVEALSLIYNKDLLPNPPKTWEEIPALDKELKAKGKSALMFNLQEPYFTWPLIAADGGYAFKYENGKYDIKDVGVDNAGAKAGLTFLVDLIKNKHMNADTDYSIAEAAFNKGETAMTINGPWAWSNIDTSKVNYGVTVLPTFKGQPSKPFVGVLSAGINAASPNKELAKEFLENYLLTDEGLEAVNKDKPLGAVALKSYEEELAKDPRIAATMENAQKGEIMPNIPQMSAFWYAVRTAVINAASGRQTVDEALKDAQTGGSGENLYFQSSDNGPQNQRNAPRITFGGPSDSTGSNQNGERSGARSKQRRPQGLPNNTASWFTALTQHGKEDLKFPRGQGVPINTNSSPDDQIGYYRRATRRIRGGDGKMKDLSPRWYFYYLGHGPEAGLPYGANKDGIIWVATEGALNTPKDHIGTRNPANNAAIVLQLPQGTTLPKGFYAEGSRGGSQASSRSSSRSRNSSRNSTPGSSRGTSPARMAGNGGDAALALLLLDRLNQLESKMSGKGQQQQGQTVTKKSAAEASKKPRQKRTATKAYNVTQAFGRRGPEQTQGNFGDQELIRQGTDYKHWPQIAQFAPSASAFFGMSRIGMEVTPSGTWLTYTGAIKLDDKDPNFKDQVILLNKHIDAYKTFPPTEPKKDKKKKADETQALPQRQKKQQTVTLLPAADLDDFSKQLQQSMSSADSTQAGGSGHHHHHH

SEQ ID NO: 3791 - protein, 806 aa, Artificial Sequence
  Description of Artificial Sequence: Synthetic polypeptide
MKIEEGKLVIWINGDKGYNGLAEVGKKFEKDTGIKVTVEHPDKLEEKFPQVAATGDGPDIIFWAHDRFGGYAQSGLLAEITPDKAFQDKLYPFTWDAVRYNGKLIAYPIAVEALSLIYNKDLLPNPPKTWEEIPALDKELKAKGKSALMFNLQEPYFTWPLIAADGGYAFKYENGKYDIKDVGVDNAGAKAGLTFLVDLIKNKHMNADTDYSIAEAAFNKGETAMTINGPWAWSNIDTSKVNYGVTVLPTFKGQPSKPFVGVLSAGINAASPNKELAKEFLENYLLTDEGLEAVNKDKPLGAVALKSYEEELAKDPRIAATMENAQKGEIMPNIPQMSAFWYAVRTAVINAASGRQTVDEALKDAQTGGSGENLYFQSSDNGPQNQRNAPRITFGGPSDSTGSNQNGERSGARSKQRRPQGLPNNTASWFTALTQHGKEDLKFPRGQGVPINTNSSPDDQIGYYRRATRRIRGGDGKMKDLSPRWYFYYLGTGPEAGLPYGANKDGIIWVATEGALNTPKDHIGTRNPANNAAINLQLPQGTTLPKGFYAEGSRGGSQASSRSSSRSRNSSRNSTPGSSRGTSPARMAGNGGDAALALLLLDRLNQLESKMSGKGQQQQGQTVTKKSAAEASKKPRQKRTATKAYNVTQAFGRRGPEQTQGNFGDQELIRQGTDYKHWPQIAQFAPSASAFFGMSRIGMEVTPSGTWLTYTGAIKLDDKDPNFKDQVILLNKHIDAYKTFPPTEPKKDKKKKADETQALPQRQKKQQTVTLLPAADLDDFSKQLQQSMSSADSTQAGGSGHHHHHH

SEQ ID NO: 3792 - protein, 806 aa, Artificial Sequence
  Description of Artificial Sequence: Synthetic polypeptide
MKIEEGKLVIWINGDKGYNGLAEVGKKFEKDTGIKVTVEHPDKLEEKFPQVAATGDGPDIIFWAHDRFGGYAQSGLLAEITPDKAFQDKLYPFTWDAVRYNGKLIAYPIAVEALSLIYNKDLLPNPPKTWEEIPALDKELKAKGKSALMFNLQEPYFTWPLIAADGGYAFKYENGKYDIKDVGVDNAGAKAGLTFLVDLIKNKHMNADTDYSIAEAAFNKGETAMTINGPWAWSNIDTSKVNYGVTVLPTFKGQPSKPFVGVLSAGINAASPNKELAKEFLENYLLTDEGLEAVNKDKPLGAVALKSYEEELAKDPRIAATMENAQKGEIMPNIPQMSAFWYAVRTAVINAASGRQTVDEALKDAQTGGSGENLYFQSSDNGPQNQRNAPRITFGGPSDSTGSNQNGERSGARSKQRRPQGLPNNTASWFTALTQHGKEDLKFPRGQGVPINTNSSPDDQIGYYRRAIRRIRGGDGKMKDLSPRWYFYYLGTGPEAGLPYGANKDGIIWVATEGALNTPKDHIGTRNPANNAAIVLQLPQGTTLPKGFYAEGSRGGSQASSRSSSRSRNSSRNSTPGSSRGTSPARMAGNGGDAALALLLLDRLNQLESKMSGKGQQQQGQTVTKKSAAEASKKPRQKRTATKAYNVTQAFGRRGPEQTQGNFGDQELIRQGTDYKHWPQIAQFAPSASAFFGMSRIGMEVTPSGTWLTYTGAIKLDDKDPNFKDQVILLNKHIDAYKTFPPTEPKKDKKKKADETQALPQRQKKQQTVTLLPAADLDDFSKQLQQSMSSADSTQAGGSGHHHHHH

SEQ ID NO: 3793 - protein, 806 aa, Artificial Sequence
  Description of Artificial Sequence: Synthetic polypeptide
MKIEEGKLVIWINGDKGYNGLAEVGKKFEKDTGIKVTVEHPDKLEEKFPQVAATGDGPDIIFWAHDRFGGYAQSGLLAEITPDKAFQDKLYPFTWDAVRYNGKLIAYPIAVEALSLIYNKDLLPNPPKTWEEIPALDKELKAKGKSALMFNLQEPYFTWPLIAADGGYAFKYENGKYDIKDVGVDNAGAKAGLTFLVDLIKNKHMNADTDYSIAEAAFNKGETAMTINGPWAWSNIDTSKVNYGVTVLPTFKGQPSKPFVGVLSAGINAASPNKELAKEFLENYLLTDEGLEAVNKDKPLGAVALKSYEEELAKDPRIAATMENAQKGEIMPNIPQMSAFWYAVRTAVINAASGRQTVDEALKDAQTGGSGENLYFQSSDNGPQNQRNAPRITFGGPSDSTGSNQNGERSGARSKQRRPQGLPNNTASWFTALTQHGKEDLKFPRGQGVPINTNSSPDDQIGYYRRATRRIRGGDGKMKDLSPRWYFYYLGTGPEAGLPYGANKDGVIWVATEGALNTPKDHIGTRNPANNAAIVLQLPQGTTLPKGFYAEGSRGGSQASSRSSSRSRNSSRNSTPGSSRGTSPARMAGNGGDAALALLLLDRLNQLESKMSGKGQQQQGQTVTKKSAAEASKKPRQKRTATKAYNVTQAFGRRGPEQTQGNFGDQELIRQGTDYKHWPQIAQFAPSASAFFGMSRIGMEVTPSGTWLTYTGAIKLDDKDPNFKDQVILLNKHIDAYKTFPPTEPKKDKKKKADETQALPQRQKKQQTVTLLPAADLDDFSKQLQQSMSSADSTQAGGSGHHHHHH

SEQ ID NO: 3794 - protein, 806 aa, Artificial Sequence
  Description of Artificial Sequence: Synthetic polypeptide
MKIEEGKLVIWINGDKGYNGLAEVGKKFEKDTGIKVTVEHPDKLEEKFPQVAATGDGPDIIFWAHDRFGGYAQSGLLAEITPDKAFQDKLYPFTWDAVRYNGKLIAYPIAVEALSLIYNKDLLPNPPKTWEEIPALDKELKAKGKSALMFNLQEPYFTWPLIAADGGYAFKYENGKYDIKDVGVDNAGAKAGLTFLVDLIKNKHMNADTDYSIAEAAFNKGETAMTINGPWAWSNIDTSKVNYGVTVLPTFKGQPSKPFVGVLSAGINAASPNKELAKEFLENYLLTDEGLEAVNKDKPLGAVALKSYEEELAKDPRIAATMENAQKGEIMPNIPQMSAFWYAVRTAVINAASGRQTVDEALKDAQTGGSGENLYFQSSDNGPQNQRNAPRITFGGPSDSTGSNQNGERSGARSKQRRPQGLPNNTASWFTALTQHGKEDLKFPRGQGVPINTNSSPDDQIGYYRRATRRIRGGDGKMKDLSPRWYFYYLGTGPEAGLPYGANKDGIIWVATEGALNTPKSHIGTRNPANNAAIVLQLPQGTTLPKGFYAEGSRGGSQASSRSSSRSRNSSRNSTPGSSRGTSPARMAGNGGDAALALLLLDRLNQLESKMSGKGQQQQGQTVTKKSAAEASKKPRQKRTATKAYNVTQAFGRRGPEQTQGNFGDQELIRQGTDYKHWPQIAQFAPSASAFFGMSRIGMEVTPSGTWLTYTGAIKLDDKDPNFKDQVILLNKHIDAYKTFPPTEPKKDKKKKADETQALPQRQKKQQTVTLLPAADLDDFSKQLQQSMSSADSTQAGGSGHHHHHH

SEQ ID NO: 3795 - protein, 806 aa, Artificial Sequence
  Description of Artificial Sequence: Synthetic polypeptide
MKIEEGKLVIWINGDKGYNGLAEVGKKFEKDTGIKVTVEHPDKLEEKFPQVAATGDGPDIIFWAHDRFGGYAQSGLLAEITPDKAFQDKLYPFTWDAVRYNGKLIAYPIAVEALSLIYNKDLLPNPPKTWEEIPALDKELKAKGKSALMFNLQEPYFTWPLIAADGGYAFKYENGKYDIKDVGVDNAGAKAGLTFLVDLIKNKHMNADTDYSIAEAAFNKGETAMTINGPWAWSNIDTSKVNYGVTVLPTFKGQPSKPFVGVLSAGINAASPNKELAKEFLENYLLTDEGLEAVNKDKPLGAVALKSYEEELAKDPRIAATMENAQKGEIMPNIPQMSAFWYAVRTAVINAASGRQTVDEALKDAQTGGSGENLYFQSSDNGPQNQRNAPRITFGGPSDSTGSNQNGERSGARSKQRRPQGLPNNTASWFTALTQHGKEDLKFPRGQGVPINTNSSPDDQIGYYRRATRRIRGGDGKMKDLSPRWYFYYLGTGPEAGLPYGANKDGIIWVATEGALNTPKDHIGTRNPANNAAIVLQLPQGTTLPKGFYAEGSRGGSQASSRSSSRSRNSSRNSTPGSSRGTSPARMAGNGGDAALALLLLDRLNQLESKMSGKGQQQQGQTVTKKSAAEASKKPRQKRTATKHYNVTQAFGRRGPEQTQGNFGDQELIRQGTDYKHWPQIAQFAPSASAFFGMSRIGMEVTPSGTWLTYTGAIKLDDKDPNFKDQVILLNKHIDAYKTFPPTEPKKDKKKKADETQALPQRQKKQQTVTLLPAADLDDFSKQLQQSMSSADSTQAGGSGHHHHHH

SEQ ID NO: 3796 - protein, 806 aa, Artificial Sequence
  Description of Artificial Sequence: Synthetic polypeptide
MKIEEGKLVIWINGDKGYNGLAEVGKKFEKDTGIKVTVEHPDKLEEKFPQVAATGDGPDIIFWAHDRFGGYAQSGLLAEITPDKAFQDKLYPFTWDAVRYNGKLIAYPIAVEALSLIYNKDLLPNPPKTWEEIPALDKELKAKGKSALMFNLQEPYFTWPLIAADGGYAFKYENGKYDIKDVGVDNAGAKAGLTFLVDLIKNKHMNADTDYSIAEAAFNKGETAMTINGPWAWSNIDTSKVNYGVTVLPTFKGQPSKPFVGVLSAGINAASPNKELAKEFLENYLLTDEGLEAVNKDKPLGAVALKSYEEELAKDPRIAATMENAQKGEIMPNIPQMSAFWYAVRTAVINAASGRQTVDEALKDAQTGGSGENLYFQSSDNGPQNQRNAPRITFGGPSDSTGSNQNGERSGARSKQRRPQGLPNNTASWFTGLTQFGKEDLKFPPGQGVPINTNSSPDDQIGYYRRATRRIRGGDGKMKDLPPRWYFYYLGTGPHADLPYGQKQDGVFWVARPGALNTPKDHIGTRNPANNAAIPLQLPPGTKLPKGFYAEGSRGGSQASSRSSSRSRNSSRNSTPGSSRGTSPARMAGNGGDAALALLLLDRLNQLESKMSGKGQQQQGQTVTKKSAAEASKKPRQKRTATKAYNVTQAFGRRGPEQTQGNFGDQELIRQGTDYKHWPQIAQFAPSASAFFGMSRIGMEVTPSGTWLTYTGAIKLDDKDPNFKDQVILLNKHIDAYKTFPPTEPKKDKKKKADETQALPQRQKKQQTVTLLPAADLDDFSKQLQQSMSSADSTQAGGSGHHHHHH

SEQ ID NO: 3797 - protein, 806 aa, Artificial Sequence
  Description of Artificial Sequence: Synthetic polypeptide
MKIEEGKLVIWINGDKGYNGLAEVGKKFEKDTGIKVTVEHPDKLEEKFPQVAATGDGPDIIFWAHDRFGGYAQSGLLAEITPDKAFQDKLYPFTWDAVRYNGKLIAYPIAVEALSLIYNKDLLPNPPKTWEEIPALDKELKAKGKSALMFNLQEPYFTWPLIAADGGYAFKYENGKYDIKDVGVDNAGAKAGLTFLVDLIKNKHMNADTDYSIAEAAFNKGETAMTINGPWAWSNIDTSKVNYGVTVLPTFKGQPSKPFVGVLSAGINAASPNKELAKEFLENYLLTDEGLEAVNKDKPLGAVALKSYEEELAKDPRIAATMENAQKGEIMPNIPQMSAFWYAVRTAVINAASGRQTVDEALKDAQTGGSGENLYFQSSDNGPQNQRNAPRITFGGPSDSTGSNQNGERSGARSKQRRPQGLPNNTASWFTALTQHGKEDLKFPRGQGVPINTNSSPDDQIGYYRRATRRKRGGDGKMKDLSPRWYFYYLGTGPEAGLPYGANKDGIIWVATEGALNTPKDHIGTRNPANNAAIVLQLPQGTTLPKGFYAEGSRGGSQASSRSSSRSRNSSRNSTPGSSRGTSPARMAGNGGDAALALLLLDRLNQLESKMSGKGQQQQGQTVTKKSAAEASKKPRQKRTATKAYNVTQAFGRRGPEQTQGNFGDQELIRQGTDYKHWPQIAQFAPSASAFFGMSRIGMEVTPSGTWLTYTGAIKLDDKDPNFKDQVILLNKHIDAYKTFPPTEPKKDKKKKADETQALPQRQKKQQTVTLLPAADLDDFSKQLQQSMSSADSTQAGGSGHHHHHH

SEQ ID NO: 3798 - protein, 806 aa, Artificial Sequence
  Description of Artificial Sequence: Synthetic polypeptide
MKIEEGKLVIWINGDKGYNGLAEVGKKFEKDTGIKVTVEHPDKLEEKFPQVAATGDGPDIIFWAHDRFGGYAQSGLLAEITPDKAFQDKLYPFTWDAVRYNGKLIAYPIAVEALSLIYNKDLLPNPPKTWEEIPALDKELKAKGKSALMFNLQEPYFTWPLIAADGGYAFKYENGKYDIKDVGVDNAGAKAGLTFLVDLIKNKHMNADTDYSIAEAAFNKGETAMTINGPWAWSNIDTSKVNYGVTVLPTFKGQPSKPFVGVLSAGINAASPNKELAKEFLENYLLTDEGLEAVNKDKPLGAVALKSYEEELAKDPRIAATMENAQKGEIMPNIPQMSAFWYAVRTAVINAASGRQTVDEALKDAQTGGSGENLYFQSSDNGPQNQRNAPRITFGGPSDSTGSNQNGERSGARSKQRRPQGLPNNTASWFTALTQHGKEDLKFPRGQGVPINTNSSPDDQIGYYRRATRRIRGGDGKMKDLSPRWYFYYLGTGPEAGLPYGANKDGIIWVATEGALNTPKDHIGTRNPANNAAIVLQLPQGTTLPKGFYAEGSRGGSQASSRSSSRSRNSSRNSTPGSSRGTSPARMAGNGGDAALALLLLDRLNQLESKMSGKGQQQQGQTVTKKSAAEMSKKPRQKRTATKGYNVTQCFGPRGPEQTQGNFGDAELIKKGTDYKHWPQIAQFAPSASAFFGMSRISSKETPSGTWLTYTGAIKLDKDDPNFKDQVILLNKHIDAYKTFPPTEPKKDKKKKADETQALPQRQKKQQTVTLLPAADLDDFSKQLQQSMSSADSTQAGGSGHHHHHH

SEQ ID NO: 3799 - protein, 806 aa, Artificial Sequence
  Description of Artificial Sequence: Synthetic polypeptide
MKIEEGKLVIWINGDKGYNGLAEVGKKFEKDTGIKVTVEHPDKLEEKFPQVAATGDGPDIIFWAHDRFGGYAQSGLLAEITPDKAFQDKLYPFTWDAVRYNGKLIAYPIAVEALSLIYNKDLLPNPPKTWEEIPALDKELKAKGKSALMFNLQEPYFTWPLIAADGGYAFKYENGKYDIKDVGVDNAGAKAGLTFLVDLIKNKHMNADTDYSIAEAAFNKGETAMTINGPWAWSNIDTSKVNYGVTVLPTFKGQPSKPFVGVLSAGINAASPNKELAKEFLENYLLTDEGLEAVNKDKPLGAVALKSYEEELAKDPRIAATMENAQKGEIMPNIPQMSAFWYAVRTAVINAASGRQTVDEALKDAQTGGSGENLYFQSSDNGPQNQRNAPRITFGGPSDSTGSNQNGERSGARSKQRRPQGLPNNTASWFTGLTQQGKEDLKFPPGQGVPINTNSSPDDQIGYYRRATRRIRGGDGKMKDLPPKWYFYYLGTGPHADLPYGQKQDGVFWVARPGALNTPKDHIGTRNPANNAAIPLQLPPGTKLPKGFYAEGSRGGSQASSRSSSRSRNSSRNSTPGSSRGTSPARMAGNGGDAALALLLLDRLNQLESKMSGKGQQQQGQTVTKKSAAEASKKPRQKRTATKAYNVTQAFGRRGPEQTQGNFGDQELIRQGTDYKHWPQIAQFAPSASAFFGMSRIGMEVTPSGTWLTYTGAIKLDDKDPNFKDQVILLNKHIDAYKTFPPTEPKKDKKKKADETQALPQRQKKQQTVTLLPAADLDDFSKQLQQSMSSADSTQAGGSGHHHHHH

SEQ ID NO: 3800 - protein, 4 aa, Artificial Sequence
  Description of Artificial Sequence: Synthetic peptide
GSGR

SEQ ID NO: 3801 - protein, 5 aa, Artificial Sequence
  Description of Artificial Sequence: Synthetic peptide
GGGSG

SEQ ID NO: 3802 - protein, 10 aa, Artificial Sequence
  Description of Artificial Sequence: Synthetic 10xHis tag
HHHHHHHHHH

SEQ ID NO: 3803 - DNA, 93 bp, Artificial Sequence
  Description of Artificial Sequence: Synthetic oligonucleotide
ggcatcctgccaagcccaggaatgcccgccctgctgtctctggtgagcctgctgtccgtgctgctgatgggatgcgtggcagagacaggcaca

SEQ ID NO: 3804 - DNA, 2019 bp, Artificial Sequence
  Description of Artificial Sequence: Synthetic polynucleotide
cagtgcgtgaacctgaccacaaggacccagctgccccctgcctataccaattctttcacacggggcgtgtactatcccgacaaggtgtttagaagctccgtgctgcactccacacaggatctgtttctgcctttcttttctaacgtgacctggttccacgccatccacgtgtccggcaccaatggcacaaagcggttcgacaatcccgtgctgccttttaacgatggcgtgtacttcgccagcaccgagaagtccaacatcatcagaggctggatctttggcaccacactggactctaagacacagagcctgctgatcgtgaacaatgccaccaacgtggtgatcaaggtgtgcgagttccagttttgtaatgatccattcctgggcgtgtactatcacaagaacaataagtcctggatggagtctgagtttcgcgtgtattctagcgccaacaattgcacatttgagtacgtgagccagcccttcctgatggacctggagggcaagcagggcaatttcaagaacctgagggagttcgtgtttaagaatatcgatggctacttcaagatctacagcaagcacaccccaatcaacctggtgcgcgacctgccacagggattctccgccctggagccactggtggatctgcccatcggcatcaacatcacccggtttcagacactgctggccctgcacagatcctacctgacaccaggcgactcctctagcggatggaccgcaggagctgccgcctactatgtgggctatctgcagccccggaccttcctgctgaagtacaacgagaatggcaccatcacagacgcagtggattgcgccctggaccccctgtctgagacaaagtgtacactgaagagctttaccgtggagaagggcatctatcagacaagcaatttcagggtgcagcctaccgagtccatcgtgcgctttcccaatatcacaaacctgtgcccttttggcgaggtgttcaacgccaccagattcgccagcgtgtacgcctggaatcggaagagaatctccaactgcgtggccgactattctgtgctgtacaactccgcctctttcagcacctttaagtgctatggcgtgtctcccacaaagctgaatgatctgtgctttaccaacgtgtacgccgatagcttcgtgatcaggggagacgaagtgagacagatcgcaccaggacagacaggaaagatcgcagactacaattataagctgcctgacgatttcaccggctgcgtgatcgcctggaactccaacaatctggattctaaagtgggcggcaactacaattatctgtacaggctgtttcgcaagtccaatctgaagccattcgagcgggacatctccacagagatctaccaggccggctctaccccctgcaatggcgtggagggctttaactgttatttccctctgcagtcttacggcttccagccaacaaacggcgtgggctatcagccctacagagtggtggtgctgtcctttgaggaactgcacgcaccagcaacagtgtgcggcccaaagaagtctaccaatctggtgaagaacaagtgcgtgaacttcaacttcaacggactgaccggcacaggcgtgctgaccgagagcaataagaagttcctgccttttcagcagttcggcagggacatcgcagataccacagacgccgtgcgcgaccctcagaccctggagatcctggacatcacaccatgcagcttcggcggcgtgtccgtgatcacaccaggcaccaatacatccaaccaggtggccgtgctgtatcaggacgtgaattgtaccgaggtgcccgtggcaatccacgcagatcagctgacccctacatggcgggtgtactctaccggcagcaacgtgttccagacaagagccggatgcctgatcggagcagagcacgtgaacaatagctatgagtgcgacatccctatcggcgccggcatctgtgccagctaccagacccagacaaactccccatctggagcaggctcc

SEQ ID NO: 3805 - DNA, 30 bp, Artificial Sequence
  Description of Artificial Sequence: Synthetic oligonucleotide
caccatcaccatcaccatcaccatcaccac

SEQ ID NO: 3806 - DNA, 2148 bp, Artificial Sequence
  Description of Artificial Sequence: Synthetic polynucleotide
atgggcatcctgccaagcccaggaatgcccgccctgctgtctctggtgagcctgctgtccgtgctgctgatgggatgcgtggcagagacaggcacacagtgcgtgaacctgaccacaaggacccagctgccccctgcctataccaattctttcacacggggcgtgtactatcccgacaaggtgtttagaagctccgtgctgcactccacacaggatctgtttctgcctttcttttctaacgtgacctggttccacgccatccacgtgtccggcaccaatggcacaaagcggttcgacaatcccgtgctgccttttaacgatggcgtgtacttcgccagcaccgagaagtccaacatcatcagaggctggatctttggcaccacactggactctaagacacagagcctgctgatcgtgaacaatgccaccaacgtggtgatcaaggtgtgcgagttccagttttgtaatgatccattcctgggcgtgtactatcacaagaacaataagtcctggatggagtctgagtttcgcgtgtattctagcgccaacaattgcacatttgagtacgtgagccagcccttcctgatggacctggagggcaagcagggcaatttcaagaacctgagggagttcgtgtttaagaatatcgatggctacttcaagatctacagcaagcacaccccaatcaacctggtgcgcgacctgccacagggattctccgccctggagccactggtggatctgcccatcggcatcaacatcacccggtttcagacactgctggccctgcacagatcctacctgacaccaggcgactcctctagcggatggaccgcaggagctgccgcctactatgtgggctatctgcagccccggaccttcctgctgaagtacaacgagaatggcaccatcacagacgcagtggattgcgccctggaccccctgtctgagacaaagtgtacactgaagagctttaccgtggagaagggcatctatcagacaagcaatttcagggtgcagcctaccgagtccatcgtgcgctttcccaatatcacaaacctgtgcccttttggcgaggtgttcaacgccaccagattcgccagcgtgtacgcctggaatcggaagagaatctccaactgcgtggccgactattctgtgctgtacaactccgcctctttcagcacctttaagtgctatggcgtgtctcccacaaagctgaatgatctgtgctttaccaacgtgtacgccgatagcttcgtgatcaggggagacgaagtgagacagatcgcaccaggacagacaggaaagatcgcagactacaattataagctgcctgacgatttcaccggctgcgtgatcgcctggaactccaacaatctggattctaaagtgggcggcaactacaattatctgtacaggctgtttcgcaagtccaatctgaagccattcgagcgggacatctccacagagatctaccaggccggctctaccccctgcaatggcgtggagggctttaactgttatttccctctgcagtcttacggcttccagccaacaaacggcgtgggctatcagccctacagagtggtggtgctgtcctttgaggaactgcacgcaccagcaacagtgtgcggcccaaagaagtctaccaatctggtgaagaacaagtgcgtgaacttcaacttcaacggactgaccggcacaggcgtgctgaccgagagcaataagaagttcctgccttttcagcagttcggcagggacatcgcagataccacagacgccgtgcgcgaccctcagaccctggagatcctggacatcacaccatgcagcttcggcggcgtgtccgtgatcacaccaggcaccaatacatccaaccaggtggccgtgctgtatcaggacgtgaattgtaccgaggtgcccgtggcaatccacgcagatcagctgacccctacatggcgggtgtactctaccggcagcaacgtgttccagacaagagccggatgcctgatcggagcagagcacgtgaacaatagctatgagtgcgacatccctatcggcgccggcatctgtgccagctaccagacccagacaaactccccatctggagcaggctcccaccatcaccatcaccatcaccatcaccactga

SEQ ID NO: 3807 - DNA, 2148 bp, Artificial Sequence
  Description of Artificial Sequence: Synthetic polynucleotide
atgggcatcctgccaagcccaggaatgcccgccctgctgtctctggtgagcctgctgtccgtgctgctgatgggatgcgtggcagagacaggcacacagtgcgtgaacctgaccacaaggacccagctgccccctgcctataccaattctttcacacggggcgtgtactatcccgacaaggtgtttagaagctccgtgctgcactccacacaggatctgtttctgcctttcttttctaacgtgacctggttccacgccaaacacgtgtccggcaccaatggcacaaagcggttcgacaatcccgtgctgccttttaacgatggcgtgtacttcgccagcaccgagaagtccaacatcatcagaggctggatctttggcaccacactggactctaagacacagagcctgctgatcgtgaacaatgccaccaacgtggtgatcaaggtgtgcgagttccagttttgtaatgatccattcctgggcgtgtactatcacaagaacaataagtcctggatggagtctgagtttcgcgtgtattctagcgccaacaattgcacatttgagtacgtgagccagcccttcctgatggacctggagggcaagcagggcaatttcaagaacctgagggagttcgtgtttaagaatatcgatggctacttcaagatctacagcaagcacaccccaatcaacctggtgcgcgacctgccacagggattctccgccctggagccactggtggatctgcccatcggcatcaacatcacccggtttcagacactgctggccctgcacagatcctacctgacaccaggcgactcctctagcggatggaccgcaggagctgccgcctactatgtgggctatctgcagccccggaccttcctgctgaagtacaacgagaatggcaccatcacagacgcagtggattgcgccctggaccccctgtctgagacaaagtgtacactgaagagctttaccgtggagaagggcatctatcagacaagcaatttcagggtgcagcctaccgagtccatcgtgcgctttcccaatatcacaaacctgtgcccttttggcgaggtgttcaacgccaccagattcgccagcgtgtacgcctggaatcggaagagaatctccaactgcgtggccgactattctgtgctgtacaactccgcctctttcagcacctttaagtgctatggcgtgtctcccacaaagctgaatgatctgtgctttaccaacgtgtacgccgatagcttcgtgatcaggggagacgaagtgagacagatcgcaccaggacagacaggaaagatcgcagactacaattataagctgcctgacgatttcaccggctgcgtgatcgcctggaactccaacaatctggattctaaagtgggcggcaactacaattatctgtacaggctgtttcgcaagtccaatctgaagccattcgagcgggacatctccacagagatctaccaggccggctctaccccctgcaatggcgtggagggctttaactgttatttccctctgcagtcttacggcttccagccaacaaacggcgtgggctatcagccctacagagtggtggtgctgtcctttgagctgctgcacgcaccagcaacagtgtgcggcccaaagaagtctaccaatctggtgaagaacaagtgcgtgaacttcaacttcaacggactgaccggcacaggcgtgctgaccgagagcaataagaagttcctgccttttcagcagttcggcagggacatcgcagataccacagacgccgtgcgcgaccctcagaccctggagatcctggacatcacaccatgcagcttcggcggcgtgtccgtgatcacaccaggcaccaatacatccaaccaggtggccgtgctgtatcaggacgtgaattgtaccgaggtgcccgtggcaatccacgcagatcagctgacccctacatggcgggtgtactctaccggcagcaacgtgttccagacaagagccggatgcctgatcggagcagagcacgtgaacaatagctatgagtgcgacatccctatcggcgccggcatctgtgccagctaccagacccagacaaactccccatctggagcaggctcccaccatcaccatcaccatcaccatcaccactga

SEQ ID NO: 3808 - DNA, 2148 bp, Artificial Sequence
  Description of Artificial Sequence: Synthetic polynucleotide
atgggcatcctgccaagcccaggaatgcccgccctgctgtctctggtgagcctgctgtccgtgctgctgatgggatgcgtggcagagacaggcacacagtgcgtgaacctgaccacaaggacccagctgccccctgcctataccaattctttcacacggggcgtgtactatcccgacaaggtgtttagaagctccgtgctgcactccacacaggatctgtttctgcctttcttttctaacgtgacctggttccacgccatccacgtgtccggcaccaatggcacaaagcggttcgacaatcccgtgctgccttttaacgatggcgtgtacttcgccagcaccgagaagtccaacatcatcagaggctggatctttggcaccacactggactctaagacacagagcctgctgatcgtgaacaatgccaccaacgtggtgatcaaggtgtgcgagttccagttttgtaatgatccattcctgggcgtgtactatcacaagaacaataagtcctggatggagtctgagtttcgcgtgtattctagcgccaacaattgcacatttgagtacgtgagccagcccttcctgatggacctggagggcaagcagggcaatttcaagaacctgagggagttcgtgtttaagaatatcgatggctacttcaagatctacagcaagcacaccccaatcaacctggtgcgcgacctgccacagggattctccgccctggagccactggtggatctgcccatcggcatcaacatcacccggtttcagacactgctggccctgcacagatcctacctgacaccaggcgactcctctagcggatggaccgcaggagctgccgcctactatgtgggctatctgcagccccggaccttcctgctgaagtacaacgagaatggcaccatcacagacgcagtggattgcgccctggaccccctgtctgagacaaagtgtacactgaagagctttaccgtggagaagggcatctatcagacaagcaatttcagggtgcagcctaccgagtccatcgtgcgctttcccaatatcacaaacctgtgcccttttggcgaggtgttcaacgccaccagattcgccagcgtgtacgcctggaatcggaagagaatctccaactgcgtggccgactattctgtgctgtacaactccgcctctttcagcacctttaagtgctatggcgtgtctcccacaaagctgaatgatctgtgctttaccaacgtgtacgccgatagcttcgtgatcaggggagacgaagtgagacagatcgcaccaggacagacaggaaagatcgcagactacaattataagctgcctgacgatttcaccggctgcgtgatcgcctggaactccaacaatctggattctaaagtgggcggcaactacaattatctgtacaggctgtttcgcaagtccaatctgaagccattcgagcgggacatctccacagagatctaccaggccggctctaccccctgcaatggcgtggagggctttaactgttatttccctctgcagtcttacggcttccagccaacaaacggcgtgggctatcagccctacagagtggtggtgctgtcctttgagctgctgcacgcaccagcaacagtgtgcggcccaaagaagtctaccaatctggtgaagaacaagtgcgtgaacttcaacttcaacggactgaccggcacaggcgtgctgaccgagagcaataagaagttcctgccttttcagcagttcggcagggacatcgcagataccacagacgccgtgcgcgaccctcagaccctggagatcctggacatcacaccatgcagcttcggcggcgtgtccgtgatcacaccaggcaccaatacatccaaccaggtggccgtgctgtatcaggacgtgaattgtaccgaggtgcccactgcaatccacgcagatcagctgacccctacatggcgggtgtactctaccggcagcaacgtgttccagacaagagccggatgcctgatcggagcagagcacgtgaacaatagctatgagtgcgacatccctatcggcgccggcatctgtgccagctaccagacccagacaaactccccatctggagcaggctcccaccatcaccatcaccatcaccatcaccactga

SEQ ID NO: 3809 - DNA, 2148 bp, Artificial Sequence
  Description of Artificial Sequence: Synthetic polynucleotide
atgggcatcctgccaagcccaggaatgcccgccctgctgtctctggtgagcctgctgtccgtgctgctgatgggatgcgtggcagagacaggcacacagtgcgtgaacctgaccacaaggacccagctgccccctgcctataccaattctttcacacggggcgtgtactatcccgacaaggtgtttagaagctccgtgctgcactccacacaggatctgtttctgcctttcttttctaacgtgacctggttccacgccatccacgtgtccggcaccaatggcacaaagcggttcgacaatcccgtgctgccttttaacgatggcgtgtacttcgccagcaccgagaagtccaacatcatcagaggctggatctttggcaccacactggactctaagacacagagcctgctgatcgtgaacaatgccaccttcgtggtgatcaaggtgtgcgagttccagttttgtaatgatccattcctgggcgtgtactatcacaagaacaataagtcctggatggagtctgagtttcgcgtgtattctagcgccaacaattgcacatttgagtacgtgagccagcccttcctgatggacctggagggcaagcagggcaatttcaagaacctgagggagttcgtgtttaagaatatcgatggctacttcaagatctacagcaagcacaccccaatcaacctggtgcgcgacctgccacagggattctccgccctggagccactggtggatctgcccatcggcatcaacatcacccggtttcagacactgctggccctgcacagatcctacctgacaccaggcgactcctctagcggatggaccgcaggagctgccgcctactatgtgggctatctgcagccccggaccttcctgctgaagtacaacgagaatggcaccatcacagacgcagtggattgcgccctggaccccctgtctgagacaaagtgtacactgaagagctttaccgtggagaagggcatctatcagacaagcaatttcagggtgcagcctaccgagtccatcgtgcgctttcccaatatcacaaacctgtgcccttttggcgaggtgttcaacgccaccagattcgccagcgtgtacgcctggaatcggaagagaatctccaactgcgtggccgactattctgtgctgtacaactccgcctctttcagcacctttaagtgctatggcgtgtctcccacaaagctgaatgatctgtgctttaccaacgtgtacgccgatagcttcgtgatcaggggagacgaagtgagacagatcgcaccaggacagacaggaaagatcgcagactacaattataagctgcctgacgatttcaccggctgcgtgatcgcctggaactccaacaatctggattctaaagtgggcggcaactacaattatctgtacaggctgtttcgcaagtccaatctgaagccattcgagcgggacatctccacagagatctaccaggccggctctaccccctgcaatggcgtggagggctttaactgttatttccctctgcagtcttacggcttccagccaacaaacggcgtgggctatcagccctacagagtggtggtgctgtcctttgagctgctgcacgcaccagcaacagtgtgcggcccaaagaagtctaccaatctggtgaagaacaagtgcgtgaacttcaacttcaacggactgaccggcacaggcgtgctgaccgagagcaataagaagttcctgccttttcagcagttcggcagggacatcgcagataccacagacgccgtgcgcgaccctcagaccctggagatcctggacatcacaccatgcagcttcggcggcgtgtccgtgatcacaccaggcaccaatacatccaaccaggtggccgtgctgtatcaggacgtgaattgtaccgaggtgcccgtggcaatccacgcagatcagctgacccctacatggcgggtgtactctaccggcagcaacgtgttccagacaagagccggatgcctgatcggagcagagcacgtgaacaatagctatgagtgcgacatccctatcggcgccggcatctgtgccagctaccagacccagacaaactccccatctggagcaggctcccaccatcaccatcaccatcaccatcaccactga

SEQ ID NO: 3810 - DNA, 2148 bp, Artificial Sequence
  Description of Artificial Sequence: Synthetic polynucleotide
atgggcatcctgccaagcccaggaatgcccgccctgctgtctctggtgagcctgctgtccgtgctgctgatgggatgcgtggcagagacaggcacacagtgcgtgaacctgaccacaaggacccagctgccccctgcctataccaattctttcacacggggcgtgtactatcccgacaaggtgtttagaagctccgtgctgcactccacacaggatctgtttctgcctttcttttctaacgtgacctggttccacgccgagcacgtgtccggcaccaatggcacaaagcggttcgacaatcccgtgctgccttttaacgatggcgtgtacttcgccagcaccgagaagtccaacatcatcagaggctggatctttggcaccacactggactctaagacacagagcctgctgatcgtgaacaatgccaccaacgtggtgatcaaggtgtgcgagttccagttttgtaatgatccattcctgggcgtgtactatcacaagaacaataagtcctggatggagtctgagtttcgcgtgtattctagcgccaacaattgcacatttgagtaccatagccagcccttcctgatggacctggagggcaagcagggcaatttcaagaacctgagggagttcgtgtttaagaatatcgatggctacttcaagatctacagcaagcacaccccaatcaacctggtgcgcgacctgccacagggattctccgccctggagccactggtggatctgcccatcggcatcaacatcacccggtttcagacactgctggccctgcacagatcctacctgacaccaggcgactcctctagcggagaaaccgcaggagctgccgcctactatgtgggctatctgcagccccggaccttcctgctgaagtacaacgagaatggcaccatcacagacgcagtggattgcgccctggaccccctgtctgagacaaagtgtacactgaagagctttaccgtggagaagggcatctatcagacaagcaatttcagggtgcagcctaccgagtccatcgtgcgctttcccaatatcacaaaccattgcccttttggcgaggtgttcaacgccaccagattcgccagcgtgtacgcctggaatcggaagagaatctccaactgcgtggccgactattctgtgctgtacaactccgcctctttcagcacctttaagtgctatggcgtgtctcccacaaagctgaatgatctgtgctttaccaacgtgtacgccgatagcttcgtgatcaggggagacgaagtgagacagatcgcaccaggacagacaggaaagatcgcagactacaattataagctgcctgacgatttcaccggctgcgtgatcgcctggaactccaacaatctggattctaaagtgggcggcaactacaattatctgtacaggctgtttcgcaagtccaatctgaagccattcgagcgggacatctccacagagatctaccaggccggctctaccccctgcaatggcgtggagggctttaactgttatttccctctgcagtcttacggcttccagccaacaaacggccctggccaacagccctacagagtggtggtgctgtcctttgagctgctgcacgcaccagcaacagtgtgcggcccaaagaagtctaccaatctggtgaagaacaagtgcgtgaacttcaacttcaacggactgaccggcacaggcgtgctgaccgagagcaataagaagttcctgccttttcagcagttcggcagggacatcgcagataccacagacgccgtgcgcgaccctcagaccctggagatcctggacatcacaccatgcagcttcggcggcgtgtccgtgatcacaccaggcaccaatacatccaaccaggtggccgtgctgtatcaggacgtgaattgtaccgaggtgcccgatgcaatccacgcagatcagctgacccctacatggcgggtgtactctaccggcagcaacgtgttccagacaagagccggatgcctgatcggagcagagcacgtgaacaatagctatgagtgcgacatccctatcggcgccggcatctgtgccagctaccagacccagacaaactccccatctggagcaggctcccaccatcaccatcaccatcaccatcaccactga

SEQ ID NO: 3811 - DNA, 2148 bp, Artificial Sequence
  Description of Artificial Sequence: Synthetic polynucleotide
atgggcatcctgccaagcccaggaatgcccgccctgctgtctctggtgagcctgctgtccgtgctgctgatgggatgcgtggcagagacaggcacacagtgcgtgaacctgaccacaaggacccagctgccccctgcctataccaattctttcacacggggcgtgtactatcccgacaaggtgtttagaagctccgtgctgcactccacacaggatctgtttctgcctttcttttctaacgtgacctggttccacgccatccacgtgtccggcaccaatggcacaaagcggttcgacaatcccgtgctgccttttaacgatggcgtgtacttcgccagcaccgagaagtccaacatcatcagaggctggatctttggcaccacactggactctaagacacagagcctgctgatcgtgaacaatgccaccaacgtggtgatcaaggtgtgcgagttccagttttgtaatgatccattcctgggcgtgtactatcacaagaacaataagtcctggatggagtctgagtttcgcgtgtattctagcgccaacaattgcacatttgagtacgtgagccagcccttcctgatggacctggagggcaagcagggcaatttcaagaacctgagggagttcgtgtttaagaatatcgatggctacttcaagatctacagcaagcacaccccaatcaacctggtgcgcgacctgccacagggattctccgccctggagccactggtggatctgcccatcggcatcaacatcacccggtttcagacactgctggccctgcacagatcctacctgacaccaggcgactcctctagcggatggaccgcaggagctgccgcctactatgtgggctatctgcagccccggaccttcctgctgaagtacaacgagaatggcaccatcacagacgcagtggattgcgccctggaccccctgtctgagacaaagtgtacactgaagagctttaccgtggagaagggcatctatcagacaagcaatttcagggtgcagcctaccgagtccatcgtgcgctttcccaatatcacaaacctgtgccctttgggcgaggtgttcaacgccaccagattcgccagctcatacgcctggaatcggaagagaatctccaactgcgtggccgactattctgtgctgtacaactccgcctctttcagcacctttaagtgctatggcgtgtctcccacaaagctgaatgatctgtgctttaccaacgtgtacgccgatcgtttcgtgatcaggggagacgaagtgagacagatcgcaccaggacagacaggaaagatcgcagactacaattataagctgcctgacgatttcaccggctgcgtgatcgcctggaactccaacaatctggatgcgaaagtgggcggcaactacaattatctgtacaggctgtttcgcaagtccaatctgaagccattcgagcggttcatctccacagagatctaccaggccggctctacccccacgaatggcgtggagggctttaactgttatttccctctgcagtcttacgtcttccagccaacaaacggcgtgacttatcagccctacagagtggtggtgctgtcctttgagctgctgcacgcaccacatacagtgtgcggcccaaagaagtctaccaatctggtgaagaacaagtgcgtgaacttcaacttcaacggactgaccggcacaggcgtgctgaccgagagcaataagaagttcctgccttttcagcagttcggcagggacatcgcagataccacagacgccgtgcgcgaccctcagaccctggagatcctggacatcacaccatgcagcttcggcggcgtgtccgtgatcacaccaggcaccaatacatccaaccaggtggccgtgctgtatcaggacgtgaattgtaccgaggtgcccgtggcaatccacgcagatcagctgacccctacatggcgggtgtactctaccggcagcaacgtgttccagacaagagccggatgcctgatcggagcagagcacgtgaacaatagctatgagtgcgacatccctatcggcgccggcatctgtgccagctaccagacccagacaaactccccatctggagcaggctcccaccatcaccatcaccatcaccatcaccactga

SEQ ID NO: 3812 - DNA, 2148 bp, Artificial Sequence
  Description of Artificial Sequence: Synthetic polynucleotide
atgggcatcctgccaagcccaggaatgcccgccctgctgtctctggtgagcctgctgtccgtgctgctgatgggatgcgtggcagagacaggcacacagtgcgtgaacctgaccacaaggacccagctgccccctgcctataccaattctttcacacggggcgtgtactatcccgacaaggtgtttagaagctccgtgctgcactccacacaggatctgtttctgcctttcttttctaacgtgacctggttccacgccatccacgtgtccggcaccaatggcacaaagcggttcgacaatcccgtgctgccttttaacgatggcgtgtacttcgccagcaccgagaagtccaacatcatcagaggctggatctttggcaccacactggactctaagacacagagcctgctgatcgtgaacaatgccaccaacgtggtgatcaaggtgtgcgagttccagttttgtaatgatccattcctgggcgtgtactatcacaagaacaataagtcctggatggagtctgagtttcgcgtgtattctagcgccaacaattgcacatttgagtacgtgagccagcccttcctgatggacctggagggcaagcagggcaatttcaagaacctgagggagttcgtgtttaagaatatcgatggctacttcaagatctacagcaagcacaccccaatcaacctggtgcgcgacctgccacagggattctccgccctggagccactggtggatctgcccatcggcatcaacatcacccggtttcagacactgctggccctgcacagatcctacctgacaccagttgactcctctagcggatggaccgcaggagctgccgcctactatgtgggctatctgcagccccggaccttcctgctgaagtacaacgagaatggcaccatcacagacgcagtggattgcgccctggaccccctgtctgagacaaagtgtacactgaagagctttaccgtggagaagggcatctatcagacaagcaatttcagggtgcagcctaccgagtccatcgtgcgctttcccaatatcacaaacctgtgcccttttggcgaggtgttcaacgccaccagattcgccagcgtgtacgcctggaatcggaagagaatctccaactgcgtggccgactattctgtgctgtacaactccgcctctttcagcacctttaagtgctatggcgtgtctcccacaaagctgaatgatctgtgctttaccaacgtgtacgccgatagcttcgtgatcaggggagacgaagtgagacagatcgcaccaggacagacaggaaagatcgcagactacaattataagctgcctgacgatttcaccggctgcgtgatcgcctggaactccaacaatctggattctaaagtgggcggcaactacaattatctgtacaggctgtttcgcaagtccaatctgaagccattcgagcgggacatctccacagagatctaccaggccggctctaccccctgcaatggcgtggagggctttaactgttatttccctctgcagtcttacggcttccagccaacaaacggcgtgggctatcagccctacagagtggtggtgctgtcctttgagctgctgcacgcaccagcaacagtgtgcggcccaaagaagtctaccaatctggtgaagaacaagtgcgtgaacttcaacttcaacggactgaccggcacaggcgtgctgaccgagagcaataagaagttcctgccttttcagcagttcggcagggacatcgcagataccacagacgccgtgcgcgaccctcagaccctggagatcctggacatcacaccatgcagcttcggcggcgtgtccgtgatcacaccaggcaccaatacatccaaccaggtggccgtgctgtatcaggacgtgaattgtaccgaggtgcccgtggcaatccacgcagatcagctgacccctacatggcgggtgtactctaccggcagcaacgtgttccagacaagagccggatgcctgatcggagcagagcacgtgaacaatagctatgagtgcgacatccctatcggcgccggcatctgtgccagctaccagacccagacaaactccccatctggagcaggctcccaccatcaccatcaccatcaccatcaccactga

SEQ ID NO: 3813 - DNA, 2148 bp, Artificial Sequence
  Description of Artificial Sequence: Synthetic polynucleotide
atgggcatcctgccaagcccaggaatgcccgccctgctgtctctggtgagcctgctgtccgtgctgctgatgggatgcgtggcagagacaggcacacagtgcgtgaacctgaccacaaggacccagctgccccctgcctataccaattctttcacacggggcgtgtactatcccgacaaggtgtttagaagctccgtgctgcactccacacaggatctgtttctgcctttcttttctaacgtgacctggttccacgccatccacgtgtccggcaccaatggcacaaagcggttcgacaatcccgtgctgccttttaacgatggcgtgtacttcgccagcaccgagaagtccaacatcatcagaggctggatctttggcaccacactggactctaagacacagagcctgctgatcgtgaacaatgccaccaacgtggtgatcaaggtgtgcgagttccagttttgtaatgatccattcctgggcgtgtactatcacaagaacaataagtcctggatggagtctgagtttcgcgtgtattctagcgccaacaattgcacatttgagtacgtgagccagcccttcctgatggacctggagggcaagcagggcaatttcaagaacctgagggagttcgtgtttaagaatatcgatggctacttcaagatctacagcaagcacaccccaatcaacctggtgcgcgacctgccacagggattctccgccctggagccactggtggatctgcccatcggcatcaacatcacccggtttcagacactgctggccctgcacagatcctacctgacaccaggcgactcctctagcggatggaccgcaggagctgccgcctactatgtgggctatctgcagccccggaccttcctgctgaagtacaacgagaatggcaccatcacagacgcagtggattgcgccctggaccccctgtctgagacaaagtgtacactgaagagctttaccgtggagaagggcatctatcagacaagcaatttcagggtgcagcctaccgagtccatcgtgcgctttcccaatatcacaaacctgtgcccttttggcgaggtgttcaacgccaccagattcgccagcgtgtacgcctggaatcggaagagaatctccaactgcgtggccgactattctgtgctgtacaactccgcctctttcagcacctttaagtgctatggcgtgtctcccacaaagctgaatgatctgtgctttaccaacgtgtacgccgatagcttcgtgatcaggggagacgaagtgagacagatcgcaccaggacagacaggaaagatcgcagactacaattataagctgcctgacgatttcaccggctgcgtgatcgcctggaactccaacaatctggattctaaagtgggcggcaactacaattatctgtacaggctgtttcgcaagtccaatctgaagccattcgagcgggacatctccacagagatctaccaggccggctctaccccctgcaatggcgtggagggctttaactgtgacttccctctgcagtcttacggcttccagccaacaaacggcgtgggctatcagccctacagagtggtggtgctgtcctttgagctgctgcacgcaccagcaacagtgtgcggcccaaagaagtctaccaatctggtgaagaacaagtgcgtgaacttcaacttcaacggactgaccggcacaggcgtgctgaccgagagcaataagaagttcctgccttttcagcagttcggcagggacatcgcagataccacagacgccgtgcgcgaccctcagaccctggagatcctggacatcacaccatgcagcttcggcggcgtgtccgtgatcacaccaggcaccaatacatccaaccaggtggccgtgctgtatcaggacgtgaattgtaccgaggtgcccgtggcaatccacgcagatcagctgacccctacatggcgggtgtactctaccggcagcaacgtgttccagacaagagccggatgcctgatcggagcagagcacgtgaacaatagctatgagtgcgacatccctatcggcgccggcatctgtgccagctaccagacccagacaaactccccatctggagcaggctcccaccatcaccatcaccatcaccatcaccactga

SEQ ID NO: 3814 - DNA, 2148 bp, Artificial Sequence
  Description of Artificial Sequence: Synthetic polynucleotide
atgggcatcctgccaagcccaggaatgcccgccctgctgtctctggtgagcctgctgtccgtgctgctgatgggatgcgtggcagagacaggcacacagtgcgtgaacctgaccacaaggacccagctgccccctgcctataccaattctttcacacggggcgtgtactatcccgacaaggtgtttagaagctccgtgctgcactccacacaggatctgtttctgcctttcttttctaacgtgacctggttccacgccatccacgtgtccggcaccaatggcacaaagcggttcgacaatcccgtgctgccttttaacgatggcgtgtacttcgccagcaccgagaagtccaacatcatcagaggctggatctttggcaccacactggactctaagacacagagcctgctgatcgtgaacaatgccaccaacgtggtgatcaaggtgtgcgagttccagttttgtaatgatccattcctgggcgtgtactatcacaagaacaataagtcctggatggagtctgagtttcgcgtgtattctagcgccaacaattgcacatttgagtacgtgagccagcccttcctgatggacctggagggcaagcagggcaatttcaagaacctgagggagttcgtgtttaagaatatcgatggctacttcaagatctacagcaagcacaccccaatcaacctggtgcgcgacctgccacagggattctccgccctggagccactggtggatctgcccatcggcatcaacatcacccggtttcagacactgctggccctgcacagatcctacctgacaccaggcgactcctctagcggatggaccgcaggagctgccgcctactatgtgggctatctgcagccccggaccttcctgctgaagtacaacgagaatggcaccatcacagacgcagtggattgcgccctggaccccctgtctgagacaaagtgtacactgaagagctttaccgtggagaagggcatctatcagacaagcaatttcagggtgcagcctaccgagtccatcgtgcgctttcccaatatcacaaacctgtgcccttttggcgaggtgttcaacgccaccagattcgccagcgtgtacgcctggattcggaagagaatctccaactgcgtggccgactattctgtgctgtacaactccgcctctttcagcacctttaagtgctatggcgtgtctcccacaaagctgaatgatctgtgctttaccaacgtgtacgccgatagcttcgtgatcaggggagacgaagtgagacagatcgcaccaggacagacaggaaagatcgcagactacaattataagctgcctgacgatttcaccggctgcgtgatcgcctggaactccaacaatctggattctaaagtgggcggcaactacaattatctgtacaggctgtttcgcaagtccaatctgaagccattcgagcgggacatctccacagagatctaccaggccggctctaccccctgcaatggcgtggagggctttaactgttatttccctctgcagtcttacggcttccagccaacaaacggcgtgggctatcagccctacagagtggtggtgctgtcctttgagctgctgcacgcaccagcaacagtgtgcggcccaaagaagtctaccaatctggtgaagaacaagtgcgtgaacttcaacttcaacggactgaccggcacaggcgtgctgaccgagagcaataagaagttcctgccttttcagcagttcggcagggacatcgcagataccacagacgccgtgcgcgaccctcagaccctggagatcctggacatcacaccatgcagcttcggcggcgtgtccgtgatcacaccaggcaccaatacatccaaccaggtggccgtgctgtatcaggacgtgaattgtaccgaggtgcccgtggcaatccacgcagatcagctgacccctacatggcgggtgtactctaccggcagcaacgtgttccagacaagagccggatgcctgatcggagcagagcacgtgaacaatagctatgagtgcgacatccctatcggcgccggcatctgtgccagctaccagacccagacaaactccccatctggagcaggctcccaccatcaccatcaccatcaccatcaccactga

SEQ ID NO: 3815 - DNA, 2148 bp, Artificial Sequence
  Description of Artificial Sequence: Synthetic polynucleotide
atgggcatcctgccaagcccaggaatgcccgccctgctgtctctggtgagcctgctgtccgtgctgctgatgggatgcgtggcagagacaggcacacagtgcgtgaacctgaccacaaggacccagctgccccctgcctataccaattctttcacacggggcgtgtactatcccgacaaggtgtttagaagctccgtgctgcactccacacaggatctgtttctgcctttcttttctaacgtgacctggttccacgcctaccacgtgtccggcaccaatggcacaaagcggttcgacaatcccgtgctgccttttaacgatggcgtgtacttcgccagcaccgagaagtccaacatcatcagaggctggatctttggcaccacactggactctaagacacagagcctgctgatcgtgaacaatgccaccaacgtggtgatcaaggtgtgcgagttccagttttgtaatgatccattcctgggcgtgtactatcacaagaacaataagtcctggatggagtctgagtttcgcgtgtattctagcgccaacaattgcacatttgagtaccatagccagcccttcctgatggacctggagggcaagcagggcaatttcaagaacctgagggagttcgtgtttaagaatatcgatggctacttcaagatctacagcaagcacaccccaatcaacctggtgcgcgacctgccacagggattctccgccctggagccactggtggatctgcccatcggcatcaacatcacccggtttcagacactgctggccctgcacagatcctacctgacaccaggcgactcctctagcggagaaaccgcaggagctgccgcctactatgtgggctatctgcagccccggaccttcctgctgaagtacaacgagaatggcaccatcacagacgcagtggattgcgccctggaccccctgtctgagacaaagtgtacactgaagagctttaccgtggagaagggcatctatcagacaagcaatttcagggtgcagcctaccgagtccatcgtgcgctttcccaatatcacaaacctgtgcccttttggcgaggtgttcaacgccaccagattcgccagcgtgtacgcctggaatcggaagagaatctccaactgcgtggccgactattctgtgctgtacaactccgcctctttcagcacctttaagtgctatggcgtgtctcccacaaagctgaatgatctgtgctttaccaacgtgtacgccgatagcttcgtgatcaggggagacgaagtgagacagatcgcaccaggacagacaggaaagatcgcagactacaattataagctgcctgacgatttcaccggctgcgtgatcgcctggaactccaacaatctggattctaaagtgggcggcaactacaattatctgtacaggctgtttcgcaagtccaatctgaagccattcgagcgggacatctccacagagatctaccaggccggctctaccccctgcaatggcgtggagggctttaactgttatttccctctgcagtcttacggcttccagccaacaaacggcccgggccaacagccctacagagtggtggtgctgtcctttgagctgctgcacgcaccagcaacagtgtgcggcccaaagaagtctaccaatctggtgaagaacaagtgcgtgaacttcaacttcaacggactgaccggcacaggcgtgctgaccgagagcaataagaagttcctgccttttcagcagttcggcagggacatcgcagataccacagacgccgtgcgcgaccctcagaccctggagatcctggacatcacaccatgcagcttcggcggcgtgtccgtgatcacaccaggcaccaatacatccaaccaggtggccgtgctgtatcaggacgtgaattgtaccgaggtgcccgatgcaatccacgcagatcagctgacccctacatggcgggtgtactctaccggcagcaacgtgttccagacaagagccggatgcctgatcggagcagagcacgtgaacaatagctatgagtgcgacatccctatcggcgccggcatctgtgccagctaccagacccagacaaactccccatctggagcaggctcccaccatcaccatcaccatcaccatcaccactga

SEQ ID NO: 3816 - DNA, 2148 bp, Artificial Sequence
  Description of Artificial Sequence: Synthetic polynucleotide
atgggcatcctgccaagcccaggaatgcccgccctgctgtctctggtgagcctgctgtccgtgctgctgatgggatgcgtggcagagacaggcacacagtgcgtgaacctgaccacaaggacccagctgccccctgcctataccaattctttcacacggggcgtgtactatcccgacaaggtgtttagaagctccgtgctgcactccacacaggatctgtttctgcctttcttttctaacgtgacctggttccacgccatccacgtgtccggcaccaatggcacaaagcggttcgacaatcccgtgctgccttttaacgatggcgtgtacttcgccagcaccgagaagtccaacatcatcagaggctggatctttggcaccacactggactctaagacacagagcctgctgatcgtgaacaatgccaccaacgtggtgatcaaggtgtgcgagttccagttttgtaatgatccattcctgggcgtgtactatcacaagaacaataagtcctggatggagtctgagtttcgcgtgtattctagcgccaacaattgcacatttgagtacgtgagccagcccttcctgatggacctggagggcaagcagggcaatttcaagaacctgagggagttcgtgtttaagaatatcgatggctacttcaagatctacagcaagcacaccccaatcaacctggtgcgcgacctgccacagggattctccgccctggagccactggtggatctgcccatcggcatcaacatcacccggtttcagacactgctggccctgcacagatcctacctgacaccaggcgactcctctagcggatggaccgcaggagctgccgcctactatgtgggctatctgcagccccggaccttcctgctgaagtacaacgagaatggcaccatcacagacgcagtggattgcgccctggaccccctgtctgagacaaagtgtacactgaagagctttaccgtggagaagggcatctatcagacaagcaatttcagggtgcagcctaccgagtccatcgtgcgctttcccaatatcacaaacctgtgcccttttggcgaggtgttcaacgccaccagattcgccagcgtgtacgcctggaatcggaagagaatctccaactgcgtggccgactattctgtgctgtacaactccgcctctttcagcacctttaagtgctatggcgtgtctcccacaaagctgaatgatctgtgctttaccaacgtgtacgccgatagcttcgtgatcaggggagacgaagtgagacagatcgcaccaggacagacaggaaagatcgcagactacaattataagctgcctgacgatttcaccggctgcgtgatcgcctggaactccaacaatctggattctaaagtgggcggcaactacaattatctgtacaggctgtttcgcaagtccaatctgaagccattcgagcgggacatctccacagagatctaccaggccggctctaccccctgcaatggcgtggagggctttaactgttatttccctctgcagtcttacggcttccagccaacaaacggcgtgggctatcagccctacagagtggtggtgctgtcctttgagctgctgcacgcaccagcaacagtgtgcggcccaaagaagtctaccaatctggtgaagaacaagtgcgtgaacttcaacttcaacggactgaccggcacaggcgtgctgaccgagagcaataagaagttcctgccttttcagcagttcggcagggacatcgcagataccacagacgccgtgcgcgaccctcagaccctggagatcctggacatcacaccatgcagctatggcggcgtgtccgtgatcacaccaggcaccaatacatccaaccaggtggccgtgctgtatcaggacgtgaattgtaccgaggtgcccgtggcaatccacgcagatcagctgacccctacatggcgggtgtactctaccggcagcaacgtgttccagacaagagccggatgcctgatcggagcagagcacgtgaacaatagctatgagtgcgacatccctatcggcgccggcatctgtgccagctaccagacccagacaaactccccatctggagcaggctcccaccatcaccatcaccatcaccatcaccactga

SEQ ID NO: 3817 - DNA, 2148 bp, Artificial Sequence
  Description of Artificial Sequence: Synthetic polynucleotide
atgggcatcctgccaagcccaggaatgcccgccctgctgtctctggtgagcctgctgtccgtgctgctgatgggatgcgtggcagagacaggcacacagtgcgtgaacctgaccacaaggacccagctgccccctgcctataccaattctttcacacggggcgtgtactatcccgacaaggtgtttagaagctccgtgctgcactccacacaggatctgtttctgcctttcttttctaacgtgacctggttccacgccatccacgtgtccggcaccaatggcacaaagcggttcgacaatcccgtgctgccttttaacgatggcgtgtacttcgccagcaccgagaagtccaacatcatcagaggctggatctttggcaccacactggactctaagacacagagcctgctgatcgtgaacaatgccaccaacgtggtgatcaaggtgtgcgagttccagttttgtaatgatccattcctgggcgtgtactatcacaagaacaataagtcctggatggagtctgagtttcgcgtgtattctagcgccaacaattgcacatttgagtacgtgagccagcccttcctgatggacctggagggcaagcagggcaatttcaagaacctgagggagttcgtgtttaagaatatcgatggctacttcaagatctacagcaagcacaccccaatcaacctggtgcgcgacctgccacagggattctccgccctggagccactggtggatctgcccatcggcatcaacatcacctattttcagacactgctggccctgcacagatcctacctgacaccaggcgactcctctagcggatggaccgcaggagctgccgcctactatgtgggctatctgcagccccggaccttcctgctgaagtacaacgagaatggcaccatcacagacgcagtggattgcgccctggaccccctgtctgagacaaagtgtacactgaagagctttaccgtggagaagggcatctatcagacaagcaatttcagggtgcagcctaccgagtccatcgtgcgctttcccaatatcacaaacctgtgcccttttggcgaggtgttcaacgccaccagattcgccagcgtgtacgcctggaatcggaagagaatctccaactgcgtggccgactattctgtgctgtacaactccgcctctttcagcacctttaagtgctatggcgtgtctcccacaaagctgaatgatctgtgctttaccaacgtgtacgccgatagcttcgtgatcaggggagacgaagtgagacagatcgcaccaggacagacaggaaagatcgcagactacaattataagctgcctgacgatttcaccggctgcgtgatcgcctggaactccaacaatctggattctaaagtgggcggcaactacaattatctgtacaggctgtttcgcaagtccaatctgaagccattcgagcgggacatctccacagagatctaccaggccggctctaccccctgcaatggcgtggagggctttaactgttatttccctctgcagtcttacggcttccagccaacaaacggcgtgggctatcagccctacagagtggtggtgctgtcctttgagctgctgcacgcaccagcaacagtgtgcggcccaaagaagtctaccaatctggtgaagaacaagtgcgtgaacttcaacttcaacggactgaccggcacaggcgtgctgaccgagagcaataagaagttcctgccttttcagcagttcggcagggacatcgcagataccacagacgccgtgcgcgaccctcagaccctggagatcctggacatcacaccatgcagcttcggcggcgtgtccgtgatcacaccaggcaccaatacatccaaccaggtggccgtgctgtatcaggacgtgaattgtaccgaggtgcccgtggcaatccacgcagatcagctgacccctacatggcgggtgtactctaccggcagcaacgtgttccagacaagagccggatgcctgatcggagcagagcacgtgaacaatagctatgagtgcgacatccctatcggcgccggcatctgtgccagctaccagacccagacaaactccccatctggagcaggctcccaccatcaccatcaccatcaccatcaccactga

SEQ ID NO: 3818 - DNA, 2148 bp, Artificial Sequence
  Description of Artificial Sequence: Synthetic polynucleotide
atgggcatcctgccaagcccaggaatgcccgccctgctgtctctggtgagcctgctgtccgtgctgctgatgggatgcgtggcagagacaggcacacagtgcgtgaacctgaccacaaggacccagctgccccctgcctataccaattctttcacacggggcgtgtactatcccgacaaggtgtttagaagctccgtgctgcactccacacaggatctgtttctgcctttcttttctaacgtgacctggttccacgccatccacgtgtccggcaccaatggcacaaagcggttcgacaatcccgtgctgccttttaacgatggcgtgtacttcgccagcaccgagaagtccaacatcatcagaggctggatctttggcaccacactggactctaagacacagagcctgctgatcgtgaacaatgccaccaacgtggtgatcaaggtgtgcgagttccagttttgtaatgatccattcctgggcgtgtactatcacaagaacaataagtcctggatggagtctgagtttcgcgtgtattctagcgccaacaattgcacatttgagtacgtgagccagcccttcctgatggacctggagggcaagcagggcaatttcaagaacctgagggagttcgtgtttaagaatatcgatggctacttcaagatctacagcaagcacaccccaatcaacctggtgcgcgacctgccacagggattctccgccctggagccactggtggatctgcccatcggcatcaacatcacccggtttcagacactgctggccctgcacagatcctacctgacaccaggcgactcctctagcggatggaccgcaggagctgccgcctactatgtgggctatctgcagccccggaccttcctgctgaagtacaacgagaatggcaccatcacagacgcagtggattgcgccctggaccccctgtctgagacaaagtgtacactgaagagctttaccgtggagaagggcatctatcagacaagcaatttcagggtgcagcctaccgagtccatcgtgcgctttcccaatatcacaaacctgtgcccttttggcgaggtgttcaacgccaccagattcgccagcgtgtacgcctggaatcggaagagaatctccaactgcgtggccgactattctgtgctgtacaactccgcctctttcagcacctttaagtgctatggcgtgtctcccacaaagctgaatgatctgtgctttaccaacgtgtacgccgatagcttcgtgatcaggggagacgaagtgagacagatcgcaccaggacagacaggaaagatcgcagactacaattataagctgcctgacgatttcaccggctgcgtgatcgcctggaactccaacaatctggattctaaagtgggcggcaactacaattatctgtacaggctgtttcgcaagtccaatctgaagccattcgagcgggacatctccacagagatctaccaggccggctctaccccctgcaatggcgtggagggctttaactgttatttccctctgcagtcttacggcttccagccaacaaacggcacgggctatcagccctacagagtggtggtgctgtcctttgagctgctgcacgcaccagcaacagtgtgcggcccaaagaagtctaccaatctggtgaagaacaagtgcgtgaacttcaacttcaacggactgaccggcacaggcgtgctgaccgagagcaataagaagttcctgccttttcagcagttcggcagggacatcgcagataccacagacgccgtgcgcgaccctcagaccctggagatcctggacatcacaccatgcagcttcggcggcgtgtccgtgatcacaccaggcaccaatacatccaaccaggtggccgtgctgtatcaggacgtgaattgtaccgaggtgcccgtggcaatccacgcagatcagctgacccctacatggcgggtgtactctaccggcagcaacgtgttccagacaagagccggatgcctgatcggagcagagcacgtgaacaatagctatgagtgcgacatccctatcggcgccggcatctgtgccagctaccagacccagacaaactccccatctggagcaggctcccaccatcaccatcaccatcaccatcaccactga

SEQ ID NO: 3819 - DNA, 2148 bp, Artificial Sequence
  Description of Artificial Sequence: Synthetic polynucleotide
atgggcatcctgccaagcccaggaatgcccgccctgctgtctctggtgagcctgctgtccgtgctgctgatgggatgcgtggcagagacaggcacacagtgcgtgaacctgaccacaaggacccagctgccccctgcctataccaattctttcacacggggcgtgtactatcccgacaaggtgtttagaagctccgtgctgcactccacacaggatctgtttctgcctttcttttctaacgtgacctggttccacgccatccacgtgtccggcaccaatggcacaaagcggttcgacaatcccgtgctgccttttaacgatggcgtgtacttcgccagcaccgagaagtccaacatcatcagaggctggatctttggcaccacactggactctaagacacagagcctgctgatcgtgaacaatgccaccaacgtggtgatcaaggtgtgcgagttccagttttgtaatgatccattcctgggcgtgtactatcacaagaacaataagtcctggatggagtctgagtttcgcgtgtattctagcgccaacaattgcacatttgagtacgtgagccagcccttcctgatggacctggagggcaagcagggcaatttcaagaacctgagggagttcgtgtttaagaatatcgatggctacttcaagatctacagcaagcacaccccaatcaacctggtgcgcgacctgccacagggattctccgccctggagccactggtggatctgcccatcggcatcaacatcacccggtttcagacactgctggccctgcacagatcctacctgacaccaggcgactcctctagcggatggaccgcaggagctgccgcctactatgtgggctatctgcagccccggaccttcctgctgaagtacaacgagaatggcaccatcacagacgcagtggattgcgccctggaccccctgtctgagacaaagtgtacactgaagagctttaccgtggagaagggcatctatcagacaagcaatttcagggtgcagcctaccgagtccatcgtgcgctttcccaatatcacaaacctgtgcccttttggcgaggtgttcaacgccaccagattcgccagcgtgtacgcctggaatcggaagagaatctccaactgcgtggccgactattctgtgctgtacaactccgcctctttcagcacctttaagtgctatggcgtgtctcccacaaagctgaatgatctgtgctttaccaacgtgtacgccgatagcttcgtgatcaggggagacgaagtgagacagatcgcaccaggacagacaggaaagatcgcagactacaattataagctgcctgacgatttcaccggctgcgtgatcgcctggaactccaacaatctggattctaaagtgggcggcaactacaattatctgtacaggctgtttcgcaagtccaatctgaagccattcgagcgggacatctccacagagatctaccaggccggctctaccccctgcaatggcgtggagggctttaactgttatttccctctgcagtcttacggcttccagccaacaaacggcgtgggctatcagccctacagagtggtggtgctgtcctttgagctgctgcacgcaccagcaacagtgtgcggcccaaagaagtctaccaatctggtgaagaacaagtgcgtgaacttcaacttcaacggactgaccggcacaggcgtgctgaccgagagcaataagaagttcctgccttttcagcagttcggcagggacatcgcagataccacagacgccgtgcgcgaccctcagaccctggagatcctggacatcacaccatgcagcttcggcggcgtgtccgtgatcacaccaggcaccaatacatccaaccaggtggccgtgctgtatcaggacgtgaattgtaccgaggtgcccgtggcaatccacgcagatcagctgacccctacatggcgggtgtacgcgaccggcagcaacgtgttccagacaagagccggatgcctgatcggagcagagcacgtgaacaatagctatgagtgcgacatccctatcggcgccggcatctgtgccagctaccagacccagacaaactccccatctggagcaggctcccaccatcaccatcaccatcaccatcaccactga

SEQ ID NO: 3820 - DNA, 2148 bp, Artificial Sequence
  Description of Artificial Sequence: Synthetic polynucleotide
atgggcatcctgccaagcccaggaatgcccgccctgctgtctctggtgagcctgctgtccgtgctgctgatgggatgcgtggcagagacaggcacacagtgcgtgaacctgaccacaaggacccagctgccccctgcctataccaattctttcacacggggcgtgtactatcccgacaaggtgtttagaagctccgtgctgcactccacacaggatctgtttctgcctttcttttctaacgtgacctggttccacgccatccacgtgtccggcaccaatggcacaaagcggttcgacaatcccgtgctgccttttaacgatggcgtgtacttcgccagcaccgagaagtccaacatcatcagaggctggatctttggcaccacactggactctaagacacagagcctgctgatcgtgaacaatgccaccaacgtggtgatcaaggtgtgcgagttccagttttgtaatgatccattcctgggcgtgtactatcacaagaacaataagtcctggatggagtctgagtttcgcgtgtattctagcgccaacaattgcacatttgagtacgtgagccagcccttcctgatggacctggagggcaagcagggcaatttcaagaacctgagggagttcgtgtttaagaatatcgatggctacttcaagatctacagcaagcacaccccaatcaacctggtgcgcgacctgccacagggattctccgccctggagccaactgtggatctgcccatcggcatcaacatcacccggtttcagacactgctggccctgcacagatcctacctgacaccaggcgactcctctagcggatggaccgcaggagctgccgcctactatgtgggctatctgcagccccggaccttcctgctgaagtacaacgagaatggcaccatcacagacgcagtggattgcgccctggaccccctgtctgagacaaagtgtacactgaagagctttaccgtggagaagggcatctatcagacaagcaatttcagggtgcagcctaccgagtccatcgtgcgctttcccaatatcacaaacctgtgcccttttggcgaggtgttcaacgccaccagattcgccagcgtgtacgcctggaatcggaagagaatctccaactgcgtggccgactattctgtgctgtacaactccgcctctttcagcacctttaagtgctatggcgtgtctcccacaaagctgaatgatctgtgctttaccaacgtgtacgccgatagcttcgtgatcaggggagacgaagtgagacagatcgcaccaggacagacaggaaagatcgcagactacaattataagctgcctgacgatttcaccggctgcgtgatcgcctggaactccaacaatctggattctaaagtgggcggcaactacaattatctgtacaggctgtttcgcaagtccaatctgaagccattcgagcgggacatctccacagagatctaccaggccggctctaccccctgcaatggcgtggagggctttaactgttatttccctctgcagtcttacggcttccagccaacaaacggcgtgggctatcagccctacagagtggtggtgctgtcctttgagctgctgcacgcaccagcaacagtgtgcggcccaaagaagtctaccaatctggtgaagaacaagtgcgtgaacttcaacttcaacggactgaccggcacaggcgtgctgaccgagagcaataagaagttcctgccttttcagcagttcggcagggacatcgcagataccacagacgccgtgcgcgaccctcagaccctggagatcctggacatcacaccatgcagcttcggcggcgtgtccgtgatcacaccaggcaccaatacatccaaccaggtggccgtgctgtatcaggacgtgaattgtaccgaggtgcccgtggcaatccacgcagatcagctgacccctacatggcgggtgtactctaccggcagcaacgtgttccagacaagagccggatgcctgatcggagcagagcacgtgaacaatagctatgagtgcgacatccctatcggcgccggcatctgtgccagctaccagacccagacaaactccccatctggagcaggctcccaccatcaccatcaccatcaccatcaccactga

SEQ ID NO: 3821 - DNA, 2148 bp, Artificial Sequence
  Description of Artificial Sequence: Synthetic polynucleotide
atgggcatcctgccaagcccaggaatgcccgccctgctgtctctggtgagcctgctgtccgtgctgctgatgggatgcgtggcagagacaggcacacagtgcgtgaacctgaccacaaggacccagctgccccctgcctataccaattctttcacacggggcgtgtactatcccgacaaggtgtttagaagctccgtgctgcactccacacaggatctgtttctgcctttcttttctaacgtgacctggttccacgccatccacgtgtccggcaccaatggcacaaagcggttcgacaatcccgtgctgccttttaacgatggcgtgtacttcgccagcaccgagaagtccaacatcatcagaggctggatctttggcaccacactggactctaagacacagagcctgctgatcgtgaacaatgccaccaacgtggtgatcaaggtgtgcgagttccagttttgtaatgatccattcctgggcgtgtactatcacaagaacaataagtcctggatggagtctgagtttcgcgtgtattctagcgccaacaattgcacatttgagtacgtgagccagcccttcctgatggacctggagggcaagcagggcaatttcaagaacctgagggagttcgtgtttaagaatatcgatggctacttcaagatctacagcaagcacaccccaatcaacctggtgcgcgacctgccacagggattctccgccctggagccactggtggatctgcccatcggcatcaacatcacccggtttcagacactgctggccctgcacagatcctacctgacaccaggcgactcctctagcggatggaccgcaggagctgccgcctactatgtgggctatctgcagccccggaccttcctgctgaagtacaacgagaatggcaccatcacagacgcagtggattgcgccctggaccccctgtctgagacaaagtgtacactgaagagctttaccgtggagaagggcatctatcagacaagcaatttcagggtgcagcctaccgagtccatcgtgcgctttcccaatatcacaaacctgtgcccttttggcgaggtgttcaacgccaccagattcgccagcgtgtacgcctggaatcggaagagaatctccaactgcgtggccgactattctgtgctgtacaactccgcctctttcagcacctttaagtgctatggcgtgtctcccacaaagctgaatgatctgtgctttaccaacgtgtacgccgatagcttcgtgatcaggggagacgaagtgagacagatcgcaccaggacagacaggaaagatcgcagactacaattataagctgcctgacgatttcaccggctgcgtgatcgcctggaactccaacaatctggattctaaagtgggcggcaactacaattatctgtacaggctgtttcgcaagtccaatctgaagccattcgagcgggacatctccacagagatctaccaggccggctctaccccctgcaatggcgtggagggctttaactgttatttccctctgcagtcttacggcttccagccaacaaacggcgtgggctatcagccctacagagtggtggtgctgtcctttgagctgctgcacgcaccagcaacagtgtgcggcccaaagaagtctaccaatctggtgaagaacaagtgcgtgaacttcaacttcaacggactgaccggcacaggcgtgctgaccgagagcaataagaagttcctgccttttcagcagttcggcagggacatcgcagataccacagacgccgtgcgcgaccctcagaccctggagatcctggacatcacaccatgcagccgtggcggcgtgtccgtgatcacaccaggcaccaatacatccaaccaggtggccgtgctgtatcaggacgtgaattgtaccgaggtgcccgtggcaatccacgcagatcagctgacccctacatggcgggtgtactctaccggcagcaacgtgttccagacaagagccggatgcctgatcggagcagagcacgtgaacaatagctatgagtgcgacatccctatcggcgccggcatctgtgccagctaccagacccagacaaactccccatctggagcaggctcccaccatcaccatcaccatcaccatcaccactga

SEQ ID NO: 3822 - DNA, 2148 bp, Artificial Sequence
  Description of Artificial Sequence: Synthetic polynucleotide
atgggcatcctgccaagcccaggaatgcccgccctgctgtctctggtgagcctgctgtccgtgctgctgatgggatgcgtggcagagacaggcacacagtgcgtgaacctgaccacaaggacccagctgccccctgcctataccaattctttcacacggggcgtgtactatcccgacaaggtgtttagaagctccgtgctgcactccacacaggatctgtttctgcctttcttttctaacgtgacctggttccacgccatccacgtgtccggcaccaatggcacaaagcggttcgacaatcccgtgctgccttttaacgatggcgtgtacttcgccagcaccgagaagtccaacatcatcagaggctggatctttggcaccacactggactctaagacacagagcctgctgatcgtgaacaatgccaccaacgtggtgatcaaggtgtgcgagttccagttttgtaatgatccattcctgggcgtgtactatcacaagaacaataagtcctggatggagtctgagtttcgcgtgtattctagcgccaacaattgcacatttgagtacgtgagccagcccttcctgatggacctggagggcaagcagggcaatttcaagaacctgagggagttcgtgtttaagaatatcgatggctacttcaagatctacagcaagcacaccccaatcaacctggtgcgcgacctgccacagggattctccgccctggagccactggtggatctgcccatcggcatcaacatcacccggtttcagacactgctggccctgggtagatcctacctgacaccaggcgactcctctagcggatggaccgcaggagctgccgcctactatgtgggctatctgcagccccggaccttcctgctgaagtacaacgagaatggcaccatcacagacgcagtggattgcgccctggaccccctgtctgagacaaagtgtacactgaagagctttaccgtggagaagggcatctatcagacaagcaatttcagggtgcagcctaccgagtccatcgtgcgctttcccaatatcacaaacctgtgcccttttggcgaggtgttcaacgccaccagattcgccagcgtgtacgcctggaatcggaagagaatctccaactgcgtggccgactattctgtgctgtacaactccgcctctttcagcacctttaagtgctatggcgtgtctcccacaaagctgaatgatctgtgctttaccaacgtgtacgccgatagcttcgtgatcaggggagacgaagtgagacagatcgcaccaggacagacaggaaagatcgcagactacaattataagctgcctgacgatttcaccggctgcgtgatcgcctggaactccaacaatctggattctaaagtgggcggcaactacaattatctgtacaggctgtttcgcaagtccaatctgaagccattcgagcgggacatctccacagagatctaccaggccggctctaccccctgcaatggcgtggagggctttaactgttatttccctctgcagtcttacggcttccagccaacaaacggcgtgggctatcagccctacagagtggtggtgctgtcctttgagctgctgcacgcaccagcaacagtgtgcggcccaaagaagtctaccaatctggtgaagaacaagtgcgtgaacttcaacttcaacggactgaccggcacaggcgtgctgaccgagagcaataagaagttcctgccttttcagcagttcggcagggacatcgcagataccacagacgccgtgcgcgaccctcagaccctggagatcctggacatcacaccatgcagcttcggcggcgtgtccgtgatcacaccaggcaccaatacatccaaccaggtggccgtgctgtatcaggacgtgaattgtaccgaggtgcccgtggcaatccacgcagatcagctgacccctacatggcgggtgtactctaccggcagcaacgtgttccagacaagagccggatgcctgatcggagcagagcacgtgaacaatagctatgagtgcgacatccctatcggcgccggcatctgtgccagctaccagacccagacaaactccccatctggagcaggctcccaccatcaccatcaccatcaccatcaccactga

SEQ ID NO: 3823 - DNA, 2148 bp, Artificial Sequence
  Description of Artificial Sequence: Synthetic polynucleotide
atgggcatcctgccaagcccaggaatgcccgccctgctgtctctggtgagcctgctgtccgtgctgctgatgggatgcgtggcagagacaggcacacagtgcgtgaacctgaccacaaggacccagctgccccctgcctataccaattctttcacacggggcgtgtactatcccgacaaggtgtttagaagctccgtgctgcactccacacaggatctgtttctgcctttcttttctaacgtgacctggttccacgccatccacgtgtccggcaccaatggcacaaagcggttcgacaatcccgtgctgccttttaacgatggcgtgtacttcgccagcaccgagaagtccaacatcatcagaggctggatctttggcaccacactggactctaagacacagagcctgctgatcgtgaacaatgccaccaacgtggtgatcaaggtgtgcgagttccagttttgtaatgatccattcctgggcgtgtactatcacaagaacaataagtcctggatggagtctgagtttcgcgtgtattctagcgccaacaattgcacatttgagtacgtgagccagcccttcctgatggacctggagggcaagcagggcaatttcaagaacctgagggagttcgtgtttaagaatatcgatggctacttcaagatctacagcaagcacaccccaatcaacctggtgcgcgacctgccacagggattctccgccctggagccactggtggatctgcccatcggcatcaacatcacccggtttcagacactgctggccctgcacagatcctacctgacaccaggcgactcctctagcggatggaccgcaggagctgccgcctactatgtgggctatctgcagccccggaccttcctgctgaagtacaacgagaatggcaccatcacagacgcagtggattgcgccctggaccccctgtctgagacaaagtgtacactgaagagctttaccgtggagaagggcatctatcagacaagcaatttcagggtgcagcctaccgagtccatcgtgcgctttcccaatatcacaaacctgtgcccttttggcgaggtgttcaacgccaccagattcgccagcgtgtacgcctggaatcggaagagaatctccaactgcgtggccgactattctgtgctgtacaactccgcctctttcagcacctttaagtgctatggcgtgtctcccacaaagctgaatgatctgtgctttaccaacgtgtacgccgatagcttcgtgatcaggggagacgaagtgagacagatcgcaccaggacagacaggaaagatcgcagactacaattataagctgcctgacgatttcaccggctgcgtgatcgcctggaactccaacaatctggattctaaagtgggcggcaactacaattatctgtacaggctgtttcgcaagtccaatctgaagccattcgagcgggacatctccacagagaattaccaggccggctctaccccctgcaatggcgtggagggctttaactgttatttccctctgcagtcttacggcttccagccaacaaacggcgtgggctatcagccctacagagtggtggtgctgtcctttgagctgctgcacgcaccagcaacagtgtgcggcccaaagaagtctaccaatctggtgaagaacaagtgcgtgaacttcaacttcaacggactgaccggcacaggcgtgctgaccgagagcaataagaagttcctgccttttcagcagttcggcagggacatcgcagataccacagacgccgtgcgcgaccctcagaccctggagatcctggacatcacaccatgcagcttcggcggcgtgtccgtgatcacaccaggcaccaatacatccaaccaggtggccgtgctgtatcaggacgtgaattgtaccgaggtgcccgtggcaatccacgcagatcagctgacccctacatggcgggtgtactctaccggcagcaacgtgttccagacaagagccggatgcctgatcggagcagagcacgtgaacaatagctatgagtgcgacatccctatcggcgccggcatctgtgccagctaccagacccagacaaactccccatctggagcaggctcccaccatcaccatcaccatcaccatcaccactga

SEQ ID NO: 3824 - DNA, 2148 bp, Artificial Sequence
  Description of Artificial Sequence: Synthetic polynucleotide
atgggcatcctgccaagcccaggaatgcccgccctgctgtctctggtgagcctgctgtccgtgctgctgatgggatgcgtggcagagacaggcacacagtgcgtgaacctgaccacaaggacccagctgccccctgcctataccaattctttcacacggggcgtgtactatcccgacaaggtgtttagaagctccgtgctgcactccacacaggatctgtttctgcctttcttttctaacgtgacctggttccacgccatccacgtgtccggcaccaatggcacaaagcggttcgacaatcccgtgctgccttttaacgatggcgtgtacttcgccagcaccgagaagtccaacatcatcagaggctggatctttggcaccacactggactctaagacacagagcctgctgatcgtgaacaatgccaccaacgtggtgatcaaggtgtgcgagttccagttttgtaatgatccattcctgggcgtgtactatcacaagaacaataagtcctggatggagtctgagtttcgcgtgtattctagcgccaacaattgcacatttgagtacgtgagccagcccttcctgatggacctggagggcaagcagggcaatttcaagaacctgagggagttcgtgtttaagaatatcgatggctacttctatatctacagcaagcacaccccaatcaacctggtgcgcgacctgccacagggattctccgccctggagccactggtggatctgcccatcggcatcaacatcacccggtttcagacactgctggccctgcacagatcctacctgacaccaggcgactcctctagcggatggaccgcaggagctgccgcctactatgtgggctatctgcagccccggaccttcctgctgaagtacaacgagaatggcaccatcacagacgcagtggattgcgccctggaccccctgtctgagacaaagtgtacactgaagagctttaccgtggagaagggcatctatcagacaagcaatttcagggtgcagcctaccgagtccatcgtgcgctttcccaatatcacaaacctgtgcccttttggcgaggtgttcaacgccaccagattcgccagcgtgtacgcctggaatcggaagagaatctccaactgcgtggccgactattctgtgctgtacaactccgcctctttcagcacctttaagtgctatggcgtgtctcccacaaagctgaatgatctgtgctttaccaacgtgtacgccgatagcttcgtgatcaggggagacgaagtgagacagatcgcaccaggacagacaggaaagatcgcagactacaattataagctgcctgacgatttcaccggctgcgtgatcgcctggaactccaacaatctggattctaaagtgggcggcaactacaattatctgtacaggctgtttcgcaagtccaatctgaagccattcgagcgggacatctccacagagatctaccaggccggctctaccccctgcaatggcgtggagggctttaactgttatttccctctgcagtcttacggcttccagccaacaaacggcgtgggctatcagccctacagagtggtggtgctgtcctttgagctgctgcacgcaccagcaacagtgtgcggcccaaagaagtctaccaatctggtgaagaacaagtgcgtgaacttcaacttcaacggactgaccggcacaggcgtgctgaccgagagcaataagaagttcctgccttttcagcagttcggcagggacatcgcagataccacagacgccgtgcgcgaccctcagaccctggagatcctggacatcacaccatgcagcttcggcggcgtgtccgtgatcacaccaggcaccaatacatccaaccaggtggccgtgctgtatcaggacgtgaattgtaccgaggtgcccgtggcaatccacgcagatcagctgacccctacatggcgggtgtactctaccggcagcaacgtgttccagacaagagccggatgcctgatcggagcagagcacgtgaacaatagctatgagtgcgacatccctatcggcgccggcatctgtgccagctaccagacccagacaaactccccatctggagcaggctcccaccatcaccatcaccatcaccatcaccactga

SEQ ID NO: 3825 - DNA, 2148 bp, Artificial Sequence
  Description of Artificial Sequence: Synthetic polynucleotide
atgggcatcctgccaagcccaggaatgcccgccctgctgtctctggtgagcctgctgtccgtgctgctgatgggatgcgtggcagagacaggcacacagtgcgtgaacctgaccacaaggacccagctgccccctgcctataccaattctttcacacggggcgtgtactatcccgacaaggtgtttagaagctccgtgctgcactccacacaggatctgtttctgcctttcttttctaacgtgacctggttccacgccatccacgtgtccggcaccaatggcacaaagcggttcgacaatcccgtgctgccttttaacgatggcgtgtacttcgccagcaccgagaagtccaacatcatcagaggctggatctttggcaccacactggactctaagacacagagcctgctgatcgtgaacaatgccaccaacgtggtgatcaaggtgtgcgagttccagttttgtaatgatccattcctgggcgtgtactatcacaagaacaataagtcctggatggagtctgagtttcgcgtgtattctagcgccaacaattgcacatttgagtacgtgagccagcccttcctgatggacctggagggcaagcagggcaatttcaagaacctgagggagttcgtgtttaagaatatcgatggctacttcaagatctacagcaagcacaccccaatcaacctggtgcgcgacctgccacagggattctccgccctggagccactggtggatctgcccatcggcatcaacatcacccggtttcagacactgctggccctgcacagatcctacctgacaccaggcgactcctctagcggatggaccgcaggagctgccgcctactatgtgggctatctgcagccccggaccttcctgctgaagtacaacgagaatggcaccatcacagacgcagtggattgcgccctggaccccctgtctgagacaaagtgtacactgaagagctttaccgtggagaagggcatctatcagacaagcaatttcagggtgcagcctaccgagtccatcgtgcgctttcccaatatcacaaacctgtgcccttttggcgaggtgttcaacgccaccagattcgccagcgtgtacgcctggaatcggaagagaatctccaactgcgtggccgactattctgtgctgtacaactccgcctctttcagcacctttaagtgctatggcgtgtctcccacaaagctgaatgatctgtgctttaccaacgtgtacgccgatagcttcgtgatcaggggagacgaagtgagacagatcgcaccaggacagacaggaaagatcgcagactacaattataagctgcctgacgatttcaccggctgcgtgatcgcctggaactccaacaatctggattctaaagtgggcggcaactacaattatctgtacaggctgtttcgcaagtccaatctgaagccattcgagcgggacatctccacagagatctaccaggccggctctaccccctgcaatggcgtggagggctttaactgttatttccctctgcagtcttacacgttccagccaacaaacggcgtgggctatcagccctacagagtggtggtgctgtcctttgagctgctgcacgcaccagcaacagtgtgcggcccaaagaagtctaccaatctggtgaagaacaagtgcgtgaacttcaacttcaacggactgaccggcacaggcgtgctgaccgagagcaataagaagttcctgccttttcagcagttcggcagggacatcgcagataccacagacgccgtgcgcgaccctcagaccctggagatcctggacatcacaccatgcagcttcggcggcgtgtccgtgatcacaccaggcaccaatacatccaaccaggtggccgtgctgtatcaggacgtgaattgtaccgaggtgcccgtggcaatccacgcagatcagctgacccctacatggcgggtgtactctaccggcagcaacgtgttccagacaagagccggatgcctgatcggagcagagcacgtgaacaatagctatgagtgcgacatccctatcggcgccggcatctgtgccagctaccagacccagacaaactccccatctggagcaggctcccaccatcaccatcaccatcaccatcaccactga

SEQ ID NO: 3826 - DNA, 2148 bp, Artificial Sequence
  Description of Artificial Sequence: Synthetic polynucleotide
atgggcatcctgccaagcccaggaatgcccgccctgctgtctctggtgagcctgctgtccgtgctgctgatgggatgcgtggcagagacaggcacacagtgcgtgaacctgaccacaaggacccagctgccccctgcctataccaattctttcacacggggcgtgtactatcccgacaaggtgtttagaagctccgtgctgcactccacacaggatctgtttctgcctttcttttctaacgtgacctggttccacgccatccacgtgtccggcaccaatggcacaaagcggttcgacaatcccgtgctgccttttaacgatggcgtgtacttcgccagcaccgagaagtccaacatcatcagaggctggatctttggcaccacactggactctaagacacagagcctgctgatcgtgaacaatgccaccaacgtggtgatcaaggtgtgcgagttccagttttgtaatgatccattcctgggcgtgtactatcacaagaacaataagtcctggatggagtctgagtttcgcgtgtattctagcgccaacaattgcacatttgagtacgtgagccagcccttcctgatggacctggagggcaagcagggcaatttcaagaacctgagggagttcgtgtttaagaatatcgatggctacttcaagatctacagcaagcacaccccaatcaacctggtgcgcgacctgccacagggattctccgccctggagccactggtggatctgcccatcggcatcaacatcacccggtttcagacactgctggccctgcacagatcctacctgacaccaggcgactcctctagcggatggaccgcaggagctgccgcctactatgtgggctatctgcagccccggaccttcctgctgaagtacaacgagaatggcaccatcacagacgcagtggattgcgccctggaccccctgtctgagacaaagtgtacactgaagagctttaccgtggagaagggcatctatcagacaagcaatttcagggtgcagcctaccgagtccatcgtgcgctttcccaatatcacaaacctgtgcccttttggcgaggtgttcaacgccaccagattcgccagcgtgtacgcctggaatcggaagagaatctccaactgcgtggccgactattctgtgctgtacaactccgcctctttcagcacctttaagtgctatggcgtgtctcccacaaagctgaatgatctgtgctttaccaacgtgtacgccgatagcttcgtgatcaggggagacgaagtgagacagatcgcaccaggacagacaggaaagatcgcagactacaattataagctgcctgacgatttcaccggctgcgtgatcgcctggaactccaacaatctggattctaaagtgggcggcaactacaattatctgtacaggctgtttcgcaagtccaatctgaagccattcgagcgggacatctccacagagatctaccaggccggctctaccccctgcaatggcgtggagggctttaactgttatttccctctgcagtcttacggcttccagccaacaaacggcgtgggctatcagccctacagagtggtggtgctgtcctttgagctgcaacacgcaccagcaacagtgtgcggcccaaagaagtctaccaatctggtgaagaacaagtgcgtgaacttcaacttcaacggactgaccggcacaggcgtgctgaccgagagcaataagaagttcctgccttttcagcagttcggcagggacatcgcagataccacagacgccgtgcgcgaccctcagaccctggagatcctggacatcacaccatgcagcttcggcggcgtgtccgtgatcacaccaggcaccaatacatccaaccaggtggccgtgctgtatcaggacgtgaattgtaccgaggtgcccgtggcaatccacgcagatcagctgacccctacatggcgggtgtactctaccggcagcaacgtgttccagacaagagccggatgcctgatcggagcagagcacgtgaacaatagctatgagtgcgacatccctatcggcgccggcatctgtgccagctaccagacccagacaaactccccatctggagcaggctcccaccatcaccatcaccatcaccatcaccactga

SEQ ID NO: 3827 - DNA, 2148 bp, Artificial Sequence
  Description of Artificial Sequence: Synthetic polynucleotide
atgggcatcctgccaagcccaggaatgcccgccctgctgtctctggtgagcctgctgtccgtgctgctgatgggatgcgtggcagagacaggcacacagtgcgtgaacctgaccacaaggacccagctgccccctgcctataccaattctttcacacggggcgtgtactatcccgacaaggtgtttagaagctccgtgctgcactccacacaggatctgtttctgcctttcttttctaacgtgacctggttccacgccatccacgtgtccggcaccaatggcacaaagcggttcgacaatcccgtgctgccttttaacgatggcgtgtacttcgccagcaccgagaagtccaacatcatcagaggctggatctttggcaccacactggactctaagacacagagcctgctgatcgtgaacaatgccaccaacgtggtgatcaaggtgtgcgagttccagttttgtaatgatccattcctgggcgtgtactatcacaagaacaataagtcctggatggagtctgagtttcgcgtgtattctagcgccaacaattgcacatttgagtacgtgagccagcccttcctgatggacctggagggcaagcagggcaatttcaagaacctgagggagttcgtgtttaagaatatcgatggctacttcaagatctacagcaagcacaccccaatcaacctggtgcgcgacctgccacagggattctccgccctggagccactggtggatctgcccatcggcatcaacatcacccggtttcagacactgctggccctgcacagatcctacctgacaccaggcgactcctctagcggatggaccgcaggagctgccgcctactatgtgggctatctgcagccccggaccttcctgctgaagtacaacgagaatggcaccatcacagacgcagtggattgcgccctggaccccctgtctgagacaaagtgtacactgaagagctttaccgtggagaagggcatctatcagacaagcaatttcagggtgcagcctaccgagtccatcgtgcgctttcccaatatcacaaacctgtgcccttttggcgaggtgttcaacgccaccagattcgccagcgtgtacgcctggaatcggaagagaatctccaactgcgtggccgactattctgtgctgtacaactccgcctctttcagcacctttaagtgctatggcgtgtctcccacaaagctgaatgatctgtgctttaccaacgtgtacgccgatagcttcgtgatcaggggagacgaagtgagacagatcgcaccaggacagacaggaaagatcgcagactacaattataagctgcctgacgatttcaccggctgcgtgatcgcctggaactccaacaatctggattctaaagtgggcggcaactacaattatctgtacaggctgtttcgcaagtccaatctgaagccattcgagcgggacatctccacagagatctaccaggccggctctaccccctgcaatggcgtggagggctttaactgttatttccctctgcagtcttacggcttccagccaacaaacggcgtgggctatcagccctacagagtggtggtgctgtcctttgagctgctgcacgcaccagcaacagtgtgcggcccaaagaagtctaccaatctggtgaagaacaagtgcgtgaacttcaacttcaacggactgaccggcacaggcgtgctgaccgagagcaataagaagttcctgccttttcagcagttccttagggacatcgcagataccacagacgccgtgcgcgaccctcagaccctggagatcctggacatcacaccatgcagcttcggcggcgtgtccgtgatcacaccaggcaccaatacatccaaccaggtggccgtgctgtatcaggacgtgaattgtaccgaggtgcccgtggcaatccacgcagatcagctgacccctacatggcgggtgtactctaccggcagcaacgtgttccagacaagagccggatgcctgatcggagcagagcacgtgaacaatagctatgagtgcgacatccctatcggcgccggcatctgtgccagctaccagacccagacaaactccccatctggagcaggctcccaccatcaccatcaccatcaccatcaccactga

SEQ ID NO: 3828 - DNA, 2148 bp, Artificial Sequence
  Description of Artificial Sequence: Synthetic polynucleotide
atgggcatcctgccaagcccaggaatgcccgccctgctgtctctggtgagcctgctgtccgtgctgctgatgggatgcgtggcagagacaggcacacagtgcgtgaacctgaccacaaggacccagctgccccctgcctataccaattctttcacacggggcgtgtactatcccgacaaggtgtttagaagctccgtgctgcactccacacaggatctgtttctgcctttcttttctaacgtgacctggttccacgccatccacgtgtccggcaccaatggcacaaagcggttcgacaatcccgtgctgccttttaacgatggcgtgtacttcgccagcaccgagaagtccaacatcatcagaggctggatctttggcaccacactggactctaagacacagagcctgctgatcgtgaacaatgccaccaacgtggtgatcaaggtgtgcgagttccagttttgtaatgatccattcctgggcgtgtactatcacaagaacaataagtcctggatggagtctgagtttcgcgtgtattctagcgccaacaattgcacatttgagtacgtgagccagcccttcctgatggacctggagggcaagcagggcaatttcaagaacctgagggagttcgtgtttaagaatatcgatggctacttcaagatctacagcaagcacaccccaatcaacctggtgcgcgacctgccacagggattctccgccctggagccactggtggatctgcccatcggcatcaacatcacccggtttcagacactgctggccctgcacagatcctacctgacaccaggcgactcctctagcggatggaccgcaggagctgccgcctactatgtgggctatctgcagccccggaccttcctgctgaagtacaacgagaatggcaccatcacagacgcagtggattgcgccctggaccccctgtctgagacaaagtgtacactgaagagctttaccgtggagaagggcatctatcagacaagcaatttcagggtgcagcctaccgagtccatcgtgcgctttcccaatatcacaaacctgtgcccttttggcgaggtgttcaacgccaccagattcgccagcgtgtacgcctggaatcggaagagaatctccaactgcgtggccgactattctgtgctgtacaactccgcctctttcagcacctttaagtgctatggcgtgtctcccacaaagctgaatgatctgtgctttaccaacgtgtacgccgatagcttcgtgatcaggggagacgaagtgagacagatcgcaccaggacagacaggaaagatcgcagactacaattataagctgcctgacgatttcaccggctgcgtgatcgcctggaactccaacaatctggattctaaagtgggcggcaactacaattatctgtacaggctgtttcgcaagtccaatctgaagccattcgagcgggacatctccacagagatctaccaggccggctctaccccctgcaatggcgtggagggctttaactgttatacgcctctgcagtcttacggcttccagccaacaaacggcgtgggctatcagccctacagagtggtggtgctgtcctttgagctgctgcacgcaccagcaacagtgtgcggcccaaagaagtctaccaatctggtgaagaacaagtgcgtgaacttcaacttcaacggactgaccggcacaggcgtgctgaccgagagcaataagaagttcctgccttttcagcagttcggcagggacatcgcagataccacagacgccgtgcgcgaccctcagaccctggagatcctggacatcacaccatgcagcttcggcggcgtgtccgtgatcacaccaggcaccaatacatccaaccaggtggccgtgctgtatcaggacgtgaattgtaccgaggtgcccgtggcaatccacgcagatcagctgacccctacatggcgggtgtactctaccggcagcaacgtgttccagacaagagccggatgcctgatcggagcagagcacgtgaacaatagctatgagtgcgacatccctatcggcgccggcatctgtgccagctaccagacccagacaaactccccatctggagcaggctcccaccatcaccatcaccatcaccatcaccactga

SEQ ID NO: 3829 - DNA, 2148 bp, Artificial Sequence
  Description of Artificial Sequence: Synthetic polynucleotide
atgggcatcctgccaagcccaggaatgcccgccctgctgtctctggtgagcctgctgtccgtgctgctgatgggatgcgtggcagagacaggcacacagtgcgtgaacctgaccacaaggacccagctgccccctgcctataccaattctttcacacggggcgtgtactatcccgacaaggtgtttagaagctccgtgctgcactccacacaggatctgtttctgcctttcttttctaacgtgacctggttccacgccatccacgtgtccggcaccaatggcacaaagcggttcgacaatcccgtgctgccttttaacgatggcgtgtacttcgccagcaccgagaagtccaacatcatcagaggctggatctttggcaccacactggactctaagacacagagcctgctgatcgtgaacaatgccaccaacgtggtgatcaaggtgtgcgagttccagttttgtaatgatccattcctgggcgtgtactatcacaagaacaataagtcctggatggagtctgagtttcgcgtgtattctagcgccaacaattgcacatttgagtacgtgagccagcccttcctgatggacctggagggcaagcagggcaatttcaagaacctgagggagttcgtgtttaagaatatcgatggctacttcaagatctacagcaagcacaccccaatcaacctggtgcgcgacctgccacagggattctccgccctggagccactggtggatctgcccatcggcatcaacatcacccggtttcagacactgctggccctgcacagatcctacctgacaccaggcgactcctctagcggatggaccgcaggagctgccgcctactatgtgggctatctgcagccccggaccttcctgctgaagtacaacgagaatggcaccatcacagacgcagtggattgcgccctggaccccctgtctgagacaaagtgtacactgaagagctttaccgtggagaagggcatctatcagacaagcaatttcagggtgcagcctaccgagtccatcgtgcgctttcccaatatcacaaaccgatgcccttttggcgaggtgttcaacgccaccagattcgccagcgtgtacgcctggaatcggaagagaatctccaactgcgtggccgactattctgtgctgtacaactccgcctctttcagcacctttaagtgctatggcgtgtctcccacaaagctgaatgatctgtgctttaccaacgtgtacgccgatagcttcgtgatcaggggagacgaagtgagacagatcgcaccaggacagacaggaaagatcgcagactacaattataagctgcctgacgatttcaccggctgcgtgatcgcctggaactccaacaatctggattctaaagtgggcggcaactacaattatctgtacaggctgtttcgcaagtccaatctgaagccattcgagcgggacatctccacagagatctaccaggccggctctaccccctgcaatggcgtggagggctttaactgttatttccctctgcagtcttacggcttccagccaacaaacggcgtgggctatcagccctacagagtggtggtgctgtcctttgagctgctgcacgcaccagcaacagtgtgcggcccaaagaagtctaccaatctggtgaagaacaagtgcgtgaacttcaacttcaacggactgaccggcacaggcgtgctgaccgagagcaataagaagttcctgccttttcagcagttcggcagggacatcgcagataccacagacgccgtgcgcgaccctcagaccctggagatcctggacatcacaccatgcagcttcggcggcgtgtccgtgatcacaccaggcaccaatacatccaaccaggtggccgtgctgtatcaggacgtgaattgtaccgaggtgcccgtggcaatccacgcagatcagctgacccctacatggcgggtgtactctaccggcagcaacgtgttccagacaagagccggatgcctgatcggagcagagcacgtgaacaatagctatgagtgcgacatccctatcggcgccggcatctgtgccagctaccagacccagacaaactccccatctggagcaggctcccaccatcaccatcaccatcaccatcaccactga

SEQ ID NO: 3830 - DNA, 2148 bp, Artificial Sequence
  Description of Artificial Sequence: Synthetic polynucleotide
atgggcatcctgccaagcccaggaatgcccgccctgctgtctctggtgagcctgctgtccgtgctgctgatgggatgcgtggcagagacaggcacacagtgcgtgaacctgaccacaaggacccagctgccccctgcctataccaattctttcacacggggcgtgtactatcccgacaaggtgtttagaagctccgtgctgcactccacacaggatctgtttctgcctttcttttctaacgtgacctggttccacgccggacacgtgtccggcaccaatggcacaaagcggttcgacaatcccgtgctgccttttaacgatggcgtgtacttcgccagcaccgagaagtccaacatcatcagaggctggatctttggcaccacactggactctaagacacagagcctgctgatcgtgaacaatgccaccaacgtggtgatcaaggtgtgcgagttccagttttgtaatgatccattcctgggcgtgtactatcacaagaacaataagtcctggatggagtctgagtttcgcgtgtattctagcgccaacaattgcacatttgagtacgtgagccagcccttcctgatggacctggagggcaagcagggcaatttcaagaacctgagggagttcgtgtttaagaatatcgatggctacttcaagatctacagcaagcacaccccaatcaacctggtgcgcgacctgccacagggattctccgccctggagccactggtggatctgcccatcggcatcaacatcacccggtttcagacactgctggccctgcacagatcctacctgacaccaggcgactcctctagcggatggaccgcaggagctgccgcctactatgtgggctatctgcagccccggaccttcctgctgaagtacaacgagaatggcaccatcacagacgcagtggattgcgccctggaccccctgtctgagacaaagtgtacactgaagagctttaccgtggagaagggcatctatcagacaagcaatttcagggtgcagcctaccgagtccatcgtgcgctttcccaatatcacaaacctgtgcccttttggcgaggtgttcaacgccaccagattcgccagcgtgtacgcctggaatcggaagagaatctccaactgcgtggccgactattctgtgctgtacaactccgcctctttcagcacctttaagtgctatggcgtgtctcccacaaagctgaatgatctgtgctttaccaacgtgtacgccgatagcttcgtgatcaggggagacgaagtgagacagatcgcaccaggacagacaggaaagatcgcagactacaattataagctgcctgacgatttcaccggctgcgtgatcgcctggaactccaacaatctggattctaaagtgggcggcaactacaattatctgtacaggctgtttcgcaagtccaatctgaagccattcgagcgggacatctccacagagatctaccaggccggctctaccccctgcaatggcgtggagggctttaactgttatttccctctgcagtcttacggcttccagccaacaaacggcgtgggctatcagccctacagagtggtggtgctgtcctttgagctgctgcacgcaccagcaacagtgtgcggcccaaagaagtctaccaatctggtgaagaacaagtgcgtgaacttcaacttcaacggactgaccggcacaggcgtgctgaccgagagcaataagaagttcctgccttttcagcagttcggcagggacatcgcagataccacagacgccgtgcgcgaccctcagaccctggagatcctggacatcacaccatgcagcttcggcggcgtgtccgtgatcacaccaggcaccaatacatccaaccaggtggccgtgctgtatcaggacgtgaattgtaccgaggtgcccgtggcaatccacgcagatcagctgacccctacatggcgggtgtactctaccggcagcaacgtgttccagacaagagccggatgcctgatcggagcagagcacgtgaacaatagctatgagtgcgacatccctatcggcgccggcatctgtgccagctaccagacccagacaaactccccatctggagcaggctcccaccatcaccatcaccatcaccatcaccactga

SEQ ID NO: 3831 - DNA, 2148 bp, Artificial Sequence
  Description of Artificial Sequence: Synthetic polynucleotide
atgggcatcctgccaagcccaggaatgcccgccctgctgtctctggtgagcctgctgtccgtgctgctgatgggatgcgtggcagagacaggcacacagtgcgtgaacctgaccacaaggacccagctgccccctgcctataccaattctttcacacggggcgtgtactatcccgacaaggtgtttagaagctccgtgctgcactccacacaggatctgtttctgcctttcttttctaacgtgacctggttccacgccatccacgtgtccggcaccaatggcacaaagcggttcgacaatcccgtgctgccttttaacgatggcgtgtacttcgccagcaccgagaagtccaacatcatcagaggctggatctttggcaccacactggactctaagacacagagcctgctgatcgtgaacaatgccaccaacgtggtgatcaaggtgtgcgagttccagttttgtaatgatccattcctgggcgtgtactatcacaagaacaataagtcctggatggagtctgagtttcgcgtgtattctagcgccaacaattgcacatttgagtacgtgagccagcccttcctgatggacctggagggcaagcagggcaatttcaagaacctgagggagttcgtgtttaagaatatcgatggctacttcaagatctacagcaagcacaccccaatcaacctggtgcgcgacctgccacagggattctccgccctggagccactggtggatctgcccatcggcatcaacatcacccggtttcagacactgctggccctgcacagatcctacctgacaccaggcgactcctctagcggatggaccgcaggagctgccgcctactatgtgggctatctgcagccccggaccttcctgctgaagtacaacgagaatggcaccatcacagacgcagtggattgcgccctggaccccctgtctgagacaaagtgtacactgaagagctttaccgtggagaagggcatctatcagacaagcaatttcagggtgcagcctaccgagtccatcgtgcgctttcccaatatcacaaacctgtgcccttttggcgaggtgttcaacgccaccagattcgccagcgtgtacgcctggaatcggaagagaatctccaactgcgtggccgactattctgtgctgtacaactccgcctctttcagcacctttaagtgctatggcgtgtctcccacaaagctgaatgatctgtgctttaccaacgtgtacgccgatagcttcgtgatcaggggagacgaagtgagacagatcgcaccaggacagacaggaaagatcgcagactacaattataagctgcctgacgatttcaccggctgcgtgatcgcctggaactccaacaatctggattctaaagtgggcggcaactacaattatctgtacaggctgtttcgcaagtccaatctgaagccattcgagcgggacatctccacagagatctaccaggccggctctaccccctgcaatggcgtggagggctttaactgttatttccctctgcagtcttacggcttccagccaacaaacggcgtgaactatcagccctacagagtggtggtgctgtcctttgagctgctgcacgcaccagcaacagtgtgcggcccaaagaagtctaccaatctggtgaagaacaagtgcgtgaacttcaacttcaacggactgaccggcacaggcgtgctgaccgagagcaataagaagttcctgccttttcagcagttcggcagggacatcgcagataccacagacgccgtgcgcgaccctcagaccctggagatcctggacatcacaccatgcagcttcggcggcgtgtccgtgatcacaccaggcaccaatacatccaaccaggtggccgtgctgtatcaggacgtgaattgtaccgaggtgcccgtggcaatccacgcagatcagctgacccctacatggcgggtgtactctaccggcagcaacgtgttccagacaagagccggatgcctgatcggagcagagcacgtgaacaatagctatgagtgcgacatccctatcggcgccggcatctgtgccagctaccagacccagacaaactccccatctggagcaggctcccaccatcaccatcaccatcaccatcaccactga

SEQ ID NO: 3832 - DNA, 2148 bp, Artificial Sequence
  Description of Artificial Sequence: Synthetic polynucleotide
atgggcatcctgccaagcccaggaatgcccgccctgctgtctctggtgagcctgctgtccgtgctgctgatgggatgcgtggcagagacaggcacacagtgcgtgaacctgaccacaaggacccagctgccccctgcctataccaattctttcacacggggcgtgtactatcccgacaaggtgtttagaagctccgtgctgcactccacacaggatctgtttctgcctttcttttctaacgtgacctggttccacgccatccacgtgtccggcaccaatggcacaaagcggttcgacaatcccgtgctgccttttaacgatggcgtgtacttcgccagcaccgagaagtccaacatcatcagaggctggatctttggcaccacactggactctaagacacagagcctgctgatcgtgaacaatgccaccaacgtggtgatcaaggtgtgcgagttccagttttgtaatgatccattcctgggcgtgtactatcacaagaacaataagtcctggatggagtctgagtttcgcgtgtattctagcgccaacaattgcacatttgagtacgtgagccagcccttcctgatggacctggagggcaagcagggcaatttcaagaacctgagggagttcgtgtttaagaatatcgatggctacttcaagatctacagcaagcacaccccaatcaacctggtgcgcgacctgccacagggattctccgccctggagccactggtggatctgcccatcggcatcaacatcacccggtttcagacactgctggccctgcacagatcctacctgacaccaggcgactcctctagcggatggaccgcaggagctgccgcctactatgtgggctatctgcagccccggaccttcctgctgaagtacaacgagaatggcaccatcacagacgcagtggattgcgccctggaccccctgtctgagacaaagtgtacactgaagagctttaccgtggagaagggcatctatcagacaagcaatttcagggtgcagcctaccgagtccatcgtgcgctttcccaatatcacaaacctgtgcccttttggcgaggtgttcaacgccaccagattcgccagcgtgtacgcctggaatcggaagagaatctccaactgcgtggccgactattctgtgctgtacaactccgcctctttcagcacctttaagtgctatggcgtgtctcccacaaagctgaatgatctgtgctttaccaacgtgtacgccgatagcttcgtgatcaggggagacgaagtgagacagatcgcaccaggacagacaggaaagatcgcagactacaattataagctgcctgacgatttcaccggctgcgtgatcgcctggaactccaacaatctggattctaaagtgggcggcaactacaattatctgtacaggctgtttcgcaagtccaatctgaagccattcgagcgggacatctccacagagatctaccaggccggctctaccccctgcaatggcgtggagggctttaactgttatttccctctgcagtcttacggcttccagccaacaaacggcgtgggctatcagccctacagagtggtggtgctgtcctttgagctgacgcacgcaccagcaacagtgtgcggcccaaagaagtctaccaatctggtgaagaacaagtgcgtgaacttcaacttcaacggactgaccggcacaggcgtgctgaccgagagcaataagaagttcctgccttttcagcagttcggcagggacatcgcagataccacagacgccgtgcgcgaccctcagaccctggagatcctggacatcacaccatgcagcttcggcggcgtgtccgtgatcacaccaggcaccaatacatccaaccaggtggccgtgctgtatcaggacgtgaattgtaccgaggtgcccgtggcaatccacgcagatcagctgacccctacatggcgggtgtactctaccggcagcaacgtgttccagacaagagccggatgcctgatcggagcagagcacgtgaacaatagctatgagtgcgacatccctatcggcgccggcatctgtgccagctaccagacccagacaaactccccatctggagcaggctcccaccatcaccatcaccatcaccatcaccactga

SEQ ID NO: 3833 - DNA, 2148 bp, Artificial Sequence
  Description of Artificial Sequence: Synthetic polynucleotide
atgggcatcctgccaagcccaggaatgcccgccctgctgtctctggtgagcctgctgtccgtgctgctgatgggatgcgtggcagagacaggcacacagtgcgtgaacctgaccacaaggacccagctgccccctgcctataccaattctttcacacggggcgtgtactatcccgacaaggtgtttagaagctccgtgctgcactccacacaggatctgtttctgcctttcttttctaacgtgacctggttccacgccatccacgtgtccggcaccaatggcacaaagcggttcgacaatcccgtgctgccttttaacgatggcgtgtacttcgccagcaccgagaagtccaacatcatcagaggctggatctttggcaccacactggactctaagacacagagcctgctgatcgtgaacaatgccaccaacgtggtgatcaaggtgtgcgagttccagttttgtaatgatccattcctgggcgtgtactatcacaagaacaataagtcctggatggagtctgagtttcgcgtgtattctagcgccaacaattgcacatttgagtacgtgagccagcccttcctgatggacctggagggcaagcagggcaatttcaagaacctgagggagttcgtgtttaagaatatcgatggctacttcaagatctacagcaagcacaccccaatcaacctggtgcgcgacctgccacagggattctccgccctggagccactggtggatctgcccatcggcatcaacatcacccggtttcagacactgctggccctgcacagatcctacctgacaccaggcgactcctctagcggatggaccgcaggagctgccgcctactatgtgggctatctgcagccccggaccttcctgctgaagtacaacgagaatggcaccatcacagacgcagtggattgcgccctggaccccctgtctgagacaaagtgtacactgaagagctttaccgtggagaagggcatctatcagacaagcaatttcagggtgcagcctaccgagtccatcgtgcgctttcccaatatcacaaacctgtgcccttttggcgaggtgttcaacgccaccagattcgccagcgtgtacgcctggaatcggaagagaatctccaactgcgtggccgactattctgtgctgtacaactccgcctctttcagcacctttaagtgctatggcgtgtctcccacaaagctgaatgatctgtgctttaccaacgtgtacgccgatagcttcgtgatcaggggagacgaagtgagacagatcgcaccaggacagacaggaaagatcgcagactacaattataagctgcctgacgatttcaccggctgcgtgatcgcctggaactccaacaatctggattctaaagtgggcggcaactacaattatctgtacaggctgtttcgcaagtccaatctgaagccattcgagcgggacatctccacagagatctaccaggccggctctaccccctgcaatggcgtggagggctttaactgttatttccctctgcagtcttacggcttccagccaacaaacggcgtgggctatcagccctacagagtggtggtgctgtcctttgagctgctgcacgcaccagcaacagtgtgcggcccaaagaagtctaccaatctggtgaagaacaagtgcgtgaacttcaacttcaacggactgaccggcacaggcgtgctgaccgagagcaataagaagttcctgccttttcagcagttcggcagggacatcgcagataccacagacgccgtgcgcgaccctcagaccctggagatcctggacatcacaccatgcagctcaggcggcgtgtccgtgatcacaccaggcaccaatacatccaaccaggtggccgtgctgtatcaggacgtgaattgtaccgaggtgcccgtggcaatccacgcagatcagctgacccctacatggcgggtgtactctaccggcagcaacgtgttccagacaagagccggatgcctgatcggagcagagcacgtgaacaatagctatgagtgcgacatccctatcggcgccggcatctgtgccagctaccagacccagacaaactccccatctggagcaggctcccaccatcaccatcaccatcaccatcaccactga

SEQ ID NO: 3834 - DNA, 2148 bp, Artificial Sequence
  Description of Artificial Sequence: Synthetic polynucleotide
atgggcatcctgccaagcccaggaatgcccgccctgctgtctctggtgagcctgctgtccgtgctgctgatgggatgcgtggcagagacaggcacacagtgcgtgaacctgaccacaaggacccagctgccccctgcctataccaattctttcacacggggcgtgtactatcccgacaaggtgtttagaagctccgtgctgcactccacacaggatctgtttctgcctttcttttctaacgtgacctggttccacgccaaacacgtgtccggcaccaatggcacaaagcggttcgacaatcccgtgctgccttttaacgatggcgtgtacttcgccagcaccgagaagtccaacatcatcagaggctggatctttggcaccacactggactctaagacacagagcctgctgatcgtgaacaatgccaccaacgtggtgatcaaggtgtgcgagttccagttttgtaatgatccattcctgggcgtgtactatcacaagaacaataagtcctggatggagtctgagtttcgcgtgtattctagcgccaacaattgcacatttgagtacgtgagccagcccttcctgatggacctggagggcaagcagggcaatttcaagaacctgagggagttcgtgtttaagaatatcgatggctacttcaagatctacagcaagcacaccccaatcaacctggtgcgcgacctgccacagggattctccgccctggagccactggtggatctgcccatcggcatcaacatcacccggtttcagacactgctggccctgcacagatcctacctgacaccaggcgactcctctagcggagaaaccgcaggagctgccgcctactatgtgggctatctgcagccccggaccttcctgctgaagtacaacgagaatggcaccatcacagacgcagtggattgcgccctggaccccctgtctgagacaaagtgtacactgaagagctttaccgtggagaagggcatctatcagacaagcaatttcagggtgcagcctaccgagtccatcgtgcgctttcccaatatcacaaacaaatgcccttttggcgaggtgttcaacgccaccagattcgccagcgtgtacgcctggaatcggaagagaatctccaactgcgtggccgactattctgtgctgtacaactccgcctctttcagcacctttaagtgctatggcgtgtctcccacaaagctgaatgatctgtgctttaccaacgtgtacgccgatagcttcgtgatcaggggagacgaagtgagacagatcgcaccaggacagacaggaaagatcgcagactacaattataagctgcctgacgatttcaccggctgcgtgatcgcctggaactccaacaatctggattctaaagtgggcggcaactacaattatctgtacaggctgtttcgcaagtccaatctgaagccattcgagcgggacatctccacagagatctaccaggccggctctaccccctgcaatggcgtggagggctttaactgttatttccctctgcagtcttacggcttccagccaacaaacggcccgggccaacagccctacagagtggtggtgctgtcctttgagctgctgcacgcaccagcaacagtgtgcggcccaaagaagtctaccaatctggtgaagaacaagtgcgtgaacttcaacttcaacggactgaccggcacaggcgtgctgaccgagagcaataagaagttcctgccttttcagcagttcggcagggacatcgcagataccacagacgccgtgcgcgaccctcagaccctggagatcctggacatcacaccatgcagcttcggcggcgtgtccgtgatcacaccaggcaccaatacatccaaccaggtggccgtgctgtatcaggacgtgaattgtaccgaggtgcccgatgcaatccacgcagatcagctgacccctacatggcgggtgtactctaccggcagcaacgtgttccagacaagagccggatgcctgatcggagcagagcacgtgaacaatagctatgagtgcgacatccctatcggcgccggcatctgtgccagctaccagacccagacaaactccccatctggagcaggctcccaccatcaccatcaccatcaccatcaccactga

SEQ ID NO: 3835 - DNA, 2148 bp, Artificial Sequence
  Description of Artificial Sequence: Synthetic polynucleotide
atgggcatcctgccaagcccaggaatgcccgccctgctgtctctggtgagcctgctgtccgtgctgctgatgggatgcgtggcagagacaggcacacagtgcgtgaacctgaccacaaggacccagctgccccctgcctataccaattctttcacacggggcgtgtactatcccgacaaggtgtttagaagctccgtgctgcactccacacaggatctgtttctgcctttcttttctaacgtgacctggttccacgccatccacgtgtccggcaccaatggcacaaagcggttcgacaatcccgtgctgccttttaacgatggcgtgtacttcgccagcaccgagaagtccaacatcatcagaggctggatctttggcaccacactggactctaagacacagagcctgctgatcgtgaacaatgccaccaacgtggtgatcaaggtgtgcgagttccagttttgtaatgatccattcctgggcgtgtactatcacaagaacaataagtcctggatggagtctgagtttcgcgtgtattctagcgccaacaattgcacatttgagtacgtgagccagcccttcctgatggacctggagggcaagcagggcaatttcaagaacctgagggagttcgtgtttaagaatatcgatggctacttcaagatctacagcaagcacaccccaatcaacctggtgcgcgacctgccacagggattctccgccctggagccactggtggatctgcccatcggcatcaacatcacccggtttcagacactgctggccctgcacagatcctacctgacaccaggcgactcctctagcggatggaccgcaggagctgccgcctactatgtgggctatctgcagccccggaccttcctgctgaagtacaacgagaatggcaccatcacagacgcagtggattgcgccctggaccccctgtctgagacaaagtgtacactgaagagctttaccgtggagaagggcatctatcagacaagcaatttcagggtgcagcctaccgagtccatcgtgcgctttcccaatatcacaaacctgtgcccttttggcgaggtgttcaacgccaccagattcgccagcgtgtacgcctggaatcggaagagaatctccaactgcgtggccgactattctgtgctgtacaactccgcctctttcagcacctttaagtgctatggcgtgtctcccacaaagctgaatgatctgtgctttaccaacgtgtacgccgatagcttcgtgatcaggggagacgaagtgagacagatcgcaccaggacagacaggaaagatcgcagactacaattataagctgcctgacgatttcaccggctgcgtgatcgcctggaactccaacaatctggattctaaagtgggcggcaactacaattatctgtacaggctgtttcgcaagtccaatctgaagccattcgagcgggacatctccacagagatctaccaggccggctctaccccctgcaatggcgtggagggctttaactgttatttccctctgcagtcttacggcttccagccaacaaacggcgtgggctatcagccctacagagtggtggtgctgtcctttgagctgctgcacgcaccagcaacagtgtgcggcccaaagaagtctaccaatctggtgaagaacaagtgcgtgaacttcaacttcaacggactgaccggcacaggcgtgctgaccgagagcaataagaagttcctgccttttcagcagttcggcagggacatcgcagataccacagacgccgtgcgcgaccctcagaccctggagatcctggacatcacaccatgcagcttcggcggcgtgtccgtgatcacaccaggcaccaatacatccaaccaggtggccgtgctgtatcaggacgtgaattgtaccgaggtgcccgctgcaatccacgcagatcagctgacccctacatggcgggtgtactctaccggcagcaacgtgttccagacaagagccggatgcctgatcggagcagagcacgtgaacaatagctatgagtgcgacatccctatcggcgccggcatctgtgccagctaccagacccagacaaactccccatctggagcaggctcccaccatcaccatcaccatcaccatcaccactga

SEQ ID NO: 3836 - DNA, 2148 bp, Artificial Sequence
  Description of Artificial Sequence: Synthetic polynucleotide
atgggcatcctgccaagcccaggaatgcccgccctgctgtctctggtgagcctgctgtccgtgctgctgatgggatgcgtggcagagacaggcacacagtgcgtgaacctgaccacaaggacccagctgccccctgcctataccaattctttcacacggggcgtgtactatcccgacaaggtgtttagaagctccgtgctgcactccacacaggatctgtttctgcctttcttttctaacgtgacctggttccacgccatccacgtgtccggcaccaatggcacaaagcggttcgacaatcccgtgctgccttttaacgatggcgtgtacttcgccagcaccgagaagtccaacatcatcagaggctggatctttggcaccacactggactctaagacagatagcctgctgatcgtgaacaatgccaccaacgtggtgatcaaggtgtgcgagttccagttttgtaatgatccattcctgggcgtgtactatcacaagaacaataagtcctggatggagtctgagtttcgcgtgtattctagcgccaacaattgcacatttgagtacgtgagccagcccttcctgatggacctggagggcaagcagggcaatttcaagaacctgagggagttcgtgtttaagaatatcgatggctacttcaagatctacagcaagcacaccccaatcaacctggtgcgcgacctgccacagggattctccgccctggagccactggtggatctgcccatcggcatcaacatcacccggtttcagacactgctggccctgcacagatcctacctgacaccaggcgactcctctagcggatggaccgcaggagctgccgcctactatgtgggctatctgcagccccggaccttcctgctgaagtacaacgagaatggcaccatcacagacgcagtggattgcgccctggaccccctgtctgagacaaagtgtacactgaagagctttaccgtggagaagggcatctatcagacaagcaatttcagggtgcagcctaccgagtccatcgtgcgctttcccaatatcacaaacctgtgcccttttggcgaggtgttcaacgccaccagattcgccagcgtgtacgcctggaatcggaagagaatctccaactgcgtggccgactattctgtgctgtacaactccgcctctttcagcacctttaagtgctatggcgtgtctcccacaaagctgaatgatctgtgctttaccaacgtgtacgccgatagcttcgtgatcaggggagacgaagtgagacagatcgcaccaggacagacaggaaagatcgcagactacaattataagctgcctgacgatttcaccggctgcgtgatcgcctggaactccaacaatctggattctaaagtgggcggcaactacaattatctgtacaggctgtttcgcaagtccaatctgaagccattcgagcgggacatctccacagagatctaccaggccggctctaccccctgcaatggcgtggagggctttaactgttatttccctctgcagtcttacggcttccagccaacaaacggcgtgggctatcagccctacagagtggtggtgctgtcctttgagctgctgcacgcaccagcaacagtgtgcggcccaaagaagtctaccaatctggtgaagaacaagtgcgtgaacttcaacttcaacggactgaccggcacaggcgtgctgaccgagagcaataagaagttcctgccttttcagcagttcggcagggacatcgcagataccacagacgccgtgcgcgaccctcagaccctggagatcctggacatcacaccatgcagcttcggcggcgtgtccgtgatcacaccaggcaccaatacatccaaccaggtggccgtgctgtatcaggacgtgaattgtaccgaggtgcccgtggcaatccacgcagatcagctgacccctacatggcgggtgtactctaccggcagcaacgtgttccagacaagagccggatgcctgatcggagcagagcacgtgaacaatagctatgagtgcgacatccctatcggcgccggcatctgtgccagctaccagacccagacaaactccccatctggagcaggctcccaccatcaccatcaccatcaccatcaccactga

SEQ ID NO: 3837 - DNA, 2148 bp, Artificial Sequence
  Description of Artificial Sequence: Synthetic polynucleotide
atgggcatcctgccaagcccaggaatgcccgccctgctgtctctggtgagcctgctgtccgtgctgctgatgggatgcgtggcagagacaggcacacagtgcgtgaacctgaccacaaggacccagctgccccctgcctataccaattctttcacacggggcgtgtactatcccgacaaggtgtttagaagctccgtgctgcactccacacaggatctgtttctgcctttcttttctaacgtgacctggttccacgccatccacgtgtccggcaccaatggcacaaagcggttcgacaatcccgtgctgccttttaacgatggcgtgtacttcgccagcaccgagaagtccaacatcatcagaggctggatctttggcaccacactggactctaagacacagagcctgctgatcgtgaacaatgccaccaacgtggtgatcaaggtgtgcgagttccagttttgtaatgatccattcctgggcgtgtactatcacaagaacaataagtcctggatggagtctgagtttcgcgtgtattctagcgccaacaattgcacatttgagtacgtgagccagcccttcctgatggacctggagggcaagcagggcaatttcaagaacctgagggagttcgtgtttaagaatatcgatggctacttcaagatctacagcaagcacaccccaatcaacctggtgcgcgacctgccacagggattctccgccctggagccactggtggatctgcccatcggcatcaacatcacccggtttcagacactgctggccctgcacagatcctacctgacaccaggcgactcctctagcggatggaccgcaggagctgccgcctactatgtgggctatctgcagccccggaccttcctgctgaagtacaacgagaatggcaccatcacagacgcagtggattgcgccctggaccccctgtctgagacaaagtgtacactgaagagctttaccgtggagaagggcatctatcagacaagcaatttcagggtgcagcctaccgagtccatcgtgcgctttcccaatatcacaaacctgtgcccttttggcgaggtgttcaacgccaccagattcgccagcgtgtacgcctggaatcggaagagaatctccaactgcgtggccgactattctgtgctgtacaactccgcctctttcagcacctttaagtgctatggcgtgtctcccacaaagctgaatgatctgtgctttaccaacgtgtacgccgatagcttcgtgatcaggggagacgaagtgagacagatcgcaccaggacagacaggaaagatcgcagactacaattataagctgcctgacgatttcaccggctgcgtgatcgcctggaactccaacaatctggattctaaagtgggcggcaactacaattatctgtacaggctgtttcgcaagtccaatctgaagccattcgagcgggacatctccacagagatctaccaggccggctctaccccctgcaatggcgtggagggctttaactgtaaattccctctgcagtcttacggcttccagccaacaaacggcgtgggctatcagccctacagagtggtggtgctgtcctttgagctgctgcacgcaccagcaacagtgtgcggcccaaagaagtctaccaatctggtgaagaacaagtgcgtgaacttcaacttcaacggactgaccggcacaggcgtgctgaccgagagcaataagaagttcctgccttttcagcagttcggcagggacatcgcagataccacagacgccgtgcgcgaccctcagaccctggagatcctggacatcacaccatgcagcttcggcggcgtgtccgtgatcacaccaggcaccaatacatccaaccaggtggccgtgctgtatcaggacgtgaattgtaccgaggtgcccgtggcaatccacgcagatcagctgacccctacatggcgggtgtactctaccggcagcaacgtgttccagacaagagccggatgcctgatcggagcagagcacgtgaacaatagctatgagtgcgacatccctatcggcgccggcatctgtgccagctaccagacccagacaaactccccatctggagcaggctcccaccatcaccatcaccatcaccatcaccactga

SEQ ID NO: 3838 - DNA, 2148 bp, Artificial Sequence
  Description of Artificial Sequence: Synthetic polynucleotide
atgggcatcctgccaagcccaggaatgcccgccctgctgtctctggtgagcctgctgtccgtgctgctgatgggatgcgtggcagagacaggcacacagtgcgtgaacctgaccacaaggacccagctgccccctgcctataccaattctttcacacggggcgtgtactatcccgacaaggtgtttagaagctccgtgctgcactccacacaggatctgtttctgcctttcttttctaacgtgacctggttccacgccatccacgtgtccggcaccaatggcacaaagcggttcgacaatcccgtgctgccttttaacgatggcgtgtacttcgccagcaccgagaagtccaacatcatcagaggctggatctttggcaccacactggactctaagacacagagcctgctgatcgtgaacaatgccaccaacgtggtgatcaaggtgtgcgagttccagttttgtaatgatccattcctgggcgtgtactatcacaagaacaataagtcctggatggagtctgagtttcgcgtgtattctagcgccaacaattgcacatttgagtacgtgagccagcccttcctgatggacctggagggcaagcagggcaatttcaagaacctgagggagttcgtgtttaagaatatcgatggctacttcaagatctacagcaagcacaccccaatcaacctggtgcgcgacctgccacagggattctccgccctggagccactggtggatctgcccatcggcatcaacatcacccggtttcagacactgctggccctgcacagatcctacctgacaccaggcgactcctctagcggatggaccgcaggagctgccgcctactatgtgggctatctgcagccccggaccttcctgctgaagtacaacgagaatggcaccatcacagacgcagtggattgcgccctggaccccctgtctgagacaaagtgtacactgaagagctttaccgtggagaagggcatctatcagacaagcaatttcagggtgcagcctaccgagtccatcgtgcgctttcccaatatcacaaacctgtgccctcttggcgaggtgttcaacgccaccagattcgccagctcatacgcctggaatcggaagagaatctccaactgcgtggccgactattctgtgctgtacaactccgcctctttcagcacctttaagtgctatggcgtgtctcccacaaagctgaatgatctgtgctttaccaacgtgtacgccgatcgattcgtgatcaggggagacgaagtgagacagatcgcaccaggacagacaggaaagatcgcagactacaattataagctgcctgacgatttcaccggctgcgtgatcgcctggaactccaacaatctggatgcgaaagtgggcggcaactacaattatctgtacaggctgtttcgcaagtccaatctgaagccattcgagcggtttatctccacagagatctaccaggccggctctacccccgcgaatggcgtggagggctttaactgttatttccctctgcagtcttacgtattccagccaacaaacggcgtgacgtatcagccctacagagtggtggtgctgtcctttgagctgctgcacgcaccacatacagtgtgcggcccaaagaagtctaccaatctggtgaagaacaagtgcgtgaacttcaacttcaacggactgaccggcacaggcgtgctgaccgagagcaataagaagttcctgccttttcagcagttcggcagggacatcgcagataccacagacgccgtgcgcgaccctcagaccctggagatcctggacatcacaccatgcagcttcggcggcgtgtccgtgatcacaccaggcaccaatacatccaaccaggtggccgtgctgtatcaggacgtgaattgtaccgaggtgcccgtggcaatccacgcagatcagctgacccctacatggcgggtgtactctaccggcagcaacgtgttccagacaagagccggatgcctgatcggagcagagcacgtgaacaatagctatgagtgcgacatccctatcggcgccggcatctgtgccagctaccagacccagacaaactccccatctggagcaggctcccaccatcaccatcaccatcaccatcaccactga

SEQ ID NO: 3839 - DNA, 2148 bp, Artificial Sequence
  Description of Artificial Sequence: Synthetic polynucleotide
atgggcatcctgccaagcccaggaatgcccgccctgctgtctctggtgagcctgctgtccgtgctgctgatgggatgcgtggcagagacaggcacacagtgcgtgaacctgaccacaaggacccagctgccccctgcctataccaattctttcacacggggcgtgtactatcccgacaaggtgtttagaagctccgtgctgcactccacacaggatctgtttctgcctttcttttctaacgtgacctggttccacgccatccacgtgtccggcaccaatggcacaaagcggttcgacaatcccgtgctgccttttaacgatggcgtgtacttcgccagcaccgagaagtccaacatcatcagaggctggatctttggcaccacactggactctaagacacagagcctgctgatcgtgaacaatgccaccaacgtggtgatcaaggtgtgcgagttccagttttgtaatgatccattcctgggcgtgtactatcacaagaacaataagtcctggatggagtctgagtttcgcgtgtattctagcgccaacaattgcacatttgagtacgtgagccagcccttcctgatggacctggagggcaagcagggcaatttcaagaacctgagggagttcgtgtttaagaatatcgatggctacttcaagatctacagcaagcacaccccaatcaacctggtgcgcgacctgccacagggattctccgccctggagtgtctggtggatctgcccatcggcatcaacatcacccggtttcagacactgctggccctgcacagatcctacctgacaccaggcgactcctctagcggatggaccgcaggagctgccgcctactatgtgggctatctgcagccccggaccttcctgctgaagtacaacgagaatggcaccatcacagacgcagtggattgcgccctggaccccctgtctgagacaaagtgtacactgaagagctttaccgtggagaagggcatctatcagacaagcaatttcagggtgcagcctaccgagtccatcgtgcgctttcccaatatcacaaacctgtgcccttttggcgaggtgttcaacgccaccagattcgccagcgtgtacgcctggaatcggaagagaatctccaactgcgtggccgactattctgtgctgtacaactccgcctctttcagcacctttaagtgctatggcgtgtctcccacaaagctgaatgatctgtgctttaccaacgtgtacgccgatagcttcgtgatcaggggagacgaagtgagacagatcgcaccaggacagacaggaaagatcgcagactacaattataagctgcctgacgatttcaccggctgcgtgatcgcctggaactccaacaatctggattctaaagtgggcggcaactacaattatctgtacaggctgtttcgcaagtccaatctgaagccattcgagcgggacatctccacagagatctaccaggccggctctaccccctgcaatggcgtggagggctttaactgttatttccctctgcagtcttacggcttccagccaacaaacggcgtgggctatcagccctacagagtggtggtgctgtcctttgagctgctgcacgcaccagcaacagtgtgcggcccaaagaagtctaccaatctggtgaagaacaagtgcgtgaacttcaacttcaacggactgaccggcacaggcgtgctgaccgagagcaataagaagttcctgccttttcagcagttcggcagggacatcgcagataccacagacgccgtgcgcgaccctcagaccctggagatcctggacatcacaccatgcagcttcggcggcgtgtccgtgatcacaccaggcaccaatacatccaaccaggtggccgtgctgtatcaggacgtgaattgtaccgaggtgcccgtggcaatccacgcagatcagctgacccctacatggcgggtgtactctaccggcagcaacgtgttccagacaagagccggatgcctgatcggagcagagcacgtgaacaatagctatgagtgcgacatccctatcggcgccggcatctgtgccagctaccagacccagacaaactccccatctggagcaggctcccaccatcaccatcaccatcaccatcaccactga

SEQ ID NO: 3840 - DNA, 2148 bp, Artificial Sequence
  Description of Artificial Sequence: Synthetic polynucleotide
atgggcatcctgccaagcccaggaatgcccgccctgctgtctctggtgagcctgctgtccgtgctgctgatgggatgcgtggcagagacaggcacacagtgcgtgaacctgaccacaaggacccagctgccccctgcctataccaattctttcacacggggcgtgtactatcccgacaaggtgtttagaagctccgtgctgcactccacacaggatctgtttctgcctttcttttctaacgtgacctggttccacgcctaccacgtgtccggcaccaatggcacaaagcggttcgacaatcccgtgctgccttttaacgatggcgtgtacttcgccagcaccgagaagtccaacatcatcagaggctggatctttggcaccacactggactctaagacacagagcctgctgatcgtgaacaatgccaccaacgtggtgatcaaggtgtgcgagttccagttttgtaatgatccattcctgggcgtgtactatcacaagaacaataagtcctggatggagtctgagtttcgcgtgtattctagcgccaacaattgcacatttgagtaccatagccagcccttcctgatggacctggagggcaagcagggcaatttcaagaacctgagggagttcgtgtttaagaatatcgatggctacttcaagatctacagcaagcacaccccaatcaacctggtgcgcgacctgccacagggattctccgccctggagccactggtggatctgcccatcggcatcaacatcacccggtttcagacactgctggccctgcacagatcctacctgacaccaggcgactcctctagcggagaaaccgcaggagctgccgcctactatgtgggctatctgcagccccggaccttcctgctgaagtacaacgagaatggcaccatcacagacgcagtggattgcgccctggaccccctgtctgagacaaagtgtacactgaagagctttaccgtggagaagggcatctatcagacaagcaatttcagggtgcagcctaccgagtccatcgtgcgctttcccaatatcacaaaccattgcccttttggcgaggtgttcaacgccaccagattcgccagcgtgtacgcctggaatcggaagagaatctccaactgcgtggccgactattctgtgctgtacaactccgcctctttcagcacctttaagtgctatggcgtgtctcccacaaagctgaatgatctgtgctttaccaacgtgtacgccgatagcttcgtgatcaggggagacgaagtgagacagatcgcaccaggacagacaggaaagatcgcagactacaattataagctgcctgacgatttcaccggctgcgtgatcgcctggaactccaacaatctggattctaaagtgggcggcaactacaattatctgtacaggctgtttcgcaagtccaatctgaagccattcgagcgggacatctccacagagatctaccaggccggctctaccccctgcaatggcgtggagggctttaactgttatttccctctgcagtcttacggcttccagccaacaaacggcgtgggccaacagccctacagagtggtggtgctgtcctttgagctgctgcacgcaccagcaacagtgtgcggcccaaagaagtctaccaatctggtgaagaacaagtgcgtgaacttcaacttcaacggactgaccggcacaggcgtgctgaccgagagcaataagaagttcctgccttttcagcagttcggcagggacatcgcagataccacagacgccgtgcgcgaccctcagaccctggagatcctggacatcacaccatgcagcttcggcggcgtgtccgtgatcacaccaggcaccaatacatccaaccaggtggccgtgctgtatcaggacgtgaattgtaccgaggtgcccgatgcaatccacgcagatcagctgacccctacatggcgggtgtactctaccggcagcaacgtgttccagacaagagccggatgcctgatcggagcagagcacgtgaacaatagctatgagtgcgacatccctatcggcgccggcatctgtgccagctaccagacccagacaaactccccatctggagcaggctcccaccatcaccatcaccatcaccatcaccactga

SEQ ID NO: 3841 - DNA, 2148 bp, Artificial Sequence
  Description of Artificial Sequence: Synthetic polynucleotide
atgggcatcctgccaagcccaggaatgcccgccctgctgtctctggtgagcctgctgtccgtgctgctgatgggatgcgtggcagagacaggcacacagtgcgtgaacctgaccacaaggacccagctgccccctgcctataccaattctttcacacggggcgtgtactatcccgacaaggtgtttagaagctccgtgctgcactccacacaggatctgtttctgcctttcttttctaacgtgacctggttccacgccatccacgtgtccggcaccaatggcacaaagcggttcgacaatcccgtgctgccttttaacgatggcgtgtacttcgccagcaccgagaagtccaacatcatcagaggctggatctttggcaccacactggactctaagacacagagcctgctgatcgtgaacaatgaaaccaacgtggtgatcaaggtgtgcgagttccagttttgtaatgatccattcctgggcgtgtactatcacaagaacaataagtcctggatggagtctgagtttcgcgtgtattctagcgccaacaattgcacatttgagtacgtgagccagcccttcctgatggacctggagggcaagcagggcaatttcaagaacctgagggagttcgtgtttaagaatatcgatggctacttcaagatctacagcaagcacaccccaatcaacctggtgcgcgacctgccacagggattctccgccctggagccactggtggatctgcccatcggcatcaacatcacccggtttcagacactgctggccctgcacagatcctacctgacaccaggcgactcctctagcggatggaccgcaggagctgccgcctactatgtgggctatctgcagccccggaccttcctgctgaagtacaacgagaatggcaccatcacagacgcagtggattgcgccctggaccccctgtctgagacaaagtgtacactgaagagctttaccgtggagaagggcatctatcagacaagcaatttcagggtgcagcctaccgagtccatcgtgcgctttcccaatatcacaaacctgtgcccttttggcgaggtgttcaacgccaccagattcgccagcgtgtacgcctggaatcggaagagaatctccaactgcgtggccgactattctgtgctgtacaactccgcctctttcagcacctttaagtgctatggcgtgtctcccacaaagctgaatgatctgtgctttaccaacgtgtacgccgatagcttcgtgatcaggggagacgaagtgagacagatcgcaccaggacagacaggaaagatcgcagactacaattataagctgcctgacgatttcaccggctgcgtgatcgcctggaactccaacaatctggattctaaagtgggcggcaactacaattatctgtacaggctgtttcgcaagtccaatctgaagccattcgagcgggacatctccacagagatctaccaggccggctctaccccctgcaatggcgtggagggctttaactgttatttccctctgcagtcttacggcttccagccaacaaacggcgtgggctatcagccctacagagtggtggtgctgtcctttgagctgctgcacgcaccagcaacagtgtgcggcccaaagaagtctaccaatctggtgaagaacaagtgcgtgaacttcaacttcaacggactgaccggcacaggcgtgctgaccgagagcaataagaagttcctgccttttcagcagttcggcagggacatcgcagataccacagacgccgtgcgcgaccctcagaccctggagatcctggacatcacaccatgcagcttcggcggcgtgtccgtgatcacaccaggcaccaatacatccaaccaggtggccgtgctgtatcaggacgtgaattgtaccgaggtgcccgtggcaatccacgcagatcagctgacccctacatggcgggtgtactctaccggcagcaacgtgttccagacaagagccggatgcctgatcggagcagagcacgtgaacaatagctatgagtgcgacatccctatcggcgccggcatctgtgccagctaccagacccagacaaactccccatctggagcaggctcccaccatcaccatcaccatcaccatcaccactga

SEQ ID NO: 3842 - DNA, 2148 bp, Artificial Sequence
  Description of Artificial Sequence: Synthetic polynucleotide
atgggcatcctgccaagcccaggaatgcccgccctgctgtctctggtgagcctgctgtccgtgctgctgatgggatgcgtggcagagacaggcacacagtgcgtgaacctgaccacaaggacccagctgccccctgcctataccaattctttcacacggggcgtgtactatcccgacaaggtgtttagaagctccgtgctgcactccacacaggatctgtttctgcctttcttttctaacgtgacctggttccacgccatccacgtgtccggcaccaatggcacaaagcggttcgacaatcccgtgctgccttttaacgatggcgtgtacttcgccagcaccgagaagtccaacatcatcagaggctggatctttggcaccacactggactctaagacacagagcctgctgatcgtgaacaatgccaccaacgtggtgatcaaggtgtgcgagttccagttttgtaatgatccattcctgggcgtgtactatcacaagaacaataagtcctggatggagtctgagtttcgcgtgtattctagcgccaacaattgcacatttgagtacgtgagccagcccttcctgatggacctggagggcaagcagggcaatttcaagaacctgagggagttcgtgtttaagaatatcgatggctacttcaagatctacagcaagcacaccccaatcaacctggtgcgcgacctgccacagggattctccgccctggagccacaagtggatctgcccatcggcatcaacatcacccggtttcagacactgctggccctgcacagatcctacctgacaccaggcgactcctctagcggatggaccgcaggagctgccgcctactatgtgggctatctgcagccccggaccttcctgctgaagtacaacgagaatggcaccatcacagacgcagtggattgcgccctggaccccctgtctgagacaaagtgtacactgaagagctttaccgtggagaagggcatctatcagacaagcaatttcagggtgcagcctaccgagtccatcgtgcgctttcccaatatcacaaacctgtgcccttttggcgaggtgttcaacgccaccagattcgccagcgtgtacgcctggaatcggaagagaatctccaactgcgtggccgactattctgtgctgtacaactccgcctctttcagcacctttaagtgctatggcgtgtctcccacaaagctgaatgatctgtgctttaccaacgtgtacgccgatagcttcgtgatcaggggagacgaagtgagacagatcgcaccaggacagacaggaaagatcgcagactacaattataagctgcctgacgatttcaccggctgcgtgatcgcctggaactccaacaatctggattctaaagtgggcggcaactacaattatctgtacaggctgtttcgcaagtccaatctgaagccattcgagcgggacatctccacagagatctaccaggccggctctaccccctgcaatggcgtggagggctttaactgttatttccctctgcagtcttacggcttccagccaacaaacggcgtgggctatcagccctacagagtggtggtgctgtcctttgagctgctgcacgcaccagcaacagtgtgcggcccaaagaagtctaccaatctggtgaagaacaagtgcgtgaacttcaacttcaacggactgaccggcacaggcgtgctgaccgagagcaataagaagttcctgccttttcagcagttcggcagggacatcgcagataccacagacgccgtgcgcgaccctcagaccctggagatcctggacatcacaccatgcagcttcggcggcgtgtccgtgatcacaccaggcaccaatacatccaaccaggtggccgtgctgtatcaggacgtgaattgtaccgaggtgcccgtggcaatccacgcagatcagctgacccctacatggcgggtgtactctaccggcagcaacgtgttccagacaagagccggatgcctgatcggagcagagcacgtgaacaatagctatgagtgcgacatccctatcggcgccggcatctgtgccagctaccagacccagacaaactccccatctggagcaggctcccaccatcaccatcaccatcaccatcaccactga

SEQ ID NO: 3843 - DNA, 2148 bp, Artificial Sequence
  Description of Artificial Sequence: Synthetic polynucleotide
atgggcatcctgccaagcccaggaatgcccgccctgctgtctctggtgagcctgctgtccgtgctgctgatgggatgcgtggcagagacaggcacacagtgcgtgaacctgaccacaaggacccagctgccccctgcctataccaattctttcacacggggcgtgtactatcccgacaaggtgtttagaagctccgtgctgcactccacacaggatctgtttctgcctttcttttctaacgtgacctggttccacgccatccacgtgtccggcaccaatggcacaaagcggttcgacaatcccgtgctgccttttaacgatggcgtgtacttcgccagcaccgagaagtccaacatcatcagaggctggatctttggcaccacactggactctaagacacagagcctgctgatcgtgaacaatgccaccaacgtggtgatcaaggtgtgcgagttccagttttgtaatgatccattcctgggcgtgtactatcacaagaacaataagtcctggatggagtctgagtttcgcgtgtattctagcgccaacaattgcacatttgagtacgtgagccagcccttcctgatggacctggagggcaagcagggcaatttcaagaacctgagggagttcgtgtttaagaatatcgatggctacttcaagatctacagcaagcacaccccaatcaacctggtgcgcgacctgccacagggattctccgccctggagccactggtggatctgcccatcggcatcaacatcacccggtttcagacactgctggccctgcacagatcctacctgacaccaggcgactcctctagcggatggaccgcaggagctgccgcctactatgtgggctatctgcagccccggaccttcctgctgaagtacaacgagaatggcaccatcacagacgcagtggattgcgccctggaccccctgtctgagacaaagtgtacactgaagagctttaccgtggagaagggcatctatcagacaagcaatttcagggtgcagcctaccgagtccatcgtgcgctttcccaatatcacaaacctgtgcccttttggcgaggtgttcaacgccaccagattcgccagcgtgtacgcctggaatcggaagagaatctccaactgcgtggccgactattctgtgctgtacaactccgcctctttcagcacctttaagtgctatggcgtgtctcccacaaagctgaatgatctgtgctttaccaacgtgtacgccgatagcttcgtgatcaggggagacgaagtgagacagatcgcaccaggacagacaggaaagatcgcagactacaattataagctgcctgacgatttcaccggctgcgtgatcgcctggaactccaacaatctggattctaaagtgggcggcaactacaattatctgtacaggctgtttcgcaagtccaatctgaagccattcgagcgggacatctccacagagatctaccaggccggctctaccccctgcaatggcgtggagggctttaactgttatttccctctgcagtcttacggcttccagccaacaaacggcgtgggctatcagccctacagagtggtggtgctgtcctttgagctgctgcacgcaccagcaacagtgtgcggcccaaagaagtctaccaatctggtgaagaacaagtgcgtgaacttcaacttcaacggactgaccggcacaggcgtgctgaccgagagcaataagaagttcctgccttttcagcagttcggcagggacatcgcagataccacagacgccgtgcgcgaccctcagaccctggagatcctggacatcacaccatgcagcttcggcggcgtgtccgtgatcacaccaggcaccaatacatccaaccaggtggccgtgctgtatcaggacgtgaattgtaccgaggtgcccgtggcaatccacgcagatcagctgacccctacatggcgggtgtactctaccggcagcaacgtgttccagacaagagccggatgcctgatcggagcagagccggtgaacaatagctatgagtgcgacatccctatcggcgccggcatctgtgccagctaccagacccagacaaactccccatctggagcaggctcccaccatcaccatcaccatcaccatcaccactga

SEQ ID NO: 3844 - DNA, 2148 bp, Artificial Sequence
  Description of Artificial Sequence: Synthetic polynucleotide
atgggcatcctgccaagcccaggaatgcccgccctgctgtctctggtgagcctgctgtccgtgctgctgatgggatgcgtggcagagacaggcacacagtgcgtgaacctgaccacaaggacccagctgccccctgcctataccaattctttcacacggggcgtgtactatcccgacaaggtgtttagaagctccgtgctgcactccacacaggatctgtttctgcctttcttttctaacgtgacctggttccacgccatccacgtgtccggcaccaatggcacaaagcggttcgacaatcccgtgctgccttttaacgatggcgtgtacttcgccagcaccgagaagtccaacatcatcagaggctggatctttggcaccacactggactctaagacacagagcctgctgatcgtgaacaatgccaccaacgtggtgatcaaggtgtgcgagttccagttttgtaatgatccattcctgggcgtgtactatcacaagaacaataagtcctggatggagtctgagtttcgcgtgtattctagcgccaacaattgcacatttgagtacgtgagccagcccttcctgatggacctggagggcaagcagggcaatttcaagaacctgagggagttcgtgtttaagaatatcgatggctacttcaagatctacagcaagcacaccccaatcaacctggtgcgcgacctgccacagggattctccgccctggagccaaaagtggatctgcccatcggcatcaacatcacccggtttcagacactgctggccctgcacagatcctacctgacaccaggcgactcctctagcggatggaccgcaggagctgccgcctactatgtgggctatctgcagccccggaccttcctgctgaagtacaacgagaatggcaccatcacagacgcagtggattgcgccctggaccccctgtctgagacaaagtgtacactgaagagctttaccgtggagaagggcatctatcagacaagcaatttcagggtgcagcctaccgagtccatcgtgcgctttcccaatatcacaaacctgtgcccttttggcgaggtgttcaacgccaccagattcgccagcgtgtacgcctggaatcggaagagaatctccaactgcgtggccgactattctgtgctgtacaactccgcctctttcagcacctttaagtgctatggcgtgtctcccacaaagctgaatgatctgtgctttaccaacgtgtacgccgatagcttcgtgatcaggggagacgaagtgagacagatcgcaccaggacagacaggaaagatcgcagactacaattataagctgcctgacgatttcaccggctgcgtgatcgcctggaactccaacaatctggattctaaagtgggcggcaactacaattatctgtacaggctgtttcgcaagtccaatctgaagccattcgagcgggacatctccacagagatctaccaggccggctctaccccctgcaatggcgtggagggctttaactgttatttccctctgcagtcttacggcttccagccaacaaacggcgtgggctatcagccctacagagtggtggtgctgtcctttgagctgctgcacgcaccagcaacagtgtgcggcccaaagaagtctaccaatctggtgaagaacaagtgcgtgaacttcaacttcaacggactgaccggcacaggcgtgctgaccgagagcaataagaagttcctgccttttcagcagttcggcagggacatcgcagataccacagacgccgtgcgcgaccctcagaccctggagatcctggacatcacaccatgcagcttcggcggcgtgtccgtgatcacaccaggcaccaatacatccaaccaggtggccgtgctgtatcaggacgtgaattgtaccgaggtgcccgtggcaatccacgcagatcagctgacccctacatggcgggtgtactctaccggcagcaacgtgttccagacaagagccggatgcctgatcggagcagagcacgtgaacaatagctatgagtgcgacatccctatcggcgccggcatctgtgccagctaccagacccagacaaactccccatctggagcaggctcccaccatcaccatcaccatcaccatcaccactga

SEQ ID NO: 3845 - DNA, 2148 bp, Artificial Sequence
  Description of Artificial Sequence: Synthetic polynucleotide
atgggcatcctgccaagcccaggaatgcccgccctgctgtctctggtgagcctgctgtccgtgctgctgatgggatgcgtggcagagacaggcacacagtgcgtgaacctgaccacaaggacccagctgccccctgcctataccaattctttcacacggggcgtgtactatcccgacaaggtgtttagaagctccgtgctgcactccacacaggatctgtttctgcctttcttttctaacgtgacctggttccacgccatccacgtgtccggcaccaatggcacaaagcggttcgacaatcccgtgctgccttttaacgatggcgtgtacttcgccagcaccgagaagtccaacatcatcagaggctggatctttggcaccacactggactctaagacacagagcctgctgatcgtgaacaatgccaccaacgtggtgatcaaggtgtgcgagttccagttttgtaatgatccattcctgggcgtgtactatcacaagaacaataagtcctggatggagtctgagtttcgcgtgtattctagcgccaacaattgcacatttgagtacgtgagccagcccttcctgatggacctggagggcaagcagggcaatttcaagaacctgagggagttcgtgtttaagaatatcgatggctacttcaagatctacagcaagcacaccccaatcaacctggtgcgcgacctgccacagggattctccgccctggagccactggtggatctgcccatcggcatcaacatcacccggtttcagacactgctggccctgcacagatcctacctgacaccaggcgactcctctagcggatggaccgcaggagctgccgcctactatgtgggctatctgcagccccggaccttcctgctgaagtacaacgagaatggcaccatcacagacgcagtggattgcgccctggaccccctgtctgagacaaagtgtacactgaagagctttaccgtggagaagggcatctatcagacaagcaatttcagggtgcagcctaccgagtccatcgtgcgctttcccaatatcacaaacctgtgcccttttggcgaggtgttcaacgccaccagattcgccagcgtgtacgcctggaatcggaagagaatctccaactgcgtggccgactattctgtgctgtacaactccgcctctttcagcacctttaagtgctatggcgtgtctcccacaaagctgaatgatctgtgctttaccaacgtgtacgccgatagcttcgtgatcaggggagacgaagtgagacagatcgcaccaggacagacaggaaagatcgcagactacaattataagctgcctgacgatttcaccggctgcgtgatcgcctggaactccaacaatctggattctaaagtgggcggcaactacaattatctgtacaggctgtttcgcaagtccaatctgaagccattcgagcgggacatctccacagagatctaccaggccggctctaccccctgcaatggcgtggagggctttaactgttatttccctctgcagtcttacggcttccagccaacaaacggcgtgggctatcagccctacagagtggtggtgctgtcctttgagtgtctgcacgcaccagcaacagtgtgcggcccaaagaagtctaccaatctggtgaagaacaagtgcgtgaacttcaacttcaacggactgaccggcacaggcgtgctgaccgagagcaataagaagttcctgccttttcagcagttcggcagggacatcgcagataccacagacgccgtgcgcgaccctcagaccctggagatcctggacatcacaccatgcagcttcggcggcgtgtccgtgatcacaccaggcaccaatacatccaaccaggtggccgtgctgtatcaggacgtgaattgtaccgaggtgcccgtggcaatccacgcagatcagctgacccctacatggcgggtgtactctaccggcagcaacgtgttccagacaagagccggatgcctgatcggagcagagcacgtgaacaatagctatgagtgcgacatccctatcggcgccggcatctgtgccagctaccagacccagacaaactccccatctggagcaggctcccaccatcaccatcaccatcaccatcaccactga

SEQ ID NO: 3846 - DNA, 2148 bp, Artificial Sequence
  Description of Artificial Sequence: Synthetic polynucleotide
atgggcatcctgccaagcccaggaatgcccgccctgctgtctctggtgagcctgctgtccgtgctgctgatgggatgcgtggcagagacaggcacacagtgcgtgaacctgaccacaaggacccagctgccccctgcctataccaattctttcacacggggcgtgtactatcccgacaaggtgtttagaagctccgtgctgcactccacacaggatctgtttctgcctttcttttctaacgtgacctggttccacgccatccacgtgtccggcaccaatggcacaaagcggttcgacaatcccgtgctgccttttaacgatggcgtgtacttcgccagcaccgagaagtccaacatcatcagaggctggatctttggcaccacactggactctaagacacagagcctgctgatcgtgaacaatgccaccaacgtggtgatcaaggtgtgcgagttccagttttgtaatgatccattcctgggcgtgtactatcacaagaacaataagtcctggatggagtctgagtttcgcgtgtattctagcgccaacaattgcacatttgagtacgtgagccagcccttcctgatggacctggagggcaagcagggcaatttcaagaacctgagggagttcgtgtttaagaatatcgatggctacttcaagatctacagcaagcacaccccaatcaacctggtgcgcgacctgccacagggattctccgccctggagccactggtggatctgcccatcggcatcaacatcacccggtttcagacactgctggccctgtcaagatcctacctgacaccaggcgactcctctagcggatggaccgcaggagctgccgcctactatgtgggctatctgcagccccggaccttcctgctgaagtacaacgagaatggcaccatcacagacgcagtggattgcgccctggaccccctgtctgagacaaagtgtacactgaagagctttaccgtggagaagggcatctatcagacaagcaatttcagggtgcagcctaccgagtccatcgtgcgctttcccaatatcacaaacctgtgcccttttggcgaggtgttcaacgccaccagattcgccagcgtgtacgcctggaatcggaagagaatctccaactgcgtggccgactattctgtgctgtacaactccgcctctttcagcacctttaagtgctatggcgtgtctcccacaaagctgaatgatctgtgctttaccaacgtgtacgccgatagcttcgtgatcaggggagacgaagtgagacagatcgcaccaggacagacaggaaagatcgcagactacaattataagctgcctgacgatttcaccggctgcgtgatcgcctggaactccaacaatctggattctaaagtgggcggcaactacaattatctgtacaggctgtttcgcaagtccaatctgaagccattcgagcgggacatctccacagagatctaccaggccggctctaccccctgcaatggcgtggagggctttaactgttatttccctctgcagtcttacggcttccagccaacaaacggcgtgggctatcagccctacagagtggtggtgctgtcctttgagctgctgcacgcaccagcaacagtgtgcggcccaaagaagtctaccaatctggtgaagaacaagtgcgtgaacttcaacttcaacggactgaccggcacaggcgtgctgaccgagagcaataagaagttcctgccttttcagcagttcggcagggacatcgcagataccacagacgccgtgcgcgaccctcagaccctggagatcctggacatcacaccatgcagcttcggcggcgtgtccgtgatcacaccaggcaccaatacatccaaccaggtggccgtgctgtatcaggacgtgaattgtaccgaggtgcccgtggcaatccacgcagatcagctgacccctacatggcgggtgtactctaccggcagcaacgtgttccagacaagagccggatgcctgatcggagcagagcacgtgaacaatagctatgagtgcgacatccctatcggcgccggcatctgtgccagctaccagacccagacaaactccccatctggagcaggctcccaccatcaccatcaccatcaccatcaccactga

SEQ ID NO: 3847 - DNA, 2148 bp, Artificial Sequence
  Description of Artificial Sequence: Synthetic polynucleotide
atgggcatcctgccaagcccaggaatgcccgccctgctgtctctggtgagcctgctgtccgtgctgctgatgggatgcgtggcagagacaggcacacagtgcgtgaacctgaccacaaggacccagctgccccctgcctataccaattctttcacacggggcgtgtactatcccgacaaggtgtttagaagctccgtgctgcactccacacaggatctgtttctgcctttcttttctaacgtgttgtggttccacgccatccacgtgtccggcaccaatggcacaaagcggttcgacaatcccgtgctgccttttaacgatggcgtgtacttcgccagcaccgagaagtccaacatcatcagaggctggatctttggcaccacactggactctaagacacagagcctgctgatcgtgaacaatgccaccaacgtggtgatcaaggtgtgcgagttccagttttgtaatgatccattcctgggcgtgtactatcacaagaacaataagtcctggatggagtctgagtttcgcgtgtattctagcgccaacaattgcacatttgagtacgtgagccagcccttcctgatggacctggagggcaagcagggcaatttcaagaacctgagggagttcgtgtttaagaatatcgatggctacttcaagatctacagcaagcacaccccaatcaacctggtgcgcgacctgccacagggattctccgccctggagccactggtggatctgcccatcggcatcaacatcacccggtttcagacactgctggccctgcacagatcctacctgacaccaggcgactcctctagcggatggaccgcaggagctgccgcctactatgtgggctatctgcagccccggaccttcctgctgaagtacaacgagaatggcaccatcacagacgcagtggattgcgccctggaccccctgtctgagacaaagtgtacactgaagagctttaccgtggagaagggcatctatcagacaagcaatttcagggtgcagcctaccgagtccatcgtgcgctttcccaatatcacaaacctgtgcccttttggcgaggtgttcaacgccaccagattcgccagcgtgtacgcctggaatcggaagagaatctccaactgcgtggccgactattctgtgctgtacaactccgcctctttcagcacctttaagtgctatggcgtgtctcccacaaagctgaatgatctgtgctttaccaacgtgtacgccgatagcttcgtgatcaggggagacgaagtgagacagatcgcaccaggacagacaggaaagatcgcagactacaattataagctgcctgacgatttcaccggctgcgtgatcgcctggaactccaacaatctggattctaaagtgggcggcaactacaattatctgtacaggctgtttcgcaagtccaatctgaagccattcgagcgggacatctccacagagatctaccaggccggctctaccccctgcaatggcgtggagggctttaactgttatttccctctgcagtcttacggcttccagccaacaaacggcgtgggctatcagccctacagagtggtggtgctgtcctttgagctgctgcacgcaccagcaacagtgtgcggcccaaagaagtctaccaatctggtgaagaacaagtgcgtgaacttcaacttcaacggactgaccggcacaggcgtgctgaccgagagcaataagaagttcctgccttttcagcagttcggcagggacatcgcagataccacagacgccgtgcgcgaccctcagaccctggagatcctggacatcacaccatgcagcttcggcggcgtgtccgtgatcacaccaggcaccaatacatccaaccaggtggccgtgctgtatcaggacgtgaattgtaccgaggtgcccgtggcaatccacgcagatcagctgacccctacatggcgggtgtactctaccggcagcaacgtgttccagacaagagccggatgcctgatcggagcagagcacgtgaacaatagctatgagtgcgacatccctatcggcgccggcatctgtgccagctaccagacccagacaaactccccatctggagcaggctcccaccatcaccatcaccatcaccatcaccactga

SEQ ID NO: 3848 - DNA, 2148 bp, Artificial Sequence
  Description of Artificial Sequence: Synthetic polynucleotide
atgggcatcctgccaagcccaggaatgcccgccctgctgtctctggtgagcctgctgtccgtgctgctgatgggatgcgtggcagagacaggcacacagtgcgtgaacctgaccacaaggacccagctgccccctgcctataccaattctttcacacggggcgtgtactatcccgacaaggtgtttagaagctccgtgctgcactccacacaggatctgtttctgcctttcttttctaacgtgacctggttccacgccatccacgtgtccggcaccaatggcacaaagcggttcgacaatcccgtgctgccttttaacgatggcgtgtacttcgccagcaccgagaagtccaacatcatcagaggctggatctttggcaccacactggactctaagacacagagcctgctgatcgtgaacaatgccaccaacgtggtgatcaaggtgtgcgagttccagttttgtaatgatccattcctgggcgtgtactatcacaagaacaataagtcctggatggagtctgagtttcgcgtgtattctagcgccaacaattgcacatttgagtacgtgagccagcccttcctgatggacctggagggcaagcagggcaatttcaagaacctgagggagttcgtgtttaagaatatcgatggctacttcaagatctacagcaagcacaccccaatcaacctggtgcgcgacctgccacagggattctccgccctggagccactggtggatctgcccatcggcatcaacatcacccggtttcagacactgctggccctgcacagatcctacctgacaccaggcgactcctctagcggatggaccgcaggagctgccgcctactatgtgggctatctgcagccccggaccttcctgctgaagtacaacgagaatggcaccatcacagacgcagtggattgcgccctggaccccctgtctgagacaaagtgtacactgaagagctttaccgtggagaagggcatctatcagacaagcaatttcagggtgcagcctaccgagtccatcgtgcgctttcccaatatcacaaacctgtgcccttttggcgaggtgttcaacgccaccagattcgccagcgtgtacgcctggaatcggaggagaatctccaactgcgtggccgactattctgtgctgtacaactccgcctctttcagcacctttaagtgctatggcgtgtctcccacaaagctgaatgatctgtgctttaccaacgtgtacgccgatagcttcgtgatcaggggagacgaagtgagacagatcgcaccaggacagacaggaaagatcgcagactacaattataagctgcctgacgatttcaccggctgcgtgatcgcctggaactccaacaatctggattctaaagtgggcggcaactacaattatctgtacaggctgtttcgcaagtccaatctgaagccattcgagcgggacatctccacagagatctaccaggccggctctaccccctgcaatggcgtggagggctttaactgttatttccctctgcagtcttacggcttccagccaacaaacggcgtgggctatcagccctacagagtggtggtgctgtcctttgagctgctgcacgcaccagcaacagtgtgcggcccaaagaagtctaccaatctggtgaagaacaagtgcgtgaacttcaacttcaacggactgaccggcacaggcgtgctgaccgagagcaataagaagttcctgccttttcagcagttcggcagggacatcgcagataccacagacgccgtgcgcgaccctcagaccctggagatcctggacatcacaccatgcagcttcggcggcgtgtccgtgatcacaccaggcaccaatacatccaaccaggtggccgtgctgtatcaggacgtgaattgtaccgaggtgcccgtggcaatccacgcagatcagctgacccctacatggcgggtgtactctaccggcagcaacgtgttccagacaagagccggatgcctgatcggagcagagcacgtgaacaatagctatgagtgcgacatccctatcggcgccggcatctgtgccagctaccagacccagacaaactccccatctggagcaggctcccaccatcaccatcaccatcaccatcaccactga

SEQ ID NO: 3849 - DNA, 2148 bp, Artificial Sequence
  Description of Artificial Sequence: Synthetic polynucleotide
atgggcatcctgccaagcccaggaatgcccgccctgctgtctctggtgagcctgctgtccgtgctgctgatgggatgcgtggcagagacaggcacacagtgcgtgaacctgaccacaaggacccagctgccccctgcctataccaattctttcacacggggcgtgtactatcccgacaaggtgtttagaagctccgtgctgcactccacacaggatctgtttctgcctttcttttctaacgtgacctggttccacgccatccacgtgtccggcaccaatggcacaaagcggttcgacaatcccgtgctgccttttaacgatggcgtgtacttcgccagcaccgagaagtccaacatcatcagaggctggatctttggcaccacactggactctaagacacagagcctgctgatcgtgaacaatgccaccaacgtggtgatcaaggtgtgcgagttccagttttgtaatgatccattcctgggcgtgtactatcacaagaacaataagtcctggatggagtctgagtttcgcgtgtattctagcgccaacaattgcacatttgagtacgtgagccagcccttcctgatggacctggagggcaagcagggcaatttcaagaacctgagggagttcgtgtttaagaatatcgatggctacttcaagatctacagcaagcacaccccaatcaacctggtgcgcgacctgccacagggattctccgccctggagccactggtggatctgcccatcggcatcaacatcacccggtttcagacactgctggccctgcacagatcctacctgacaccaggcgactcctctagcggatggaccgcaggagctgccgcctactatgtgggctatctgcagccccggaccttcctgctgaagtacaacgagaatggcaccatcacagacgcagtggattgcgccctggaccccctgtctgagacaaagtgtacactgaagagctttaccgtggagaagggcatctatcagacaagcaatttcagggtgcagcctaccgagtccatcgtgcgctttcccaatatcacaaacctgtgcccttttggcgaggtgttcaacgccaccagattcgccagcgtgtacgcctggaatcggaagagaatctccaactgcgtggccgactattctgtgctgtacaactccgcctctttcagcacctttaagtgctatggcgtgtctcccacaaagctgaatgatctgtgctttaccaacgtgtacgccgatagcttcgtgatcaggggagacgaagtgagacagatcgcaccaggacagacaggaaagatcgcagactacaattataagctgcctgacgatttcaccggctgcgtgatcgcctggaactccaacaatctggattctaaagtgggcggcaactacaattatctgtacaggctgtttcgcaagtccaatctgaagccattcgagcgggacatctccacagagatctaccaggccggctctaccccctgcaatggcgtggagggctttaacgcgtatttccctctgcagtcttacggcttccagccaacaaacggcgtgggctatcagccctacagagtggtggtgctgtcctttgagctgctgcacgcaccagcaacagtgtgcggcccaaagaagtctaccaatctggtgaagaacaagtgcgtgaacttcaacttcaacggactgaccggcacaggcgtgctgaccgagagcaataagaagttcctgccttttcagcagttcggcagggacatcgcagataccacagacgccgtgcgcgaccctcagaccctggagatcctggacatcacaccatgcagcttcggcggcgtgtccgtgatcacaccaggcaccaatacatccaaccaggtggccgtgctgtatcaggacgtgaattgtaccgaggtgcccgtggcaatccacgcagatcagctgacccctacatggcgggtgtactctaccggcagcaacgtgttccagacaagagccggatgcctgatcggagcagagcacgtgaacaatagctatgagtgcgacatccctatcggcgccggcatctgtgccagctaccagacccagacaaactccccatctggagcaggctcccaccatcaccatcaccatcaccatcaccactga

SEQ ID NO: 3850 - DNA, 2148 bp, Artificial Sequence
  Description of Artificial Sequence: Synthetic polynucleotide
atgggcatcctgccaagcccaggaatgcccgccctgctgtctctggtgagcctgctgtccgtgctgctgatgggatgcgtggcagagacaggcacacagtgcgtgaacctgaccacaaggacccagctgccccctgcctataccaattctttcacacggggcgtgtactatcccgacaaggtgtttagaagctccgtgctgcactccacacaggatctgtttctgcctttcttttctaacgtgacctggttccacgccatccacgtgtccggcaccaatggcacaaagcggttcgacaatcccgtgctgccttttaacgatggcgtgtacttcgccagcaccgagaagtccaacatcatcagaggctggatctttggcaccacactggactctaagacacagagcctgctgatcgtgaacaatgccaccaacgtggtgatcaaggtgtgcgagttccagttttgtaatgatccattcctgggcgtgtactatcacaagaacaataagtcctggatggagtctgagtttcgcgtgtattctagcgccaacaattgcacatttgagtacgtgagccagcccttcctgatggacctggagggcaagcagggcaatttcaagaacctgagggagttcgtgtttaagaatatcgatggctacttcaagatctacagcaagcacaccccaatcaacctggtgcgcgacctgccacagggattctccgccctggagccactggtggatctgcccatcggcatcaacatcacccggtttcagacactgctggccctgcacagatcctacctgacaccaggcgactcctctagcggatggaccgcaggagctgccgcctactatgtgggctatctgcagccccggaccttcctgctgaagtacaacgagaatggcaccatcacagacgcagtggattgcgccctggaccccctgtctgagacaaagtgtacactgaagagctttaccgtggagaagggcatctatcagacaagcaatttcagggtgcagcctaccgagtccatcgtgcgctttcccaatatcacaaacctgtgcccttttggcgaggtgttcaacgccaccagattcgccagcgtgtacgcctggaatcggaagagaatctccaactgcgtggccgactattctgtgctgtacaactccgcctctttcagcacctttaagtgctatggcgtgtctcccacaaagctgaatgatctgtgctttaccaacgtgtacgccgatagcttcgtgatcaggggagacgaagtgagacagatcgcaccaggacagacaggaaagatcgcagactacaattataagctgcctgacgatttcaccggctgcgtgatcgcctggaactccaacaatctggattctaaagtgggcggcaactacaattatctgtacaggctgtttcgcaagtccaatctgaagccattcgagcgggacatctccacagagatctaccaggccggctctaccccctgcaatggcgtggagggctttaactgttatttccctctgcagtcttacggcttccagccaacaaacggcgtgggctatcagccctacagagtggtggtgctgtcctttgagctgctgcacgcaccagcaacagtgtgcggcccaaagaagtctaccaatctggtgaagaacaagtgcgtgaacttcaacttcaacggactgaccggcacaggcgtgctgaccgagagcaataagaagttcctgccttttcagcagttcggcagggacatcgcagataccacagacgccgtgcgcgaccctcagaccctggagatcctggacatcacaccatgcagcttcggcggcgtgtccgtgatcacaccaggcaccaatacatccaaccaggtggccgtgctgtatcaggacgtgaattgtaccgaggtgcccgtggcaatccacgcagatcagctgacccctacatggcgggtggaatctaccggcagcaacgtgttccagacaagagccggatgcctgatcggagcagagcacgtgaacaatagctatgagtgcgacatccctatcggcgccggcatctgtgccagctaccagacccagacaaactccccatctggagcaggctcccaccatcaccatcaccatcaccatcaccactga

SEQ ID NO: 3851 - DNA, 2148 bp, Artificial Sequence
  Description of Artificial Sequence: Synthetic polynucleotide
atgggcatcctgccaagcccaggaatgcccgccctgctgtctctggtgagcctgctgtccgtgctgctgatgggatgcgtggcagagacaggcacacagtgcgtgaacctgaccacaaggacccagctgccccctgcctataccaattctttcacacggggcgtgtactatcccgacaaggtgtttagaagctccgtgctgcactccacacaggatctgtttctgcctttcttttctaacgtgacctggttccacgccatccacgtgtccggcaccaatggcacaaagcggttcgacaatcccgtgctgccttttaacgatggcgtgtacttcgccagcaccgagaagtccaacatcatcagaggctggatctttggcaccacactggactctaagacacagagcctgctgatcgtgaacaatgccaccaacgtggtgatcaaggtgtgcgagttccagttttgtaatgatccattcctgggcgtgtactatcacaagaacaataagtcctggatggagtctgagtttcgcgtgtattctagcgccaacaattgcacatttgagtacgtgagccagcccttcctgatggacctggagggcaagcagggcaatttcaagaacctgagggagttcgtgtttaagaatatcgatggctacttcaagatctacagcaagcacaccccaatcaacctggtgcgcgacctgccacagggattctccgccctggagccactggtggatctgcccatcggcatcaacatcacccggtttcagacactgctggccctgcacagatcctacctgacaccaggcgactcctctagcggatggaccgcaggagctgccgcctactatgtgggctatctgcagccccggaccttcctgctgaagtacaacgagaatggcaccatcacagacgcagtggattgcgccctggaccccctgtctgagacaaagtgtacactgaagagctttaccgtggagaagggcatctatcagacaagcaatttcagggtgcagcctaccgagtccatcgtgcgctttcccaatatcacaaacctgtgccctcttggcgaggtgttcaacgccaccagattcgccagcagttacgcctggaatcggaagagaatctccaactgcgtggccgactattctgtgctgtacaactccgcctctttcagcacctttaagtgctatggcgtgtctcccacaaagctgaatgatctgtgctttaccaacgtgtacgccgatcgattcgtgatcaggggagacgaagtgagacagatcgcaccaggacagacaggaaagatcgcagactacaattataagctgcctgacgatttcaccggctgcgtgatcgcctggaactccaacaatctggatgctaaagtgggcggcaactacaattatctgtacaggctgtttcgcaagtccaatctgaagccattcgagcggtttatctccacagagatctaccaggccggctctacccccgctaatggcgtggagggctttaactgttatttccctctgcagtcttacggcttccagccaacaaacggcgtgggctatcagccctacagagtggtggtgctgtcctttgagctgctgcacgcaccacatacagtgtgcggcccaaagaagtctaccaatctggtgaagaacaagtgcgtgaacttcaacttcaacggactgaccggcacaggcgtgctgaccgagagcaataagaagttcctgccttttcagcagttcggcagggacatcgcagataccacagacgccgtgcgcgaccctcagaccctggagatcctggacatcacaccatgcagcttcggcggcgtgtccgtgatcacaccaggcaccaatacatccaaccaggtggccgtgctgtatcaggacgtgaattgtaccgaggtgcccgtggcaatccacgcagatcagctgacccctacatggcgggtgtactctaccggcagcaacgtgttccagacaagagccggatgcctgatcggagcagagcacgtgaacaatagctatgagtgcgacatccctatcggcgccggcatctgtgccagctaccagacccagacaaactccccatctggagcaggctcccaccatcaccatcaccatcaccatcaccactga

SEQ ID NO: 3852 - DNA, 2148 bp, Artificial Sequence
  Description of Artificial Sequence: Synthetic polynucleotide
atgggcatcctgccaagcccaggaatgcccgccctgctgtctctggtgagcctgctgtccgtgctgctgatgggatgcgtggcagagacaggcacacagtgcgtgaacctgaccacaaggacccagctgccccctgcctataccaattctttcacacggggcgtgtactatcccgacaaggtgtttagaagctccgtgctgcactccacacaggatctgtttctgcctttcttttctaacgtgacctggttccacgccatccacgtgtccggcaccaatggcacaaagcggttcgacaatcccgtgctgccttttaacgatggcgtgtacttcgccagcaccgagaagtccaacatcatcagaggctggatctttggcaccacactggactctaagacacagagcctgctgatcgtgaacaatgccaccaacgtggtgatcaaggtgtgcgagttccagttttgtaatgatccattcctgggcgtgtactatcacaagaacaataagtcctggatggagtctgagtttcgcgtgtattctagcgccaacaattgcacatttgagtacgtgagccagcccttcctgatggacctggagggcaagcagggcaatttcaagaacctgagggagttcgtgtttaagaatatcgatggctacttcaagatctacagcaagcacaccccaatcaacctggtgcgcgacctgccacagggattctccgccctggagccactggtggatctgcccatcggcatcaacatcacccggtttcagacactgctggccctgcacagatcctacctgacaccaggcgactcctctagcggatggaccgcaggagctgccgcctactatgtgggctatctgcagccccggaccttcctgctgaagtacaacgagaatggcaccatcacagacgcagtggattgcgccctggaccccctgtctgagacaaagtgtacactgaagagctttaccgtggagaagggcatctatcagacaagcaatttcagggtgcagcctaccgagtccatcgtgcgctttcccaatatcacaaacctgtgcccttttggcgaggtgttcaacgccaccagattcgccagcgtgtacgcctggaatcggaagagaatctccaactgcgtggccgactattctgtgctgtacaactccgcctctttcagcacctttaagtgctatggcgtgtctcccacaaagctgaatgatctgtgctttaccaacgtgtacgccgatagcttcgtgatcaggggagacgaagtgagacagatcgcaccaggacagacaggaaagatcgcagactacaattataagctgcctgacgatttcaccggctgcgtgatcgcctggaactccaacaatctggattctaaagtgggcggcaactacaattatctgtacaggctgtttcgcaagtccaatctgaagccattcgagcgggacatctccacagagatctaccaggccggctctaccccctataatggcgtggagggctttaactgttatttccctctgcagtcttacggcttccagccaacaaacggcgtgggctatcagccctacagagtggtggtgctgtcctttgagctgctgcacgcaccagcaacagtgtgcggcccaaagaagtctaccaatctggtgaagaacaagtgcgtgaacttcaacttcaacggactgaccggcacaggcgtgctgaccgagagcaataagaagttcctgccttttcagcagttcggcagggacatcgcagataccacagacgccgtgcgcgaccctcagaccctggagatcctggacatcacaccatgcagcttcggcggcgtgtccgtgatcacaccaggcaccaatacatccaaccaggtggccgtgctgtatcaggacgtgaattgtaccgaggtgcccgtggcaatccacgcagatcagctgacccctacatggcgggtgtactctaccggcagcaacgtgttccagacaagagccggatgcctgatcggagcagagcacgtgaacaatagctatgagtgcgacatccctatcggcgccggcatctgtgccagctaccagacccagacaaactccccatctggagcaggctcccaccatcaccatcaccatcaccatcaccactga

SEQ ID NO: 3853 - DNA, 2148 bp, Artificial Sequence
  Description of Artificial Sequence: Synthetic polynucleotide
atgggcatcctgccaagcccaggaatgcccgccctgctgtctctggtgagcctgctgtccgtgctgctgatgggatgcgtggcagagacaggcacacagtgcgtgaacctgaccacaaggacccagctgccccctgcctataccaattctttcacacggggcgtgtactatcccgacaaggtgtttagaagctccgtgctgcactccacacaggatctgtttctgcctttcttttctaacgtgacctggttccacgccatccacgtgtccggcaccaatggcacaaagcggttcgacaatcccgtgctgccttttaacgatggcgtgtacttcgccagcaccgagaagtccaacatcatcagaggctggatctttggcaccacactggactctaagacacagagcctgctgatcgtgaacaatgccaccaacgtggtgatcaaggtgtgcgagttccagttttgtaatgatccattcctgggcgtgtactatcacaagaacaataagtcctggatggagtctgagtttcgcgtgtattctagcgccaacaattgcacatttgagtacgtgagccagcccttcctgatggacctggagggcaagcagggcaatttcaagaacctgagggagttcgtgtttaagaatatcgatggctacttcaagatctacagcaagcacaccccaatcaacctggtgcgcgacctgccacagggattctccgccctggagccactggtggatctgcccatcggcatcaacatcatacggtttcagacactgctggccctgcacagatcctacctgacaccaggcgactcctctagcggatggaccgcaggagctgccgcctactatgtgggctatctgcagccccggaccttcctgctgaagtacaacgagaatggcaccatcacagacgcagtggattgcgccctggaccccctgtctgagacaaagtgtacactgaagagctttaccgtggagaagggcatctatcagacaagcaatttcagggtgcagcctaccgagtccatcgtgcgctttcccaatatcacaaacctgtgcccttttggcgaggtgttcaacgccaccagattcgccagcgtgtacgcctggaatcggaagagaatctccaactgcgtggccgactattctgtgctgtacaactccgcctctttcagcacctttaagtgctatggcgtgtctcccacaaagctgaatgatctgtgctttaccaacgtgtacgccgatagcttcgtgatcaggggagacgaagtgagacagatcgcaccaggacagacaggaaagatcgcagactacaattataagctgcctgacgatttcaccggctgcgtgatcgcctggaactccaacaatctggattctaaagtgggcggcaactacaattatctgtacaggctgtttcgcaagtccaatctgaagccattcgagcgggacatctccacagagatctaccaggccggctctaccccctgcaatggcgtggagggctttaactgttatttccctctgcagtcttacggcttccagccaacaaacggcgtgggctatcagccctacagagtggtggtgctgtcctttgagctgctgcacgcaccagcaacagtgtgcggcccaaagaagtctaccaatctggtgaagaacaagtgcgtgaacttcaacttcaacggactgaccggcacaggcgtgctgaccgagagcaataagaagttcctgccttttcagcagttcggcagggacatcgcagataccacagacgccgtgcgcgaccctcagaccctggagatcctggacatcacaccatgcagcttcggcggcgtgtccgtgatcacaccaggcaccaatacatccaaccaggtggccgtgctgtatcaggacgtgaattgtaccgaggtgcccgtggcaatccacgcagatcagctgacccctacatggcgggtgtactctaccggcagcaacgtgttccagacaagagccggatgcctgatcggagcagagcacgtgaacaatagctatgagtgcgacatccctatcggcgccggcatctgtgccagctaccagacccagacaaactccccatctggagcaggctcccaccatcaccatcaccatcaccatcaccactga

SEQ ID NO: 3854 - DNA, 2148 bp, Artificial Sequence
  Description of Artificial Sequence: Synthetic polynucleotide
atgggcatcctgccaagcccaggaatgcccgccctgctgtctctggtgagcctgctgtccgtgctgctgatgggatgcgtggcagagacaggcacacagtgcgtgaacctgaccacaaggacccagctgccccctgcctataccaattctttcacacggggcgtgtactatcccgacaaggtgtttagaagctccgtgctgcactccacacaggatctgtttctgcctttcttttctaacgtgacctggttccacgcctaccacgtgtccggcaccaatggcacaaagcggttcgacaatcccgtgctgccttttaacgatggcgtgtacttcgccagcaccgagaagtccaacatcatcagaggctggatctttggcaccacactggactctaagacacagagcctgctgatcgtgaacaatgccaccaacgtggtgatcaaggtgtgcgagttccagttttgtaatgatccattcctgggcgtgtactatcacaagaacaataagtcctggatggagtctgagtttcgcgtgtattctagcgccaacaattgcacatttgagtaccatagccagcccttcctgatggacctggagggcaagcagggcaatttcaagaacctgagggagttcgtgtttaagaatatcgatggctacttcaagatctacagcaagcacaccccaatcaacctggtgcgcgacctgccacagggattctccgccctggagccactggtggatctgcccatcggcatcaacatcacccggtttcagacactgctggccctgcacagatcctacctgacaccaggcgactcctctagcggatggaccgcaggagctgccgcctactatgtgggctatctgcagccccggaccttcctgctgaagtacaacgagaatggcaccatcacagacgcagtggattgcgccctggaccccctgtctgagacaaagtgtacactgaagagctttaccgtggagaagggcatctatcagacaagcaatttcagggtgcagcctaccgagtccatcgtgcgctttcccaatatcacaaacccgtgcccttttggcgaggtgttcaacgccaccagattcgccagcgtgtacgcctggaatcggaagagaatctccaactgcgtggccgactattctgtgctgtacaactccgcctctttcagcacctttaagtgctatggcgtgtctcccacaaagctgaatgatctgtgctttaccaacgtgtacgccgatagcttcgtgatcaggggagacgaagtgagacagatcgcaccaggacagacaggaaagatcgcagactacaattataagctgcctgacgatttcaccggctgcgtgatcgcctggaactccaacaatctggattctaaagtgggcggcaactacaattatctgtacaggctgtttcgcaagtccaatctgaagccattcgagcgggacatctccacagagatctaccaggccggctctaccccctgcaatggcgtggagggctttaactgttatttccctctgcagtcttacggcttccagccaacaaacggcccgggccaacagccctacagagtggtggtgctgtcctttgagctgctgcacgcaccagcaacagtgtgcggcccaaagaagtctaccaatctggtgaagaacaagtgcgtgaacttcaacttcaacggactgaccggcacaggcgtgctgaccgagagcaataagaagttcctgccttttcagcagttcggcagggacatcgcagataccacagacgccgtgcgcgaccctcagaccctggagatcctggacatcacaccatgcagcttcggcggcgtgtccgtgatcacaccaggcaccaatacatccaaccaggtggccgtgctgtatcaggacgtgaattgtaccgaggtgcccgatgcaatccacgcagatcagctgacccctacatggcgggtgtactctaccggcagcaacgtgttccagacaagagccggatgcctgatcggagcagagcacgtgaacaatagctatgagtgcgacatccctatcggcgccggcatctgtgccagctaccagacccagacaaactccccatctggagcaggctcccaccatcaccatcaccatcaccatcaccactga

SEQ ID NO: 3855 - DNA, 2148 bp, Artificial Sequence
  Description of Artificial Sequence: Synthetic polynucleotide
atgggcatcctgccaagcccaggaatgcccgccctgctgtctctggtgagcctgctgtccgtgctgctgatgggatgcgtggcagagacaggcacacagtgcgtgaacctgaccacaaggacccagctgccccctgcctataccaattctttcacacggggcgtgtactatcccgacaaggtgtttagaagctccgtgctgcactccacacaggatctgtttctgcctttcttttctaacgtgacctggttccacgccatccacgtgtccggcaccaatggcacaaagcggttcgacaatcccgtgctgccttttaacgatggcgtgtacttcgccagcaccgagaagtccaacatcatcagaggctggatctttggcaccacactggactctaagacacagagcctgctgatcgtgaacaatgccaccaacgtggtgatcaaggtgtgcgagttccagttttgtaatgatccattcctgggcgtgtactatcacaagaacaataagtcctggatggagtctgagtttcgcgtgtattctagcgccaacaattgcacatttgagtacgtgagccagcccttcctgatggacctggagggcaagcagggcaatttcaagaacctgagggagttcgtgtttaagaatatcgatggctacttcaagatctacagcaagcacaccccaatcaacctggtgcgcgacctgccacagggattctccgccctggagccactggtggatctgcccatcggcatcaacatcacccggtttcagacactgctggccctgcacagatcctacctgacaccaggcgactcctctagcggatggaccgcaggagctgccgcctactatgtgggctatctgcagccccggaccttcctgctgaagtacaacgagaatggcaccatcacagacgcagtggattgcgccctggaccccctgtctgagacaaagtgtacactgaagagctttaccgtggagaagggcatctatcagacaagcaatttcagggtgcagcctaccgagtccatcgtgcgctttcccaatatcacaaacctgtgcccttttggcgaggtgttcaacgccaccagattcgccagcgtgtacgcctggaatcggaagagaatctccaactgcgtggccgactattctgtgctgtacaactccgcctctttcagcacctttaagtgctatggcgtgtctcccacaaagctgaatgatctgtgctttaccaacgtgtacgccgatagcttcgtgatcaggggagacgaagtgagacagatcgcaccaggacagacaggaaagatcgcagactacaattataagctgcctgacgatttcaccggctgcgtgatcgcctggaactccaacaatctggattctaaagtgggcggcaactacaattatctgtacaggctgtttcgcaagtccaatctgaagccattcgagcgggacatctccacagagatctaccaggccggctctaccccctgcaatggcgtggagggctttaactgttatttccctctgcagtcttacggcttccagccaacaaacggcgtgggctatcagccctacagagtggtggtgctgtcctttgagctgctgcacgcaccagcaacagtgtgcggcccaaagaagtctaccaatctggtgaagaacaagtgcgtgaacttcaacttcaacggactgaccggcacaggcgtgctgaccgagagcaataagaagttcctgccttttcagcagttcggcagggacatcgcagataccacagacgccgtgcgcgaccctcagaccctggagatcctggacatcacaccatgcagcttcggcggcaaattggtgatcacaccagacaccaatacatccaaccaggtggccgtgctgtatcaggacgtgaattgtaccgaggtgcccgtggcaatccacgcagatcagctgacccctacatggcgggtgtacaacaccggcagcaacgtgttccagacaagagccggatgcctggttggatttgagcacgtgaacaatagctatgagtgcgacatccctgtaggcgccggcatctgtgccagctaccagacccagcgaaactccccatctggagcaggctcccaccatcaccatcaccatcaccatcaccactga

SEQ ID NO: 3856 - DNA, 2148 bp, Artificial Sequence
  Description of Artificial Sequence: Synthetic polynucleotide
atgggcatcctgccaagcccaggaatgcccgccctgctgtctctggtgagcctgctgtccgtgctgctgatgggatgcgtggcagagacaggcacacagtgcgtgaacctgaccacaaggacccagctgccccctgcctataccaattctttcacacggggcgtgtactatcccgacaaggtgtttagaagctccgtgctgcactccacacaggatctgtttctgcctttcttttctaacgtgacctggttccacgccatccacgtgtccggcaccaatggcacaaagcggttcgacaatcccgtgctgccttttaacgatggcgtgtacttcgccagcaccgagaagtccaacatcatcagaggctggatctttggcaccacactggactctaagacacagagcctgctgatcgtgaacaatgccaccaacgtggtgatcaaggtgtgcgagttccagttttgtaatgatccattcctgggcgtgtactatcacaagaacaataagtcctggatggagtctgagtttcgcgtgtattctagcgccaacaattgcacatttgagtacgtgagccagcccttcctgatggacctggagggcaagcagggcaatttcaagaacctgagggagttcgtgtttaagaatatcgatggctacttcaagatctacagcaagcacaccccaatcaacctggtgcgcgacctgccacagggattctccgccctggagccactggtggatctgcccatcggcatcaacatcacccggtttcagacactgctggccctgcacagatcctacctgacaccaggcgactcctctagcggatggaccgcaggagctgccgcctactatgtgggctatctgcagccccggaccttcctgctgaagtacaacgagaatggcaccatcacagacgcagtggattgcgccctggaccccctgtctgagacaaagtgtacactgaagagctttaccgtggagaagggcatctatcagacaagcaatttcagggtgcagcctaccgagtccatcgtgcgctttcccaatatcacaaacctgtgcccttttggcgaggtgttcaacgccaccagattcgccagcgtgtacgcctggaatcggaagagaatctccaactgcgtggccgactattctgtgctgtacaactccgcctctttcagcacctttaagtgctatggcgtgtctcccacaaagctgaatgatctgtgctttaccaacgtgtacgccgatagcttcgtgatcaggggagacgaagtgagacagatcgcaccaggacagacaggaaagatcgcagactacaattataagctgcctgacgatttcaccggctgcgtgatcgcctggaactccaacaatctggattctaaagtgggcggcaactacaattatctgtacaggctgtttcgcaagtccaatctgaagccattcgagcgggacatctccacagagatctaccaggccggctctaccccctgcaatggcgtggagggctttaactgttatttccctctgcagtcttacggcttccagccaacaaacggcgtgggctatcagccctacagagtggtggtgctgtcctttgagctgctgcacgcaccagcaacagtgtgcggcccaaagaagtctaccaatctggtgaagaacaagtgcgtgaacttcaacttcaacggactgaccggcacaggcgtgctgaccgagagcaataagaagttcctgccttttcagcagttcggcagggacatcgcagataccacagacgccgtgcgcgaccctcagaccctggagatcctggacatcacaccatgcagcttcggcggcgtgtccgtgatcacaccaggcaccaatacatccaaccaggtggccgtgctgtatcaggacgtgaattgtaccgaggtgcccgtggcaatccacgcagatcagctgacccctacatggcggatgtactctaccggcagcaacgtgttccagacaagagccggatgcctgatcggagcagagcacgtgaacaatagctatgagtgcgacatccctatcggcgccggcatctgtgccagctaccagacccagacaaactccccatctggagcaggctcccaccatcaccatcaccatcaccatcaccactga

SEQ ID NO: 3857 - DNA, 2148 bp, Artificial Sequence
  Description of Artificial Sequence: Synthetic polynucleotide
atgggcatcctgccaagcccaggaatgcccgccctgctgtctctggtgagcctgctgtccgtgctgctgatgggatgcgtggcagagacaggcacacagtgcgtgaacctgaccacaaggacccagctgccccctgcctataccaattctttcacacggggcgtgtactatcccgacaaggtgtttagaagctccgtgctgcactccacacaggatctgtttctgcctttcttttctaacgtgacccgattccacgccatccacgtgtccggcaccaatggcacaaagcggttcgacaatcccgtgctgccttttaacgatggcgtgtacttcgccagcaccgagaagtccaacatcatcagaggctggatctttggcaccacactggactctaagacacagagcctgctgatcgtgaacaatgccaccaacgtggtgatcaaggtgtgcgagttccagttttgtaatgatccattcctgggcgtgtactatcacaagaacaataagtcctggatggagtctgagtttcgcgtgtattctagcgccaacaattgcacatttgagtacgtgagccagcccttcctgatggacctggagggcaagcagggcaatttcaagaacctgagggagttcgtgtttaagaatatcgatggctacttcaagatctacagcaagcacaccccaatcaacctggtgcgcgacctgccacagggattctccgccctggagccactggtggatctgcccatcggcatcaacatcacccggtttcagacactgctggccctgcacagatcctacctgacaccaggcgactcctctagcggatggaccgcaggagctgccgcctactatgtgggctatctgcagccccggaccttcctgctgaagtacaacgagaatggcaccatcacagacgcagtggattgcgccctggaccccctgtctgagacaaagtgtacactgaagagctttaccgtggagaagggcatctatcagacaagcaatttcagggtgcagcctaccgagtccatcgtgcgctttcccaatatcacaaacctgtgcccttttggcgaggtgttcaacgccaccagattcgccagcgtgtacgcctggaatcggaagagaatctccaactgcgtggccgactattctgtgctgtacaactccgcctctttcagcacctttaagtgctatggcgtgtctcccacaaagctgaatgatctgtgctttaccaacgtgtacgccgatagcttcgtgatcaggggagacgaagtgagacagatcgcaccaggacagacaggaaagatcgcagactacaattataagctgcctgacgatttcaccggctgcgtgatcgcctggaactccaacaatctggattctaaagtgggcggcaactacaattatctgtacaggctgtttcgcaagtccaatctgaagccattcgagcgggacatctccacagagatctaccaggccggctctaccccctgcaatggcgtggagggctttaactgttatttccctctgcagtcttacggcttccagccaacaaacggcgtgggctatcagccctacagagtggtggtgctgtcctttgagctgctgcacgcaccagcaacagtgtgcggcccaaagaagtctaccaatctggtgaagaacaagtgcgtgaacttcaacttcaacggactgaccggcacaggcgtgctgaccgagagcaataagaagttcctgccttttcagcagttcggcagggacatcgcagataccacagacgccgtgcgcgaccctcagaccctggagatcctggacatcacaccatgcagcttcggcggcgtgtccgtgatcacaccaggcaccaatacatccaaccaggtggccgtgctgtatcaggacgtgaattgtaccgaggtgcccgtggcaatccacgcagatcagctgacccctacatggcgggtgtactctaccggcagcaacgtgttccagacaagagccggatgcctgatcggagcagagcacgtgaacaatagctatgagtgcgacatccctatcggcgccggcatctgtgccagctaccagacccagacaaactccccatctggagcaggctcccaccatcaccatcaccatcaccatcaccactga

SEQ ID NO: 3858 - DNA, 2148 bp, Artificial Sequence
  Description of Artificial Sequence: Synthetic polynucleotide
atgggcatcctgccaagcccaggaatgcccgccctgctgtctctggtgagcctgctgtccgtgctgctgatgggatgcgtggcagagacaggcacacagtgcgtgaacctgaccacaaggacccagctgccccctgcctataccaattctttcacacggggcgtgtactatcccgacaaggtgtttagaagctccgtgctgcactccacacaggatctgtttctgcctttcttttctaacgtgacctggttccacgccatccacgtgtccggcaccaatggcacaaagcggttcgacaatcccgtgctgccttttaacgatggcgtgtacttcgccagcaccgagaagtccaacatcatcagaggctggatctttggcaccacactggactctaagacacagagcctgctgatcgtgaacaatgccaccaacgtggtgatcaaggtgtgcgagttccagttttgtaatgatccattcctgggcgtgtactatcacaagaacaataagtcctggatggagtctgagtttcgcgtgtattctagcgccaacaattgcacatttgagtacgtgagccagcccttcctgatggacctggagggcaagcagggcaatttcaagaacctgagggagttcgtgtttaagaatatcgatggctacttcaagatctacagcaagcacaccccaatcaacctggtgcgcgacctgccacagggattctccgccctggagccactggtggatctgcccatcggcatcaacatcacccggtttcagacactgctggccctgcacagatcctacctgacaccaggcgactcctctagcggatggaccgcaggagctgccgcctactatgtgggctatctgcagccccggaccttcctgctgaagtacaacgagaatggcaccatcacagacgcagtggattgcaacctggaccccctgtctgagacaaagtgtacactgaagagctttaccgtggagaagggcatctatcagacaagcaatttcagggtgcagcctaccgagtccatcgtgcgctttcccaatatcacaaacctgtgcccttttggcgaggtgttcaacgccaccagattcgccagcgtgtacgcctggaatcggaagagaatctccaactgcgtggccgactattctgtgctgtacaactccgcctctttcagcacctttaagtgctatggcgtgtctcccacaaagctgaatgatctgtgctttaccaacgtgtacgccgatagcttcgtgatcaggggagacgaagtgagacagatcgcaccaggacagacaggaaagatcgcagactacaattataagctgcctgacgatttcaccggctgcgtgatcgcctggaactccaacaatctggattctaaagtgggcggcaactacaattatctgtacaggctgtttcgcaagtccaatctgaagccattcgagcgggacatctccacagagatctaccaggccggctctaccccctgcaatggcgtggagggctttaactgttatttccctctgcagtcttacggcttccagccaacaaacggcgtgggctatcagccctacagagtggtggtgctgtcctttgagctgctgcacgcaccagcaacagtgtgcggcccaaagaagtctaccaatctggtgaagaacaagtgcgtgaacttcaacttcaacggactgaccggcacaggcgtgctgaccgagagcaataagaagttcctgccttttcagcagttcggcagggacatcgcagataccacagacgccgtgcgcgaccctcagaccctggagatcctggacatcacaccatgcagcttcggcggcgtgtccgtgatcacaccaggcaccaatacatccaaccaggtggccgtgctgtatcaggacgtgaattgtaccgaggtgcccgtggcaatccacgcagatcagctgacccctacatggcgggtgtactctaccggcagcaacgtgttccagacaagagccggatgcctgatcggagcagagcacgtgaacaatagctatgagtgcgacatccctatcggcgccggcatctgtgccagctaccagacccagacaaactccccatctggagcaggctcccaccatcaccatcaccatcaccatcaccactga

SEQ ID NO: 3859 - DNA, 2148 bp, Artificial Sequence
  Description of Artificial Sequence: Synthetic polynucleotide
atgggcatcctgccaagcccaggaatgcccgccctgctgtctctggtgagcctgctgtccgtgctgctgatgggatgcgtggcagagacaggcacacagtgcgtgaacctgaccacaaggacccagctgccccctgcctataccaattctttcacacggggcgtgtactatcccgacaaggtgtttagaagctccgtgctgcactccacacaggatctgtttctgcctttcttttctaacgtgacctggttccacgccatccacgtgtccggcaccaatggcacaaagcggttcgacaatcccgtgctgccttttaacgatggcgtgtacttcgccagcaccgagaagtccaacatcatcagaggctggatctttggcaccacactggactctaagacacagagcctgctgatcgtgaacaatgccaccaacgtggtgatcaaggtgtgcgagttccagttttgtaatgatccattcctgggcgtgtactatcacaagaacaataagtcctggatggagtctgagtttcgcgtgtattctagcgccaacaattgcacatttgagtacgtgagccagcccttcctgatggacctggagggcaagcagggcaatttcaagaacctgagggagttcgtgtttaagaatatcgatggctacttcaagatctacagcaagcacaccccaatcaacctggtgcgcgacctgccacagggattctccgccctggagccactggtggatctgcccatcggcatcaacatcacccggtttcagacactgctggccctgcacagatcctacctgacaccaggcgactcctctagcggatggaccgcaggagctgccgcctactatgtgggctatctgcagccccggaccttcctgctgaagtacaacgagaatggcaccatcacagacgcagtggattgcgccctggaccccctgtctgagacaaagtgtacactgaagagctttaccgtggagaagggcatctatcagacaagcaatttcagggtgcagcctaccgagtccatcgtgcgctttcccaatatcacaaacctgtgcccttttggcgaggtgttcaacgccaccagattcgccagcgtgtacgcctggaatcggaagagaatctccaactgcgtggccgactattctgtgctgtacaactccgcctctttcagcacctttaagtgctatggcgtgtctcccacaaagctgaatgatctgtgctttaccaacgtgtacgccgatagcttcgtgatcaggggagacgaagtgagacagatcgcaccaggacagacaggaaagatcgcagactacaattataagctgcctgacgatttcaccggctgcgtgatcgcctggaactccaacaatctggattctaaagtgggcggcaactacaattatctgtacaggctgtttcgcaagtccaatctgaagccattcgagcgggacatctccacagagatctaccaggccggctctaccccctgcaatggcgtggagggctttaactgttatttccctctgcagtcttacggcttccagccaacaaacggcgtgggctatcagccctacagagtggtggtgctgtcctttgagctgctgcacgcaccagcaacagtgtgcggcccaaagaagtctaccaatctggtgaagaacaagtgcgtgaacttcaacttcaacggactgaccggcacaggcgtgctgaccgagagcaataagaagttcctgccttttcagcagttcggcagggacatcgcagataccacagacgccgtgcgcgaccctcagaccctggagatcctggacatcacaccatgcagcgaaggcggcgtgtccgtgatcacaccaggcaccaatacatccaaccaggtggccgtgctgtatcaggacgtgaattgtaccgaggtgcccgtggcaatccacgcagatcagctgacccctacatggcgggtgtactctaccggcagcaacgtgttccagacaagagccggatgcctgatcggagcagagcacgtgaacaatagctatgagtgcgacatccctatcggcgccggcatctgtgccagctaccagacccagacaaactccccatctggagcaggctcccaccatcaccatcaccatcaccatcaccactga

SEQ ID NO: 3860 - DNA, 2148 bp, Artificial Sequence
  Description of Artificial Sequence: Synthetic polynucleotide
atgggcatcctgccaagcccaggaatgcccgccctgctgtctctggtgagcctgctgtccgtgctgctgatgggatgcgtggcagagacaggcacacagtgcgtgaacctgaccacaaggacccagctgccccctgcctataccaattctttcacacggggcgtgtactatcccgacaaggtgtttagaagctccgtgctgcactccacacaggatctgtttctgcctttcttttctaacgtgacctggttccacgccatccacgtgtccggcaccaatggcacaaagcggttcgacaatcccgtgctgccttttaacgatggcgtgtacttcgccagcaccgagatatccaacatcatcagaggctggatctttggcaccacactggactctaagacacagagcctgctgatcgtgaacaatgccaccaacgtggtgatcaaggtgtgcgagttccagttttgtaatgatccattcctgggcgtgtactatcacaagaacaataagtcctggatggagtctgagtttcgcgtgtattctagcgccaacaattgcacatttgagtacgtgagccagcccttcctgatggacctggagggcaagcagggcaatttcaagaacctgagggagttcgtgtttaagaatatcgatggctacttcaagatctacagcaagcacaccccaatcaacctggtgcgcgacctgccacagggattctccgccctggagccactggtggatctgcccatcggcatcaacatcacccggtttcagacactgctggccctgcacagatcctacctgacaccaggcgactcctctagcggatggaccgcaggagctgccgcctactatgtgggctatctgcagccccggaccttcctgctgaagtacaacgagaatggcaccatcacagacgcagtggattgcgccctggaccccctgtctgagacaaagtgtacactgaagagctttaccgtggagaagggcatctatcagacaagcaatttcagggtgcagcctaccgagtccatcgtgcgctttcccaatatcacaaacctgtgcccttttggcgaggtgttcaacgccaccagattcgccagcgtgtacgcctggaatcggaagagaatctccaactgcgtggccgactattctgtgctgtacaactccgcctctttcagcacctttaagtgctatggcgtgtctcccacaaagctgaatgatctgtgctttaccaacgtgtacgccgatagcttcgtgatcaggggagacgaagtgagacagatcgcaccaggacagacaggaaagatcgcagactacaattataagctgcctgacgatttcaccggctgcgtgatcgcctggaactccaacaatctggattctaaagtgggcggcaactacaattatctgtacaggctgtttcgcaagtccaatctgaagccattcgagcgggacatctccacagagatctaccaggccggctctaccccctgcaatggcgtggagggctttaactgttatttccctctgcagtcttacggcttccagccaacaaacggcgtgggctatcagccctacagagtggtggtgctgtcctttgagctgctgcacgcaccagcaacagtgtgcggcccaaagaagtctaccaatctggtgaagaacaagtgcgtgaacttcaacttcaacggactgaccggcacaggcgtgctgaccgagagcaataagaagttcctgccttttcagcagttcggcagggacatcgcagataccacagacgccgtgcgcgaccctcagaccctggagatcctggacatcacaccatgcagcttcggcggcgtgtccgtgatcacaccaggcaccaatacatccaaccaggtggccgtgctgtatcaggacgtgaattgtaccgaggtgcccgtggcaatccacgcagatcagctgacccctacatggcgggtgtactctaccggcagcaacgtgttccagacaagagccggatgcctgatcggagcagagcacgtgaacaatagctatgagtgcgacatccctatcggcgccggcatctgtgccagctaccagacccagacaaactccccatctggagcaggctcccaccatcaccatcaccatcaccatcaccactga

SEQ ID NO: 3861 - DNA, 2148 bp, Artificial Sequence
  Description of Artificial Sequence: Synthetic polynucleotide
atgggcatcctgccaagcccaggaatgcccgccctgctgtctctggtgagcctgctgtccgtgctgctgatgggatgcgtggcagagacaggcacacagtgcgtgaacctgaccacaaggacccagctgccccctgcctataccaattctttcacacggggcgtgtactatcccgacaaggtgtttagaagctccgtgctgcactccacacaggatctgtttctgcctttcttttctaacgtgacctggttccacgccatccacgtgtccggcaccaatggcacaaagcggttcgacaatcccgtgctgccttttaacgatggcgtgtacttcgccagcaccgagaagtccaacatcatcagaggctggatctttggcaccacactggactctaagacacagagcctgctgatcgtgaacaatgccaccaacgtggtgatcaaggtgtgcgagttccagttttgtaatgatccattcctgggcgtgtactatcacaagaacaataagtcctggatggagtctgagtttcgcgtgtattctagcgccaacaattgcacatttgagtacgtgagccagcccttcctgatggacctggagggcaagcagggcaatttcaagaacctgagggagttcgtgtttaagaatatcgatggctacttcaagatctacagcaagcacaccccaatcaacctggtgcgcgacctgccacagggattctccgccctggagccactggtggatctgcccatcggcatcaacatcacccggtttcagacactgctggccctgcacagatcctacctgacaccaggcgactcctctagcggatggaccgcaggagctgccgcctactatgtgggctatctgcagccccggaccttcctgctgaagtacaacgagaatggcaccatcacagacgcagtggattgcgccctggaccccctgtctgagacaaagtgtacactgaagagctttaccgtggagaagggcatctatcagacaagcaatttcagggtgcagcctaccgagtccatcgtgcgctttcccaatatcacaaacctgtgcccttttggcgaggtgttcaacgccaccagattcgccagcgtgtacgcctggaatcggaagagaatctccaactgcgtggccgactattctgtgctgtacaactccgcctctttcagcacctttaagtgctatggcgtgtctcccacaaagctgaatgatctgtgctttaccaacgtgtacgccgatagcttcgtgatcaggggagacgaagtgagacagatcgcaccaggacagacaggaaagatcgcagactacaattataagctgcctgacgatttcaccggctgcgtgatcgcctggaactccaacaatctggattctaaagtgggcggcaactacaattatctgtacaggctgtttcgcaagtccaatctgaagccattcgagcgggacatctccacagagatctaccaggccggctctaccccctgcaatggcgtggagggctttaactgttatttccctctgcagtcttacggcttccagccaacaaacggcgtgggctatcagccctacagagtggtggtgctgtcctttgagctgctgcacgcaccagcaacagtgtgcggcccaaagaagtctaccaatctggtgaagaacaagtgcgtgaacttcaacttcaacggactgaccggcacaggcgtgctgaccgagagcaataagaagttcctgccttttcagcagttcggcaggactatcgcagataccacagacgccgtgcgcgaccctcagaccctggagatcctggacatcacaccatgcagcttcggcggcgtgtccgtgatcacaccaggcaccaatacatccaaccaggtggccgtgctgtatcaggacgtgaattgtaccgaggtgcccgtggcaatccacgcagatcagctgacccctacatggcgggtgtactctaccggcagcaacgtgttccagacaagagccggatgcctgatcggagcagagcacgtgaacaatagctatgagtgcgacatccctatcggcgccggcatctgtgccagctaccagacccagacaaactccccatctggagcaggctcccaccatcaccatcaccatcaccatcaccactga

SEQ ID NO: 3862 - DNA, 2148 bp, Artificial Sequence
  Description of Artificial Sequence: Synthetic polynucleotide
atgggcatcctgccaagcccaggaatgcccgccctgctgtctctggtgagcctgctgtccgtgctgctgatgggatgcgtggcagagacaggcacacagtgcgtgaacctgaccacaaggacccagctgccccctgcctataccaattctttcacacggggcgtgtactatcccgacaaggtgtttagaagctccgtgctgcacatcacacaggatctgtttctgcctttcttttctaacgtgacctggttccacgccatccacgtgtccggcaccaatggcacaaagcggttcgacaatcccgtgctgccttttaacgatggcgtgtacttcgccagcaccgagaagtccaacatcatcagaggctggatctttggcaccacactggactctaagacacagagcctgctgatcgtgaacaatgccaccaacgtggtgatcaaggtgtgcgagttccagttttgtaatgatccattcctgggcgtgtactatcacaagaacaataagtcctggatggagtctgagtttcgcgtgtattctagcgccaacaattgcacatttgagtacgtgagccagcccttcctgatggacctggagggcaagcagggcaatttcaagaacctgagggagttcgtgtttaagaatatcgatggctacttcaagatctacagcaagcacaccccaatcaacctggtgcgcgacctgccacagggattctccgccctggagccactggtggatctgcccatcggcatcaacatcacccggtttcagacactgctggccctgcacagatcctacctgacaccaggcgactcctctagcggatggaccgcaggagctgccgcctactatgtgggctatctgcagccccggaccttcctgctgaagtacaacgagaatggcaccatcacagacgcagtggattgcgccctggaccccctgtctgagacaaagtgtacactgaagagctttaccgtggagaagggcatctatcagacaagcaatttcagggtgcagcctaccgagtccatcgtgcgctttcccaatatcacaaacctgtgcccttttggcgaggtgttcaacgccaccagattcgccagcgtgtacgcctggaatcggaagagaatctccaactgcgtggccgactattctgtgctgtacaactccgcctctttcagcacctttaagtgctatggcgtgtctcccacaaagctgaatgatctgtgctttaccaacgtgtacgccgatagcttcgtgatcaggggagacgaagtgagacagatcgcaccaggacagacaggaaagatcgcagactacaattataagctgcctgacgatttcaccggctgcgtgatcgcctggaactccaacaatctggattctaaagtgggcggcaactacaattatctgtacaggctgtttcgcaagtccaatctgaagccattcgagcgggacatctccacagagatctaccaggccggctctaccccctgcaatggcgtggagggctttaactgttatttccctctgcagtcttacggcttccagccaacaaacggcgtgggctatcagccctacagagtggtggtgctgtcctttgagctgctgcacgcaccagcaacagtgtgcggcccaaagaagtctaccaatctggtgaagaacaagtgcgtgaacttcaacttcaacggactgaccggcacaggcgtgctgaccgagagcaataagaagttcctgccttttcagcagttcggcagggacatcgcagataccacagacgccgtgcgcgaccctcagaccctggagatcctggacatcacaccatgcagcttcggcggcgtgtccgtgatcacaccaggcaccaatacatccaaccaggtggccgtgctgtatcaggacgtgaattgtaccgaggtgcccgtggcaatccacgcagatcagctgacccctacatggcgggtgtactctaccggcagcaacgtgttccagacaagagccggatgcctgatcggagcagagcacgtgaacaatagctatgagtgcgacatccctatcggcgccggcatctgtgccagctaccagacccagacaaactccccatctggagcaggctcccaccatcaccatcaccatcaccatcaccactga

SEQ ID NO: 3863 - DNA, 2148 bp, Artificial Sequence
  Description of Artificial Sequence: Synthetic polynucleotide
atgggcatcctgccaagcccaggaatgcccgccctgctgtctctggtgagcctgctgtccgtgctgctgatgggatgcgtggcagagacaggcacacagtgcgtgaacctgaccacaaggacccagctgccccctgcctataccaattctttcacacggggcgtgtactatcccgacaaggtgtttagaagctccgtgctgcactccacacaggatctgtttctgcctttcttttctaacgtgacctggttccacgccaaacacgtgtccggcaccaatggcacaaagcggttcgacaatcccgtgctgccttttaacgatggcgtgtacttcgccagcaccgagaagtccaacatcatcagaggctggatctttggcaccacactggactctaagacacagagcctgctgatcgtgaacaatgccaccaacgtggtgatcaaggtgtgcgagttccagttttgtaatgatccattcctgggcgtgtactatcacaagaacaataagtcctggatggagtctgagtttcgcgtgtattctagcgccaacaattgcacatttgagtaccatagccagcccttcctgatggacctggagggcaagcagggcaatttcaagaacctgagggagttcgtgtttaagaatatcgatggctacttcaagatctacagcaagcacaccccaatcaacctggtgcgcgacctgccacagggattctccgccctggagccactggtggatctgcccatcggcatcaacatcacccggtttcagacactgctggccctgcacagatcctacctgacaccaggcgactcctctagcggagaaaccgcaggagctgccgcctactatgtgggctatctgcagccccggaccttcctgctgaagtacaacgagaatggcaccatcacagacgcagtggattgcgccctggaccccctgtctgagacaaagtgtacactgaagagctttaccgtggagaagggcatctatcagacaagcaatttcagggtgcagcctaccgagtccatcgtgcgctttcccaatatcacaaacctgtgcccttttggcgaggtgttcaacgccaccagattcgccagcgtgtacgcctggaatcggaagagaatctccaactgcgtggccgactattctgtgctgtacaactccgcctctttcagcacctttaagtgctatggcgtgtctcccacaaagctgaatgatctgtgctttaccaacgtgtacgccgatagcttcgtgatcaggggagacgaagtgagacagatcgcaccaggacagacaggaaagatcgcagactacaattataagctgcctgacgatttcaccggctgcgtgatcgcctggaactccaacaatctggattctaaagtgggcggcaactacaattatctgtacaggctgtttcgcaagtccaatctgaagccattcgagcgggacatctccacagagatctaccaggccggctctaccccctgcaatggcgtggagggctttaactgttatttccctctgcagtcttacggcttccagccaacaaacggcccgggccaacagccctacagagtggtggtgctgtcctttgagctgctgcacgcaccagcaacagtgtgcggcccaaagaagtctaccaatctggtgaagaacaagtgcgtgaacttcaacttcaacggactgaccggcacaggcgtgctgaccgagagcaataagaagttcctgccttttcagcagttcggcagggacatcgcagataccacagacgccgtgcgcgaccctcagaccctggagatcctggacatcacaccatgcagcttcggcggcgtgtccgtgatcacaccaggcaccaatacatccaaccaggtggccgtgctgtatcaggacgtgaattgtaccgaggtgcccgatgcaatccacgcagatcagctgacccctacatggcgggtgtactctaccggcagcaacgtgttccagacaagagccggatgcctgatcggagcagagcacgtgaacaatagctatgagtgcgacatccctatcggcgccggcatctgtgccagctaccagacccagacaaactccccatctggagcaggctcccaccatcaccatcaccatcaccatcaccactga

SEQ ID NO: 3864 - DNA, 2148 bp, Artificial Sequence
  Description of Artificial Sequence: Synthetic polynucleotide
atgggcatcctgccaagcccaggaatgcccgccctgctgtctctggtgagcctgctgtccgtgctgctgatgggatgcgtggcagagacaggcacacagtgcgtgaacctgaccacaaggacccagctgccccctgcctataccaattctttcacacggggcgtgtactatcccgacaaggtgtttagaagctccgtgctgcactccacacaggatctgtttctgcctttcttttctaacgtgacctggttccacgccatccacgtgtccggcaccaatggcacaaagcggttcgacaatcccgtgctgccttttaacgatggcgtgtacttcgccagcaccgagaagtccaacatcatcagaggctggatctttggcaccacactggactctaagacacagagcctgctgatcgtgaacaatgccaccaacgtggtgatcaaggtgtgcgagttccagttttgtaatgatccattcctgggcgtgtactatcacaagaacaataagtcctggatggagtctgagtttcgcgtgtattctagcgccaacaattgcacatttgagtacgtgagccagcccttcctgatggacctggagggcaagcagggcaatttcaagaacctgagggagttcgtgtttaagaatatcgatggctacttcaagatctacagcaagcacaccccaatcaacctggtgcgcgacctgccacagggattctccgccctggagccactggtggatctgcccatcggcatcaacatcacccggtttcagacactgctggccctgcacagatcctacctgacaccaggcgactcctctagcggatggaccgcaggagctgccgcctactatgtgggctatctgcagccccggaccttcctgctgaagtacaacgagaatggcaccatcacagacgcagtggattgcgccctggaccccctgtctgagacaaagtgtacactgaagagctttaccgtggagaagggcatctatcagacaagcaatttcagggtgcagcctaccgagtccatcgtgcgctttcccaatatcacaaacctgtgcccttttggcgaggtgttcaacgccaccagattcgccagcgtgtacgcctggaatcggaagagaatctccaactgcgtggccgactattctgtgctgtacaactccgcctctttcagcacctttaagtgctatggcgtgtctcccacaaagctgaatgatctgtgctttaccaacgtgtacgccgatagcttcgtgatcaggggagacgaagtgagacagatcgcaccaggacagacaggaaagatcgcagactacaattataagctgcctgacgatttcaccggctgcgtgatcgcctggaactccaacaatctggattctaaagtgggcggcaactacaattatctgtacaggctgtttcgcaagttgaatctgaagccattcgagcgggacatctccacagagatctaccaggccggctctaccccctgcaatggcgtggagggctttaactgttatttccctctgcagtcttacggcttccagccaacaaacggcgtgggctatcagccctacagagtggtggtgctgtcctttgagctgctgcacgcaccagcaacagtgtgcggcccaaagaagtctaccaatctggtgaagaacaagtgcgtgaacttcaacttcaacggactgaccggcacaggcgtgctgaccgagagcaataagaagttcctgccttttcagcagttcggcagggacatcgcagataccacagacgccgtgcgcgaccctcagaccctggagatcctggacatcacaccatgcagcttcggcggcgtgtccgtgatcacaccaggcaccaatacatccaaccaggtggccgtgctgtatcaggacgtgaattgtaccgaggtgcccgtggcaatccacgcagatcagctgacccctacatggcgggtgtactctaccggcagcaacgtgttccagacaagagccggatgcctgatcggagcagagcacgtgaacaatagctatgagtgcgacatccctatcggcgccggcatctgtgccagctaccagacccagacaaactccccatctggagcaggctcccaccatcaccatcaccatcaccatcaccactga

SEQ ID NO: 3865 - DNA, 2148 bp, Artificial Sequence
  Description of Artificial Sequence: Synthetic polynucleotide
atgggcatcctgccaagcccaggaatgcccgccctgctgtctctggtgagcctgctgtccgtgctgctgatgggatgcgtggcagagacaggcacacagtgcgtgaacctgaccacaaggacccagctgccccctgcctataccaattctttcacacggggcgtgtactatcccgacaaggtgtttagaagctccgtgctgcactccacacaggatctgtttctgcctttcttttctaacgtgacctggttccacgccatccacgtgtccggcaccaatggcacaaagcggttcgacaatcccgtgctgccttttaacgatggcgtgtacttcgccagcaccgagaagtccaacatcatcagaggctggatctttggcaccacactggactctaagacacagagcctgctgatcgtgaacaatgccaccaacgtggtgatcaaggtgtgcgagttccagttttgtaatgatccattcctgggcgtgtactatcacaagaacaataagtcctggatggagtctgagtttcgcgtgtattctagcgccaacaattgcacatttgagtacgtgagccagcccttcctgatggacctggagggcaagcagggcaatttcaagaacctgagggagttcgtgtttaagaatatcgatggctacttcaagatctacagcaagcacaccccaatcaacctggtgcgcgacctgccacagggattctccgccctggagccactggtggatctgcccatcggcatcaacatcacccggtttcagacactgctggccctgcacagatcctacctgacaccaggcgactcctctagcggatggaccgcaggagctgccgcctactatgtgggctatctgcagccccggaccttcctgctgaagtacaacgagaatggcaccatcacagacgcagtggattgcgccctggaccccctgtctgagacaaagtgtacactgaagagctttaccgtggagaagggcatctatcagacaagcaatttcagggtgcagcctaccgagtccatcgtgcgctttcccaatatcacaaacgaatgcccttttggcgaggtgttcaacgccaccagattcgccagcgtgtacgcctggaatcggaagagaatctccaactgcgtggccgactattctgtgctgtacaactccgcctctttcagcacctttaagtgctatggcgtgtctcccacaaagctgaatgatctgtgctttaccaacgtgtacgccgatagcttcgtgatcaggggagacgaagtgagacagatcgcaccaggacagacaggaaagatcgcagactacaattataagctgcctgacgatttcaccggctgcgtgatcgcctggaactccaacaatctggattctaaagtgggcggcaactacaattatctgtacaggctgtttcgcaagtccaatctgaagccattcgagcgggacatctccacagagatctaccaggccggctctaccccctgcaatggcgtggagggctttaactgttatttccctctgcagtcttacggcttccagccaacaaacggcgtgggctatcagccctacagagtggtggtgctgtcctttgagctgctgcacgcaccagcaacagtgtgcggcccaaagaagtctaccaatctggtgaagaacaagtgcgtgaacttcaacttcaacggactgaccggcacaggcgtgctgaccgagagcaataagaagttcctgccttttcagcagttcggcagggacatcgcagataccacagacgccgtgcgcgaccctcagaccctggagatcctggacatcacaccatgcagcttcggcggcgtgtccgtgatcacaccaggcaccaatacatccaaccaggtggccgtgctgtatcaggacgtgaattgtaccgaggtgcccgtggcaatccacgcagatcagctgacccctacatggcgggtgtactctaccggcagcaacgtgttccagacaagagccggatgcctgatcggagcagagcacgtgaacaatagctatgagtgcgacatccctatcggcgccggcatctgtgccagctaccagacccagacaaactccccatctggagcaggctcccaccatcaccatcaccatcaccatcaccactga

SEQ ID NO: 3866 - DNA, 2148 bp, Artificial Sequence
  Description of Artificial Sequence: Synthetic polynucleotide
atgggcatcctgccaagcccaggaatgcccgccctgctgtctctggtgagcctgctgtccgtgctgctgatgggatgcgtggcagagacaggcacacagtgcgtgaacctgaccacaaggacccagctgccccctgcctataccaattctttcacacggggcgtgtactatcccgacaaggtgtttagaagctccgtgctgcactccacacaggatctgtttctgcctttcttttctaacgtgacctggttccacgccatccacgtgtccggcaccaatggcacaaagcggttcgacaatcccgtgctgccttttaacgatggcgtgtacttcgccagcaccgagaagtccaacatcatcagaggctggatctttggcaccacactggactctaagacacagagcctgctgatcgtgaacaatgccaccaacgtggtgatcaaggtgtgcgagttccagttttgtaatgatccattcctgggcgtgtactatcacaagaacaataagtcctggatggagtctgagtttcgcgtgtattctagcgccaacaattgcacatttgagtacgtgagccagcccttcctgatggacctggagggcaagcagggcaatttcaagaacctgagggagttcgtgtttaagaatatcgatggctacttcaagatctacagcaagcacaccccaatcaacctggtgcgcgacctgccacagggattctccgccctggagccacatgtggatctgcccatcggcatcaacatcacccggtttcagacactgctggccctgcacagatcctacctgacaccaggcgactcctctagcggatggaccgcaggagctgccgcctactatgtgggctatctgcagccccggaccttcctgctgaagtacaacgagaatggcaccatcacagacgcagtggattgcgccctggaccccctgtctgagacaaagtgtacactgaagagctttaccgtggagaagggcatctatcagacaagcaatttcagggtgcagcctaccgagtccatcgtgcgctttcccaatatcacaaacctgtgcccttttggcgaggtgttcaacgccaccagattcgccagcgtgtacgcctggaatcggaagagaatctccaactgcgtggccgactattctgtgctgtacaactccgcctctttcagcacctttaagtgctatggcgtgtctcccacaaagctgaatgatctgtgctttaccaacgtgtacgccgatagcttcgtgatcaggggagacgaagtgagacagatcgcaccaggacagacaggaaagatcgcagactacaattataagctgcctgacgatttcaccggctgcgtgatcgcctggaactccaacaatctggattctaaagtgggcggcaactacaattatctgtacaggctgtttcgcaagtccaatctgaagccattcgagcgggacatctccacagagatctaccaggccggctctaccccctgcaatggcgtggagggctttaactgttatttccctctgcagtcttacggcttccagccaacaaacggcgtgggctatcagccctacagagtggtggtgctgtcctttgagctgctgcacgcaccagcaacagtgtgcggcccaaagaagtctaccaatctggtgaagaacaagtgcgtgaacttcaacttcaacggactgaccggcacaggcgtgctgaccgagagcaataagaagttcctgccttttcagcagttcggcagggacatcgcagataccacagacgccgtgcgcgaccctcagaccctggagatcctggacatcacaccatgcagcttcggcggcgtgtccgtgatcacaccaggcaccaatacatccaaccaggtggccgtgctgtatcaggacgtgaattgtaccgaggtgcccgtggcaatccacgcagatcagctgacccctacatggcgggtgtactctaccggcagcaacgtgttccagacaagagccggatgcctgatcggagcagagcacgtgaacaatagctatgagtgcgacatccctatcggcgccggcatctgtgccagctaccagacccagacaaactccccatctggagcaggctcccaccatcaccatcaccatcaccatcaccactga

SEQ ID NO: 3867 - DNA, 2148 bp, Artificial Sequence
  Description of Artificial Sequence: Synthetic polynucleotide
atgggcatcctgccaagcccaggaatgcccgccctgctgtctctggtgagcctgctgtccgtgctgctgatgggatgcgtggcagagacaggcacacagtgcgtgaacctgaccacaaggacccagctgccccctgcctataccaattctttcacacggggcgtgtactatcccgacaaggtgtttagaagctccgtgctgcactccacacaggatctgtttctgcctttcttttctaacgtgacctggttccacgccatccacgtgtccggcaccaatggcacaaagcggttcgacaatcccgtgctgccttttaacgatggcgtgtacttcgccagcaccgagaagtccaacatcatcagaggctggatctttggcaccacactggactctaagacacagagcctgctgatcgtgaacaatgccaccaacgtggtgatcaaggtgtgcgagttccagttttgtaatgatccattcctgggcgtgtactatcacaagaacaataagtcctggatggagtctgagtttcgcgtgtattctagcgccaacaattgcacatttgagtacgtgagccagcccttcctgatggacctggagggcaagcagggcaatttcaagaacctgagggagttcgtgtttaagaatatcgatggctacttcaagatctacagcaagcacaccccaatcaacctggtgcgcgacctgccacagggattctccgccctggagccactggtggatctgcccatcggcatcaacatcacccggtttcagacactgctggccctgcacagatcctacctgacaccaggcgactcctctagcggatggaccgcaggagctgccgcctactatgtgggctatctgcagccccggaccttcctgctgaagtacaacgagaatggcaccatcacagacgcagtggattgcgccctggaccccctgtctgagacaaagtgtacactgaagagctttaccgtggagaagggcatctatcagacaagcaatttcagggtgcagcctaccgagtccatcgtgcgctttcccaatatcacaaacctgtgcccttttggcgaggtgttcaacgccaccagattcgccagcgtgtacgcctggaatcggaagagaatctccaactgcgtggccgactattctgtgctgtacaactccgcctctttcagcacctttaagtgctatggcgtgtctcccacaaagctgaatgatctgtgctttaccaacgtgtacgccgatagcttcgtgatcaggggagacgaagtgagacagatcgcaccaggacagacaggaaagatcgcagactacaattataagctgcctgacgatttcaccggctgcgtgatcgcctggaactccaacaatctggattctaaagtgggcggcaactacaattatctgtacaggctgtttcgcaagtccaatctgaagccattcgagcgggacatctccacagagatctaccaggccggctctaccccctgcaatggcgtggagggctttaactgttatttccctctgcagtcttacggcttccagccaacaaacggcgtgggcaatcagccctacagagtggtggtgctgtcctttgagctgctgcacgcaccagcaacagtgtgcggcccaaagaagtctaccaatctggtgaagaacaagtgcgtgaacttcaacttcaacggactgaccggcacaggcgtgctgaccgagagcaataagaagttcctgccttttcagcagttcggcagggacatcgcagataccacagacgccgtgcgcgaccctcagaccctggagatcctggacatcacaccatgcagcttcggcggcgtgtccgtgatcacaccaggcaccaatacatccaaccaggtggccgtgctgtatcaggacgtgaattgtaccgaggtgcccgtggcaatccacgcagatcagctgacccctacatggcgggtgtactctaccggcagcaacgtgttccagacaagagccggatgcctgatcggagcagagcacgtgaacaatagctatgagtgcgacatccctatcggcgccggcatctgtgccagctaccagacccagacaaactccccatctggagcaggctcccaccatcaccatcaccatcaccatcaccactga

SEQ ID NO: 3868 - DNA, 2148 bp, Artificial Sequence
  Description of Artificial Sequence: Synthetic polynucleotide
atgggcatcctgccaagcccaggaatgcccgccctgctgtctctggtgagcctgctgtccgtgctgctgatgggatgcgtggcagagacaggcacacagtgcgtgaacctgaccacaaggacccagctgccccctgcctataccaattctttcacacggggcgtgtactatcccgacaaggtgtttagaagctccgtgctgcactccacacaggatctgtttctgcctttcttttctaacgtgacctggttccacgccatccacgtgtccggcaccaatggcacaaagcggttcgacaatcccgtgctgccttttaacgatggcgtgtacttcgccagcaccgagaagtccaacatcatcagaggctggatctttggcaccacactggactctaagacacagagcctgctgatcgtgaacaatgccaccaacgtggtgatcaaggtgtgcgagttccagttttgtaatgatccattcctgggcgtgtactatcacaagaacaataagtcctggatggagtctgagtttcgcgtgtattctagcgccaacaattgcacatttgagtacgtgagccagcccttcctgatggacctggagggcaagcagggcaatttcaagaacctgagggagttcgtgtttaagaatatcgatggctacttcaagatctacagcaagcacaccccaatcaacctggtgcgcgacctgccacagggattctccgccctggagccactggtggatctgcccatcggcatcaacatcacccggtttcagacactgctggccctgcacagatcctacctgacaccaggcgactcctctagcggatggaccgcaggagctgccgcctactatgtgggctatctgcagccccggaccttcctgctgaagtacaacgagaatggcaccatcacagacgcagtggattgcgccctggaccccctgtctgagacaaagtgtacactgaagagctttaccgtggagaagggcatctatcagacaagcaatttcagggtgcagcctaccgagtccatcgtgcgctttcccaatatcacaaaccattgcccttttggcgaggtgttcaacgccaccagattcgccagcgtgtacgcctggaatcggaagagaatctccaactgcgtggccgactattctgtgctgtacaactccgcctctttcagcacctttaagtgctatggcgtgtctcccacaaagctgaatgatctgtgctttaccaacgtgtacgccgatagcttcgtgatcaggggagacgaagtgagacagatcgcaccaggacagacaggaaagatcgcagactacaattataagctgcctgacgatttcaccggctgcgtgatcgcctggaactccaacaatctggattctaaagtgggcggcaactacaattatctgtacaggctgtttcgcaagtccaatctgaagccattcgagcgggacatctccacagagatctaccaggccggctctaccccctgcaatggcgtggagggctttaactgttatttccctctgcagtcttacggcttccagccaacaaacggcgtgggctatcagccctacagagtggtggtgctgtcctttgagctgctgcacgcaccagcaacagtgtgcggcccaaagaagtctaccaatctggtgaagaacaagtgcgtgaacttcaacttcaacggactgaccggcacaggcgtgctgaccgagagcaataagaagttcctgccttttcagcagttcggcagggacatcgcagataccacagacgccgtgcgcgaccctcagaccctggagatcctggacatcacaccatgcagcttcggcggcgtgtccgtgatcacaccaggcaccaatacatccaaccaggtggccgtgctgtatcaggacgtgaattgtaccgaggtgcccgtggcaatccacgcagatcagctgacccctacatggcgggtgtactctaccggcagcaacgtgttccagacaagagccggatgcctgatcggagcagagcacgtgaacaatagctatgagtgcgacatccctatcggcgccggcatctgtgccagctaccagacccagacaaactccccatctggagcaggctcccaccatcaccatcaccatcaccatcaccactga

SEQ ID NO: 3869 - DNA, 2148 bp, Artificial Sequence
  Description of Artificial Sequence: Synthetic polynucleotide
atgggcatcctgccaagcccaggaatgcccgccctgctgtctctggtgagcctgctgtccgtgctgctgatgggatgcgtggcagagacaggcacacagtgcgtgaacctgaccacaaggacccagctgccccctgcctataccaattctttcacacggggcgtgtactatcccgacaaggtgtttagaagctccgtgctgcactccacacaggatctgtttctgcctttcttttctaacgtgacctggttccacgcccgccacgtgtccggcaccaatggcacaaagcggttcgacaatcccgtgctgccttttaacgatggcgtgtacttcgccagcaccgagaagtccaacatcatcagaggctggatctttggcaccacactggactctaagacacagagcctgctgatcgtgaacaatgccaccaacgtggtgatcaaggtgtgcgagttccagttttgtaatgatccattcctgggcgtgtactatcacaagaacaataagtcctggatggagtctgagtttcgcgtgtattctagcgccaacaattgcacatttgagtacgtgagccagcccttcctgatggacctggagggcaagcagggcaatttcaagaacctgagggagttcgtgtttaagaatatcgatggctacttcaagatctacagcaagcacaccccaatcaacctggtgcgcgacctgccacagggattctccgccctggagccactggtggatctgcccatcggcatcaacatcacccggtttcagacactgctggccctgcacagatcctacctgacaccaggcgactcctctagcggatggaccgcaggagctgccgcctactatgtgggctatctgcagccccggaccttcctgctgaagtacaacgagaatggcaccatcacagacgcagtggattgcgccctggaccccctgtctgagacaaagtgtacactgaagagctttaccgtggagaagggcatctatcagacaagcaatttcagggtgcagcctaccgagtccatcgtgcgctttcccaatatcacaaacctgtgcccttttggcgaggtgttcaacgccaccagattcgccagcgtgtacgcctggaatcggaagagaatctccaactgcgtggccgactattctgtgctgtacaactccgcctctttcagcacctttaagtgctatggcgtgtctcccacaaagctgaatgatctgtgctttaccaacgtgtacgccgatagcttcgtgatcaggggagacgaagtgagacagatcgcaccaggacagacaggaaagatcgcagactacaattataagctgcctgacgatttcaccggctgcgtgatcgcctggaactccaacaatctggattctaaagtgggcggcaactacaattatctgtacaggctgtttcgcaagtccaatctgaagccattcgagcgggacatctccacagagatctaccaggccggctctaccccctgcaatggcgtggagggctttaactgttatttccctctgcagtcttacggcttccagccaacaaacggcgtgggctatcagccctacagagtggtggtgctgtcctttgagctgctgcacgcaccagcaacagtgtgcggcccaaagaagtctaccaatctggtgaagaacaagtgcgtgaacttcaacttcaacggactgaccggcacaggcgtgctgaccgagagcaataagaagttcctgccttttcagcagttcggcagggacatcgcagataccacagacgccgtgcgcgaccctcagaccctggagatcctggacatcacaccatgcagcttcggcggcgtgtccgtgatcacaccaggcaccaatacatccaaccaggtggccgtgctgtatcaggacgtgaattgtaccgaggtgcccgtggcaatccacgcagatcagctgacccctacatggcgggtgtactctaccggcagcaacgtgttccagacaagagccggatgcctgatcggagcagagcacgtgaacaatagctatgagtgcgacatccctatcggcgccggcatctgtgccagctaccagacccagacaaactccccatctggagcaggctcccaccatcaccatcaccatcaccatcaccactga

SEQ ID NO: 3870 - DNA, 2148 bp, Artificial Sequence
  Description of Artificial Sequence: Synthetic polynucleotide
atgggcatcctgccaagcccaggaatgcccgccctgctgtctctggtgagcctgctgtccgtgctgctgatgggatgcgtggcagagacaggcacacagtgcgtgaacctgaccacaaggacccagctgccccctgcctataccaattctttcacacggggcgtgtactatcccgacaaggtgtttagaagctccgtgctgcactccacacaggatctgtttctgcctttcttttctaacgtgacctggttccacgccatccacgtgtccggcaccaatggcacaaagcggttcgacaatcccgtgctgccttttaacgatggcgtgtacttcgccagcaccgagaagtccaacatcatcagaggctggatctttggcaccacactggactctaagacacagagcctgctgatcgtgaacaatgccaccaacgtggtgatcaaggtgtgcgagttccagttttgtaatgatccattcctgggcgtgtactatcacaagaacaataagtcctggatggagtctgagtttcgcgtgtattctagcgccaacaattgcacatttgagtacgtgagccagcccttcctgatggacctggagggcaagcagggcaatttcaagaacctgagggagttcgtgtttaagaatatcgatggctacttcaagatctacagcaagcacaccccaatcaacctggtgcgcgacctgccacagggattctccgccctggagccactggtggatctgcccatcggcatcaacatcacccggtttcagacactgctggccctgcacagatcctacctgacaccaggcgactcctctagcggatggaccgcaggagctgccgcctactatgtgggctatctgcagccccggaccttcctgctgaagtacaacgagaatggcaccatcacagacgcagtggattgcgccctggaccccctgtctgagacaaagtgtctactgaagagctttaccgtggagaagggcatctatcagacaagcaatttcagggtgcagcctaccgagtccatcgtgcgctttcccaatatcacaaacctgtgcccttttggcgaggtgttcaacgccaccagattcgccagcgtgtacgcctggaatcggaagagaatctccaactgcgtggccgactattctgtgctgtacaactccgcctctttcagcacctttaagtgctatggcgtgtctcccacaaagctgaatgatctgtgctttaccaacgtgtacgccgatagcttcgtgatcaggggagacgaagtgagacagatcgcaccaggacagacaggaaagatcgcagactacaattataagctgcctgacgatttcaccggctgcgtgatcgcctggaactccaacaatctggattctaaagtgggcggcaactacaattatctgtacaggctgtttcgcaagtccaatctgaagccattcgagcgggacatctccacagagatctaccaggccggctctaccccctgcaatggcgtggagggctttaactgttatttccctctgcagtcttacggcttccagccaacaaacggcgtgggctatcagccctacagagtggtggtgctgtcctttgagctgctgcacgcaccagcaacagtgtgcggcccaaagaagtctaccaatctggtgaagaacaagtgcgtgaacttcaacttcaacggactgaccggcacaggcgtgctgaccgagagcaataagaagttcctgccttttcagcagttcggcagggacatcgcagataccacagacgccgtgcgcgaccctcagaccctggagatcctggacatcacaccatgcagcttcggcggcgtgtccgtgatcacaccaggcaccaatacatccaaccaggtggccgtgctgtatcaggacgtgaattgtaccgaggtgcccgtggcaatccacgcagatcagctgacccctacatggcgggtgtactctaccggcagcaacgtgttccagacaagagccggatgcctgatcggagcagagcacgtgaacaatagctatgagtgcgacatccctatcggcgccggcatctgtgccagctaccagacccagacaaactccccatctggagcaggctcccaccatcaccatcaccatcaccatcaccactga

SEQ ID NO: 3871 - DNA, 2148 bp, Artificial Sequence
  Description of Artificial Sequence: Synthetic polynucleotide
atgggcatcctgccaagcccaggaatgcccgccctgctgtctctggtgagcctgctgtccgtgctgctgatgggatgcgtggcagagacaggcacacagtgcgtgaacctgaccacaaggacccagctgccccctgcctataccaattctttcacacggggcgtgtactatcccgacaaggtgtttagaagctccgtgctgcactccacacaggatctgtttctgcctttcttttctaacgtgacctggttccacgccatccacgtgtccggcaccaatggcacaaagcggttcgacaatcccgtgctgccttttaacgatggcgtgtacttcgccagcaccgagaagtccaacatcatcagaggctggatctttggcaccacactggactctaagacacagagcctgctgatcgtgaacaatgccaccaacgtggtgatcaaggtgtgcgagttccagttttgtaatgatccattcctgggcgtgtactatcacaagaacaataagtcctggatggagtctgagtttcgcgtgtattctagcgccaacaattgcacatttgagtacgtgagccagcccttcctgatggacctggagggcaagcagggcaatttcaagaacctgagggagttcgtgtttaagaatatcgatggctacttcaagatctacagcaagcacaccccaatcaacctggtgcgcgacctgccacagggattctccgccctggagccactggtggatctgcccatcggcatcaacatcacccggtttcagacactgctggccctgcacagatcctacctgacaccaggcgactcctctagcggatggaccgcaggagctgccgcctactatgtgggctatctgcagccccggaccttcctgctgaagtacaacgagaatggcaccatcacagacgcagtggattgcgccctggaccccctgtctgagacaaagtgtacactgaagagctttaccgtggagaagggcatctatcagacaagcaatttcagggtgcagcctaccgagtccatcgtgcgctttcccaatatcacaaacctgtgcccttttggcgaggtgttcaacgccaccagattcgccagcgtgtacgcctggaatcggaagagaatctccaactgcgtggccgactattctgtgctgtacaactccgcctctttcagcacctttaagtgctatggcgtgtctcccacaaagctgaatgatctgtgctttaccaacgtgtacgccgatgtcttcgtgatcaggggagacgaagtgagacagatcgcaccaggacagacaggaaagatcgcagactacaattataagctgcctgacgatttcaccggctgcgtgatcgcctggaactccaacaatctggattctaaagtgggcggcaactacaattatctgtacaggctgtttcgcaagtccaatctgaagccattcgagcgggacatctccacagagatctaccaggccggctctaccccctgcaatggcgtggagggctttaactgttatttccctctgcagtcttacggcttccagccaacaaacggcgtgggctatcagccctacagagtggtggtgctgtcctttgagctgctgcacgcaccagcaacagtgtgcggcccaaagaagtctaccaatctggtgaagaacaagtgcgtgaacttcaacttcaacggactgaccggcacaggcgtgctgaccgagagcaataagaagttcctgccttttcagcagttcggcagggacatcgcagataccacagacgccgtgcgcgaccctcagaccctggagatcctggacatcacaccatgcagcttcggcggcgtgtccgtgatcacaccaggcaccaatacatccaaccaggtggccgtgctgtatcaggacgtgaattgtaccgaggtgcccgtggcaatccacgcagatcagctgacccctacatggcgggtgtactctaccggcagcaacgtgttccagacaagagccggatgcctgatcggagcagagcacgtgaacaatagctatgagtgcgacatccctatcggcgccggcatctgtgccagctaccagacccagacaaactccccatctggagcaggctcccaccatcaccatcaccatcaccatcaccactga

SEQ ID NO: 3872 - DNA, 2148 bp, Artificial Sequence
  Description of Artificial Sequence: Synthetic polynucleotide
atgggcatcctgccaagcccaggaatgcccgccctgctgtctctggtgagcctgctgtccgtgctgctgatgggatgcgtggcagagacaggcacacagtgcgtgaacctgaccacaaggacccagctgccccctgcctataccaattctttcacacggggcgtgtactatcccgacaaggtgtttagaagctccgtgctgcactccacacaggatctgtttctgcctttcttttctaacgtgacctggttccacgccatccacgtgtccggcaccaatggcacaaagcggttcgacaatcccgtgctgccttttaacgatggcgtgtacttcgccagcaccgagaagtccaacatcatcagaggctggatctttggcaccacactggactctaagacacagagcctgctgatcgtgaacaatgccaccaacgtggtgatcaaggtgtgcgagttccagttttgtaatgatccattcctgggcgtgtactatcacaagaacaataagtcctggatggagtctgagtttcgcgtgtattctagcgccaacaattgcacatttgagtacgtgagccagcccttcctgatggacctggagggcaagcagggcaatttcaagaacctgagggagttcgtgtttaagaatatcgatggctacttcaagatctacagcaagcacaccccaatcaacctggtgcgcgacctgccacagggattctccgccctggagccactggtggatctgcccatcggcatcaacatcacccggtttcagacactgctggccctgcacagatcctacctgacaccaggcgactcctctagcggatggaccgcaggagctgccgcctactatgtgggctatctgcagccccggaccttcctgctgaagtacaacgagaatggcaccatcacagacgcagtggattgcgccctggaccccctgtctgagacaaagtgtacactgaagagctttaccgtggagaagggcatctatcagacaagcaatttcagggtgcagcctaccgagtccatcgtgcgctttcccaatatcacaaacctgtgcccttttggcgaggtgttcaacgccaccagattcgccagcgtgtacgcctggaatcggaagagaatctccaactgcgtggccgactattctgtgctgtacaactccgcctctttcagcacctttaagtgctatggcgtgtctcccacaaagctgaatgatctgtgctttaccaacgtgtacgccgatagcttcgtgatcaggggagacgaagtgagacagatcgcaccaggacagacaggaaagatcgcagactacaattataagctgcctgacgatttcaccggctgcgtgatcgcctggaactccaacaatctggattctaaagtgggcggcaactacaattatctgtacaggctgtttcgcaagtccaatctgaagccattcgagcgggacatctccacagagatctaccaggccggctctaccccctgcaatggcgtggagggctttaactgttatttccctctgcagtcttacggcttccagccaacaaacggcgtgggctatcagccctacagagtggtggtgctgtcctttgagccgctgcacgcaccagcaacagtgtgcggcccaaagaagtctaccaatctggtgaagaacaagtgcgtgaacttcaacttcaacggactgaccggcacaggcgtgctgaccgagagcaataagaagttcctgccttttcagcagttcggcagggacatcgcagataccacagacgccgtgcgcgaccctcagaccctggagatcctggacatcacaccatgcagcttcggcggcgtgtccgtgatcacaccaggcaccaatacatccaaccaggtggccgtgctgtatcaggacgtgaattgtaccgaggtgcccgtggcaatccacgcagatcagctgacccctacatggcgggtgtactctaccggcagcaacgtgttccagacaagagccggatgcctgatcggagcagagcacgtgaacaatagctatgagtgcgacatccctatcggcgccggcatctgtgccagctaccagacccagacaaactccccatctggagcaggctcccaccatcaccatcaccatcaccatcaccactga

SEQ ID NO: 3873 - DNA, 2148 bp, Artificial Sequence
  Description of Artificial Sequence: Synthetic polynucleotide
atgggcatcctgccaagcccaggaatgcccgccctgctgtctctggtgagcctgctgtccgtgctgctgatgggatgcgtggcagagacaggcacacagtgcgtgaacctgaccacaaggacccagctgccccctgcctataccaattctttcacacggggcgtgtactatcccgacaaggtgtttagaagctccgtgctgcactccacacaggatctgtttctgcctttcttttctaacgtgacctggttccacgccatccacgtgtccggcaccaatggcacaaagcggttcgacaatcccgtgctgccttttaacgatggcgtgtacttcgccagcgtagagaagtccaacatcatcagaggctggatctttggcaccacactggactctaagacacagagcctgctgatcgtgaacaatgccaccaacgtggtgatcaaggtgtgcgagttccagttttgtaatgatccattcctgggcgtgtactatcacaagaacaataagtcctggatggagtctgagtttcgcgtgtattctagcgccaacaattgcacatttgagtacgtgagccagcccttcctgatggacctggagggcaagcagggcaatttcaagaacctgagggagttcgtgtttaagaatatcgatggctacttcaagatctacagcaagcacaccccaatcaacctggtgcgcgacctgccacagggattctccgccctggagccactggtggatctgcccatcggcatcaacatcacccggtttcagacactgctggccctgcacagatcctacctgacaccaggcgactcctctagcggatggaccgcaggagctgccgcctactatgtgggctatctgcagccccggaccttcctgctgaagtacaacgagaatggcaccatcacagacgcagtggattgcgccctggaccccctgtctgagacaaagtgtacactgaagagctttaccgtggagaagggcatctatcagacaagcaatttcagggtgcagcctaccgagtccatcgtgcgctttcccaatatcacaaacctgtgcccttttggcgaggtgttcaacgccaccagattcgccagcgtgtacgcctggaatcggaagagaatctccaactgcgtggccgactattctgtgctgtacaactccgcctctttcagcacctttaagtgctatggcgtgtctcccacaaagctgaatgatctgtgctttaccaacgtgtacgccgatagcttcgtgatcaggggagacgaagtgagacagatcgcaccaggacagacaggaaagatcgcagactacaattataagctgcctgacgatttcaccggctgcgtgatcgcctggaactccaacaatctggattctaaagtgggcggcaactacaattatctgtacaggctgtttcgcaagtccaatctgaagccattcgagcgggacatctccacagagatctaccaggccggctctaccccctgcaatggcgtggagggctttaactgttatttccctctgcagtcttacggcttccagccaacaaacggcgtgggctatcagccctacagagtggtggtgctgtcctttgagctgctgcacgcaccagcaacagtgtgcggcccaaagaagtctaccaatctggtgaagaacaagtgcgtgaacttcaacttcaacggactgaccggcacaggcgtgctgaccgagagcaataagaagttcctgccttttcagcagttcggcagggacatcgcagataccacagacgccgtgcgcgaccctcagaccctggagatcctggacatcacaccatgcagcttcggcggcgtgtccgtgatcacaccaggcaccaatacatccaaccaggtggccgtgctgtatcaggacgtgaattgtaccgaggtgcccgtggcaatccacgcagatcagctgacccctacatggcgggtgtactctaccggcagcaacgtgttccagacaagagccggatgcctgatcggagcagagcacgtgaacaatagctatgagtgcgacatccctatcggcgccggcatctgtgccagctaccagacccagacaaactccccatctggagcaggctcccaccatcaccatcaccatcaccatcaccactga

SEQ ID NO: 3874 - DNA, 2148 bp, Artificial Sequence
  Description of Artificial Sequence: Synthetic polynucleotide
atgggcatcctgccaagcccaggaatgcccgccctgctgtctctggtgagcctgctgtccgtgctgctgatgggatgcgtggcagagacaggcacacagtgcgtgaacctgaccacaaggacccagctgccccctgcctataccaattctttcacacggggcgtgtactatcccgacaaggtgtttagaagctccgtgctgcactccacacaggatctgtttctgcctttcttttctaacgtgacctggttccacgccatccacgtgtccggcaccaatggcacaaagcggttcgacaatcccgtgctgccttttaacgatggcgtgtacttcgccagcaccgagaagtccaacatcatcagaggctggatctttggcaccacactggactctaagacacagagcctgctgatcgtgaacaatgccaccaacgtggtgatcaaggtgtgcgagttccagttttgtaatgatccattcctgggcgtgtactatcacaagaacaataagtcctggatggagtctgagtttcgcgtgtattctagcgccaacaattgcacatttgagtacgtgagccagcccttcctgatggacctggagggcaagcagggcaatttcaagaacctgagggagttcgtgtttaagaatatcgatggctacttcaagatctacagcaagcacaccccaatcaacctggtgcgcgacctgccacagggattctccgccctggagccactggtggatctgcccatcggcatcaacatcacccggtttcagacactgctggccctgcacagatcctacctgacaccaggcgactcctctagcggatggaccgcaggagctgccgcctactatgtgggctatctgcagccccggaccttcctgctgaagtacaacgagaatggcaccatcacagacgcagtggattgcgccctggaccccctgtctgagacaaagtgtacactgaagagctttaccgtggagaagggcatctatcagacaagcaatttcagggtgcagcctaccgagtccatcgtgcgctttcccaatatcacaaacctgtgcccttttggcgaggtgttcaacgccaccagattcgccagcgtgtacgcctggaatcggaagagaatctccaactgcgtggccgactattctgtgctgtacaactccgcctctttcagcacctttaagtgctatggcgtgtctcccacaaagctgaatgatctgtgctttaccaacgtgtacgccgatagcttcgtgatcaggggagacgaagtgagacagatcgcaccaggacagacaggaaagatcgcagactacaattataagctgcctgacgatttcaccggctgcgtgatcgcctggaactccaacaatctggattctaaagtgggcggcaactacaattatctgtacaggctgtttcgcaagtccaatctgaagccattcgagcgggacatctccacagagatctaccaggccggctctaccccctgcaatggcgtggagggctttaactgttatttccctctgcagtcttacggcttccagccaacaaacggcgtgggctatcagccctacagagtggtggtgctgtcctttgagctggaacacgcaccagcaacagtgtgcggcccaaagaagtctaccaatctggtgaagaacaagtgcgtgaacttcaacttcaacggactgaccggcacaggcgtgctgaccgagagcaataagaagttcctgccttttcagcagttcggcagggacatcgcagataccacagacgccgtgcgcgaccctcagaccctggagatcctggacatcacaccatgcagcttcggcggcgtgtccgtgatcacaccaggcaccaatacatccaaccaggtggccgtgctgtatcaggacgtgaattgtaccgaggtgcccgtggcaatccacgcagatcagctgacccctacatggcgggtgtactctaccggcagcaacgtgttccagacaagagccggatgcctgatcggagcagagcacgtgaacaatagctatgagtgcgacatccctatcggcgccggcatctgtgccagctaccagacccagacaaactccccatctggagcaggctcccaccatcaccatcaccatcaccatcaccactga

SEQ ID NO: 3875 - DNA, 2148 bp, Artificial Sequence
  Description of Artificial Sequence: Synthetic polynucleotide
atgggcatcctgccaagcccaggaatgcccgccctgctgtctctggtgagcctgctgtccgtgctgctgatgggatgcgtggcagagacaggcacacagtgcgtgaacctgaccacaaggacccagctgccccctgcctataccaattctttcacacggggcgtgtactatcccgacaaggtgtttagaagctccgtgctgcactccacacaggatctgtttctgcctttcttttctaacgtgacctggttccacgccatccacgtgtccggcaccaatggcacaaagcggttcgacaatcccgtgctgccttttaacgatggcgtgtacttcgccagcaccgagaagtccaacatcatcagaggctggatctttggcaccacactggactctaagacacagagcctgctgatcgtgaacaatgccaccaacgtggtgatcaaggtgtgcgagttccagttttgtaatgatccattcctgggcgtgtactatcacaagaacaataagtcctggatggagtctgagtttcgcgtgtattctagcgccaacaattgcacatttgagtacgtgagccagcccttcctgatggacctggagggcaagcagggcaatttcaagaacctgagggagttcgtgtttaagaatatcgatggctacttcaagatctacagcaagcacaccccaatcaacctggtgcgcgacctgccacagggattctccgccctggagccactggtggatctgcccatcggcatcaacatcacccggtttcagacactgctggccctgcacagatcctacctgacaccaggcgactcctctagcggatggaccgcaggagctgccgcctactatgtgggctatctgcagccccggaccttcctgctgaagtacaacgagaatggcaccatcacagacgcagtggattgcgccctggaccccctgtctgagacaaagtgtacactgaagagctttaccgtggagaagggcatctatcagacaagcaatttcagggtgcagcctaccgagtccatcgtgcgctttcccaatatcacaaacctgtgcccttttggcgaggtgttcaacgccaccagattcgccagcgtgtacgcctggaatcggaagagaatctccaactgcgtggccgactattctgtgctgtacaactccgcctctttcagcacctttaagtgctatggcgtgtctcccacaaagctgaatgatctgtgctttaccaacgtgtacgccgatagcttcgtgatcaggggagacgaagtgagacagatcgcaccaggacagacaggaaagatcgcagactacaattataagctgcctgacgatttcaccggctgcgtgatcgcctggaactccaacaatctggattctaaagtgggcggcaactacaattatctgtacaggctgtttcgcaagtccaatctgaagccattcgagcgggacatctccacagagtggtaccaggccggctctaccccctgcaatggcgtggagggctttaactgttatttccctctgcagtcttacggcttccagccaacaaacggcgtgggctatcagccctacagagtggtggtgctgtcctttgagctgctgcacgcaccagcaacagtgtgcggcccaaagaagtctaccaatctggtgaagaacaagtgcgtgaacttcaacttcaacggactgaccggcacaggcgtgctgaccgagagcaataagaagttcctgccttttcagcagttcggcagggacatcgcagataccacagacgccgtgcgcgaccctcagaccctggagatcctggacatcacaccatgcagcttcggcggcgtgtccgtgatcacaccaggcaccaatacatccaaccaggtggccgtgctgtatcaggacgtgaattgtaccgaggtgcccgtggcaatccacgcagatcagctgacccctacatggcgggtgtactctaccggcagcaacgtgttccagacaagagccggatgcctgatcggagcagagcacgtgaacaatagctatgagtgcgacatccctatcggcgccggcatctgtgccagctaccagacccagacaaactccccatctggagcaggctcccaccatcaccatcaccatcaccatcaccactga

SEQ ID NO: 3876 - DNA, 2148 bp, Artificial Sequence
  Description of Artificial Sequence: Synthetic polynucleotide
atgggcatcctgccaagcccaggaatgcccgccctgctgtctctggtgagcctgctgtccgtgctgctgatgggatgcgtggcagagacaggcacacagtgcgtgaacctgaccacaaggacccagctgccccctgcctataccaattctttcacacggggcgtgtactatcccgacaaggtgtttagaagctccgtgctgcactccacacaggatctgtttctgcctttcttttctaacgtgacctggttccacgccatccacgtgtccggcaccaatggcacaaagcggttcgacaatcccgtgctgccttttaacgatggcgtgtacttcgccagcaccgagaagtccaacatcatcagaggctggatctttggcaccacactggactctaagacacagagcctgctgatcgtgaacaatgccaccaacgtggtgatcaaggtgtgcgagttccagttttgtaatgatccattcctgggcgtgtactatcacaagaacaataagtcctggatggagtctgagtttcgcgtgtattctagcgccaacaattgcacatttgagtacgtgagccagcccttcctgatggacctggagggcaagcagggcaatttcaagaacctgagggagttcgtgtttaagaatatcgatggctacttcaagatctacagcaagcacaccccaatcaacctggtgcgcgacctgccacagggattctccgccctggagccactggtggatctgcccatcggcatcaacatcacccggtttcagacactgctggccctgcacagatcctacctgacaccaggcgactcctctagcggatggaccgcaggagctgccgcctactatgtgggctatctgcagccccggaccttcctgctgaagtacaacgagaatggcaccatcacagacgcagtggattgcgccctggaccccctgtctgagacaaagtgtacactgaagagctttaccgtggagaagggcatctatcagacaagcaatttcagggtgcagcctaccgagtccatcgtgcgctttcccaatatcacaaacagttgcccttttggcgaggtgttcaacgccaccagattcgccagcgtgtacgcctggaatcggaagagaatctccaactgcgtggccgactattctgtgctgtacaactccgcctctttcagcacctttaagtgctatggcgtgtctcccacaaagctgaatgatctgtgctttaccaacgtgtacgccgatagcttcgtgatcaggggagacgaagtgagacagatcgcaccaggacagacaggaaagatcgcagactacaattataagctgcctgacgatttcaccggctgcgtgatcgcctggaactccaacaatctggattctaaagtgggcggcaactacaattatctgtacaggctgtttcgcaagtccaatctgaagccattcgagcgggacatctccacagagatctaccaggccggctctaccccctgcaatggcgtggagggctttaactgttatttccctctgcagtcttacggcttccagccaacaaacggcgtgggctatcagccctacagagtggtggtgctgtcctttgagctgctgcacgcaccagcaacagtgtgcggcccaaagaagtctaccaatctggtgaagaacaagtgcgtgaacttcaacttcaacggactgaccggcacaggcgtgctgaccgagagcaataagaagttcctgccttttcagcagttcggcagggacatcgcagataccacagacgccgtgcgcgaccctcagaccctggagatcctggacatcacaccatgcagcttcggcggcgtgtccgtgatcacaccaggcaccaatacatccaaccaggtggccgtgctgtatcaggacgtgaattgtaccgaggtgcccgtggcaatccacgcagatcagctgacccctacatggcgggtgtactctaccggcagcaacgtgttccagacaagagccggatgcctgatcggagcagagcacgtgaacaatagctatgagtgcgacatccctatcggcgccggcatctgtgccagctaccagacccagacaaactccccatctggagcaggctcccaccatcaccatcaccatcaccatcaccactga

SEQ ID NO: 3877 - DNA, 2148 bp, Artificial Sequence
  Description of Artificial Sequence: Synthetic polynucleotide
atgggcatcctgccaagcccaggaatgcccgccctgctgtctctggtgagcctgctgtccgtgctgctgatgggatgcgtggcagagacaggcacacagtgcgtgaacctgaccacaaggacccagctgccccctgcctataccaattctttcacacggggcgtgtactatcccgacaaggtgtttagaagctccgtgctgcactccacacaggatctgtttctgcctttcttttctaacgtgacctggttccacgccatccacgtgtccggcaccaatggcacaaagcggttcgacaatcccgtgctgccttttaacgatggcgtgtacttcgccagcaccgagaagtccaacatcatcagaggctggatctttggcaccacactggactctaagacacagagcctgctgatcgtgaacaatgccaccaacgtggtgatcaaggtgtgcgagttccagttttgtaatgatccattcctgggcgtgtactatcacaagaacaataagtcctggatggagtctgagtttcgcgtgtattctagcgccaacaattgcacatttgagtacgtgagccagcccttcctgatggacctggagggcaagcagggcaatttcaagaacctgagggagttcgtgtttaagaatatcgatggctacttcaagatctacagcaagcacaccccaatcaacctggtgcgcgacctgccacagggattctccgccctggagccactggtggatctgcccatcggcatcaacatcacccggtttcagacactgctggccctgcacagatcctaccaaacaccaggcgactcctctagcggatggaccgcaggagctgccgcctactatgtgggctatctgcagccccggaccttcctgctgaagtacaacgagaatggcaccatcacagacgcagtggattgcgccctggaccccctgtctgagacaaagtgtacactgaagagctttaccgtggagaagggcatctatcagacaagcaatttcagggtgcagcctaccgagtccatcgtgcgctttcccaatatcacaaacctgtgcccttttggcgaggtgttcaacgccaccagattcgccagcgtgtacgcctggaatcggaagagaatctccaactgcgtggccgactattctgtgctgtacaactccgcctctttcagcacctttaagtgctatggcgtgtctcccacaaagctgaatgatctgtgctttaccaacgtgtacgccgatagcttcgtgatcaggggagacgaagtgagacagatcgcaccaggacagacaggaaagatcgcagactacaattataagctgcctgacgatttcaccggctgcgtgatcgcctggaactccaacaatctggattctaaagtgggcggcaactacaattatctgtacaggctgtttcgcaagtccaatctgaagccattcgagcgggacatctccacagagatctaccaggccggctctaccccctgcaatggcgtggagggctttaactgttatttccctctgcagtcttacggcttccagccaacaaacggcgtgggctatcagccctacagagtggtggtgctgtcctttgagctgctgcacgcaccagcaacagtgtgcggcccaaagaagtctaccaatctggtgaagaacaagtgcgtgaacttcaacttcaacggactgaccggcacaggcgtgctgaccgagagcaataagaagttcctgccttttcagcagttcggcagggacatcgcagataccacagacgccgtgcgcgaccctcagaccctggagatcctggacatcacaccatgcagcttcggcggcgtgtccgtgatcacaccaggcaccaatacatccaaccaggtggccgtgctgtatcaggacgtgaattgtaccgaggtgcccgtggcaatccacgcagatcagctgacccctacatggcgggtgtactctaccggcagcaacgtgttccagacaagagccggatgcctgatcggagcagagcacgtgaacaatagctatgagtgcgacatccctatcggcgccggcatctgtgccagctaccagacccagacaaactccccatctggagcaggctcccaccatcaccatcaccatcaccatcaccactga

SEQ ID NO: 3878 - DNA, 2148 bp, Artificial Sequence
  Description of Artificial Sequence: Synthetic polynucleotide
atgggcatcctgccaagcccaggaatgcccgccctgctgtctctggtgagcctgctgtccgtgctgctgatgggatgcgtggcagagacaggcacacagtgcgtgaacctgaccacaaggacccagctgccccctgcctataccaattctttcacacggggcgtgtactatcccgacaaggtgtttagaagctccgtgctgcactccacacaggatctgtttctgcctttcttttctaacgtgacctggttccacgccatccacgtgtccggcaccaatggcacaaagcggttcgacaatcccgtgctgccttttaacgatggcgtgtacttcgccagcaccgagaagtccaacatcatcagaggctggatctttggcaccacactggactctaagacacagagcctgctgatcgtgaacaatgccaccaacgtggtgatcaaggtgtgcgagttccagttttgtaatgatccattcctgggcgtgtactatcacaagaacaataagtcctggatggagtctgagtttcgcgtgtattctagcgccaacaattgcacatttgagtacgtgagccagcccttcctgatggacctggagggcaagcagggcaatttcaagaacctgagggagttcgtgtttaagaatatcgatggctacttcaagatctacagcaagcacaccccaatcaacctggtgcgcgacctgccacagggattctccgccctggagccactggtggatctgcccatcggcatcaacatcacccggtttcagacactgctggccctgcacagatcctacctgacaccaggcgactcctctagcggatggaccgcaggagctgccgcctactatgtgggctatctgcagccccggaccttcctgctgaagtacaacgagaatggcaccatcacagacgcagtggattgcgccctggaccccctgtctgagacaaagtgtacactgaagagctttaccgtggagaagggcatctatcagacaagcaatttcagggtgcagcctaccgagtccatcgtgcgctttcccaatatcacaaacctgtgcccttttggcgaggtgttcaacgccaccagattcgccagcgtgtacgcctggaatcggaagagaatctccaactgcgtggccgactattctgtgctgtacaactccgcctctttcagcacctttaagtgctatggcgtgtctcccacaaagctgaatgatctgtgctttaccaacgtgtacgccgatagcttcgtgatcaggggagacgaagtgagacagatcgcaccaggacagacaggaaagatcgcagactacaattataagctgcctgacgatttcaccggctgcgtgatcgcctggaactccaacaatctggattctaaagtgggcggcaactacaattatctgtacaggctgtttcgcaagtccaatctgaagccattcgagcgggacatctccacagagatctaccaggccggctctaccccctgcaatggcgtggagggctttaactgttatttccctctgcagtcttacggcttccagccaacaaacggcgtgggctatcagccctacagagtggtggtgctgtcctttgagctgctgcacgcaccagcaacagtgtgcggcccaaagaagtctaccaatctggtgaagaacaagtgcgtgaacttcaacttcaacggactgaccggcacaggcgtgctgaccgagagcaataagaagttcctgccttttcagcagttcggcagggacatcgcagataccacagacgccgtgcgcgaccctcagaccctggagatcctggacatcacaccatgcagcttcggcggcgtgtccgtgatcacaccaggcaccaatacatccaaccaggtggccgtgctgtatcaggacgtgaattgtaccgaggtgccctgggcaatccacgcagatcagctgacccctacatggcgggtgtactctaccggcagcaacgtgttccagacaagagccggatgcctgatcggagcagagcacgtgaacaatagctatgagtgcgacatccctatcggcgccggcatctgtgccagctaccagacccagacaaactccccatctggagcaggctcccaccatcaccatcaccatcaccatcaccactga

SEQ ID NO: 3879 - DNA, 2148 bp, Artificial Sequence
  Description of Artificial Sequence: Synthetic polynucleotide
atgggcatcctgccaagcccaggaatgcccgccctgctgtctctggtgagcctgctgtccgtgctgctgatgggatgcgtggcagagacaggcacacagtgcgtgaacctgaccacaaggacccagctgccccctgcctataccaattctttcacacggggcgtgtactatcccgacaaggtgtttagaagctccgtgctgcactccacacaggatctgtttctgcctttcttttctaacgtgacctggttccacgcctgtcacgtgtccggcaccaatggcacaaagcggttcgacaatcccgtgctgccttttaacgatggcgtgtacttcgccagcaccgagaagtccaacatcatcagaggctggatctttggcaccacactggactctaagacacagagcctgctgatcgtgaacaatgccaccaacgtggtgatcaaggtgtgcgagttccagttttgtaatgatccattcctgggcgtgtactatcacaagaacaataagtcctggatggagtctgagtttcgcgtgtattctagcgccaacaattgcacatttgagtacgtgagccagcccttcctgatggacctggagggcaagcagggcaatttcaagaacctgagggagttcgtgtttaagaatatcgatggctacttcaagatctacagcaagcacaccccaatcaacctggtgcgcgacctgccacagggattctccgccctggagccactggtggatctgcccatcggcatcaacatcacccggtttcagacactgctggccctgcacagatcctacctgacaccaggcgactcctctagcggatggaccgcaggagctgccgcctactatgtgggctatctgcagccccggaccttcctgctgaagtacaacgagaatggcaccatcacagacgcagtggattgcgccctggaccccctgtctgagacaaagtgtacactgaagagctttaccgtggagaagggcatctatcagacaagcaatttcagggtgcagcctaccgagtccatcgtgcgctttcccaatatcacaaacctgtgcccttttggcgaggtgttcaacgccaccagattcgccagcgtgtacgcctggaatcggaagagaatctccaactgcgtggccgactattctgtgctgtacaactccgcctctttcagcacctttaagtgctatggcgtgtctcccacaaagctgaatgatctgtgctttaccaacgtgtacgccgatagcttcgtgatcaggggagacgaagtgagacagatcgcaccaggacagacaggaaagatcgcagactacaattataagctgcctgacgatttcaccggctgcgtgatcgcctggaactccaacaatctggattctaaagtgggcggcaactacaattatctgtacaggctgtttcgcaagtccaatctgaagccattcgagcgggacatctccacagagatctaccaggccggctctaccccctgcaatggcgtggagggctttaactgttatttccctctgcagtcttacggcttccagccaacaaacggcgtgggctatcagccctacagagtggtggtgctgtcctttgagctgctgcacgcaccagcaacagtgtgcggcccaaagaagtctaccaatctggtgaagaacaagtgcgtgaacttcaacttcaacggactgaccggcacaggcgtgctgaccgagagcaataagaagttcctgccttttcagcagttcggcagggacatcgcagataccacagacgccgtgcgcgaccctcagaccctggagatcctggacatcacaccatgcagcttcggcggcgtgtccgtgatcacaccaggcaccaatacatccaaccaggtggccgtgctgtatcaggacgtgaattgtaccgaggtgcccgtggcaatccacgcagatcagctgacccctacatggcgggtgtactctaccggcagcaacgtgttccagacaagagccggatgcctgatcggagcagagcacgtgaacaatagctatgagtgcgacatccctatcggcgccggcatctgtgccagctaccagacccagacaaactccccatctggagcaggctcccaccatcaccatcaccatcaccatcaccactga

SEQ ID NO: 3880 - DNA, 2148 bp, Artificial Sequence
  Description of Artificial Sequence: Synthetic polynucleotide
atgggcatcctgccaagcccaggaatgcccgccctgctgtctctggtgagcctgctgtccgtgctgctgatgggatgcgtggcagagacaggcacacagtgcgtgaacctgaccacaaggacccagctgccccctgcctataccaattctttcacacggggcgtgtactatcccgacaaggtgtttagaagctccgtgctgcactccacacaggatctgtttctgcctttcttttctaacgtgacctggttccacgcccaacacgtgtccggcaccaatggcacaaagcggttcgacaatcccgtgctgccttttaacgatggcgtgtacttcgccagcaccgagaagtccaacatcatcagaggctggatctttggcaccacactggactctaagacacagagcctgctgatcgtgaacaatgccaccaacgtggtgatcaaggtgtgcgagttccagttttgtaatgatccattcctgggcgtgtactatcacaagaacaataagtcctggatggagtctgagtttcgcgtgtattctagcgccaacaattgcacatttgagtacgtgagccagcccttcctgatggacctggagggcaagcagggcaatttcaagaacctgagggagttcgtgtttaagaatatcgatggctacttcaagatctacagcaagcacaccccaatcaacctggtgcgcgacctgccacagggattctccgccctggagccactggtggatctgcccatcggcatcaacatcacccggtttcagacactgctggccctgcacagatcctacctgacaccaggcgactcctctagcggatggaccgcaggagctgccgcctactatgtgggctatctgcagccccggaccttcctgctgaagtacaacgagaatggcaccatcacagacgcagtggattgcgccctggaccccctgtctgagacaaagtgtacactgaagagctttaccgtggagaagggcatctatcagacaagcaatttcagggtgcagcctaccgagtccatcgtgcgctttcccaatatcacaaacctgtgcccttttggcgaggtgttcaacgccaccagattcgccagcgtgtacgcctggaatcggaagagaatctccaactgcgtggccgactattctgtgctgtacaactccgcctctttcagcacctttaagtgctatggcgtgtctcccacaaagctgaatgatctgtgctttaccaacgtgtacgccgatagcttcgtgatcaggggagacgaagtgagacagatcgcaccaggacagacaggaaagatcgcagactacaattataagctgcctgacgatttcaccggctgcgtgatcgcctggaactccaacaatctggattctaaagtgggcggcaactacaattatctgtacaggctgtttcgcaagtccaatctgaagccattcgagcgggacatctccacagagatctaccaggccggctctaccccctgcaatggcgtggagggctttaactgttatttccctctgcagtcttacggcttccagccaacaaacggcgtgggctatcagccctacagagtggtggtgctgtcctttgagctgctgcacgcaccagcaacagtgtgcggcccaaagaagtctaccaatctggtgaagaacaagtgcgtgaacttcaacttcaacggactgaccggcacaggcgtgctgaccgagagcaataagaagttcctgccttttcagcagttcggcagggacatcgcagataccacagacgccgtgcgcgaccctcagaccctggagatcctggacatcacaccatgcagcttcggcggcgtgtccgtgatcacaccaggcaccaatacatccaaccaggtggccgtgctgtatcaggacgtgaattgtaccgaggtgcccgtggcaatccacgcagatcagctgacccctacatggcgggtgtactctaccggcagcaacgtgttccagacaagagccggatgcctgatcggagcagagcacgtgaacaatagctatgagtgcgacatccctatcggcgccggcatctgtgccagctaccagacccagacaaactccccatctggagcaggctcccaccatcaccatcaccatcaccatcaccactga

SEQ ID NO: 3881 - DNA, 2148 bp, Artificial Sequence
  Description of Artificial Sequence: Synthetic polynucleotide
atgggcatcctgccaagcccaggaatgcccgccctgctgtctctggtgagcctgctgtccgtgctgctgatgggatgcgtggcagagacaggcacacagtgcgtgaacctgaccacaaggacccagctgccccctgcctataccaattctttcacacggggcgtgtactatcccgacaaggtgtttagaagctccgtgctgcactccacacaggatctgtttctgcctttcttttctaacgtgacctggttccacgccatccacgtgtccggcaccaatggcacaaagcggttcgacaatcccgtgctgccttttaacgatggcgtgtacttcgccagcaccgagaagtccaacatcatcagaggctggatctttggcaccacactggactctaagacacagagcctgctgatcgtgaacaatgccaccaacgtggtgatcaaggtgtgcgagttccagttttgtaatgatccattcctgggcgtgtactatcacaagaacaataagtcctggatggagtctgagtttcgcgtgtattctagcgccaacaattgcacatttgagtacgtgagccagcccttcctgatggacctggagggcaagcagggcaatttcaagaacctgagggagttcgtgtttaagaatatcgatggctacttcaagatctacagcaagcacaccccaatcaacctggtgcgcgacctgccacagggattctccgccctggagccactggtggatctgcccatcggcatcaacatcacccggtttcagacactgctggccctgcacagatcctacctgacaccaggcgactcctctagcggatggaccgcaggagctgccgcctactatgtgggctatctgcagccccggaccttcctgctgaagtacaacgagaatggcaccatcacagacgcagtggattgcgccctggaccccctgtctgagacaaagtgtacactgaagagctttaccgtggagaagggcatctatcagacaagcaatttcagggtgcagcctaccgagtccatcgtgcgctttcccaatatcacaaacctgtgcccttttggcgaggtgttcaacgccaccagattcgccagcgtgtacgcctggaatcggaagagaatctccaactgcgtggccgactattctgtgctgtacaactccgcctctttcagcacctttaagtgctatggcgtgtctcccacaaagctgaatgatctgtgctttaccaacgtgtacgccgatattttcgtgatcaggggagacgaagtgagacagatcgcaccaggacagacaggaaagatcgcagactacaattataagctgcctgacgatttcaccggctgcgtgatcgcctggaactccaacaatctggattctaaagtgggcggcaactacaattatctgtacaggctgtttcgcaagtccaatctgaagccattcgagcgggacatctccacagagatctaccaggccggctctaccccctgcaatggcgtggagggctttaactgttatttccctctgcagtcttacggcttccagccaacaaacggcgtgggctatcagccctacagagtggtggtgctgtcctttgagctgctgcacgcaccagcaacagtgtgcggcccaaagaagtctaccaatctggtgaagaacaagtgcgtgaacttcaacttcaacggactgaccggcacaggcgtgctgaccgagagcaataagaagttcctgccttttcagcagttcggcagggacatcgcagataccacagacgccgtgcgcgaccctcagaccctggagatcctggacatcacaccatgcagcttcggcggcgtgtccgtgatcacaccaggcaccaatacatccaaccaggtggccgtgctgtatcaggacgtgaattgtaccgaggtgcccgtggcaatccacgcagatcagctgacccctacatggcgggtgtactctaccggcagcaacgtgttccagacaagagccggatgcctgatcggagcagagcacgtgaacaatagctatgagtgcgacatccctatcggcgccggcatctgtgccagctaccagacccagacaaactccccatctggagcaggctcccaccatcaccatcaccatcaccatcaccactga

SEQ ID NO: 3882 - DNA, 2148 bp, Artificial Sequence
  Description of Artificial Sequence: Synthetic polynucleotide
atgggcatcctgccaagcccaggaatgcccgccctgctgtctctggtgagcctgctgtccgtgctgctgatgggatgcgtggcagagacaggcacacagtgcgtgaacctgaccacaaggacccagctgccccctgcctataccaattctttcacacggggcgtgtactatcccgacaaggtgtttagaagctccgtgctgcactccacacaggatctgtttctgcctttcttttctaacgtgacctggttccacgccatccacgtgtccggcaccaatggcacaaagcggttcgacaatcccgtgctgccttttaacgatggcgtgtacttcgccagcaccgagaagtccaacatcatcagaggctggatctttggcaccacactggactctaagacacagagcctgctgatcgtgaacaatgccaccaacgtggtgatcaaggtgtgcgagttccagttttgtaatgatccattcctgggcgtgtactatcacaagaacaataagtcctggatggagtctgagtttcgcgtgtattctagcgccaacaattgcacatttgagtacgtgagccagcccttcctgatggacctggagggcaagcagggcaatttcaagaacctgagggagttcgtgtttaagaatatcgatggctacttcaagatctacagcaagcacaccccaatcaacctggtgcgcgacctgccacagggattctccgccctggagccagaagtggatctgcccatcggcatcaacatcacccggtttcagacactgctggccctgcacagatcctacctgacaccaggcgactcctctagcggatggaccgcaggagctgccgcctactatgtgggctatctgcagccccggaccttcctgctgaagtacaacgagaatggcaccatcacagacgcagtggattgcgccctggaccccctgtctgagacaaagtgtacactgaagagctttaccgtggagaagggcatctatcagacaagcaatttcagggtgcagcctaccgagtccatcgtgcgctttcccaatatcacaaacctgtgcccttttggcgaggtgttcaacgccaccagattcgccagcgtgtacgcctggaatcggaagagaatctccaactgcgtggccgactattctgtgctgtacaactccgcctctttcagcacctttaagtgctatggcgtgtctcccacaaagctgaatgatctgtgctttaccaacgtgtacgccgatagcttcgtgatcaggggagacgaagtgagacagatcgcaccaggacagacaggaaagatcgcagactacaattataagctgcctgacgatttcaccggctgcgtgatcgcctggaactccaacaatctggattctaaagtgggcggcaactacaattatctgtacaggctgtttcgcaagtccaatctgaagccattcgagcgggacatctccacagagatctaccaggccggctctaccccctgcaatggcgtggagggctttaactgttatttccctctgcagtcttacggcttccagccaacaaacggcgtgggctatcagccctacagagtggtggtgctgtcctttgagctgctgcacgcaccagcaacagtgtgcggcccaaagaagtctaccaatctggtgaagaacaagtgcgtgaacttcaacttcaacggactgaccggcacaggcgtgctgaccgagagcaataagaagttcctgccttttcagcagttcggcagggacatcgcagataccacagacgccgtgcgcgaccctcagaccctggagatcctggacatcacaccatgcagcttcggcggcgtgtccgtgatcacaccaggcaccaatacatccaaccaggtggccgtgctgtatcaggacgtgaattgtaccgaggtgcccgtggcaatccacgcagatcagctgacccctacatggcgggtgtactctaccggcagcaacgtgttccagacaagagccggatgcctgatcggagcagagcacgtgaacaatagctatgagtgcgacatccctatcggcgccggcatctgtgccagctaccagacccagacaaactccccatctggagcaggctcccaccatcaccatcaccatcaccatcaccactga

SEQ ID NO: 3883 - DNA, 2148 bp, Artificial Sequence
  Description of Artificial Sequence: Synthetic polynucleotide
atgggcatcctgccaagcccaggaatgcccgccctgctgtctctggtgagcctgctgtccgtgctgctgatgggatgcgtggcagagacaggcacacagtgcgtgaacctgaccacaaggacccagctgccccctgcctataccaattctttcacacggggcgtgtactatcccgacaaggtgtttagaagctccgtgctgcactccacacaggatctgtttctgcctttcttttctaacgtgacctggttccacgccatccacgtgtccggcaccaatggcacaaagcggttcgacaatcccgtgctgccttttaacgatggcgtgtacttcgccagcaccgagaagtccaacatcatcagaggctggatctttggcaccacactggactctaagacacagagcctgctgatcgtgaacaatgccaccaacgtggtgatcaaggtgtgcgagttccagttttgtaatgatccattcctgggcgtgtactatcacaagaacaataagtcctggatggagtctgagtttcgcgtgtattctagcgccaacaattgcacatttgagtacgtgagccagcccttcctgatggacctggagggcaagcagggcaatttcaagaacctgagggagttcgtgtttaagaatatcgatggctacttcaagatctacagcaagcacaccccaatcaacctggtgcgcgacctgccacagggattctccgccctggagccactggtggatctgcccatcggcatcaacatcacccggtttcagacactgctggccctgcacagatcctacctgacaccaggcgactcctctagcggatggaccgcaggagctgccgcctactatgtgggctatctgcagccccggaccttcctgctgaagtacaacgagaatggcaccatcacagacgcagtggattgcgccctggaccccctgtctgagacaaagtgtacactgaagagctttaccgtggagaagggcatctatcagacaagcaatttcagggtgcagcctaccgagtccatcgtgcgctttcccaatatcacaaacctgtgcccttttggcgaggtgttcaacgccaccagattcgccagcgtgtacgcctggaatcggaagagaatctccaactgcgtggccgactattctgtgctgtacaactccgcctctttcagcacctttaagtgctatggcgtgtctcccacaaagctgaatgatctgtgctttaccaacgtgtacgccgatagcttcgtgatcaggggagacgaagtgagacagatcgcaccaggacagacaggaaagatcgcagactacaattataagctgcctgacgatttcaccggctgcgtgatcgcctggaactccaacaatctggattctaaagtgggcggcaactacaattatctgtacaggctgtttcgcaagtccaatctgaagccattcgagcgggacatctccacagagatctaccaggccggctctaccccctgcaatggcgtggagggctttaactgttatttccctctgcagtcttacggcttccagccaacaaacggcgtgggctatcagccctacagagtggtggtgctgtcctttgagctgctgcacgcaccagcaacagtgtgcggcccaaagaagtctaccaatctggtgaagaacaagtgcgtgaacttcaacttcaacggactgaccggcacaggcgtgctgaccgagagcaataagaagttcctgccttttcagcagttcggcagggacatcgcagataccacagacgccgtgcgcgaccctcagaccctggagatcctggacatcacaccatgcagcttcggcggcgtgtccgtgatcacaccagataccaatacatccaaccaggtggccgtgctgtatcaggacgtgaattgtaccgaggtgcccgtggcaatccacgcagatcagctgacccctacatggcgggtgtactctaccggcagcaacgtgttccagacaagagccggatgcctgatcggagcagagcacgtgaacaatagctatgagtgcgacatccctatcggcgccggcatctgtgccagctaccagacccagacaaactccccatctggagcaggctcccaccatcaccatcaccatcaccatcaccactga

SEQ ID NO: 3884 - DNA, 2148 bp, Artificial Sequence
  Description of Artificial Sequence: Synthetic polynucleotide
atgggcatcctgccaagcccaggaatgcccgccctgctgtctctggtgagcctgctgtccgtgctgctgatgggatgcgtggcagagacaggcacacagtgcgtgaacctgaccacaaggacccagctgccccctgcctataccaattctttcacacggggcgtgtactatcccgacaaggtgtttagaagctccgtgctgcactccacacaggatctgtttctgcctttcttttctaacgtgacctggttccacgccatccacgtgtccggcaccaatggcacaaagcggttcgacaatcccgtgctgccttttaacgatggcgtgtacttcgccagcaccgagaagtccaacatcatcagaggctggatctttggcaccacactggactctaagacacagagcctgctgatcgtgaacaatgccaccaacgtggtgatcaaggtgtgcgagttccagttttgtaatgatccattcctgggcgtgtactatcacaagaacaataagtcctggatggagtctgagtttcgcgtgtattctagcgccaacaattgcacatttgagtacgtgagccagcccttcctgatggacctggagggcaagcagggcaatttcaagaacctgagggagttcgtgtttaagaatatcgatggctacttcaagatctacagcaagcacaccccaatcaacctggtgcgcgacctgccacagggattctccgccctggagccactggtggatctgcccatcggcatcaacatcacccggtttcagacactgctggccctgcacagatcctacctgacaccaggcgactcctctagcggatggaccgcaggagctgccgcctactatgtgggctatctgcagccccggaccttcctgctgaagtacaacgagaatggcaccatcacagacgcagtggattgcgccctggaccccctgtctgagacaaagtgtacactgaagagctttaccgtggagaagggcatctatcagacaagcaatttcagggtgcagcctaccgagtccatcgtgcgctttcccaatatcacaaacctgtgcccttttggcgaggtgttcaacgccaccagattcgccagcgtgtacgcctggaatcggaagagaatctccaactgcgtggccgactattctgtgctgtacaactccgcctctttcagcacctttaagtgctatggcgtgtctcccacaaagctgaatgatctgtgctttaccaacgtgtacgccgatagcttcgtgatcaggggagacgaagtgagacagatcgcaccaggacagacaggaaagatcgcagactacaattataagctgcctgacgatttcaccggctgcgtgatcgcctggaactccaacaatctggattctaaagtgggcggcaactacaattatctgtacaggctgtttcgcaagtccaatctgaagccatgggagcgggacatctccacagagatctaccaggccggctctaccccctgcaatggcgtggagggctttaactgttatttccctctgcagtcttacggcttccagccaacaaacggcgtgggctatcagccctacagagtggtggtgctgtcctttgagctgctgcacgcaccagcaacagtgtgcggcccaaagaagtctaccaatctggtgaagaacaagtgcgtgaacttcaacttcaacggactgaccggcacaggcgtgctgaccgagagcaataagaagttcctgccttttcagcagttcggcagggacatcgcagataccacagacgccgtgcgcgaccctcagaccctggagatcctggacatcacaccatgcagcttcggcggcgtgtccgtgatcacaccaggcaccaatacatccaaccaggtggccgtgctgtatcaggacgtgaattgtaccgaggtgcccgtggcaatccacgcagatcagctgacccctacatggcgggtgtactctaccggcagcaacgtgttccagacaagagccggatgcctgatcggagcagagcacgtgaacaatagctatgagtgcgacatccctatcggcgccggcatctgtgccagctaccagacccagacaaactccccatctggagcaggctcccaccatcaccatcaccatcaccatcaccactga

SEQ ID NO: 3885 - DNA, 2148 bp, Artificial Sequence
  Description of Artificial Sequence: Synthetic polynucleotide
atgggcatcctgccaagcccaggaatgcccgccctgctgtctctggtgagcctgctgtccgtgctgctgatgggatgcgtggcagagacaggcacacagtgcgtgaacctgaccacaaggacccagctgccccctgcctataccaattctttcacacggggcgtgtactatcccgacaaggtgtttagaagctccgtgctgcactccacacaggatctgtttctgcctttcttttctaacgtgacctggttccacgccatccacgtgtccggcaccaatggcacaaagcggttcgacaatcccgtgctgccttttaacgatggcgtgtacttcgccagcaccgagaagtccaacatcatcagaggctggatctttggcaccacactggactctaagacacagagcctgctgatcgtgaacaatgccaccaacgtggtgatcaaggtgtgcgagttccagttttgtaatgatccattcctgggcgtgtactatcacaagaacaataagtcctggatggagtctgagtttcgcgtgtattctagcgccaacaattgcacatttgagtacgtgagccagcccttcctgatggacctggagggcaagcagggcaatttcaagaacctgagggagttcgtgtttaagaatatcgatggctacttcaagatctacagcaagcacaccccaatcaacctggtgcgcgacctgccacagggattctccgccctggagccactggtggatctgcccatcggcatcaacatcacccggtttcagacactgctggccctgcacagatcctacctgacaccaggcgactcctctagcggatggaccgcaggagctgccgcctactatgtgggctatctgcagccccggaccttcctgctgaagtacaacgagaatggcaccatcacagacgcagtggattgcgccctggaccccctgtctgagacaaagtgtacactgaagagctttaccgtggagaagggcatctatcagacaagcaatttcagggtgcagcctaccgagtccatcgtgcgctttcccaatatcacaaacccttgcccttttggcgaggtgttcaacgccaccagattcgccagcgtgtacgcctggaatcggaagagaatctccaactgcgtggccgactattctgtgctgtacaactccgcctctttcagcacctttaagtgctatggcgtgtctcccacaaagctgaatgatctgtgctttaccaacgtgtacgccgatagcttcgtgatcaggggagacgaagtgagacagatcgcaccaggacagacaggaaagatcgcagactacaattataagctgcctgacgatttcaccggctgcgtgatcgcctggaactccaacaatctggattctaaagtgggcggcaactacaattatctgtacaggctgtttcgcaagtccaatctgaagccattcgagcgggacatctccacagagatctaccaggccggctctaccccctgcaatggcgtggagggctttaactgttatttccctctgcagtcttacggcttccagccaacaaacggcgtgggctatcagccctacagagtggtggtgctgtcctttgagctgctgcacgcaccagcaacagtgtgcggcccaaagaagtctaccaatctggtgaagaacaagtgcgtgaacttcaacttcaacggactgaccggcacaggcgtgctgaccgagagcaataagaagttcctgccttttcagcagttcggcagggacatcgcagataccacagacgccgtgcgcgaccctcagaccctggagatcctggacatcacaccatgcagcttcggcggcgtgtccgtgatcacaccaggcaccaatacatccaaccaggtggccgtgctgtatcaggacgtgaattgtaccgaggtgcccgtggcaatccacgcagatcagctgacccctacatggcgggtgtactctaccggcagcaacgtgttccagacaagagccggatgcctgatcggagcagagcacgtgaacaatagctatgagtgcgacatccctatcggcgccggcatctgtgccagctaccagacccagacaaactccccatctggagcaggctcccaccatcaccatcaccatcaccatcaccactga

SEQ ID NO: 3886 - DNA, 2148 bp, Artificial Sequence
  Description of Artificial Sequence: Synthetic polynucleotide
atgggcatcctgccaagcccaggaatgcccgccctgctgtctctggtgagcctgctgtccgtgctgctgatgggatgcgtggcagagacaggcacacagtgcgtgaacctgaccacaaggacccagctgccccctgcctataccaattctttcacacggggcgtgtactatcccgacaaggtgtttagaagctccgtgctgcactccacacaggatctgtttctgcctttcttttctaacgtgacctggttccacgccatccacgtgtccggcaccaatggcacaaagcggttcgacaatcccgtgctgccttttaacgatggcgtgtacttcgccagcaccgagaagtccaacatcatcagaggctggatctttggcaccacactggactctaagacacagagcctgctgatcgtgaacaatgccaccaacgtggtgatcgttgtgtgcgagttccagttttgtaatgatccattcctgggcgtgtactatcacaagaacaataagtcctggatggagtctgagtttcgcgtgtattctagcgccaacaattgcacatttgagtacgtgagccagcccttcctgatggacctggagggcaagcagggcaatttcaagaacctgagggagttcgtgtttaagaatatcgatggctacttcaagatctacagcaagcacaccccaatcaacctggtgcgcgacctgccacagggattctccgccctggagccactggtggatctgcccatcggcatcaacatcacccggtttcagacactgctggccctgcacagatcctacctgacaccaggcgactcctctagcggatggaccgcaggagctgccgcctactatgtgggctatctgcagccccggaccttcctgctgaagtacaacgagaatggcaccatcacagacgcagtggattgcgccctggaccccctgtctgagacaaagtgtacactgaagagctttaccgtggagaagggcatctatcagacaagcaatttcagggtgcagcctaccgagtccatcgtgcgctttcccaatatcacaaacctgtgcccttttggcgaggtgttcaacgccaccagattcgccagcgtgtacgcctggaatcggaagagaatctccaactgcgtggccgactattctgtgctgtacaactccgcctctttcagcacctttaagtgctatggcgtgtctcccacaaagctgaatgatctgtgctttaccaacgtgtacgccgatagcttcgtgatcaggggagacgaagtgagacagatcgcaccaggacagacaggaaagatcgcagactacaattataagctgcctgacgatttcaccggctgcgtgatcgcctggaactccaacaatctggattctaaagtgggcggcaactacaattatctgtacaggctgtttcgcaagtccaatctgaagccattcgagcgggacatctccacagagatctaccaggccggctctaccccctgcaatggcgtggagggctttaactgttatttccctctgcagtcttacggcttccagccaacaaacggcgtgggctatcagccctacagagtggtggtgctgtcctttgagctgctgcacgcaccagcaacagtgtgcggcccaaagaagtctaccaatctggtgaagaacaagtgcgtgaacttcaacttcaacggactgaccggcacaggcgtgctgaccgagagcaataagaagttcctgccttttcagcagttcggcagggacatcgcagataccacagacgccgtgcgcgaccctcagaccctggagatcctggacatcacaccatgcagcttcggcggcgtgtccgtgatcacaccaggcaccaatacatccaaccaggtggccgtgctgtatcaggacgtgaattgtaccgaggtgcccgtggcaatccacgcagatcagctgacccctacatggcgggtgtactctaccggcagcaacgtgttccagacaagagccggatgcctgatcggagcagagcacgtgaacaatagctatgagtgcgacatccctatcggcgccggcatctgtgccagctaccagacccagacaaactccccatctggagcaggctcccaccatcaccatcaccatcaccatcaccactga

SEQ ID NO: 3887 - DNA, 2148 bp, Artificial Sequence
  Description of Artificial Sequence: Synthetic polynucleotide
atgggcatcctgccaagcccaggaatgcccgccctgctgtctctggtgagcctgctgtccgtgctgctgatgggatgcgtggcagagacaggcacacagtgcgtgaacctgaccacaaggacccagctgccccctgcctataccaattctttcacacggggcgtgtactatcccgacaaggtgtttagaagctccgtgctgcactccacacaggatctgtttctgcctttcttttctaacgtgacctggttccacgccatccacgtgtccggcaccaatggcacaaagcggttcgacaatcccgtgctgccttttaacgatggcgtgtacttcgccagcaccgagaagtccaacatcatcagaggctggatctttggcaccacactggactctaagacacagagcctgctgatcgtgaacaatgccaccaacgtggtgatcaaggtgtgcgagttccagttttgtaatgatccattcctgggcgtgtactatcacaagaacaataagtcctggatggagtctgagtttcgcgtgtattctagcgccaacaattgcacatttgagtacgtgagccagcccttcctgatggacctggagggcaagcagggcaatttcaagaacctgagggagttcgtgtttaagaatatcgatggctacttcaagatctacagcaagcacaccccaatcaacctggtgcgcgacctgccacagggattctccgccctggagccactggtggatctgcccatcggcatcaacatcacccggtttcagacactgctggccctgcacagatcctacctgacaccaggcgactcctctagcggatggaccgcaggagctgccgcctactatgtgggctatctgcagccccggaccttcctgctgaagtacaacgagaatggcaccatcacagacgcagtggattgcgccctggaccccctgtctgagacaaagtgtacactgaagagctttaccgtggagaagggcatctatcagacaagcaatttcagggtgcagcctaccgagtccatcgtgcgctttcccaatatcacaaacctgtgcccttttggcgaggtgttcaacgccaccagattcgccagcgtgtacgcctggaatcggaagagaatctccaactgcgtggccgactattctgtgctgtacaactccgcctctttcagcacctttaagtgctatggcgtgtctcccacaaagctgaatgatctgtgctttaccaacgtgtacgccgatagcttcgtgatcaggggagacgaagtgagacagatcgcaccaggacagacaggaaagatcgcagactacaattataagctgcctgacgatttcaccggctgcgtgatcgcctggaactccaacaatctggattctaaagtgggcggcaactacaattatctgtacaggctgtttcgcaagtccaatctgaagccattcgagcgggacatctccacagagatctaccaggccggctctaccccctgcaatggcgtggagggctttaactgttatttccctctgcagtcttacggcttccagccaacaaacggcgtgggctatcagccctacagagtggtggtgctgtcctttgagctgctgcacgcaccagcaacagtgtgcggcccaaagaagtctaccaatctggtgaagaacaagtgcgtgaacttcaacttcaacggactgaccggcacaggcgtgctgaccgagagcaataagaagttcctgccttttcagcagttcggcagggacccggcagataccacagacgccgtgcgcgaccctcagaccctggagatcctggacatcacaccatgcagcttcggcggcgtgtccgtgatcacaccaggcaccaatacatccaaccaggtggccgtgctgtatcaggacgtgaattgtaccgaggtgcccgtggcaatccacgcagatcagctgacccctacatggcgggtgtactctaccggcagcaacgtgttccagacaagagccggatgcctgatcggagcagagcacgtgaacaatagctatgagtgcgacatccctatcggcgccggcatctgtgccagctaccagacccagacaaactccccatctggagcaggctcccaccatcaccatcaccatcaccatcaccactga

SEQ ID NO: 3888 - DNA, 2148 bp, Artificial Sequence
  Description of Artificial Sequence: Synthetic polynucleotide
atgggcatcctgccaagcccaggaatgcccgccctgctgtctctggtgagcctgctgtccgtgctgctgatgggatgcgtggcagagacaggcacacagtgcgtgaacctgaccacaaggacccagctgccccctgcctataccaattctttcacacggggcgtgtactatcccgacaaggtgtttagaagctccgtgctgcactccacacaggatctgtttctgcctttcttttctaacgtgacctggttccacgcctcacacgtgtccggcaccaatggcacaaagcggttcgacaatcccgtgctgccttttaacgatggcgtgtacttcgccagcaccgagaagtccaacatcatcagaggctggatctttggcaccacactggactctaagacacagagcctgctgatcgtgaacaatgccaccaacgtggtgatcaaggtgtgcgagttccagttttgtaatgatccattcctgggcgtgtactatcacaagaacaataagtcctggatggagtctgagtttcgcgtgtattctagcgccaacaattgcacatttgagtacgtgagccagcccttcctgatggacctggagggcaagcagggcaatttcaagaacctgagggagttcgtgtttaagaatatcgatggctacttcaagatctacagcaagcacaccccaatcaacctggtgcgcgacctgccacagggattctccgccctggagccactggtggatctgcccatcggcatcaacatcacccggtttcagacactgctggccctgcacagatcctacctgacaccaggcgactcctctagcggatggaccgcaggagctgccgcctactatgtgggctatctgcagccccggaccttcctgctgaagtacaacgagaatggcaccatcacagacgcagtggattgcgccctggaccccctgtctgagacaaagtgtacactgaagagctttaccgtggagaagggcatctatcagacaagcaatttcagggtgcagcctaccgagtccatcgtgcgctttcccaatatcacaaacctgtgcccttttggcgaggtgttcaacgccaccagattcgccagcgtgtacgcctggaatcggaagagaatctccaactgcgtggccgactattctgtgctgtacaactccgcctctttcagcacctttaagtgctatggcgtgtctcccacaaagctgaatgatctgtgctttaccaacgtgtacgccgatagcttcgtgatcaggggagacgaagtgagacagatcgcaccaggacagacaggaaagatcgcagactacaattataagctgcctgacgatttcaccggctgcgtgatcgcctggaactccaacaatctggattctaaagtgggcggcaactacaattatctgtacaggctgtttcgcaagtccaatctgaagccattcgagcgggacatctccacagagatctaccaggccggctctaccccctgcaatggcgtggagggctttaactgttatttccctctgcagtcttacggcttccagccaacaaacggcgtgggctatcagccctacagagtggtggtgctgtcctttgagctgctgcacgcaccagcaacagtgtgcggcccaaagaagtctaccaatctggtgaagaacaagtgcgtgaacttcaacttcaacggactgaccggcacaggcgtgctgaccgagagcaataagaagttcctgccttttcagcagttcggcagggacatcgcagataccacagacgccgtgcgcgaccctcagaccctggagatcctggacatcacaccatgcagcttcggcggcgtgtccgtgatcacaccaggcaccaatacatccaaccaggtggccgtgctgtatcaggacgtgaattgtaccgaggtgcccgtggcaatccacgcagatcagctgacccctacatggcgggtgtactctaccggcagcaacgtgttccagacaagagccggatgcctgatcggagcagagcacgtgaacaatagctatgagtgcgacatccctatcggcgccggcatctgtgccagctaccagacccagacaaactccccatctggagcaggctcccaccatcaccatcaccatcaccatcaccactga

SEQ ID NO: 3889 - DNA, 2148 bp, Artificial Sequence
  Description of Artificial Sequence: Synthetic polynucleotide
atgggcatcctgccaagcccaggaatgcccgccctgctgtctctggtgagcctgctgtccgtgctgctgatgggatgcgtggcagagacaggcacacagtgcgtgaacctgaccacaaggacccagctgccccctgcctataccaattctttcacacggggcgtgtactatcccgacaaggtgtttagaagctccgtgctgcactccacacaggatctgtttctgcctttcttttctaacgtgacctggttccacgccatccacgtgtccggcaccaatggcacaaagcggttcgacaatcccgtgctgccttttaacgatggcgtgtacttcgccagcaccgagaagtccaacatcatcagaggctggatctttggcaccacactggactctaagacacagagcctgctgatcgtgaacaatgccaccaacgtggtgatcaaggtgtgcgagttccagttttgtaatgatccattcctgggcgtgtactatcacaagaacaataagtcctggatggagtctgagtttcgcgtgtattctagcgccaacaattgcacatttgagtacgtgagccagcccttcctgatggacctggagggcaagcagggcaatttcaagaacctgagggagttcgtgtttaagaatatcgatggctacttcaagatctacagcaagcacaccccaatcaacctggtgcgcgacctgccacagggattctccgccctggagccactggtggatctgcccatcggcatcaacatcacccggtttcagacactgctggccctgcacagatcctacctgacaccaggcgactcctctagcggatggaccgcaggagctgccgcctactatgtgggctatctgcagccccggaccttcctgctgaagtacaacgagaatggcaccatcacagacgcagtggattgcgccctggaccccctgtctgagacaaagtgtacactgaagagctttaccgtggagaagggcatctatcagacaagcaatttcagggtgcagcctaccgagtccatcgtgcgctttcccaatatcacaaacctgtgcccttttggcgaggtgttcaacgccaccagattcgccagcgtgtacgcctggaatcggaagagaatctccaactgcgtggccgactattctgtgctgtacaactccgcctctttcagcacctttaagtgctatggcgtgtctcccacaaagctgaatgatctgtgctttaccaacgtgtacgccgatagcttcgtgatcaggggagacgaagtgagacagatcgcaccaggacagacaggaaagatcgcagactacaattataagctgcctgacgatttcaccggctgcgtgatcgcctggaactccaacaatctggattctaaagtgggcggcaactacaattatctgtacaggctgtttcgcaagtccaatctgaagccattcgagcgggacatctccacagagatctaccaggccggctctaccccctgcaatggcgtggagggctttaactgtaatttccctctgcagtcttacggcttccagccaacaaacggcgtgggctatcagccctacagagtggtggtgctgtcctttgagctgctgcacgcaccagcaacagtgtgcggcccaaagaagtctaccaatctggtgaagaacaagtgcgtgaacttcaacttcaacggactgaccggcacaggcgtgctgaccgagagcaataagaagttcctgccttttcagcagttcggcagggacatcgcagataccacagacgccgtgcgcgaccctcagaccctggagatcctggacatcacaccatgcagcttcggcggcgtgtccgtgatcacaccaggcaccaatacatccaaccaggtggccgtgctgtatcaggacgtgaattgtaccgaggtgcccgtggcaatccacgcagatcagctgacccctacatggcgggtgtactctaccggcagcaacgtgttccagacaagagccggatgcctgatcggagcagagcacgtgaacaatagctatgagtgcgacatccctatcggcgccggcatctgtgccagctaccagacccagacaaactccccatctggagcaggctcccaccatcaccatcaccatcaccatcaccactga

SEQ ID NO: 3890 - DNA, 2148 bp, Artificial Sequence
  Description of Artificial Sequence: Synthetic polynucleotide
atgggcatcctgccaagcccaggaatgcccgccctgctgtctctggtgagcctgctgtccgtgctgctgatgggatgcgtggcagagacaggcacacagtgcgtgaacctgaccacaaggacccagctgccccctgcctataccaattctttcacacggggcgtgtactatcccgacaaggtgtttagaagctccgtgctgcactccacacaggatctgtttctgcctttcttttctaacgtgacccaattccacgccatccacgtgtccggcaccaatggcacaaagcggttcgacaatcccgtgctgccttttaacgatggcgtgtacttcgccagcaccgagaagtccaacatcatcagaggctggatctttggcaccacactggactctaagacacagagcctgctgatcgtgaacaatgccaccaacgtggtgatcaaggtgtgcgagttccagttttgtaatgatccattcctgggcgtgtactatcacaagaacaataagtcctggatggagtctgagtttcgcgtgtattctagcgccaacaattgcacatttgagtacgtgagccagcccttcctgatggacctggagggcaagcagggcaatttcaagaacctgagggagttcgtgtttaagaatatcgatggctacttcaagatctacagcaagcacaccccaatcaacctggtgcgcgacctgccacagggattctccgccctggagccactggtggatctgcccatcggcatcaacatcacccggtttcagacactgctggccctgcacagatcctacctgacaccaggcgactcctctagcggatggaccgcaggagctgccgcctactatgtgggctatctgcagccccggaccttcctgctgaagtacaacgagaatggcaccatcacagacgcagtggattgcgccctggaccccctgtctgagacaaagtgtacactgaagagctttaccgtggagaagggcatctatcagacaagcaatttcagggtgcagcctaccgagtccatcgtgcgctttcccaatatcacaaacctgtgcccttttggcgaggtgttcaacgccaccagattcgccagcgtgtacgcctggaatcggaagagaatctccaactgcgtggccgactattctgtgctgtacaactccgcctctttcagcacctttaagtgctatggcgtgtctcccacaaagctgaatgatctgtgctttaccaacgtgtacgccgatagcttcgtgatcaggggagacgaagtgagacagatcgcaccaggacagacaggaaagatcgcagactacaattataagctgcctgacgatttcaccggctgcgtgatcgcctggaactccaacaatctggattctaaagtgggcggcaactacaattatctgtacaggctgtttcgcaagtccaatctgaagccattcgagcgggacatctccacagagatctaccaggccggctctaccccctgcaatggcgtggagggctttaactgttatttccctctgcagtcttacggcttccagccaacaaacggcgtgggctatcagccctacagagtggtggtgctgtcctttgagctgctgcacgcaccagcaacagtgtgcggcccaaagaagtctaccaatctggtgaagaacaagtgcgtgaacttcaacttcaacggactgaccggcacaggcgtgctgaccgagagcaataagaagttcctgccttttcagcagttcggcagggacatcgcagataccacagacgccgtgcgcgaccctcagaccctggagatcctggacatcacaccatgcagcttcggcggcgtgtccgtgatcacaccaggcaccaatacatccaaccaggtggccgtgctgtatcaggacgtgaattgtaccgaggtgcccgtggcaatccacgcagatcagctgacccctacatggcgggtgtactctaccggcagcaacgtgttccagacaagagccggatgcctgatcggagcagagcacgtgaacaatagctatgagtgcgacatccctatcggcgccggcatctgtgccagctaccagacccagacaaactccccatctggagcaggctcccaccatcaccatcaccatcaccatcaccactga

SEQ ID NO: 3891 - DNA, 2148 bp, Artificial Sequence
  Description of Artificial Sequence: Synthetic polynucleotide
atgggcatcctgccaagcccaggaatgcccgccctgctgtctctggtgagcctgctgtccgtgctgctgatgggatgcgtggcagagacaggcacacagtgcgtgaacctgaccacaaggacccagctgccccctgcctataccaattctttcacacggggcgtgtactatcccgacaaggtgtttagaagctccgtgctgcactccacacaggatctgtttctgcctttcttttctaacgtgacctggttccacgccatccacgtgtccggcaccaatggcacaaagcggttcgacaatcccgtgctgccttttaacgatggcgtgtacttcgccagcaccgagaagtccaacatcatcagaggctggatctttggcaccacactggactctaagacacagagcctgctgatcgtgaacaatgccaccaacgtggtgatcaaggtgtgcgagttccagttttgtaatgatccattcctgggcgtgtactatcacaagaacaataagtcctggatggagtctgagtttcgcgtgtattctagcgccaacaattgcacatttgagtacgtgagccagcccttcctgatggacctggagggcaagcagggcaatttcaagaacctgagggagttcgtgtttaagaatatcgatggctacttcaagatctacagcaagcacaccccaatcaacctggtgcgcgacctgccacagggattctccgccctggagccactggtggatctgcccatcggcatcaacatcacccggtttcagacactgctggccctgcacagatcctacctgacaccaggcgactcctctagcggatggaccgcaggagctgccgcctactatgtgggctatctgcagccccggaccttcctgctgaagtacaacgagaatggcaccatcacagacgcagtggattgcgccctggaccccctgtctgagacaaagtgtacactgaagagctttaccgtggagaagggcatctatcagacaagcaatttcagggtgcagcctaccgagtccatcgtgcgctttcccaatatcacaaacctgtgcccttttggcgaggtgttcaacgccaccagattcgccagcagttacgcctggaatcggaagagaatctccaactgcgtggccgactattctgtgctgtacaactccgcctctttcagcacctttaagtgctatggcgtgtctcccacaaagctgaatgatctgtgctttaccaacgtgtacgccgatcgcttcgtgatcaggggagacgaagtgagacagatcgcaccaggacagacaggaaagatcgcagactacaattataagctgcctgacgatttcaccggctgcgtgatcgcctggaactccaacaatctggatgctaaagtgggcggcaactacaattatctgtacaggctgtttcgcaagtccaatctgaagccattcgagcggttcatctccacagagatctaccaggccggctctaccccctcaaatggcgtggagggctttaactgttatttccctctgcagtcttacggcttccagccaacaaacggcgtgacgtatcagccctacagagtggtggtgctgtcctttgagctgctgcacgcaccacatacagtgtgcggcccaaagaagtctaccaatctggtgaagaacaagtgcgtgaacttcaacttcaacggactgaccggcacaggcgtgctgaccgagagcaataagaagttcctgccttttcagcagttcggcagggacatcgcagataccacagacgccgtgcgcgaccctcagaccctggagatcctggacatcacaccatgcagcttcggcggcgtgtccgtgatcacaccaggcaccaatacatccaaccaggtggccgtgctgtatcaggacgtgaattgtaccgaggtgcccgtggcaatccacgcagatcagctgacccctacatggcgggtgtactctaccggcagcaacgtgttccagacaagagccggatgcctgatcggagcagagcacgtgaacaatagctatgagtgcgacatccctatcggcgccggcatctgtgccagctaccagacccagacaaactccccatctggagcaggctcccaccatcaccatcaccatcaccatcaccactga

SEQ ID NO: 3892 - DNA, 2148 bp, Artificial Sequence
  Description of Artificial Sequence: Synthetic polynucleotide
atgggcatcctgccaagcccaggaatgcccgccctgctgtctctggtgagcctgctgtccgtgctgctgatgggatgcgtggcagagacaggcacacagtgcgtgaacctgaccacaaggacccagctgccccctgcctataccaattctttcacacggggcgtgtactatcccgacaaggtgtttagaagctccgtgctgcactccacacaggatctgtttctgcctttcttttctaacgtgacctggttccacgccatccacgtgtccggcaccaatggcacaaagcggttcgacaatcccgtgctgccttttaacgatggcgtgtacttcgccagcaccgagaagtccaacatcatcagaggctggatctttggcaccacactggactctaagacacagagcctgctgatcgtgaacaatgccaccaacgtggtgatcaaggtgtgcgagttccagttttgtaatgatccattcctgggcgtgtactatcacaagaacaataagtcctggatggagtctgagtttcgcgtgtattctagcgccaacaattgcacatttgagtacgtgagccagcccttcctgatggacctggagggcaagcagggcaatttcaagaacctgagggagttcgtgtttaagaatatcgatggctacttcaagatctacagcaagcacaccccaatcaacctggtgcgcgacctgccacagggattctccgccctggagccactggtggatctgcccatcggcatcaacatcacccggtttcagacactgctggccctgcacagatcctacctgacaccaggcgactcctctagcggatggaccgcaggagctgccgcctactatgtgggctatctgcagccccggaccttcctgctgaagtacaacgagaatggcaccatcacagacgcagtggattgcgccctggaccccctgtctgagacaaagtgtacactgaagagctttaccgtggagaagggcatctatcagacaagcaatttcagggtgcagcctaccacttccatcgtgcgctttcccaatatcacaaacctgtgcccttttggcgaggtgttcaacgccaccagattcgccagcgtgtacgcctggaatcggaagagaatctccaactgcgtggccgactattctgtgctgtacaactccgcctctttcagcacctttaagtgctatggcgtgtctcccacaaagctgaatgatctgtgctttaccaacgtgtacgccgatagcttcgtgatcaggggagacgaagtgagacagatcgcaccaggacagacaggaaagatcgcagactacaattataagctgcctgacgatttcaccggctgcgtgatcgcctggaactccaacaatctggattctaaagtgggcggcaactacaattatctgtacaggctgtttcgcaagtccaatctgaagccattcgagcgggacatctccacagagatctaccaggccggctctaccccctgcaatggcgtggagggctttaactgttatttccctctgcagtcttacggcttccagccaacaaacggcgtgggctatcagccctacagagtggtggtgctgtcctttgagctgctgcacgcaccagcaacagtgtgcggcccaaagaagtctaccaatctggtgaagaacaagtgcgtgaacttcaacttcaacggactgaccggcacaggcgtgctgaccgagagcaataagaagttcctgccttttcagcagttcggcagggacatcgcagataccacagacgccgtgcgcgaccctcagaccctggagatcctggacatcacaccatgcagcttcggcggcgtgtccgtgatcacaccaggcaccaatacatccaaccaggtggccgtgctgtatcaggacgtgaattgtaccgaggtgcccgtggcaatccacgcagatcagctgacccctacatggcgggtgtactctaccggcagcaacgtgttccagacaagagccggatgcctgatcggagcagagcacgtgaacaatagctatgagtgcgacatccctatcggcgccggcatctgtgccagctaccagacccagacaaactccccatctggagcaggctcccaccatcaccatcaccatcaccatcaccactga

SEQ ID NO: 3893 - DNA, 2148 bp, Artificial Sequence
  Description of Artificial Sequence: Synthetic polynucleotide
atgggcatcctgccaagcccaggaatgcccgccctgctgtctctggtgagcctgctgtccgtgctgctgatgggatgcgtggcagagacaggcacacagtgcgtgaacctgaccacaaggacccagctgccccctgcctataccaattctttcacacggggcgtgtactatcccgacaaggtgtttagaagctccgtgctgcactccacacaggatctgtttctgcctttcttttctaacgtgacctggttccacgccatccacgtgtccggcaccaatggcacaaagcggttcgacaatcccgtgctgccttttaacgatggcgtgtacttcgccagcaccgagaagtccaacatcatcagaggctggatctttggcaccacactggactctaagacacagagcctgctgatcgtgaacaatgccaccaacgtggtgatcaaggtgtgcgagttccagttttgtaatgatccattcctgggcgtgtactatcacaagaacaataagtcctggatggagtctgagtttcgcgtgtattctagcgccaacaattgcacatttgagtacgtgagccagcccttcctgatggacctggagggcaagcagggcaatttcaagaacctgagggagttcgtgtttaagaatatcgatggctacttcaagatctacagcaagcacaccccaatcaacctggtgcgcgacctgccacagggattctccgccctggagccactggtggatctgcccatcggcatcaacatcacccggtttcagacactgctggccctgcacagatcctacctgacaccaggcgactcctctagcggatggaccgcaggagctgccgcctactatgtgggctatctgcagccccggaccttcctgctgaagtacaacgagaatggcaccatcacagacgcagtggattgcgccctggaccccctgtctgagacaaagtgtacactgaagagctttaccgtggagaagggcatctatcagacaagcaatttcagggtgcagcctaccgagtccatcgtgcgctttcccaatatcacaaacctgtgcccttttggcgaggtgttcaacgccaccagattcgccagcgtgtacgcctggaatcggaagagaatctccaactgcgtggccgactattctgtgctgtacaactccgcctctttcagcacctttaagtgctatggcgtgtctcccacaaagctgaatgatctgtgctttaccaacgtgtacgccgatagcttcgtgatcaggggagacgaagtgagacagatcgcaccaggacagacaggaaagatcgcagactacaattataagctgcctgacgatttcaccggctgcgtgatcgcctggaactccaacaatctggattctaaagtgggcggcaactacaattatctgtacaggctgtttcgcaagtccaatctgaagccattcgagcgggacatctccacagagatctaccaggccggctctaccccctgcaatggcgtggagggctttaactgttatttccctctgcagtcttacggcttccagccaacaaacggcgtgcaatatcagccctacagagtggtggtgctgtcctttgagctgctgcacgcaccagcaacagtgtgcggcccaaagaagtctaccaatctggtgaagaacaagtgcgtgaacttcaacttcaacggactgaccggcacaggcgtgctgaccgagagcaataagaagttcctgccttttcagcagttcggcagggacatcgcagataccacagacgccgtgcgcgaccctcagaccctggagatcctggacatcacaccatgcagcttcggcggcgtgtccgtgatcacaccaggcaccaatacatccaaccaggtggccgtgctgtatcaggacgtgaattgtaccgaggtgcccgtggcaatccacgcagatcagctgacccctacatggcgggtgtactctaccggcagcaacgtgttccagacaagagccggatgcctgatcggagcagagcacgtgaacaatagctatgagtgcgacatccctatcggcgccggcatctgtgccagctaccagacccagacaaactccccatctggagcaggctcccaccatcaccatcaccatcaccatcaccactga

SEQ ID NO: 3894 - DNA, 2148 bp, Artificial Sequence
  Description of Artificial Sequence: Synthetic polynucleotide
atgggcatcctgccaagcccaggaatgcccgccctgctgtctctggtgagcctgctgtccgtgctgctgatgggatgcgtggcagagacaggcacacagtgcgtgaacctgaccacaaggacccagctgccccctgcctataccaattctttcacacggggcgtgtactatcccgacaaggtgtttagaagctccgtgctgcactccacacaggatctgtttctgcctttcttttctaacgtgacctggttccacgccatccacgtgtccggcaccaatggcacaaagcggttcgacaatcccgtgctgccttttaacgatggcgtgtacttcgccagcaccgagaagtccaacatcatcagaggctggatctttggcaccacactggactctaagacacagagcctgctgatcgtgaacaatgccaccaacgtggtgatcaaggtgtgcgagttccagttttgtaatgatccattcctgggcgtgtactatcacaagaacaataagtcctggatggagtctgagtttcgcgtgtattctagcgccaacaattgcacatttgagtacgtgagccagcccttcctgatggacctggagggcaagcagggcaatttcaagaacctgagggagttcgtgtttaagaatatcgatggctacttcaagatctacagcaagcacaccccaatcaacctggtgcgcgacctgccacagggattctccgccctggagccactggtggatctgcccatcggcatcaacatcacccggtttcagacactgctggccctgcacagatcctacctgacaccaggcgactcctctagcggatggaccgcaggagctgccgcctactatgtgggctatctgcagccccggaccttcctgctgaagtacaacgagaatggcaccatcacagacgcagtggattgcgccctggaccccctgtctgagacaaagtgtacactgaagagctttaccgtggagaagggcatctatcagacaagcaatttcagggtgcagcctaccgagtccatcgtgcgctttcccaatatcacaaacctgtgcccttttggcgaggtgttcaacgccaccagattcgccagcgtgtacgcctggaatcggaagagaatctccaactgcgtggccgactattctgtgctgtacaactccgcctctttcagcacctttaagtgctatggcgtgtctcccacaaagctgaatgatctgtgctttaccaacgtgtacgccgatagcttcgtgatcaggggagacgaagtgagacagatcgcaccaggacagacaggaaagatcgcagactacaattataagctgcctgacgatttcaccggctgcgtgatcgcctggaactccaacaatctggattctaaagtgggcggcaactacaattatctgtacaggctgtttcgcaagtccaatctgaagccattcgagcgggacatctccacagagatctaccaggccggctctaccccctgcaatggcgtggagggctttaactgttatttccctctgcagtcttacggcttccagccaacaaacggcgtgggctatcagccctacagagtggtggtgctgtcctttgagcgactgcacgcaccagcaacagtgtgcggcccaaagaagtctaccaatctggtgaagaacaagtgcgtgaacttcaacttcaacggactgaccggcacaggcgtgctgaccgagagcaataagaagttcctgccttttcagcagttcggcagggacatcgcagataccacagacgccgtgcgcgaccctcagaccctggagatcctggacatcacaccatgcagcttcggcggcgtgtccgtgatcacaccaggcaccaatacatccaaccaggtggccgtgctgtatcaggacgtgaattgtaccgaggtgcccgtggcaatccacgcagatcagctgacccctacatggcgggtgtactctaccggcagcaacgtgttccagacaagagccggatgcctgatcggagcagagcacgtgaacaatagctatgagtgcgacatccctatcggcgccggcatctgtgccagctaccagacccagacaaactccccatctggagcaggctcccaccatcaccatcaccatcaccatcaccactga

SEQ ID NO: 3895 - DNA, 2148 bp, Artificial Sequence
  Description of Artificial Sequence: Synthetic polynucleotide
atgggcatcctgccaagcccaggaatgcccgccctgctgtctctggtgagcctgctgtccgtgctgctgatgggatgcgtggcagagacaggcacacagtgcgtgaacctgaccacaaggacccagctgccccctgcctataccaattctttcacacggggcgtgtactatcccgacaaggtgtttagaagctccgtgctgcactccacacaggatctgtttctgcctttcttttctaacgtgacctggttccacgccatccacgtgtccggcaccaatggcacaaagcggttcgacaatcccgtgctgccttttaacgatggcgtgtacttcgccagcaccgagaagtccaacatcatcagaggctggatctttggcaccacactggactctaagacacagagcctgctgatcgtgaacaatgccaccaacgtggtgatcaaggtgtgcgagttccagttttgtaatgatccattcctgggcgtgtactatcacaagaacaataagtcctggatggagtctgagtttcgcgtgtattctagcgccaacaattgcacatttgagtacgtgagccagcccttcctgatggacctggagggcaagcagggcaatttcaagaacctgagggagttcgtgtttaagaatatcgatggctacttcaagatctacagcaagcacaccccaatcaacctggtgcgcgacctgccacagggattctccgccctggagccactggtggatctgcccatcggcatcaacatcacccggtttcagacactgctggccctgcacagatcctacctgacaccaggcgactcctctagcggatggaccgcaggagctgccgcctactatgtgggctatctgcagccccggaccttcctgctgaagtacaacgagaatggcaccatcacagacgcagtggattgcgccctggaccccctgtctgagacaaagtgtacactgaagagctttaccgtggagaagggcatctatcagacaagcaatttcagggtgcagcctaccgagtccatcgtgcgctttcccaatatcacaaacctgtgcccttttggcgaggtgttcaacgccaccagattcgccagcgtgtacgcctggaatcggaagagaatctccaactgcgtggccgactattctgtgctgtacaactccgcctctttcagcacctttaagtgctatggcgtgtctcccacaaagctgaatgatctgtgctttaccaacgtgtacgccgatagcttcgtgatcaggggagacgaagtgagacagatcgcaccaggacagacaggaaagatcgcagactacaattataagctgcctgacgatttcaccggctgcgtgatcgcctggaactccaacaatctggattctaaagtgggcggcaactacaattatctgtacaggctgtttcgcaagtccaatctgaagccattcgagcgggacatctccacagagatctaccaggccggctctaccccctgcaatggcgtggagggctttaactgttatttccctctgcagtcttacggcttccagccaacaaacggcgtgggccaacagccctacagagtggtggtgctgtcctttgagctgctgcacgcaccagcaacagtgtgcggcccaaagaagtctaccaatctggtgaagaacaagtgcgtgaacttcaacttcaacggactgaccggcacaggcgtgctgaccgagagcaataagaagttcctgccttttcagcagttcggcagggacatcgcagataccacagacgccgtgcgcgaccctcagaccctggagatcctggacatcacaccatgcagcttcggcggcgtgtccgtgatcacaccaggcaccaatacatccaaccaggtggccgtgctgtatcaggacgtgaattgtaccgaggtgcccgtggcaatccacgcagatcagctgacccctacatggcgggtgtactctaccggcagcaacgtgttccagacaagagccggatgcctgatcggagcagagcacgtgaacaatagctatgagtgcgacatccctatcggcgccggcatctgtgccagctaccagacccagacaaactccccatctggagcaggctcccaccatcaccatcaccatcaccatcaccactga

SEQ ID NO: 3896 - DNA, 2148 bp, Artificial Sequence
  Description of Artificial Sequence: Synthetic polynucleotide
atgggcatcctgccaagcccaggaatgcccgccctgctgtctctggtgagcctgctgtccgtgctgctgatgggatgcgtggcagagacaggcacacagtgcgtgaacctgaccacaaggacccagctgccccctgcctataccaattctttcacacggggcgtgtactatcccgacaaggtgtttagaagctccgtgctgcactccacacaggatctgtttctgcctttcttttctaacgtgacctggttccacgccatccacgtgtccggcaccaatggcacaaagcggttcgacaatcccgtgctgccttttaacgatggcgtgtacttcgccagcaccgagaagtccaacatcatcagaggctggatctttggcaccacactggactctaagacacagagcctgctgatcgtgaacaatgccaccaacgtggtgatcaaggtgtgcgagttccagttttcaaatgatccattcctgggcgtgtactatcacaagaacaataagtcctggatggagtctgagtttcgcgtgtattctagcgccaacaattgcacatttgagtacgtgagccagcccttcctgatggacctggagggcaagcagggcaatttcaagaacctgagggagttcgtgtttaagaatatcgatggctacttcaagatctacagcaagcacaccccaatcaacctggtgcgcgacctgccacagggattctccgccctggagccactggtggatctgcccatcggcatcaacatcacccggtttcagacactgctggccctgcacagatcctacctgacaccaggcgactcctctagcggatggaccgcaggagctgccgcctactatgtgggctatctgcagccccggaccttcctgctgaagtacaacgagaatggcaccatcacagacgcagtggattgcgccctggaccccctgtctgagacaaagtgtacactgaagagctttaccgtggagaagggcatctatcagacaagcaatttcagggtgcagcctaccgagtccatcgtgcgctttcccaatatcacaaacctgtgcccttttggcgaggtgttcaacgccaccagattcgccagcgtgtacgcctggaatcggaagagaatctccaactgcgtggccgactattctgtgctgtacaactccgcctctttcagcacctttaagtgctatggcgtgtctcccacaaagctgaatgatctgtgctttaccaacgtgtacgccgatagcttcgtgatcaggggagacgaagtgagacagatcgcaccaggacagacaggaaagatcgcagactacaattataagctgcctgacgatttcaccggctgcgtgatcgcctggaactccaacaatctggattctaaagtgggcggcaactacaattatctgtacaggctgtttcgcaagtccaatctgaagccattcgagcgggacatctccacagagatctaccaggccggctctaccccctgcaatggcgtggagggctttaactgttatttccctctgcagtcttacggcttccagccaacaaacggcgtgggctatcagccctacagagtggtggtgctgtcctttgagctgctgcacgcaccagcaacagtgtgcggcccaaagaagtctaccaatctggtgaagaacaagtgcgtgaacttcaacttcaacggactgaccggcacaggcgtgctgaccgagagcaataagaagttcctgccttttcagcagttcggcagggacatcgcagataccacagacgccgtgcgcgaccctcagaccctggagatcctggacatcacaccatgcagcttcggcggcgtgtccgtgatcacaccaggcaccaatacatccaaccaggtggccgtgctgtatcaggacgtgaattgtaccgaggtgcccgtggcaatccacgcagatcagctgacccctacatggcgggtgtactctaccggcagcaacgtgttccagacaagagccggatgcctgatcggagcagagcacgtgaacaatagctatgagtgcgacatccctatcggcgccggcatctgtgccagctaccagacccagacaaactccccatctggagcaggctcccaccatcaccatcaccatcaccatcaccactga

SEQ ID NO: 3897 - DNA, 2148 bp, Artificial Sequence
  Description of Artificial Sequence: Synthetic polynucleotide
atgggcatcctgccaagcccaggaatgcccgccctgctgtctctggtgagcctgctgtccgtgctgctgatgggatgcgtggcagagacaggcacacagtgcgtgaacctgaccacaaggacccagctgccccctgcctataccaattctttcacacggggcgtgtactatcccgacaaggtgtttagaagctccgtgctgcactccacacaggatctgtttctgcctttcttttctaacgtgacctggttccacgccatccacgtgtccggcaccaatggcacaaagcggttcgacaatcccgtgctgccttttaacgatggcgtgtacttcgccagcaccgagaagtccaacatcatcagaggctggatctttggcaccacactggactctaagacacagagcctgctgatcgtgaacaatgccaccaacgtggtgatcaaggtgtgcgagttccagttttgtaatgatccattcctgggcgtgtactatcacaagaacaataagtcctggatggagtctgagtttcgcgtgtattctagcgccaacaattgcacatttgagtacgtgagccagcccttcctgatggacctggagggcaagcagggcaatttcaagaacctgagggagttcgtgtttaagaatatcgatggctacttcaagatctacagcaagcacaccccaatcaacctggtgcgcgacctgccacagggattctccgccctggagccactggtggatctgcccatcggcatcaacatcacccggtttcagacactgctggccctgcacagatcctacctgacaccaggcgactcctctagcggatggaccgcaggagctgccgcctactatgtgggctatctgcagccccggaccttcctgctgaagtacaacgagaatggcaccatcacagacgcagtggattgcgccctggaccccctgtctgagacaaagtgtacactgaagagctttaccgtggagaagggcatctatcagacaagcaatttcagggtgcagcctaccgagtccatcgtgcgctttcccaatatcacaaacctgtgcccttttggcgaggtgttcaacgccaccagattcgccagcgtgtacgcctggaatcggaagagaatctccaactgcgtggccgactattctgtgctgtacaactccgcctctttcagcacctttaagtgctatggcgtgtctcccacaaagctgaatgatctgtgctttaccaacgtgtacgccgatagcttcgtgatcaggggagacgaagtgagacagatcgcaccaggacagacaggaaagatcgcagactacaattataagctgcctgacgatttcaccggctgcgtgatcgcctggaactccaacaatctggattctaaagtgggcggcaactacaattatctgtacaggctgtttcgcaagtccaatctgaagccattcgagcgggacatctccacagagatctaccaggccggctctaccccctgcaatggcgtggagggctttaactgttatttccctctgcagtcttacggcttccagccaacaaacggcgcaggctatcagccctacagagtggtggtgctgtcctttgagctgctgcacgcaccagcaacagtgtgcggcccaaagaagtctaccaatctggtgaagaacaagtgcgtgaacttcaacttcaacggactgaccggcacaggcgtgctgaccgagagcaataagaagttcctgccttttcagcagttcggcagggacatcgcagataccacagacgccgtgcgcgaccctcagaccctggagatcctggacatcacaccatgcagcttcggcggcgtgtccgtgatcacaccaggcaccaatacatccaaccaggtggccgtgctgtatcaggacgtgaattgtaccgaggtgcccgtggcaatccacgcagatcagctgacccctacatggcgggtgtactctaccggcagcaacgtgttccagacaagagccggatgcctgatcggagcagagcacgtgaacaatagctatgagtgcgacatccctatcggcgccggcatctgtgccagctaccagacccagacaaactccccatctggagcaggctcccaccatcaccatcaccatcaccatcaccactga

SEQ ID NO: 3898 - DNA, 2148 bp, Artificial Sequence
  Description of Artificial Sequence: Synthetic polynucleotide
atgggcatcctgccaagcccaggaatgcccgccctgctgtctctggtgagcctgctgtccgtgctgctgatgggatgcgtggcagagacaggcacacagtgcgtgaacctgaccacaaggacccagctgccccctgcctataccaattctttcacacggggcgtgtactatcccgacaaggtgtttagaagctccgtgctgcactccacacaggatctgtttctgcctttcttttctaacgtgacctggttccacgccatccacgtgtccggcaccaatggcacaaagcggttcgacaatcccgtgctgccttttaacgatggcgtgtacttcgccagcaccgagaagtccaacatcatcagaggctggatctttggcaccacactggactctaagacacagagcctgctgatcgtgaacaatgccaccaacgtggtgatcaaggtgtgcgagttccagttttgtaatgatccattcctgggcgtgtactatcacaagaacaataagtcctggatggagtctgagtttcgcgtgtattctagcgccaacaattgcacatttgagtacgtgagccagcccttcctgatggacctggagggcaagcagggcaatttcaagaacctgagggagttcgtgtttaagaatatcgatggctacttcaagatctacagcaagcacaccccaatcaacctggtgcgcgacctgccacagggattctccgccctggagccactggtggatctgcccatcggcatcaacatcacccggtttcagacactgctggccctgcacagatcctacaacacaccaggcgactcctctagcggatggaccgcaggagctgccgcctactatgtgggctatctgcagccccggaccttcctgctgaagtacaacgagaatggcaccatcacagacgcagtggattgcgccctggaccccctgtctgagacaaagtgtacactgaagagctttaccgtggagaagggcatctatcagacaagcaatttcagggtgcagcctaccgagtccatcgtgcgctttcccaatatcacaaacctgtgcccttttggcgaggtgttcaacgccaccagattcgccagcgtgtacgcctggaatcggaagagaatctccaactgcgtggccgactattctgtgctgtacaactccgcctctttcagcacctttaagtgctatggcgtgtctcccacaaagctgaatgatctgtgctttaccaacgtgtacgccgatagcttcgtgatcaggggagacgaagtgagacagatcgcaccaggacagacaggaaagatcgcagactacaattataagctgcctgacgatttcaccggctgcgtgatcgcctggaactccaacaatctggattctaaagtgggcggcaactacaattatctgtacaggctgtttcgcaagtccaatctgaagccattcgagcgggacatctccacagagatctaccaggccggctctaccccctgcaatggcgtggagggctttaactgttatttccctctgcagtcttacggcttccagccaacaaacggcgtgggctatcagccctacagagtggtggtgctgtcctttgagctgctgcacgcaccagcaacagtgtgcggcccaaagaagtctaccaatctggtgaagaacaagtgcgtgaacttcaacttcaacggactgaccggcacaggcgtgctgaccgagagcaataagaagttcctgccttttcagcagttcggcagggacatcgcagataccacagacgccgtgcgcgaccctcagaccctggagatcctggacatcacaccatgcagcttcggcggcgtgtccgtgatcacaccaggcaccaatacatccaaccaggtggccgtgctgtatcaggacgtgaattgtaccgaggtgcccgtggcaatccacgcagatcagctgacccctacatggcgggtgtactctaccggcagcaacgtgttccagacaagagccggatgcctgatcggagcagagcacgtgaacaatagctatgagtgcgacatccctatcggcgccggcatctgtgccagctaccagacccagacaaactccccatctggagcaggctcccaccatcaccatcaccatcaccatcaccactga

SEQ ID NO: 3899 - DNA, 2148 bp, Artificial Sequence
  Description of Artificial Sequence: Synthetic polynucleotide
atgggcatcctgccaagcccaggaatgcccgccctgctgtctctggtgagcctgctgtccgtgctgctgatgggatgcgtggcagagacaggcacacagtgcgtgaacctgaccacaaggacccagctgccccctgcctataccaattctttcacacggggcgtgtactatcccgacaaggtgtttagaagctccgtgctgcactccacacaggatctgtttctgcctttcttttctaacgtgacctggttccacgccatccacgtggagggcaccaatggcacaaagcggttcgacaatcccgtgctgccttttaacgatggcgtgtacttcgccagcaccgagaagtccaacatcatcagaggctggatctttggcaccacactggactctaagacacagagcctgctgatcgtgaacaatgccaccaacgtggtgatcaaggtgtgcgagttccagttttgtaatgatccattcctgggcgtgtactatcacaagaacaataagtcctggatggagtctgagtttcgcgtgtattctagcgccaacaattgcacatttgagtacgtgagccagcccttcctgatggacctggagggcaagcagggcaatttcaagaacctgagggagttcgtgtttaagaatatcgatggctacttcaagatctacagcaagcacaccccaatcaacctggtgcgcgacctgccacagggattctccgccctggagccactggtggatctgcccatcggcatcaacatcacccggtttcagacactgctggccctgcacagatcctacctgacaccaggcgactcctctagcggatggaccgcaggagctgccgcctactatgtgggctatctgcagccccggaccttcctgctgaagtacaacgagaatggcaccatcacagacgcagtggattgcgccctggaccccctgtctgagacaaagtgtacactgaagagctttaccgtggagaagggcatctatcagacaagcaatttcagggtgcagcctaccgagtccatcgtgcgctttcccaatatcacaaacctgtgcccttttggcgaggtgttcaacgccaccagattcgccagcgtgtacgcctggaatcggaagagaatctccaactgcgtggccgactattctgtgctgtacaactccgcctctttcagcacctttaagtgctatggcgtgtctcccacaaagctgaatgatctgtgctttaccaacgtgtacgccgatagcttcgtgatcaggggagacgaagtgagacagatcgcaccaggacagacaggaaagatcgcagactacaattataagctgcctgacgatttcaccggctgcgtgatcgcctggaactccaacaatctggattctaaagtgggcggcaactacaattatctgtacaggctgtttcgcaagtccaatctgaagccattcgagcgggacatctccacagagatctaccaggccggctctaccccctgcaatggcgtggagggctttaactgttatttccctctgcagtcttacggcttccagccaacaaacggcgtgggctatcagccctacagagtggtggtgctgtcctttgagctgctgcacgcaccagcaacagtgtgcggcccaaagaagtctaccaatctggtgaagaacaagtgcgtgaacttcaacttcaacggactgaccggcacaggcgtgctgaccgagagcaataagaagttcctgccttttcagcagttcggcagggacatcgcagataccacagacgccgtgcgcgaccctcagaccctggagatcctggacatcacaccatgcagcttcggcggcgtgtccgtgatcacaccaggcaccaatacatccaaccaggtggccgtgctgtatcaggacgtgaattgtaccgaggtgcccgtggcaatccacgcagatcagctgacccctacatggcgggtgtactctaccggcagcaacgtgttccagacaagagccggatgcctgatcggagcagagcacgtgaacaatagctatgagtgcgacatccctatcggcgccggcatctgtgccagctaccagacccagacaaactccccatctggagcaggctcccaccatcaccatcaccatcaccatcaccactga

SEQ ID NO: 3900 - DNA, 2148 bp, Artificial Sequence
  Description of Artificial Sequence: Synthetic polynucleotide
atgggcatcctgccaagcccaggaatgcccgccctgctgtctctggtgagcctgctgtccgtgctgctgatgggatgcgtggcagagacaggcacacagtgcgtgaacctgaccacaaggacccagctgccccctgcctataccaattctttcacacggggcgtgtactatcccgacaaggtgtttagaagctccgtgctgcactccacacaggatctgtttctgcctttcttttctaacgtgacctggttccacgccatccacgtgtccggcaccaatggcacaaagcggttcgacaatcccgtgctgccttttaacgatggcgtgtacttcgccagcaccgagaagtccaacatcatcagaggctggatctttggcaccacactggactctaagacacagagcctgctgatcgtgaacaatgccaccaacgtggtgatcaaggtgtgcgagttccagttttgtaatgatccattcctgggcgtgtactatcacaagaacaataagtcctggatggagtctgagtttcgcgtgtattctagcgccaacaattgcacatttgagtacgtgagccagcccttcctgatggacctggagggcaagcagggcaatttcaagaacctgagggagttcgtgtttaagaatatcgatggctacttcaagatctacagcaagcacaccccaatcaacctggtgcgcgacctgccacagggattctccgccctggagccactggtggatctgcccatcggcatcaacatcacccggtttcagacactgctggccctgcacagatcctacctgacaccaggcgactcctctagcggatggaccgcaggagctgccgcctactatgtgggctatctgcagccccggaccttcctgctgaagtacaacgagaatggcaccatcacagacgcagtggattgcgccctggaccccctgtctgagacaaagtgtacactgaagagctttaccgtggagaagggcatctatcagacaagcaatttcagggtgcagcctaccgagtccatcgtgcgctttcccaatatcacaaacctgtgcccttttggcgaggtgttcaacgccaccagattcgccagcgtgtacgcctggaatcggaagagaatctccaactgcgtggccgactattctgtgctgtacaactccgcctctttcagcacctttaagtgctatggcgtgtctcccacaaagctgaatgatctgtgctttaccaacgtgtacgccgatagcttcgtgatcaggggagacgaagtgagacagatcgcaccaggacagacaggaaagatcgcagactacaattataagctgcctgacgatttcaccggctgcgtgatcgcctggaactccaacaatctggattctaaagtgggcggcaactacaattatctgtacaggctgtttcgcaagtccaatctgaagccattcgagcgggacatctccacagagatctaccaggccggctctaccccctgcaatggcgtggagggctttaactgttatttccctctgcagtcttacggcttccagccaacaaacggcgtgggctatcagccctacagagtggtggtgctgtcctttgagctgctgcacgcaccagcaacagtgtgcggcccaaagaagtctaccaatctggtgaagaacaagtgcgtgaacttcaacttcaacggactgaccggcacaggcgtgctgaccgagagcaataagaagttcctgccttttcagcagttcggcagggacatcgcagataccacagacgccgtgcgcgaccctcagaccctggagatcctggacatcacaccatgcagcttcggcggcgtgtccgtgatcacaccaggcaccaatacatccaaccaggtggccgtgctgtatcaggacgtgaattgtaccgaggtgcccgtggcaatccacgcagatcagctgacccctacatggcgggcgtactctaccggcagcaacgtgttccagacaagagccggatgcctgatcggagcagagcacgtgaacaatagctatgagtgcgacatccctatcggcgccggcatctgtgccagctaccagacccagacaaactccccatctggagcaggctcccaccatcaccatcaccatcaccatcaccactga

SEQ ID NO: 3901 - DNA, 2148 bp, Artificial Sequence
  Description of Artificial Sequence: Synthetic polynucleotide
atgggcatcctgccaagcccaggaatgcccgccctgctgtctctggtgagcctgctgtccgtgctgctgatgggatgcgtggcagagacaggcacacagtgcgtgaacctgaccacaaggacccagctgccccctgcctataccaattctttcacacggggcgtgtactatcccgacaaggtgtttagaagctccgtgctgcactccacacaggatctgtttctgcctttcttttctaacgtgacctggttccacgccatccacgtgtccggcaccaatggcacaaagcggttcgacaatcccgtgctgccttttaacgatggcgtgtacttcgccagcaccgagaagtccaacatcatcagaggctggatctttggcaccacactggactctaagacacagagcctgctgatcgtgaacaatgccaccaacgtggtgatcaaggtgtgcgagttccagttttgtaatgatccattcctgggcgtgtactatcacaagaacaataagtcctggatggagtctgagtttcgcgtgtattctagcgccaacaattgcacatttgagtacgtgagccagcccttcctgatggacctggagggcaagcagggcaatttcaagaacctgagggagttcgtgtttaagaatatcgatggctacttcaagatctacagcaagcacaccccaatcaacctggtgcgcgacctgccacagggattctccgccctggagccactggtggatctgcccatcggcatcaacatcacccggtttcagacactgctggccctgcacagatcctacctgacaccaggcgactcctctagcggatggaccgcaggagctgccgcctactatgtgggctatctgcagccccggaccttcctgctgaagtacaacgagaatggcaccatcacagacgcagtggattgcgccctggaccccctgtctgagacaaagtgtacactgaagagctttaccgtggagaagggcatctatcagacaagcaatttcagggtgcagcctaccgagtccatcgtgcgctttcccaatatcacaaacaactgcccttttggcgaggtgttcaacgccaccagattcgccagcgtgtacgcctggaatcggaagagaatctccaactgcgtggccgactattctgtgctgtacaactccgcctctttcagcacctttaagtgctatggcgtgtctcccacaaagctgaatgatctgtgctttaccaacgtgtacgccgatagcttcgtgatcaggggagacgaagtgagacagatcgcaccaggacagacaggaaagatcgcagactacaattataagctgcctgacgatttcaccggctgcgtgatcgcctggaactccaacaatctggattctaaagtgggcggcaactacaattatctgtacaggctgtttcgcaagtccaatctgaagccattcgagcgggacatctccacagagatctaccaggccggctctaccccctgcaatggcgtggagggctttaactgttatttccctctgcagtcttacggcttccagccaacaaacggcgtgggctatcagccctacagagtggtggtgctgtcctttgagctgctgcacgcaccagcaacagtgtgcggcccaaagaagtctaccaatctggtgaagaacaagtgcgtgaacttcaacttcaacggactgaccggcacaggcgtgctgaccgagagcaataagaagttcctgccttttcagcagttcggcagggacatcgcagataccacagacgccgtgcgcgaccctcagaccctggagatcctggacatcacaccatgcagcttcggcggcgtgtccgtgatcacaccaggcaccaatacatccaaccaggtggccgtgctgtatcaggacgtgaattgtaccgaggtgcccgtggcaatccacgcagatcagctgacccctacatggcgggtgtactctaccggcagcaacgtgttccagacaagagccggatgcctgatcggagcagagcacgtgaacaatagctatgagtgcgacatccctatcggcgccggcatctgtgccagctaccagacccagacaaactccccatctggagcaggctcccaccatcaccatcaccatcaccatcaccactga

SEQ ID NO: 3902 - DNA, 2148 bp, Artificial Sequence
  Description of Artificial Sequence: Synthetic polynucleotide
atgggcatcctgccaagcccaggaatgcccgccctgctgtctctggtgagcctgctgtccgtgctgctgatgggatgcgtggcagagacaggcacacagtgcgtgaacctgaccacaaggacccagctgccccctgcctataccaattctttcacacggggcgtgtactatcccgacaaggtgtttagaagctccgtgctgcactccacacaggatctgtttctgcctttcttttctaacgtgacctggttccacgccatccacgtgtccggcaccaatggcacaaagcggttcgacaatcccgtgctgccttttaacgatggcgtgtacttcgccagcaccgagaagtccaacatcatcagaggctggatctttggcaccacactggactctaagacacagagcctgctgatcgtgaacaatgccaccaacgtggtgatcaaggtgtgcgagttccagttttgtaatgatccattcctgggcgtgtactatcacaagaacaataagtcctggatggagtctgagtttcgcgtgtattctagcgccaacaattgcacatttgagtacgtgagccagcccttcctgatggacctggagggcaagcagggcaatttcaagaacctgagggagttcgtgtttaagaatatcgatggctacttcaagatctacagcaagcacaccccaatcaacctggtgcgcgacctgccacagggattctccgccctggagccactggtggatctgcccatcggcatcaacatcacccggtttcagacactgctggccctgcacagatcctacctgacaccaggcgactcctctagcggatggaccgcaggagctgccgcctactatgtgggctatctgcagccccggaccttcctgctgaagtacaacgagaatggcaccatcacagacgcagtggattgcgccctggaccccctgtctgagacaaagtgtacactgaagagctttaccgtggagaagggcatctatcagacaagcaatttcagggtgcagcctaccgagtccatcgtgcgctttcccaatatcacaaacctgtgcccttttggcgaggtgttcaacgccaccagattcgccagcgtgtacgcctggaatcggaagagaatctccaactgcgtggccgactattctgtgctgtacaactccgcctctttcagcacctttaagtgctatggcgtgtctcccacaaagctgaatgatctgtgctttaccaacgtgtacgccgatagcttcgtgatcaggggagacgaagtgagacagatcgcaccaggacagacaggaaagatcgcagactacaattataagctgcctgacgatttcaccggctgcgtgatcgcctggaactccaacaatctggattctaaagtgggcggcaactacaattatctgtacaggctgtttcgcaagtccaatctgaagccattcgagcgggacatctccacagagatctaccaggccggctctaccccctgcaatggcgtggagggctttaactgttatttccctctgcagtcttacggcttccagccaacaaacggccggggctatcagccctacagagtggtggtgctgtcctttgagctgctgcacgcaccagcaacagtgtgcggcccaaagaagtctaccaatctggtgaagaacaagtgcgtgaacttcaacttcaacggactgaccggcacaggcgtgctgaccgagagcaataagaagttcctgccttttcagcagttcggcagggacatcgcagataccacagacgccgtgcgcgaccctcagaccctggagatcctggacatcacaccatgcagcttcggcggcgtgtccgtgatcacaccaggcaccaatacatccaaccaggtggccgtgctgtatcaggacgtgaattgtaccgaggtgcccgtggcaatccacgcagatcagctgacccctacatggcgggtgtactctaccggcagcaacgtgttccagacaagagccggatgcctgatcggagcagagcacgtgaacaatagctatgagtgcgacatccctatcggcgccggcatctgtgccagctaccagacccagacaaactccccatctggagcaggctcccaccatcaccatcaccatcaccatcaccactga

SEQ ID NO: 3903 - DNA, 2148 bp, Artificial Sequence
  Description of Artificial Sequence: Synthetic polynucleotide
atgggcatcctgccaagcccaggaatgcccgccctgctgtctctggtgagcctgctgtccgtgctgctgatgggatgcgtggcagagacaggcacacagtgcgtgaacctgaccacaaggacccagctgccccctgcctataccaattctttcacacggggcgtgtactatcccgacaaggtgtttagaagctccgtgctgcactccacacaggatctgtttctgcctttcttttctaacgtgacctggttccacgccatccacgtgtccggcaccaatggcacaaagcggttcgacaatcccgtgctgccttttaacgatggcgtgtacttcgccagcaccgagaagtccaacatcatcagaggctggatctttggcaccacactggactctaagacacagagcctgctgatcgtgaacaatgccaccaacgtggtgatcaaggtgtgcgagttccagttttgtaatgatccattcctgggcgtgtactatcacaagaacaataagtcctggatggagtctgagtttcgcgtgtattctagcgccaacaattgcacatttgagtacgtgagccagcccttcctgatggacctggagggcaagcagggcaatttcaagaacctgagggagttcgtgtttaagaatatcgatggctacttcaagatctacagcaagcacaccccaatcaacctggtgcgcgacctgccacagggattcttggccctggagccactggtggatctgcccatcggcatcaacatcacccggtttcagacactgctggccctgcacagatcctacctgacaccaggcgactcctctagcggatggaccgcaggagctgccgcctactatgtgggctatctgcagccccggaccttcctgctgaagtacaacgagaatggcaccatcacagacgcagtggattgcgccctggaccccctgtctgagacaaagtgtacactgaagagctttaccgtggagaagggcatctatcagacaagcaatttcagggtgcagcctaccgagtccatcgtgcgctttcccaatatcacaaacctgtgcccttttggcgaggtgttcaacgccaccagattcgccagcgtgtacgcctggaatcggaagagaatctccaactgcgtggccgactattctgtgctgtacaactccgcctctttcagcacctttaagtgctatggcgtgtctcccacaaagctgaatgatctgtgctttaccaacgtgtacgccgatagcttcgtgatcaggggagacgaagtgagacagatcgcaccaggacagacaggaaagatcgcagactacaattataagctgcctgacgatttcaccggctgcgtgatcgcctggaactccaacaatctggattctaaagtgggcggcaactacaattatctgtacaggctgtttcgcaagtccaatctgaagccattcgagcgggacatctccacagagatctaccaggccggctctaccccctgcaatggcgtggagggctttaactgttatttccctctgcagtcttacggcttccagccaacaaacggcgtgggctatcagccctacagagtggtggtgctgtcctttgagctgctgcacgcaccagcaacagtgtgcggcccaaagaagtctaccaatctggtgaagaacaagtgcgtgaacttcaacttcaacggactgaccggcacaggcgtgctgaccgagagcaataagaagttcctgccttttcagcagttcggcagggacatcgcagataccacagacgccgtgcgcgaccctcagaccctggagatcctggacatcacaccatgcagcttcggcggcgtgtccgtgatcacaccaggcaccaatacatccaaccaggtggccgtgctgtatcaggacgtgaattgtaccgaggtgcccgtggcaatccacgcagatcagctgacccctacatggcgggtgtactctaccggcagcaacgtgttccagacaagagccggatgcctgatcggagcagagcacgtgaacaatagctatgagtgcgacatccctatcggcgccggcatctgtgccagctaccagacccagacaaactccccatctggagcaggctcccaccatcaccatcaccatcaccatcaccactga

SEQ ID NO: 3904 - DNA, 2148 bp, Artificial Sequence
  Description of Artificial Sequence: Synthetic polynucleotide
atgggcatcctgccaagcccaggaatgcccgccctgctgtctctggtgagcctgctgtccgtgctgctgatgggatgcgtggcagagacaggcacacagtgcgtgaacctgaccacaaggacccagctgccccctgcctataccaattctttcacacggggcgtgtactatcccgacaaggtgtttagaagctccgtgctgcactccacacaggatctgtttctgcctttcttttctaacgtgacctggttccacgccatccacgtgtccggcaccaatggcacaaagcggttcgacaatcccgtgctgccttttaacgatggcgtgtacttcgccagcaccgagaagtccaacatcatcagaggctggatctttggcaccacactggactctaagacacagagcctgctgatcgtgaacaatgccaccaacgtggtgatcaaggtgtgcgagttccagttttgtaatgatccattcctgggcgtgtactatcacaagaacaataagtcctggatggagtctgagtttcgcgtgtattctagcgccaacaattgcacatttgagtacgtgagccagcccttcctgatggacctggagggcaagcagggcaatttcaagaacctgagggagttcgtgtttaagaatatcgatggctacttcaagatctacagcaagcacaccccaatcaacctggtgcgcgacctgccacagggattctccgccctggagccactggtggatctgcccatcggcatcaacatcacccggtttcagacactgctggccctgcacagatcctacctgacaccaggcgactcctctagcggatggaccgcaggagctgccgcctactatgtgggctatctgcagccccggaccttcctgctgaagtacaacgagaatggcaccatcacagacgcagtggattgcgccctggaccccctgtctgagacaaagtgtacactgaagagctttaccgtggagaagggcatctatcagacaagcaatttcagggtgcagcctacctgttccatcgtgcgctttcccaatatcacaaacctgtgcccttttggcgaggtgttcaacgccaccagattcgccagcgtgtacgcctggaatcggaagagaatctccaactgcgtggccgactattctgtgctgtacaactccgcctctttcagcacctttaagtgctatggcgtgtctcccacaaagctgaatgatctgtgctttaccaacgtgtacgccgatagcttcgtgatcaggggagacgaagtgagacagatcgcaccaggacagacaggaaagatcgcagactacaattataagctgcctgacgatttcaccggctgcgtgatcgcctggaactccaacaatctggattctaaagtgggcggcaactacaattatctgtacaggctgtttcgcaagtccaatctgaagccattcgagcgggacatctccacagagatctaccaggccggctctaccccctgcaatggcgtggagggctttaactgttatttccctctgcagtcttacggcttccagccaacaaacggcgtgggctatcagccctacagagtggtggtgctgtcctttgagctgctgcacgcaccagcaacagtgtgcggcccaaagaagtctaccaatctggtgaagaacaagtgcgtgaacttcaacttcaacggactgaccggcacaggcgtgctgaccgagagcaataagaagttcctgccttttcagcagttcggcagggacatcgcagataccacagacgccgtgcgcgaccctcagaccctggagatcctggacatcacaccatgcagcttcggcggcgtgtccgtgatcacaccaggcaccaatacatccaaccaggtggccgtgctgtatcaggacgtgaattgtaccgaggtgcccgtggcaatccacgcagatcagctgacccctacatggcgggtgtactctaccggcagcaacgtgttccagacaagagccggatgcctgatcggagcagagcacgtgaacaatagctatgagtgcgacatccctatcggcgccggcatctgtgccagctaccagacccagacaaactccccatctggagcaggctcccaccatcaccatcaccatcaccatcaccactga

SEQ ID NO: 3905 - DNA, 2148 bp, Artificial Sequence
  Description of Artificial Sequence: Synthetic polynucleotide
atgggcatcctgccaagcccaggaatgcccgccctgctgtctctggtgagcctgctgtccgtgctgctgatgggatgcgtggcagagacaggcacacagtgcgtgaacctgaccacaaggacccagctgccccctgcctataccaattctttcacacggggcgtgtactatcccgacaaggtgtttagaagctccgtgctgcactccacacaggatctgtttctgcctttcttttctaacgtgacctggttccacgccatccacgtgtccggcaccaatggcacaaagcggttcgacaatcccgtgctgccttttaacgatggcgtgtacttcgccagcaccgagaagtccaacatcatcagaggctggatctttggcaccacactggactctaagacacagagcctgctgatcgtgaacaatgccaccaacgtggtgatcaaggtgtgctacttccagttttgtaatgatccattcctgggcgtgtactatcacaagaacaataagtcctggatggagtctgagtttcgcgtgtattctagcgccaacaattgcacatttgagtacgtgagccagcccttcctgatggacctggagggcaagcagggcaatttcaagaacctgagggagttcgtgtttaagaatatcgatggctacttcaagatctacagcaagcacaccccaatcaacctggtgcgcgacctgccacagggattctccgccctggagccactggtggatctgcccatcggcatcaacatcacccggtttcagacactgctggccctgcacagatcctacctgacaccaggcgactcctctagcggatggaccgcaggagctgccgcctactatgtgggctatctgcagccccggaccttcctgctgaagtacaacgagaatggcaccatcacagacgcagtggattgcgccctggaccccctgtctgagacaaagtgtacactgaagagctttaccgtggagaagggcatctatcagacaagcaatttcagggtgcagcctaccgagtccatcgtgcgctttcccaatatcacaaacctgtgcccttttggcgaggtgttcaacgccaccagattcgccagcgtgtacgcctggaatcggaagagaatctccaactgcgtggccgactattctgtgctgtacaactccgcctctttcagcacctttaagtgctatggcgtgtctcccacaaagctgaatgatctgtgctttaccaacgtgtacgccgatagcttcgtgatcaggggagacgaagtgagacagatcgcaccaggacagacaggaaagatcgcagactacaattataagctgcctgacgatttcaccggctgcgtgatcgcctggaactccaacaatctggattctaaagtgggcggcaactacaattatctgtacaggctgtttcgcaagtccaatctgaagccattcgagcgggacatctccacagagatctaccaggccggctctaccccctgcaatggcgtggagggctttaactgttatttccctctgcagtcttacggcttccagccaacaaacggcgtgggctatcagccctacagagtggtggtgctgtcctttgagctgctgcacgcaccagcaacagtgtgcggcccaaagaagtctaccaatctggtgaagaacaagtgcgtgaacttcaacttcaacggactgaccggcacaggcgtgctgaccgagagcaataagaagttcctgccttttcagcagttcggcagggacatcgcagataccacagacgccgtgcgcgaccctcagaccctggagatcctggacatcacaccatgcagcttcggcggcgtgtccgtgatcacaccaggcaccaatacatccaaccaggtggccgtgctgtatcaggacgtgaattgtaccgaggtgcccgtggcaatccacgcagatcagctgacccctacatggcgggtgtactctaccggcagcaacgtgttccagacaagagccggatgcctgatcggagcagagcacgtgaacaatagctatgagtgcgacatccctatcggcgccggcatctgtgccagctaccagacccagacaaactccccatctggagcaggctcccaccatcaccatcaccatcaccatcaccactga

SEQ ID NO: 3906 - DNA, 2148 bp, Artificial Sequence
  Description of Artificial Sequence: Synthetic polynucleotide
atgggcatcctgccaagcccaggaatgcccgccctgctgtctctggtgagcctgctgtccgtgctgctgatgggatgcgtggcagagacaggcacacagtgcgtgaacctgaccacaaggacccagctgccccctgcctataccaattctttcacacggggcgtgtactatcccgacaaggtgtttagaagctccgtgctgcactccacacaggatctgtttctgcctttcttttctaacgtgacctggttccacgccatgcacgtgtccggcaccaatggcacaaagcggttcgacaatcccgtgctgccttttaacgatggcgtgtacttcgccagcaccgagaagtccaacatcatcagaggctggatctttggcaccacactggactctaagacacagagcctgctgatcgtgaacaatgccaccaacgtggtgatcaaggtgtgcgagttccagttttgtaatgatccattcctgggcgtgtactatcacaagaacaataagtcctggatggagtctgagtttcgcgtgtattctagcgccaacaattgcacatttgagtacgtgagccagcccttcctgatggacctggagggcaagcagggcaatttcaagaacctgagggagttcgtgtttaagaatatcgatggctacttcaagatctacagcaagcacaccccaatcaacctggtgcgcgacctgccacagggattctccgccctggagccactggtggatctgcccatcggcatcaacatcacccggtttcagacactgctggccctgcacagatcctacctgacaccaggcgactcctctagcggatggaccgcaggagctgccgcctactatgtgggctatctgcagccccggaccttcctgctgaagtacaacgagaatggcaccatcacagacgcagtggattgcgccctggaccccctgtctgagacaaagtgtacactgaagagctttaccgtggagaagggcatctatcagacaagcaatttcagggtgcagcctaccgagtccatcgtgcgctttcccaatatcacaaacctgtgcccttttggcgaggtgttcaacgccaccagattcgccagcgtgtacgcctggaatcggaagagaatctccaactgcgtggccgactattctgtgctgtacaactccgcctctttcagcacctttaagtgctatggcgtgtctcccacaaagctgaatgatctgtgctttaccaacgtgtacgccgatagcttcgtgatcaggggagacgaagtgagacagatcgcaccaggacagacaggaaagatcgcagactacaattataagctgcctgacgatttcaccggctgcgtgatcgcctggaactccaacaatctggattctaaagtgggcggcaactacaattatctgtacaggctgtttcgcaagtccaatctgaagccattcgagcgggacatctccacagagatctaccaggccggctctaccccctgcaatggcgtggagggctttaactgttatttccctctgcagtcttacggcttccagccaacaaacggcgtgggctatcagccctacagagtggtggtgctgtcctttgagctgctgcacgcaccagcaacagtgtgcggcccaaagaagtctaccaatctggtgaagaacaagtgcgtgaacttcaacttcaacggactgaccggcacaggcgtgctgaccgagagcaataagaagttcctgccttttcagcagttcggcagggacatcgcagataccacagacgccgtgcgcgaccctcagaccctggagatcctggacatcacaccatgcagcttcggcggcgtgtccgtgatcacaccaggcaccaatacatccaaccaggtggccgtgctgtatcaggacgtgaattgtaccgaggtgcccgtggcaatccacgcagatcagctgacccctacatggcgggtgtactctaccggcagcaacgtgttccagacaagagccggatgcctgatcggagcagagcacgtgaacaatagctatgagtgcgacatccctatcggcgccggcatctgtgccagctaccagacccagacaaactccccatctggagcaggctcccaccatcaccatcaccatcaccatcaccactga

SEQ ID NO: 3907 - DNA, 2148 bp, Artificial Sequence
  Description of Artificial Sequence: Synthetic polynucleotide
atgggcatcctgccaagcccaggaatgcccgccctgctgtctctggtgagcctgctgtccgtgctgctgatgggatgcgtggcagagacaggcacacagtgcgtgaacctgaccacaaggacccagctgccccctgcctataccaattctttcacacggggcgtgtactatcccgacaaggtgtttagaagctccgtgctgcactccacacaggatctgtttctgcctttcttttctaacgtgacctggttccacgccatccacgtgtccggcaccaatggcacaaagcggttcgacaatcccgtgctgccttttaacgatggcgtgtacttcgccagcaccgagaagtccaacatcatcagaggctggatctttggcaccacactggactctaagacacagagcctgctgatcgtgaacaatgccaccaacgtggtgatcaaggtgtgcgagttccagttttgtaatgatccattcctgggcgtgtactatcacaagaacaataagtcctggatggagtctgagtttcgcgtgtattctagcgccaacaattgcacatttgagtacgtgagccagcccttcctgatggacctggagggcaagcagggcaatttcaagaacctgagggagttcgtgtttaagaatatcgatggctacttcaagatctacagcaagcacaccccaatcaacctggtgcgcgacctgccacagggattctccgccctggagccactggtggatctgcccatcggcatcaacatcacccggtttcagacactgctggccctgcacagatcctacctgacaccaggcgactcctctagcggatggaccgcaggagctgccgcctactatgtgggctatctgcagccccggaccttcctgctgaagtacaacgagaatggcaccatcacagacgcagtggattgcgccctggaccccctgtctgagacaaagtgtacactgaagagctttaccgtggagaagggcatctatcagacaagcaatttcagggtgcagcctaccgagtccatcgtgcgctttcccaatatcacaaacctgtgcccttttggcgaggtgttcaacgccaccagattcgccagcgtgtacgcctggaatcggaagagaatctccaactgcgtggccgactattctgtgctgtacaactccgcctctttcagcacctttaagtgctatggcgtgtctcccacaaagctgaatgatctgtgctttaccaacgtgtacgccgatagcttcgtgatcaggggagacgaagtgagacagatcgcaccaggacagacaggaaagatcgcagactacaattataagctgcctgacgatttcaccggctgcgtgatcgcctggaactccaacaatctggattctaaagtgggcggcaactacaattatctgtacaggctgtttcgcaagtccaatctgaagccattcgagcgggacatctccacagagatctaccaggccggctctaccccctgcaatggcgtggagggctttaactgttatttccctctgcagtcttacggcttccagccaacaaacggcgaaggctatcagccctacagagtggtggtgctgtcctttgagctgctgcacgcaccagcaacagtgtgcggcccaaagaagtctaccaatctggtgaagaacaagtgcgtgaacttcaacttcaacggactgaccggcacaggcgtgctgaccgagagcaataagaagttcctgccttttcagcagttcggcagggacatcgcagataccacagacgccgtgcgcgaccctcagaccctggagatcctggacatcacaccatgcagcttcggcggcgtgtccgtgatcacaccaggcaccaatacatccaaccaggtggccgtgctgtatcaggacgtgaattgtaccgaggtgcccgtggcaatccacgcagatcagctgacccctacatggcgggtgtactctaccggcagcaacgtgttccagacaagagccggatgcctgatcggagcagagcacgtgaacaatagctatgagtgcgacatccctatcggcgccggcatctgtgccagctaccagacccagacaaactccccatctggagcaggctcccaccatcaccatcaccatcaccatcaccactga

SEQ ID NO: 3908 - DNA, 2148 bp, Artificial Sequence
  Description of Artificial Sequence: Synthetic polynucleotide
atgggcatcctgccaagcccaggaatgcccgccctgctgtctctggtgagcctgctgtccgtgctgctgatgggatgcgtggcagagacaggcacacagtgcgtgaacctgaccacaaggacccagctgccccctgcctataccaattctttcacacggggcgtgtactatcccgacaaggtgtttagaagctccgtgctgcactccacacaggatctgtttctgcctttcttttctaacgtgacctggttccacgccatccacgtgtccggcaccaatggcacaaagcggttcgacaatcccgtgctgccttttaacgatggcgtgtacttcgccagcaccgagaagtccaacatcatcagaggctggatctttggcaccacactggactctaagacacagagcctgctgatcgtgaacaatgccaccaacgtggtgatcaaggtgtgcgagttccagttttgtaatgatccattcctgggcgtgtactatcacaagaacaataagtcctggatggagtctgagtttcgcgtgtattctagcgccaacaattgcacatttgagtacgtgagccagcccttcctgatggacctggagggcaagcagggcaatttcaagaacctgagggagttcgtgtttaagaatatcgatggctacttcaagatctacagcaagcacaccccaatcaacctggtgcgcgacctgccacagggattctccgccctggagccactggtggatctgcccatcggcatcaacatcacccggtttcagacactgctggccctgcacagatcctacctgacaccaggcgactcctctagcggatggaccgcaggagctgccgcctactatgtgggctatctgcagccccggaccttcctgctgaagtacaacgagaatggcaccatcacagacgcagtggattgcgccctggaccccctgtctgagacaaagtgtacactgaagagctttaccgtggagaagggcatctatcagacaagcaatttcagggtgcagcctaccgagtccatcgtgcgctttcccaatatcacaaacctgtgcccttttggcgaggtgttcaacgccaccagattcgccagcgtgtacgcctggaatcggaagagaatctccaactgcgtggccgactattctgtgctgtacaactccgcctctttcagcacctttaagtgctatggcgtgtctcccacaaagctgaatgatctgtgctttaccaacgtgtacgccgatagcttcgtgatcaggggagacgaagtgagacagatcgcaccaggacagacaggaaagatcgcagactacaattataagctgcctgacgatttcaccggctgcgtgatcgcctggaactccaacaatctggattctaaagtgggcggcaactacaattatctgtacaggctgtttcgcaagtccaatctgaagccattcgagcgggacatctccacagagatctaccaggccggctctaccccctgcaatggcgtggagggctttaactgttatttccctctgcagtcttacggcttccagccaacaaacggcgtggaatatcagccctacagagtggtggtgctgtcctttgagctgctgcacgcaccagcaacagtgtgcggcccaaagaagtctaccaatctggtgaagaacaagtgcgtgaacttcaacttcaacggactgaccggcacaggcgtgctgaccgagagcaataagaagttcctgccttttcagcagttcggcagggacatcgcagataccacagacgccgtgcgcgaccctcagaccctggagatcctggacatcacaccatgcagcttcggcggcgtgtccgtgatcacaccaggcaccaatacatccaaccaggtggccgtgctgtatcaggacgtgaattgtaccgaggtgcccgtggcaatccacgcagatcagctgacccctacatggcgggtgtactctaccggcagcaacgtgttccagacaagagccggatgcctgatcggagcagagcacgtgaacaatagctatgagtgcgacatccctatcggcgccggcatctgtgccagctaccagacccagacaaactccccatctggagcaggctcccaccatcaccatcaccatcaccatcaccactga

SEQ ID NO: 3909 - DNA, 2148 bp, Artificial Sequence
  Description of Artificial Sequence: Synthetic polynucleotide
atgggcatcctgccaagcccaggaatgcccgccctgctgtctctggtgagcctgctgtccgtgctgctgatgggatgcgtggcagagacaggcacacagtgcgtgaacctgaccacaaggacccagctgccccctgcctataccaattctttcacacggggcgtgtactatcccgacaaggtgtttagaagctccgtgctgcactccacacaggatctgtttctgcctttcttttctaacgtgacctggttccacgccatccacgtgtccggcaccaatggcacaaagcggttcgacaatcccgtgctgccttttaacgatggcgtgtacttcgccagcaccgagaagtccaacatcatcagaggctggatctttggcaccacactggactctaagacacagagcctgctgatcgtgaacaatgccaccaacgtggtgatcaaggtgtgcgagttccagttttgtaatgatccattcctgggcgtgtactatcacaagaacaataagtcctggatggagtctgagtttcgcgtgtattctagcgccaacaattgcacatttgagtacgtgagccagcccttcctgatggacctggagggcaagcagggcaatttcaagaacctgagggagttcgtgtttaagaatatcgatggctacttcaagatctacagcaagcacaccccaatcaacctggtgcgcgacctgccacagggattctccgccctggagccactggtggatctgcccatcggcatcaacatcacccggtttcagacactgctggccctgcacagatcctacctgacaccaggcgactcctctagcggatggaccgcaggagctgccgcctactatgtgggctatctgcagccccggaccttcctgctgaagtacaacgagaatggcaccatcacagacgcagtggattgcgccctggaccccctgtctgagacaaagtgtacactgaagagctttaccgtggagaagggcatctatcagacaagcaatttcagggtgcagcctaccgagtccatcgtgcgctttcccaatatcacaaacaaatgcccttttggcgaggtgttcaacgccaccagattcgccagcgtgtacgcctggaatcggaagagaatctccaactgcgtggccgactattctgtgctgtacaactccgcctctttcagcacctttaagtgctatggcgtgtctcccacaaagctgaatgatctgtgctttaccaacgtgtacgccgatagcttcgtgatcaggggagacgaagtgagacagatcgcaccaggacagacaggaaagatcgcagactacaattataagctgcctgacgatttcaccggctgcgtgatcgcctggaactccaacaatctggattctaaagtgggcggcaactacaattatctgtacaggctgtttcgcaagtccaatctgaagccattcgagcgggacatctccacagagatctaccaggccggctctaccccctgcaatggcgtggagggctttaactgttatttccctctgcagtcttacggcttccagccaacaaacggcgtgggctatcagccctacagagtggtggtgctgtcctttgagctgctgcacgcaccagcaacagtgtgcggcccaaagaagtctaccaatctggtgaagaacaagtgcgtgaacttcaacttcaacggactgaccggcacaggcgtgctgaccgagagcaataagaagttcctgccttttcagcagttcggcagggacatcgcagataccacagacgccgtgcgcgaccctcagaccctggagatcctggacatcacaccatgcagcttcggcggcgtgtccgtgatcacaccaggcaccaatacatccaaccaggtggccgtgctgtatcaggacgtgaattgtaccgaggtgcccgtggcaatccacgcagatcagctgacccctacatggcgggtgtactctaccggcagcaacgtgttccagacaagagccggatgcctgatcggagcagagcacgtgaacaatagctatgagtgcgacatccctatcggcgccggcatctgtgccagctaccagacccagacaaactccccatctggagcaggctcccaccatcaccatcaccatcaccatcaccactga

SEQ ID NO: 3910 - DNA, 2148 bp, Artificial Sequence
  Description of Artificial Sequence: Synthetic polynucleotide
atgggcatcctgccaagcccaggaatgcccgccctgctgtctctggtgagcctgctgtccgtgctgctgatgggatgcgtggcagagacaggcacacagtgcgtgaacctgaccacaaggacccagctgccccctgcctataccaattctttcacacggggcgtgtactatcccgacaaggtgtttagaagctccgtgctgcactccacacaggatctgtttctgcctttcttttctaacgtgacctggttccacgccatccacgtgtccggcaccaatggcacaaagcggttcgacaatcccgtgctgccttttaacgatggcgtgtacttcgccagcaccgagaagtccaacatcatcagaggctggatctttggcgcgacactggactctaagacacagagcctgctgatcgtgaacaatgccaccaacgtggtgatcaaggtgtgcgagttccagttttgtaatgatccattcctgggcgtgtactatcacaagaacaataagtcctggatggagtctgagtttcgcgtgtattctagcgccaacaattgcacatttgagtacgtgagccagcccttcctgatggacctggagggcaagcagggcaatttcaagaacctgagggagttcgtgtttaagaatatcgatggctacttcaagatctacagcaagcacaccccaatcaacctggtgcgcgacctgccacagggattctccgccctggagccactggtggatctgcccatcggcatcaacatcacccggtttcagacactgctggccctgcacagatcctacctgacaccaggcgactcctctagcggatggaccgcaggagctgccgcctactatgtgggctatctgcagccccggaccttcctgctgaagtacaacgagaatggcaccatcacagacgcagtggattgcgccctggaccccctgtctgagacaaagtgtacactgaagagctttaccgtggagaagggcatctatcagacaagcaatttcagggtgcagcctaccgagtccatcgtgcgctttcccaatatcacaaacctgtgcccttttggcgaggtgttcaacgccaccagattcgccagcgtgtacgcctggaatcggaagagaatctccaactgcgtggccgactattctgtgctgtacaactccgcctctttcagcacctttaagtgctatggcgtgtctcccacaaagctgaatgatctgtgctttaccaacgtgtacgccgatagcttcgtgatcaggggagacgaagtgagacagatcgcaccaggacagacaggaaagatcgcagactacaattataagctgcctgacgatttcaccggctgcgtgatcgcctggaactccaacaatctggattctaaagtgggcggcaactacaattatctgtacaggctgtttcgcaagtccaatctgaagccattcgagcgggacatctccacagagatctaccaggccggctctaccccctgcaatggcgtggagggctttaactgttatttccctctgcagtcttacggcttccagccaacaaacggcgtgggctatcagccctacagagtggtggtgctgtcctttgagctgctgcacgcaccagcaacagtgtgcggcccaaagaagtctaccaatctggtgaagaacaagtgcgtgaacttcaacttcaacggactgaccggcacaggcgtgctgaccgagagcaataagaagttcctgccttttcagcagttcggcagggacatcgcagataccacagacgccgtgcgcgaccctcagaccctggagatcctggacatcacaccatgcagcttcggcggcgtgtccgtgatcacaccaggcaccaatacatccaaccaggtggccgtgctgtatcaggacgtgaattgtaccgaggtgcccgtggcaatccacgcagatcagctgacccctacatggcgggtgtactctaccggcagcaacgtgttccagacaagagccggatgcctgatcggagcagagcacgtgaacaatagctatgagtgcgacatccctatcggcgccggcatctgtgccagctaccagacccagacaaactccccatctggagcaggctcccaccatcaccatcaccatcaccatcaccactga

SEQ ID NO: 3911 - DNA, 2148 bp, Artificial Sequence
  Description of Artificial Sequence: Synthetic polynucleotide
atgggcatcctgccaagcccaggaatgcccgccctgctgtctctggtgagcctgctgtccgtgctgctgatgggatgcgtggcagagacaggcacacagtgcgtgaacctgaccacaaggacccagctgccccctgcctataccaattctttcacacggggcgtgtactatcccgacaaggtgtttagaagctccgtgctgcactccacacaggatctgtttctgcctttcttttctaacgtgacctggttccacgcctaccacgtgtccggcaccaatggcacaaagcggttcgacaatcccgtgctgccttttaacgatggcgtgtacttcgccagcaccgagaagtccaacatcatcagaggctggatctttggcaccacactggactctaagacacagagcctgctgatcgtgaacaatgccaccaacgtggtgatcaaggtgtgcgagttccagttttgtaatgatccattcctgggcgtgtactatcacaagaacaataagtcctggatggagtctgagtttcgcgtgtattctagcgccaacaattgcacatttgagtaccatagccagcccttcctgatggacctggagggcaagcagggcaatttcaagaacctgagggagttcgtgtttaagaatatcgatggctacttcaagatctacagcaagcacaccccaatcaacctggtgcgcgacctgccacagggattctccgccctggagccactggtggatctgcccatcggcatcaacatcacccggtttcagacactgctggccctgcacagatcctacctgacaccaggcgactcctctagcggagaaaccgcaggagctgccgcctactatgtgggctatctgcagccccggaccttcctgctgaagtacaacgagaatggcaccatcacagacgcagtggattgcgccctggaccccctgtctgagacaaagtgtacactgaagagctttaccgtggagaagggcatctatcagacaagcaatttcagggtgcagcctaccgagtccatcgtgcgctttcccaatatcacaaacaaatgcccttttggcgaggtgttcaacgccaccagattcgccagcgtgtacgcctggaatcggaagagaatctccaactgcgtggccgactattctgtgctgtacaactccgcctctttcagcacctttaagtgctatggcgtgtctcccacaaagctgaatgatctgtgctttaccaacgtgtacgccgatagcttcgtgatcaggggagacgaagtgagacagatcgcaccaggacagacaggaaagatcgcagactacaattataagctgcctgacgatttcaccggctgcgtgatcgcctggaactccaacaatctggattctaaagtgggcggcaactacaattatctgtacaggctgtttcgcaagtccaatctgaagccattcgagcgggacatctccacagagatctaccaggccggctctaccccctgcaatggcgtggagggctttaactgttatttccctctgcagtcttacggcttccagccaacaaacggcccgggccaacagccctacagagtggtggtgctgtcctttgagctgctgcacgcaccagcaacagtgtgcggcccaaagaagtctaccaatctggtgaagaacaagtgcgtgaacttcaacttcaacggactgaccggcacaggcgtgctgaccgagagcaataagaagttcctgccttttcagcagttcggcagggacatcgcagataccacagacgccgtgcgcgaccctcagaccctggagatcctggacatcacaccatgcagcttcggcggcgtgtccgtgatcacaccaggcaccaatacatccaaccaggtggccgtgctgtatcaggacgtgaattgtaccgaggtgcccgtggcaatccacgcagatcagctgacccctacatggcgggtgtactctaccggcagcaacgtgttccagacaagagccggatgcctgatcggagcagagcacgtgaacaatagctatgagtgcgacatccctatcggcgccggcatctgtgccagctaccagacccagacaaactccccatctggagcaggctcccaccatcaccatcaccatcaccatcaccactga

SEQ ID NO: 3912 - DNA, 2148 bp, Artificial Sequence
  Description of Artificial Sequence: Synthetic polynucleotide
atgggcatcctgccaagcccaggaatgcccgccctgctgtctctggtgagcctgctgtccgtgctgctgatgggatgcgtggcagagacaggcacacagtgcgtgaacctgaccacaaggacccagctgccccctgcctataccaattctttcacacggggcgtgtactatcccgacaaggtgtttagaagctccgtgctgcactccacacaggatctgtttctgcctttcttttctaacgtgacctggttccacgccatccacgtgtccggcaccaatggcacaaagcggttcgacaatcccgtgctgccttttaacgatggcgtgtacttcgccagcaccgagaagtccaacatcatcagaggctggatctttggcaccacactggactctaagacacagagcctgctgatcgtgaacaatgccaccaacgtggtgatcaaggtgtgcgagttccagttttgtaatgatccattcctgggcgtgtactatcacaagaacaataagtcctggatggagtctgagtttcgcgtgtattctagcgccaacaattgcacatttgagtacgtgagccagcccttcctgatggacctggagggcaagcagggcaatttcaagaacctgagggagttcgtgtttaagaatatcgatggctacttcaagatctacagcaagcacaccccaatcaacctggtgcgcgacctgccacagggattctccgccctggagccactggtggatctgcccatcggcatcaacatcacccggtttcagacactgctggccctgcacagatcctacctgacaccaggcgactcctctagcggatggaccgcaggagctgccgcctactatgtgggctatctgcagccccggaccttcctgctgaagtacaacgagaatggcaccatcacagacgcagtggattgcgccctggaccccctgtctgagacaaagtgtacactgaagagctttaccgtggagaagggcatctatcagacaagcaatttcagggtgcagcctaccgagtccatcgtgcgctttcccaatatcacaaacctgtgcccttttggcgaggtgttcaacgccaccagattcgccagcgtgtacgcctggaatcggaagagaatctccaactgcgtggccgactattctgtgctgtacaactccgcctctttcagcacctttaagtgctatggcgtgtctcccacaaagctgaatgatctgtgctttaccaacgtgtacgccgatagcttcgtgatcaggggagacgaagtgagacagatcgcaccaggacagacaggaaagatcgcagactacaattataagctgcctgacgatttcaccggctgcgtgatcgcctggaactccaacaatctggattctaaagtgggcggcaactacaattatctgtacaggctgtttcgcaagtccaatctgaagccattcgagcgggacatctccacagagatctaccaggccggctctaccccctgcaatggcgtggagggctttaactgttatttccctctgcagtcttacggcttccagccaacaaacggcgtgggctatcagccctacagagtggtggtgctgtcctttgagctgctgcacgcaccagcaacagtgtgcggcccaaagaagtctaccaatctggtgaagaacaagtgcgtgaacttcaacttcaacggactgaccggcacaggcgtgctgaccgagagcaataagaagttcctgccttttcagcagttcggcagggacatcgcagataccacagacgccgtgcgcgaccctcagaccctggagatcctggacatcacaccatgcagcttcggcggcgtgtccgtgatcacaccaggcaccaatacatccaaccaggtggccgtgctgtatcaggacgtgaattgtaccgaggtgcccgacgcaatccacgcagatcagctgacccctacatggcgggtgtactctaccggcagcaacgtgttccagacaagagccggatgcctgatcggagcagagcacgtgaacaatagctatgagtgcgacatccctatcggcgccggcatctgtgccagctaccagacccagacaaactccccatctggagcaggctcccaccatcaccatcaccatcaccatcaccactga

SEQ ID NO: 3913 - DNA, 2148 bp, Artificial Sequence
  Description of Artificial Sequence: Synthetic polynucleotide
atgggcatcctgccaagcccaggaatgcccgccctgctgtctctggtgagcctgctgtccgtgctgctgatgggatgcgtggcagagacaggcacacagtgcgtgaacctgaccacaaggacccagctgccccctgcctataccaattctttcacacggggcgtgtactatcccgacaaggtgtttagaagcgaggtgctgcactccacacaggatctgtttctgcctttcttttctaacgtgacctggttccacgccatccacgtgtccggcaccaatggcacaaagcggttcgacaatcccgtgctgccttttaacgatggcgtgtacttcgccagcaccgagaagtccaacatcatcagaggctggatctttggcaccacactggactctaagacacagagcctgctgatcgtgaacaatgccaccaacgtggtgatcaaggtgtgcgagttccagttttgtaatgatccattcctgggcgtgtactatcacaagaacaataagtcctggatggagtctgagtttcgcgtgtattctagcgccaacaattgcacatttgagtacgtgagccagcccttcctgatggacctggagggcaagcagggcaatttcaagaacctgagggagttcgtgtttaagaatatcgatggctacttcaagatctacagcaagcacaccccaatcaacctggtgcgcgacctgccacagggattctccgccctggagccactggtggatctgcccatcggcatcaacatcacccggtttcagacactgctggccctgcacagatcctacctgacaccaggcgactcctctagcggatggaccgcaggagctgccgcctactatgtgggctatctgcagccccggaccttcctgctgaagtacaacgagaatggcaccatcacagacgcagtggattgcgccctggaccccctgtctgagacaaagtgtacactgaagagctttaccgtggagaagggcatctatcagacaagcaatttcagggtgcagcctaccgagtccatcgtgcgctttcccaatatcacaaacctgtgcccttttggcgaggtgttcaacgccaccagattcgccagcgtgtacgcctggaatcggaagagaatctccaactgcgtggccgactattctgtgctgtacaactccgcctctttcagcacctttaagtgctatggcgtgtctcccacaaagctgaatgatctgtgctttaccaacgtgtacgccgatagcttcgtgatcaggggagacgaagtgagacagatcgcaccaggacagacaggaaagatcgcagactacaattataagctgcctgacgatttcaccggctgcgtgatcgcctggaactccaacaatctggattctaaagtgggcggcaactacaattatctgtacaggctgtttcgcaagtccaatctgaagccattcgagcgggacatctccacagagatctaccaggccggctctaccccctgcaatggcgtggagggctttaactgttatttccctctgcagtcttacggcttccagccaacaaacggcgtgggctatcagccctacagagtggtggtgctgtcctttgagctgctgcacgcaccagcaacagtgtgcggcccaaagaagtctaccaatctggtgaagaacaagtgcgtgaacttcaacttcaacggactgaccggcacaggcgtgctgaccgagagcaataagaagttcctgccttttcagcagttcggcagggacatcgcagataccacagacgccgtgcgcgaccctcagaccctggagatcctggacatcacaccatgcagcttcggcggcgtgtccgtgatcacaccaggcaccaatacatccaaccaggtggccgtgctgtatcaggacgtgaattgtaccgaggtgcccgtggcaatccacgcagatcagctgacccctacatggcgggtgtactctaccggcagcaacgtgttccagacaagagccggatgcctgatcggagcagagcacgtgaacaatagctatgagtgcgacatccctatcggcgccggcatctgtgccagctaccagacccagacaaactccccatctggagcaggctcccaccatcaccatcaccatcaccatcaccactga

SEQ ID NO: 3914 - DNA, 2148 bp, Artificial Sequence
  Description of Artificial Sequence: Synthetic polynucleotide
atgggcatcctgccaagcccaggaatgcccgccctgctgtctctggtgagcctgctgtccgtgctgctgatgggatgcgtggcagagacaggcacacagtgcgtgaacctgaccacaaggacccagctgccccctgcctataccaattctttcacacggggcgtgtactatcccgacaaggtgtttagaagctccgtgctgcactccacacaggatctgtttctgcctttcttttctaacgtgacctggttccacgccgaccacgtgtccggcaccaatggcacaaagcggttcgacaatcccgtgctgccttttaacgatggcgtgtacttcgccagcaccgagaagtccaacatcatcagaggctggatctttggcaccacactggactctaagacacagagcctgctgatcgtgaacaatgccaccaacgtggtgatcaaggtgtgcgagttccagttttgtaatgatccattcctgggcgtgtactatcacaagaacaataagtcctggatggagtctgagtttcgcgtgtattctagcgccaacaattgcacatttgagtacgtgagccagcccttcctgatggacctggagggcaagcagggcaatttcaagaacctgagggagttcgtgtttaagaatatcgatggctacttcaagatctacagcaagcacaccccaatcaacctggtgcgcgacctgccacagggattctccgccctggagccactggtggatctgcccatcggcatcaacatcacccggtttcagacactgctggccctgcacagatcctacctgacaccaggcgactcctctagcggatggaccgcaggagctgccgcctactatgtgggctatctgcagccccggaccttcctgctgaagtacaacgagaatggcaccatcacagacgcagtggattgcgccctggaccccctgtctgagacaaagtgtacactgaagagctttaccgtggagaagggcatctatcagacaagcaatttcagggtgcagcctaccgagtccatcgtgcgctttcccaatatcacaaacctgtgcccttttggcgaggtgttcaacgccaccagattcgccagcgtgtacgcctggaatcggaagagaatctccaactgcgtggccgactattctgtgctgtacaactccgcctctttcagcacctttaagtgctatggcgtgtctcccacaaagctgaatgatctgtgctttaccaacgtgtacgccgatagcttcgtgatcaggggagacgaagtgagacagatcgcaccaggacagacaggaaagatcgcagactacaattataagctgcctgacgatttcaccggctgcgtgatcgcctggaactccaacaatctggattctaaagtgggcggcaactacaattatctgtacaggctgtttcgcaagtccaatctgaagccattcgagcgggacatctccacagagatctaccaggccggctctaccccctgcaatggcgtggagggctttaactgttatttccctctgcagtcttacggcttccagccaacaaacggcgtgggctatcagccctacagagtggtggtgctgtcctttgagctgctgcacgcaccagcaacagtgtgcggcccaaagaagtctaccaatctggtgaagaacaagtgcgtgaacttcaacttcaacggactgaccggcacaggcgtgctgaccgagagcaataagaagttcctgccttttcagcagttcggcagggacatcgcagataccacagacgccgtgcgcgaccctcagaccctggagatcctggacatcacaccatgcagcttcggcggcgtgtccgtgatcacaccaggcaccaatacatccaaccaggtggccgtgctgtatcaggacgtgaattgtaccgaggtgcccgtggcaatccacgcagatcagctgacccctacatggcgggtgtactctaccggcagcaacgtgttccagacaagagccggatgcctgatcggagcagagcacgtgaacaatagctatgagtgcgacatccctatcggcgccggcatctgtgccagctaccagacccagacaaactccccatctggagcaggctcccaccatcaccatcaccatcaccatcaccactga

SEQ ID NO: 3915 - DNA, 2148 bp, Artificial Sequence
  Description of Artificial Sequence: Synthetic polynucleotide
atgggcatcctgccaagcccaggaatgcccgccctgctgtctctggtgagcctgctgtccgtgctgctgatgggatgcgtggcagagacaggcacacagtgcgtgaacctgaccacaaggacccagctgccccctgcctataccaattctttcacacggggcgtgtactatcccgacaaggtgtttagaagctccgtgctgcactccacacaggatctgtttctgcctttcttttctaacgtgacctggttccacgccatccacgtgtccggcaccaatggcacaaagcggttcgacaatcccgtgctgccttttaacgatggcgtgtacttcgccagcaccgagaagtccaacatcatcagaggctggatctttggcaccacactggactctaagacacagagcctgctgatcgtgaacaatgccaccaacgtggtgatcaaggtgtgcgagttccagttttgtaatgatccattcctgggcgtgtactatcacaagaacaataagtcctggatggagtctgagtttcgcgtgtattctagcgccaacaattgcacatttgagtacgtgagccagcccttcctgatggacctggagggcaagcagggcaatttcaagaacctgagggagttcgtgtttaagaatatcgatggctacttcaagatctacagcaagcacaccccaatcaacctggtgcgcgacctgccacagggattctccgccctggagccactggtggatctgcccatcggcatcaacatcacccggtttcagacactgctggccctgcacagatcctacctgacaccaggcgactcctctagcggatggaccgcaggagctgccgcctactatgtgggctatctgcagccccggaccttcctgctgaagtacaacgagaatggcaccatcacagacgcagtggattgcgccctggaccccctgtctgagacaaagtgtacactgaagagctttaccgtggagaagggcatctatcagacaagcaatttcagggtgcagcctaccgagtccatcgtgcgctttcccaatatcacaaactattgcccttttggcgaggtgttcaacgccaccagattcgccagcgtgtacgcctggaatcggaagagaatctccaactgcgtggccgactattctgtgctgtacaactccgcctctttcagcacctttaagtgctatggcgtgtctcccacaaagctgaatgatctgtgctttaccaacgtgtacgccgatagcttcgtgatcaggggagacgaagtgagacagatcgcaccaggacagacaggaaagatcgcagactacaattataagctgcctgacgatttcaccggctgcgtgatcgcctggaactccaacaatctggattctaaagtgggcggcaactacaattatctgtacaggctgtttcgcaagtccaatctgaagccattcgagcgggacatctccacagagatctaccaggccggctctaccccctgcaatggcgtggagggctttaactgttatttccctctgcagtcttacggcttccagccaacaaacggcgtgggctatcagccctacagagtggtggtgctgtcctttgagctgctgcacgcaccagcaacagtgtgcggcccaaagaagtctaccaatctggtgaagaacaagtgcgtgaacttcaacttcaacggactgaccggcacaggcgtgctgaccgagagcaataagaagttcctgccttttcagcagttcggcagggacatcgcagataccacagacgccgtgcgcgaccctcagaccctggagatcctggacatcacaccatgcagcttcggcggcgtgtccgtgatcacaccaggcaccaatacatccaaccaggtggccgtgctgtatcaggacgtgaattgtaccgaggtgcccgtggcaatccacgcagatcagctgacccctacatggcgggtgtactctaccggcagcaacgtgttccagacaagagccggatgcctgatcggagcagagcacgtgaacaatagctatgagtgcgacatccctatcggcgccggcatctgtgccagctaccagacccagacaaactccccatctggagcaggctcccaccatcaccatcaccatcaccatcaccactga

SEQ ID NO: 3916 - DNA, 2148 bp, Artificial Sequence
  Description of Artificial Sequence: Synthetic polynucleotide
atgggcatcctgccaagcccaggaatgcccgccctgctgtctctggtgagcctgctgtccgtgctgctgatgggatgcgtggcagagacaggcacacagtgcgtgaacctgaccacaaggacccagctgccccctgcctataccaattctttcacacggggcgtgtactatcccgacaaggtgtttagaagctccgtgctgcactccacacaggatctgtttctgcctttcttttctaacgtgacctggttccacgccatccacgtgtccggcaccaatggcacaaagcggttcgacaatcccgtgctgccttttaacgatggcgtgtacttcgccagcaccgagaagtccaacatcatcagaggctggatctttggcaccacactggactctaagacacagagcctgctgatcgtgaacaatgccaccaacgtggtgatcaaggtgtgcgagttccagttttgtaatgatccattcctgggcgtgtactatcacaagaacaataagtcctggatggagtctgagtttcgcgtgtattctagcgccaacaattgcacatttgagtacgtgagccagcccttcctgatggacctggagggcaagcagggcaatttcaagaacctgagggagttcgtgtttaagaatatcgatggctacttcaagatctacagcaagcacaccccaatcaacctggtgcgcgacctgccacagggattctccgccctggagccactggtggatctgcccatcggcatcaacatcacccggtttcagacactgctggccctgcacagatcctacctgacaccaggcgactcctctagcggatggaccgcaggagctgccgcctactatgtgggctatctgcagccccggaccttcctgctgaagtacaacgagaatggcaccatcacagacgcagtggattgctatctggaccccctgtctgagacaaagtgtacactgaagagctttaccgtggagaagggcatctatcagacaagcaatttcagggtgcagcctaccgagtccatcgtgcgctttcccaatatcacaaacctgtgcccttttggcgaggtgttcaacgccaccagattcgccagcgtgtacgcctggaatcggaagagaatctccaactgcgtggccgactattctgtgctgtacaactccgcctctttcagcacctttaagtgctatggcgtgtctcccacaaagctgaatgatctgtgctttaccaacgtgtacgccgatagcttcgtgatcaggggagacgaagtgagacagatcgcaccaggacagacaggaaagatcgcagactacaattataagctgcctgacgatttcaccggctgcgtgatcgcctggaactccaacaatctggattctaaagtgggcggcaactacaattatctgtacaggctgtttcgcaagtccaatctgaagccattcgagcgggacatctccacagagatctaccaggccggctctaccccctgcaatggcgtggagggctttaactgttatttccctctgcagtcttacggcttccagccaacaaacggcgtgggctatcagccctacagagtggtggtgctgtcctttgagctgctgcacgcaccagcaacagtgtgcggcccaaagaagtctaccaatctggtgaagaacaagtgcgtgaacttcaacttcaacggactgaccggcacaggcgtgctgaccgagagcaataagaagttcctgccttttcagcagttcggcagggacatcgcagataccacagacgccgtgcgcgaccctcagaccctggagatcctggacatcacaccatgcagcttcggcggcgtgtccgtgatcacaccaggcaccaatacatccaaccaggtggccgtgctgtatcaggacgtgaattgtaccgaggtgcccgtggcaatccacgcagatcagctgacccctacatggcgggtgtactctaccggcagcaacgtgttccagacaagagccggatgcctgatcggagcagagcacgtgaacaatagctatgagtgcgacatccctatcggcgccggcatctgtgccagctaccagacccagacaaactccccatctggagcaggctcccaccatcaccatcaccatcaccatcaccactga

SEQ ID NO: 3917 - DNA, 2148 bp, Artificial Sequence
  Description of Artificial Sequence: Synthetic polynucleotide
atgggcatcctgccaagcccaggaatgcccgccctgctgtctctggtgagcctgctgtccgtgctgctgatgggatgcgtggcagagacaggcacacagtgcgtgaacctgaccacaaggacccagctgccccctgcctataccaattctttcacacggggcgtgtactatcccgacaaggtgtttagaagctccgtgctgcactccacacaggatctgtttctgcctttcttttctaacgtgacctggttccacgccatccacgtgtccggcaccaatggcacaaagcggttcgacaatcccgtgctgccttttaacgatggcgtgtacttcgccagcaccgagaagtccaacatcatcagaggctggatctttggcaccacactggactctaagacacagagcctgctgatcgtgaacaatgccaccaacgtggtgatcaaggtgtgcgagttccagttttgtaatgatccattcctgggcgtgtactatcacaagaacaataagtcctggatggagtctgagtttcgcgtgtattctagcgccaacaattgcacatttgagtacgtgagccagcccttcctgatggacctggagggcaagcagggcaatttcaagaacctgagggagttcgtgtttaagaatatcgatggctacttcaagatctacagcaagcacaccccaatcaacctggtgcgcgacctgccacagggattctccgccctggagccactggtggatctgcccatcggcatcaacatcacccggtttcagacactgctggccctgcacagatcctacctgacaccaggcgactcctctagcggatggaccgcaggagctgccgcctactatgtgggctatctgcagccccggaccttcctgctgaagtacaacgagaatggcaccatcacagacgcagtggattgcgccctggaccccctgtctgagacaaagtgtacactgaagagctttaccgtggagaagggcatctatcagacaagcaatttcagggtgcagcctaccgagtccatcgtgcgctttcccaatatcacaaacctgtgcccttttggcgaggtgttcaacgccaccagattcgccagcgtgtacgcctggaatcggaagagaatctccaactgcgtggccgactattctgtgctgtacaactccgcctctttcagcacctttaagtgctatggcgtgtctcccacaaagctgaatgatctgtgctttaccaacgtgtacgccgatagcttcgtgatcaggggagacgaagtgagacagatcgcaccaggacagacaggaaagatcgcagactacaattataagctgcctgacgatttcaccggcatagtgatcgcctggaactccaacaatctggattctaaagtgggcggcaactacaattatctgtacaggctgtttcgcaagtccaatctgaagccattcgagcgggacatctccacagagatctaccaggccggctctaccccctgcaatggcgtggagggctttaactgttatttccctctgcagtcttacggcttccagccaacaaacggcgtgggctatcagccctacagagtggtggtgctgtcctttgagctgctgcacgcaccagcaacagtgtgcggcccaaagaagtctaccaatctggtgaagaacaagtgcgtgaacttcaacttcaacggactgaccggcacaggcgtgctgaccgagagcaataagaagttcctgccttttcagcagttcggcagggacatcgcagataccacagacgccgtgcgcgaccctcagaccctggagatcctggacatcacaccatgcagcttcggcggcgtgtccgtgatcacaccaggcaccaatacatccaaccaggtggccgtgctgtatcaggacgtgaattgtaccgaggtgcccgtggcaatccacgcagatcagctgacccctacatggcgggtgtactctaccggcagcaacgtgttccagacaagagccggatgcctgatcggagcagagcacgtgaacaatagctatgagtgcgacatccctatcggcgccggcatctgtgccagctaccagacccagacaaactccccatctggagcaggctcccaccatcaccatcaccatcaccatcaccactga

SEQ ID NO: 3918 - DNA, 2148 bp, Artificial Sequence
  Description of Artificial Sequence: Synthetic polynucleotide
atgggcatcctgccaagcccaggaatgcccgccctgctgtctctggtgagcctgctgtccgtgctgctgatgggatgcgtggcagagacaggcacacagtgcgtgaacctgaccacaaggacccagctgccccctgcctataccaattctttcacacggggcgtgtactatcccgacaaggtgtttagaagctccgtgctgcactccacacaggatctgtttctgcctttcttttctaacgtgacctggttccacgccatccacgtgtccggcaccaatggcacaaagcggttcgacaatcccgtgctgccttttaacgatggcgtgtacttcgccagcaccgagaagtccaacatcatcagaggctggatctttggcaccacactggactctaagacacagagcctgctgatcgtgaacaatgccaccaacgtggtgatcaaggtgtgcgagttccagttttgtaatgatccattcctgggcgtgtactatcacaagaacaataagtcctggatggagtctgagtttcgcgtgtattctagcgccaacaattgcacatttgagtacgtgagccagcccttcctgatggacctggagggcaagcagggcaatttcaagaacctgagggagttcgtgtttaagaatatcgatggctacttcaagatctacagcaagcacaccccaatcaacctggtgcgcgacctgccacagggattctccgccctggagccactggtggatctgcccatcggcatcaacatcacccggtttcagacactgctggccctgcacagatcctacaaaacaccaggcgactcctctagcggatggaccgcaggagctgccgcctactatgtgggctatctgcagccccggaccttcctgctgaagtacaacgagaatggcaccatcacagacgcagtggattgcgccctggaccccctgtctgagacaaagtgtacactgaagagctttaccgtggagaagggcatctatcagacaagcaatttcagggtgcagcctaccgagtccatcgtgcgctttcccaatatcacaaacctgtgcccttttggcgaggtgttcaacgccaccagattcgccagcgtgtacgcctggaatcggaagagaatctccaactgcgtggccgactattctgtgctgtacaactccgcctctttcagcacctttaagtgctatggcgtgtctcccacaaagctgaatgatctgtgctttaccaacgtgtacgccgatagcttcgtgatcaggggagacgaagtgagacagatcgcaccaggacagacaggaaagatcgcagactacaattataagctgcctgacgatttcaccggctgcgtgatcgcctggaactccaacaatctggattctaaagtgggcggcaactacaattatctgtacaggctgtttcgcaagtccaatctgaagccattcgagcgggacatctccacagagatctaccaggccggctctaccccctgcaatggcgtggagggctttaactgttatttccctctgcagtcttacggcttccagccaacaaacggcgtgggctatcagccctacagagtggtggtgctgtcctttgagctgctgcacgcaccagcaacagtgtgcggcccaaagaagtctaccaatctggtgaagaacaagtgcgtgaacttcaacttcaacggactgaccggcacaggcgtgctgaccgagagcaataagaagttcctgccttttcagcagttcggcagggacatcgcagataccacagacgccgtgcgcgaccctcagaccctggagatcctggacatcacaccatgcagcttcggcggcgtgtccgtgatcacaccaggcaccaatacatccaaccaggtggccgtgctgtatcaggacgtgaattgtaccgaggtgcccgtggcaatccacgcagatcagctgacccctacatggcgggtgtactctaccggcagcaacgtgttccagacaagagccggatgcctgatcggagcagagcacgtgaacaatagctatgagtgcgacatccctatcggcgccggcatctgtgccagctaccagacccagacaaactccccatctggagcaggctcccaccatcaccatcaccatcaccatcaccactga

SEQ ID NO: 3919 - DNA, 2148 bp, Artificial Sequence
  Description of Artificial Sequence: Synthetic polynucleotide
atgggcatcctgccaagcccaggaatgcccgccctgctgtctctggtgagcctgctgtccgtgctgctgatgggatgcgtggcagagacaggcacacagtgcgtgaacctgaccacaaggacccagctgccccctgcctataccaattctttcacacggggcgtgtactatcccgacaaggtgtttagaagctccgtgctgcactccacacaggatctgtttctgcctttcttttctaacgtgacctggttccacgccatccacgtgtccggcaccaatggcacaaagcggttcgacaatcccgtgctgccttttaacgatggcgtgtacttcgccagcaccgagaagtccaacatcatcagaggctggatctttggcaccacactggactctaagacacagagcctgctgatcgtgaacaatgccaccaacgtggtgatcaaggtgtgcgagttccagttttgtaatgatccattcctgggcgtgtactatcacaagaacaataagtcctggatggagtctgagtttcgcgtgtattctagcgccaacaattgcacatttgagtacgtgagccagcccttcctgatggacctggagggcaagcagggcaatttcaagaacctgagggagttcgtgtttaagaatatcgatggctacttcaagatctacatgaagcacaccccaatcaacctggtgcgcgacctgccacagggattctccgccctggagccactggtggatctgcccatcggcatcaacatcacccggtttcagacactgctggccctgcacagatcctacctgacaccaggcgactcctctagcggatggaccgcaggagctgccgcctactatgtgggctatctgcagccccggaccttcctgctgaagtacaacgagaatggcaccatcacagacgcagtggattgcgccctggaccccctgtctgagacaaagtgtacactgaagagctttaccgtggagaagggcatctatcagacaagcaatttcagggtgcagcctaccgagtccatcgtgcgctttcccaatatcacaaacctgtgcccttttggcgaggtgttcaacgccaccagattcgccagcgtgtacgcctggaatcggaagagaatctccaactgcgtggccgactattctgtgctgtacaactccgcctctttcagcacctttaagtgctatggcgtgtctcccacaaagctgaatgatctgtgctttaccaacgtgtacgccgatagcttcgtgatcaggggagacgaagtgagacagatcgcaccaggacagacaggaaagatcgcagactacaattataagctgcctgacgatttcaccggctgcgtgatcgcctggaactccaacaatctggattctaaagtgggcggcaactacaattatctgtacaggctgtttcgcaagtccaatctgaagccattcgagcgggacatctccacagagatctaccaggccggctctaccccctgcaatggcgtggagggctttaactgttatttccctctgcagtcttacggcttccagccaacaaacggcgtgggctatcagccctacagagtggtggtgctgtcctttgagctgctgcacgcaccagcaacagtgtgcggcccaaagaagtctaccaatctggtgaagaacaagtgcgtgaacttcaacttcaacggactgaccggcacaggcgtgctgaccgagagcaataagaagttcctgccttttcagcagttcggcagggacatcgcagataccacagacgccgtgcgcgaccctcagaccctggagatcctggacatcacaccatgcagcttcggcggcgtgtccgtgatcacaccaggcaccaatacatccaaccaggtggccgtgctgtatcaggacgtgaattgtaccgaggtgcccgtggcaatccacgcagatcagctgacccctacatggcgggtgtactctaccggcagcaacgtgttccagacaagagccggatgcctgatcggagcagagcacgtgaacaatagctatgagtgcgacatccctatcggcgccggcatctgtgccagctaccagacccagacaaactccccatctggagcaggctcccaccatcaccatcaccatcaccatcaccactga

SEQ ID NO: 3920 - DNA, 2148 bp, Artificial Sequence
  Description of Artificial Sequence: Synthetic polynucleotide
atgggcatcctgccaagcccaggaatgcccgccctgctgtctctggtgagcctgctgtccgtgctgctgatgggatgcgtggcagagacaggcacacagtgcgtgaacctgaccacaaggacccagctgccccctgcctataccaattctttcacacggggcgtgtactatcccgacaaggtgtttagaagctccgtgctgcactccacacaggatctgtttctgcctttcttttctaacgtgacctggttccacgccatccacgtgtccggcaccaatggcacaaagcggttcgacaatcccgtgctgccttttaacgatggcgtgtacttcgccagcaccgagaagtccaacatcatcagaggctggatctttggcaccacactggactctaagacacagagcctgctgatcgtgaacaatgccaccaacgtggtgatcaaggtgtgcgagttccagttttgtaatgatccattcctgggcgtgtactatcacaagaacaataagtcctggatggagtctgagtttcgcgtgtattctagcgccaacaattgcacatttgagtacgtgagccagcccttcctgatggacctggagggcaagcagggcaatttcaagaacctgagggagttcgtgtttaagaatatcgatggctacttcaagatctacagcaagcacaccccaatcaacctggtgcgcgacctgccacagggattctccgccctggagccactggtggatctgcccatcggcatcaacatcacccggtttcagacactgctggccctgcacagatcctacctgacaccaggcgactcctctagcggatggaccgcaggagctgccgcctactatgtgggctatctgcagccccggaccttcctgctgaagtacaacgagaatggcaccatcacagacgcagtggattgcgccctggaccccctgtctgagacaaagtgtacactgaagagctttaccgtggagaagggcatctatcagacaagcaatttcagggtgcagcctaccgagtccatcgtgcgctttcccaatatcacaaacctgtgcccttttggcgaggtgttcaacgccaccagattcgccagcgtgtacgcctggaatcggaagagaatctccaactgcgtggccgactattctgtgctgtacaactccgcctctttcagcacctttaagtgctatggcgtgtctcccacaaagctgaatgatctgtgctttaccaacgtgtacgccgatagcttcgtgatcaggggagacgaagtgagacagatcgcaccaggacagacaggaaagatcgcagactacaattataagctgcctgacgatttcaccggctgcgtgatcgcctggaactccaacaatctggattctaaagtgggcggcaactacaattatctgtacaggctgtttcgcaagtccaatctgaagccattcgagcgggacatctccacagagatctaccaggccggctctaccccctgcaatggcgtggagggctttaactgttatttccctctgcagtcttacggcttccagccaacaaacggcgtgggctatcagccctacagagtggtggtgctgtcctttgagctgctgcacgcaccagcaacagtgtgcggcccaaagaagtctaccaatctggtgaagaacaagtgcgtgaacttcaacttcaacggactgaccggcacaggcgtgctgaccgagagcaataagaagttcctgccttttcagcagttcggcagggacatcgcagataccacagacgccgtgcgcgaccctcagaccctggagatcctggacatcacaccatgcagcttcggcggcgtgtccgtgatcacaccaggcaccaatacatccaaccaggtggccgtgctgtatcaggacgtgaattgtaccgaggtgcccgaagcaatccacgcagatcagctgacccctacatggcgggtgtactctaccggcagcaacgtgttccagacaagagccggatgcctgatcggagcagagcacgtgaacaatagctatgagtgcgacatccctatcggcgccggcatctgtgccagctaccagacccagacaaactccccatctggagcaggctcccaccatcaccatcaccatcaccatcaccactga

SEQ ID NO: 3921 - DNA, 2148 bp, Artificial Sequence
  Description of Artificial Sequence: Synthetic polynucleotide
atgggcatcctgccaagcccaggaatgcccgccctgctgtctctggtgagcctgctgtccgtgctgctgatgggatgcgtggcagagacaggcacacagtgcgtgaacctgaccacaaggacccagctgccccctgcctataccaattctttcacacggggcgtgtactatcccgacaaggtgtttagaagctccgtgctgcactccacacaggatctgtttctgcctttcttttctaacgtgacctggttccacgccatccacgtgtccggcaccaatggcacaaagcggttcgacaatcccgtgctgccttttaacgatggcgtgtacttcgccagcaccgagaagtccaacatcatcagaggctggatctttggcaccacactggactctaagacacagagcctgctgatcgtgaacaatgccacctacgtggtgatcaaggtgtgcgagttccagttttgtaatgatccattcctgggcgtgtactatcacaagaacaataagtcctggatggagtctgagtttcgcgtgtattctagcgccaacaattgcacatttgagtacgtgagccagcccttcctgatggacctggagggcaagcagggcaatttcaagaacctgagggagttcgtgtttaagaatatcgatggctacttcaagatctacagcaagcacaccccaatcaacctggtgcgcgacctgccacagggattctccgccctggagccactggtggatctgcccatcggcatcaacatcacccggtttcagacactgctggccctgcacagatcctacctgacaccaggcgactcctctagcggatggaccgcaggagctgccgcctactatgtgggctatctgcagccccggaccttcctgctgaagtacaacgagaatggcaccatcacagacgcagtggattgcgccctggaccccctgtctgagacaaagtgtacactgaagagctttaccgtggagaagggcatctatcagacaagcaatttcagggtgcagcctaccgagtccatcgtgcgctttcccaatatcacaaacctgtgcccttttggcgaggtgttcaacgccaccagattcgccagcgtgtacgcctggaatcggaagagaatctccaactgcgtggccgactattctgtgctgtacaactccgcctctttcagcacctttaagtgctatggcgtgtctcccacaaagctgaatgatctgtgctttaccaacgtgtacgccgatagcttcgtgatcaggggagacgaagtgagacagatcgcaccaggacagacaggaaagatcgcagactacaattataagctgcctgacgatttcaccggctgcgtgatcgcctggaactccaacaatctggattctaaagtgggcggcaactacaattatctgtacaggctgtttcgcaagtccaatctgaagccattcgagcgggacatctccacagagatctaccaggccggctctaccccctgcaatggcgtggagggctttaactgttatttccctctgcagtcttacggcttccagccaacaaacggcgtgggctatcagccctacagagtggtggtgctgtcctttgagctgctgcacgcaccagcaacagtgtgcggcccaaagaagtctaccaatctggtgaagaacaagtgcgtgaacttcaacttcaacggactgaccggcacaggcgtgctgaccgagagcaataagaagttcctgccttttcagcagttcggcagggacatcgcagataccacagacgccgtgcgcgaccctcagaccctggagatcctggacatcacaccatgcagcttcggcggcgtgtccgtgatcacaccaggcaccaatacatccaaccaggtggccgtgctgtatcaggacgtgaattgtaccgaggtgcccgtggcaatccacgcagatcagctgacccctacatggcgggtgtactctaccggcagcaacgtgttccagacaagagccggatgcctgatcggagcagagcacgtgaacaatagctatgagtgcgacatccctatcggcgccggcatctgtgccagctaccagacccagacaaactccccatctggagcaggctcccaccatcaccatcaccatcaccatcaccactga

SEQ ID NO: 3922 - DNA, 2148 bp, Artificial Sequence
  Description of Artificial Sequence: Synthetic polynucleotide
atgggcatcctgccaagcccaggaatgcccgccctgctgtctctggtgagcctgctgtccgtgctgctgatgggatgcgtggcagagacaggcacacagtgcgtgaacctgaccacaaggacccagctgccccctgcctataccaattctttcacacggggcgtgtactatcccgacaaggtgtttagaagctccgtgctgcactccacacaggatctgtttctgcctttcttttctaacgtgacctggttccacgccatccacgtgtccggcaccaatggcacaaagcggttcgacaatcccgtgctgccttttaacgatggcgtgtacttcgccagcaccgagaagtccaacatcatcagaggctggatctttggcaccacactggactctaagacacagagcctgctgatcgtgaacaatgccaccaacgtggtgatcaaggtgtgcgagttccagttttgtaatgatccattcctgggcgtgtactatcacaagaacaataagtcctggatggagtctgagtttcgcgtgtattctagcgccaacaattgcacatttgagtacgtgagccagcccttcctgatggacctggagggcaagcagggcaatttcaagaacctgagggagttcgtgtttaagaatatcgatggctacttcaagatctacagcaagcacaccccaatcaacctggtgcgcgacctgccacagggattctccgccctggagccactggtggatctgcccatcggcatcaacatcacccggtttcagacactgctggccctgcacagatcctacctgacaccaggcgactcctctagcctctggaccgcaggagctgccgcctactatgtgggctatctgcagccccggaccttcctgctgaagtacaacgagaatggcaccatcacagacgcagtggattgcgccctggaccccctgtctgagacaaagtgtacactgaagagctttaccgtggagaagggcatctatcagacaagcaatttcagggtgcagcctaccgagtccatcgtgcgctttcccaatatcacaaacctgtgcccttttggcgaggtgttcaacgccaccagattcgccagcgtgtacgcctggaatcggaagagaatctccaactgcgtggccgactattctgtgctgtacaactccgcctctttcagcacctttaagtgctatggcgtgtctcccacaaagctgaatgatctgtgctttaccaacgtgtacgccgatagcttcgtgatcaggggagacgaagtgagacagatcgcaccaggacagacaggaaagatcgcagactacaattataagctgcctgacgatttcaccggctgcgtgatcgcctggaactccaacaatctggattctaaagtgggcggcaactacaattatctgtacaggctgtttcgcaagtccaatctgaagccattcgagcgggacatctccacagagatctaccaggccggctctaccccctgcaatggcgtggagggctttaactgttatttccctctgcagtcttacggcttccagccaacaaacggcgtgggctatcagccctacagagtggtggtgctgtcctttgagctgctgcacgcaccagcaacagtgtgcggcccaaagaagtctaccaatctggtgaagaacaagtgcgtgaacttcaacttcaacggactgaccggcacaggcgtgctgaccgagagcaataagaagttcctgccttttcagcagttcggcagggacatcgcagataccacagacgccgtgcgcgaccctcagaccctggagatcctggacatcacaccatgcagcttcggcggcgtgtccgtgatcacaccaggcaccaatacatccaaccaggtggccgtgctgtatcaggacgtgaattgtaccgaggtgcccgtggcaatccacgcagatcagctgacccctacatggcgggtgtactctaccggcagcaacgtgttccagacaagagccggatgcctgatcggagcagagcacgtgaacaatagctatgagtgcgacatccctatcggcgccggcatctgtgccagctaccagacccagacaaactccccatctggagcaggctcccaccatcaccatcaccatcaccatcaccactga

SEQ ID NO: 3923 - DNA, 2148 bp, Artificial Sequence
  Description of Artificial Sequence: Synthetic polynucleotide
atgggcatcctgccaagcccaggaatgcccgccctgctgtctctggtgagcctgctgtccgtgctgctgatgggatgcgtggcagagacaggcacacagtgcgtgaacctgaccacaaggacccagctgccccctgcctataccaattctttcacacggggcgtgtactatcccgacaaggtgtttagaagctccgtgctgcactccacacaggatctgtttctgcctttcttttctaacgtgacctggttccacgccatccacgtgtccggcaccaatggcacaaagcggttcgacgtccccgtgctgccttttaacgatggcgtgtacttcgccagcaccgagaagtccaacatcatcagaggctggatctttggcaccacactggactctaagacacagagcctgctgatcgtgaacaatgccaccaacgtggtgatcaaggtgtgcgagttccagttttgtaatgatccattcctgggcgtgtactatcacaagaacaataagtcctggatggagtctgagtttcgcgtgtattctagcgccaacaattgcacatttgagtacgtgagccagcccttcctgatggacctggagggcaagcagggcaatttcaagaacctgagggagttcgtgtttaagaatatcgatggctacttcaagatctacagcaagcacaccccaatcaacctggtgcgcgacctgccacagggattctccgccctggagccactggtggatctgcccatcggcatcaacatcacccggtttcagacactgctggccctgcacagatcctacctgacaccaggcgactcctctagcggatggaccgcaggagctgccgcctactatgtgggctatctgcagccccggaccttcctgctgaagtacaacgagaatggcaccatcacagacgcagtggattgcgccctggaccccctgtctgagacaaagtgtacactgaagagctttaccgtggagaagggcatctatcagacaagcaatttcagggtgcagcctaccgagtccatcgtgcgctttcccaatatcacaaacctgtgcccttttggcgaggtgttcaacgccaccagattcgccagcgtgtacgcctggaatcggaagagaatctccaactgcgtggccgactattctgtgctgtacaactccgcctctttcagcacctttaagtgctatggcgtgtctcccacaaagctgaatgatctgtgctttaccaacgtgtacgccgatagcttcgtgatcaggggagacgaagtgagacagatcgcaccaggacagacaggaaagatcgcagactacaattataagctgcctgacgatttcaccggctgcgtgatcgcctggaactccaacaatctggattctaaagtgggcggcaactacaattatctgtacaggctgtttcgcaagtccaatctgaagccattcgagcgggacatctccacagagatctaccaggccggctctaccccctgcaatggcgtggagggctttaactgttatttccctctgcagtcttacggcttccagccaacaaacggcgtgggctatcagccctacagagtggtggtgctgtcctttgagctgctgcacgcaccagcaacagtgtgcggcccaaagaagtctaccaatctggtgaagaacaagtgcgtgaacttcaacttcaacggactgaccggcacaggcgtgctgaccgagagcaataagaagttcctgccttttcagcagttcggcagggacatcgcagataccacagacgccgtgcgcgaccctcagaccctggagatcctggacatcacaccatgcagcttcggcggcgtgtccgtgatcacaccaggcaccaatacatccaaccaggtggccgtgctgtatcaggacgtgaattgtaccgaggtgcccgtggcaatccacgcagatcagctgacccctacatggcgggtgtactctaccggcagcaacgtgttccagacaagagccggatgcctgatcggagcagagcacgtgaacaatagctatgagtgcgacatccctatcggcgccggcatctgtgccagctaccagacccagacaaactccccatctggagcaggctcccaccatcaccatcaccatcaccatcaccactga

SEQ ID NO: 3924 - DNA, 2148 bp, Artificial Sequence
  Description of Artificial Sequence: Synthetic polynucleotide
atgggcatcctgccaagcccaggaatgcccgccctgctgtctctggtgagcctgctgtccgtgctgctgatgggatgcgtggcagagacaggcacacagtgcgtgaacctgaccacaaggacccagctgccccctgcctataccaattctttcacacggggcgtgtactatcccgacaaggtgtttagaagctccgtgctgcactccacacaggatctgtttctgcctttcttttctaacgtgacctggttccacgccatccacgtgtccggcaccaatggcacaaagcggttcgacaatcccgtgctgccttttaacgatggcgtgtacttcgccagcaccgagaagtccaacatcatcagaggctggatctttggcaccacactggactctaagacacagagcctgctgatcgtgaacaatgccaccaacgtggtgatcaaggtgtgcgagttccagttttgtaatgatccattcctgggcgtgtactatcacaagaacaataagtcctggatggagtctgagtttcgcgtgtattctagcgccaacaattgcacatttgagtacgtgagccagcccttcctgatggacctggagggcaagcagggcaatttcaagaacctgagggagttcgtgtttaagaatatcgatggctacttcaagatctacagcaagcacaccccaatcaacctggtgcgcgacctgccacagggattctccgccctggagccactggtggatctgcccatcggcatcaacatcacccggtttcagacactgctggccctgcacagatcctacctgacaccaggcgactcctctagcggatggaccgaaggagctgccgcctactatgtgggctatctgcagccccggaccttcctgctgaagtacaacgagaatggcaccatcacagacgcagtggattgcgccctggaccccctgtctgagacaaagtgtacactgaagagctttaccgtggagaagggcatctatcagacaagcaatttcagggtgcagcctaccgagtccatcgtgcgctttcccaatatcacaaacctgtgcccttttggcgaggtgttcaacgccaccagattcgccagcgtgtacgcctggaatcggaagagaatctccaactgcgtggccgactattctgtgctgtacaactccgcctctttcagcacctttaagtgctatggcgtgtctcccacaaagctgaatgatctgtgctttaccaacgtgtacgccgatagcttcgtgatcaggggagacgaagtgagacagatcgcaccaggacagacaggaaagatcgcagactacaattataagctgcctgacgatttcaccggctgcgtgatcgcctggaactccaacaatctggattctaaagtgggcggcaactacaattatctgtacaggctgtttcgcaagtccaatctgaagccattcgagcgggacatctccacagagatctaccaggccggctctaccccctgcaatggcgtggagggctttaactgttatttccctctgcagtcttacggcttccagccaacaaacggcgtgggctatcagccctacagagtggtggtgctgtcctttgagctgctgcacgcaccagcaacagtgtgcggcccaaagaagtctaccaatctggtgaagaacaagtgcgtgaacttcaacttcaacggactgaccggcacaggcgtgctgaccgagagcaataagaagttcctgccttttcagcagttcggcagggacatcgcagataccacagacgccgtgcgcgaccctcagaccctggagatcctggacatcacaccatgcagcttcggcggcgtgtccgtgatcacaccaggcaccaatacatccaaccaggtggccgtgctgtatcaggacgtgaattgtaccgaggtgcccgtggcaatccacgcagatcagctgacccctacatggcgggtgtactctaccggcagcaacgtgttccagacaagagccggatgcctgatcggagcagagcacgtgaacaatagctatgagtgcgacatccctatcggcgccggcatctgtgccagctaccagacccagacaaactccccatctggagcaggctcccaccatcaccatcaccatcaccatcaccactga

SEQ ID NO: 3925 - DNA, 2148 bp, Artificial Sequence
  Description of Artificial Sequence: Synthetic polynucleotide
atgggcatcctgccaagcccaggaatgcccgccctgctgtctctggtgagcctgctgtccgtgctgctgatgggatgcgtggcagagacaggcacacagtgcgtgaacctgaccacaaggacccagctgccccctgcctataccaattctttcacacggggcgtgtactatcccgacaaggtgtttagaagctccgtgctgcactccacacaggatctgtttctgcctttcttttctaacgtgacctggttccacgccatccacgtgtccggcaccaatggcacaaagcggttcgacaatcccgtgctgccttttaacgatggcgtgtacttcgccagcaccgagaagtccaacatcatcagaggctggatctttggcaccacactggactctaagacacagagcctgctgatcgtgaacaatgccaccaacgtggtgatcaaggtgtgcgagttccagttttgtaatgatccattcctgggcgtgtactatcacaagaacaataagtcctggatggagtctgagtttcgcgtgtattctagcgccaacaattgcacatttgagtacgtgagccagcccttcctgatggacctggagggcaagcagggcaatttcaagaacctgagggagttcgtgtttaagaatatcgatggctacttcaagatctacagcaagcacaccccaatcaacctggtgcgcgacctgccacagggattctccgccctggagccactggtggatctgcccatcggcatcaacatcacccggtttcagacactgctggccctgcacagatcctacctgacaccaggcgactcctctagcggatggaccgcaggagctgccgcctactatgtgggctatctgcagccccggaccttcctgctgaagtacaacgagaatggcaccatcacagacgcagtggattgcgccctggaccccctgtctgagacaaagtgtacactgaagagctttaccgtggagaagggcatctatcagacaagcaatttcagggtgcagcctaccgagtccatcgtgcgctttcccaatatcacaaacctgtgcccttttggcgaggtgttcaacgccaccagattcgccagcgtgtacgcctggaatcggaagagaatctccaactgcgtggccgactattctgtgctgtacaactccgcctctttcagcacctttaagtgctatggcgtgtctcccacaaagctgaatgatctgtgctttaccaacgtgtacgccgatagcttcgtgatcaggggagacgaagtgagacagatcgcaccaggacagacaggaaagatcgcagactacaattataagctgcctgacgatttcaccggctgcgtgatcgcctggaactccaacaatctggattctaaagtgggcggcaactacaattatctgtacaggctgtttcgcaagtccaatctgaagccattcgagcgggacatctccacagagatctaccaggccggctctaccccctgcaatggcgtggagggctttaactgttataatcctctgcagtcttacggcttccagccaacaaacggcgtgggctatcagccctacagagtggtggtgctgtcctttgagctgctgcacgcaccagcaacagtgtgcggcccaaagaagtctaccaatctggtgaagaacaagtgcgtgaacttcaacttcaacggactgaccggcacaggcgtgctgaccgagagcaataagaagttcctgccttttcagcagttcggcagggacatcgcagataccacagacgccgtgcgcgaccctcagaccctggagatcctggacatcacaccatgcagcttcggcggcgtgtccgtgatcacaccaggcaccaatacatccaaccaggtggccgtgctgtatcaggacgtgaattgtaccgaggtgcccgtggcaatccacgcagatcagctgacccctacatggcgggtgtactctaccggcagcaacgtgttccagacaagagccggatgcctgatcggagcagagcacgtgaacaatagctatgagtgcgacatccctatcggcgccggcatctgtgccagctaccagacccagacaaactccccatctggagcaggctcccaccatcaccatcaccatcaccatcaccactga

SEQ ID NO: 3926 - DNA, 2148 bp, Artificial Sequence
  Description of Artificial Sequence: Synthetic polynucleotide
atgggcatcctgccaagcccaggaatgcccgccctgctgtctctggtgagcctgctgtccgtgctgctgatgggatgcgtggcagagacaggcacacagtgcgtgaacctgaccacaaggacccagctgccccctgcctataccaattctttcacacggggcgtgtactatcccgacaaggtgtttagaagctccgtgctgcactccacacaggatctgtttctgcctttcttttctaacgtgacctggttccacgccatccacgtgtccggcaccaatggcacaaagcggttcgacaatcccgtgctgccttttaacgatggcgtgtacttcgccagcaccgagaagtccaacatcatcagaggctggatctttggcaccacactggactctaagacacagagcctgctgatcgtgaacaatgccaccaacgtggtgatcaaggtgtgcgagttccagttttgtaatgatccattcctgggcgtgtactatcacaagaacaataagtcctggatggagtctgagtttcgcgtgtattctagcgccaacaattgcacatttgagtacgtgagccagcccttcctgaaagacctggagggcaagcagggcaatttcaagaacctgagggagttcgtgtttaagaatatcgatggctacttcaagatctacagcaagcacaccccaatcaacctggtgcgcgacctgccacagggattctccgccctggagccactggtggatctgcccatcggcatcaacatcacccggtttcagacactgctggccctgcacagatcctacctgacaccaggcgactcctctagcggatggaccgcaggagctgccgcctactatgtgggctatctgcagccccggaccttcctgctgaagtacaacgagaatggcaccatcacagacgcagtggattgcgccctggaccccctgtctgagacaaagtgtacactgaagagctttaccgtggagaagggcatctatcagacaagcaatttcagggtgcagcctaccgagtccatcgtgcgctttcccaatatcacaaacctgtgcccttttggcgaggtgttcaacgccaccagattcgccagcgtgtacgcctggaatcggaagagaatctccaactgcgtggccgactattctgtgctgtacaactccgcctctttcagcacctttaagtgctatggcgtgtctcccacaaagctgaatgatctgtgctttaccaacgtgtacgccgatagcttcgtgatcaggggagacgaagtgagacagatcgcaccaggacagacaggaaagatcgcagactacaattataagctgcctgacgatttcaccggctgcgtgatcgcctggaactccaacaatctggattctaaagtgggcggcaactacaattatctgtacaggctgtttcgcaagtccaatctgaagccattcgagcgggacatctccacagagatctaccaggccggctctaccccctgcaatggcgtggagggctttaactgttatttccctctgcagtcttacggcttccagccaacaaacggcgtgggctatcagccctacagagtggtggtgctgtcctttgagctgctgcacgcaccagcaacagtgtgcggcccaaagaagtctaccaatctggtgaagaacaagtgcgtgaacttcaacttcaacggactgaccggcacaggcgtgctgaccgagagcaataagaagttcctgccttttcagcagttcggcagggacatcgcagataccacagacgccgtgcgcgaccctcagaccctggagatcctggacatcacaccatgcagcttcggcggcgtgtccgtgatcacaccaggcaccaatacatccaaccaggtggccgtgctgtatcaggacgtgaattgtaccgaggtgcccgtggcaatccacgcagatcagctgacccctacatggcgggtgtactctaccggcagcaacgtgttccagacaagagccggatgcctgatcggagcagagcacgtgaacaatagctatgagtgcgacatccctatcggcgccggcatctgtgccagctaccagacccagacaaactccccatctggagcaggctcccaccatcaccatcaccatcaccatcaccactga

SEQ ID NO: 3927 - DNA, 2148 bp, Artificial Sequence
  Description of Artificial Sequence: Synthetic polynucleotide
atgggcatcctgccaagcccaggaatgcccgccctgctgtctctggtgagcctgctgtccgtgctgctgatgggatgcgtggcagagacaggcacacagtgcgtgaacctgaccacaaggacccagctgccccctgcctataccaattctttcacacggggcgtgtactatcccgacaaggtgtttagaagctccgtgctgcactccacacaggatctgtttctgcctttcttttctaacgtgacctggttccacgccatccacgtgtccggcaccaatggcacaaagcggttcgacaatcccgtgctgccttttaacgatggcgtgtacttcgccagcaccgagaagtccaacatcatcagaggctggatctttggcaccacactggactctaagacacagagcctgctgatcgtgaacaatgccaccaacgtggtgatcaaggtgtgcgagttccagttttgtaatcgcccattcctgggcgtgtactatcacaagaacaataagtcctggatggagtctgagtttcgcgtgtattctagcgccaacaattgcacatttgagtacgtgagccagcccttcctgatggacctggagggcaagcagggcaatttcaagaacctgagggagttcgtgtttaagaatatcgatggctacttcaagatctacagcaagcacaccccaatcaacctggtgcgcgacctgccacagggattctccgccctggagccactggtggatctgcccatcggcatcaacatcacccggtttcagacactgctggccctgcacagatcctacctgacaccaggcgactcctctagcggatggaccgcaggagctgccgcctactatgtgggctatctgcagccccggaccttcctgctgaagtacaacgagaatggcaccatcacagacgcagtggattgcgccctggaccccctgtctgagacaaagtgtacactgaagagctttaccgtggagaagggcatctatcagacaagcaatttcagggtgcagcctaccgagtccatcgtgcgctttcccaatatcacaaacctgtgcccttttggcgaggtgttcaacgccaccagattcgccagcgtgtacgcctggaatcggaagagaatctccaactgcgtggccgactattctgtgctgtacaactccgcctctttcagcacctttaagtgctatggcgtgtctcccacaaagctgaatgatctgtgctttaccaacgtgtacgccgatagcttcgtgatcaggggagacgaagtgagacagatcgcaccaggacagacaggaaagatcgcagactacaattataagctgcctgacgatttcaccggctgcgtgatcgcctggaactccaacaatctggattctaaagtgggcggcaactacaattatctgtacaggctgtttcgcaagtccaatctgaagccattcgagcgggacatctccacagagatctaccaggccggctctaccccctgcaatggcgtggagggctttaactgttatttccctctgcagtcttacggcttccagccaacaaacggcgtgggctatcagccctacagagtggtggtgctgtcctttgagctgctgcacgcaccagcaacagtgtgcggcccaaagaagtctaccaatctggtgaagaacaagtgcgtgaacttcaacttcaacggactgaccggcacaggcgtgctgaccgagagcaataagaagttcctgccttttcagcagttcggcagggacatcgcagataccacagacgccgtgcgcgaccctcagaccctggagatcctggacatcacaccatgcagcttcggcggcgtgtccgtgatcacaccaggcaccaatacatccaaccaggtggccgtgctgtatcaggacgtgaattgtaccgaggtgcccgtggcaatccacgcagatcagctgacccctacatggcgggtgtactctaccggcagcaacgtgttccagacaagagccggatgcctgatcggagcagagcacgtgaacaatagctatgagtgcgacatccctatcggcgccggcatctgtgccagctaccagacccagacaaactccccatctggagcaggctcccaccatcaccatcaccatcaccatcaccactga

SEQ ID NO: 3928 - DNA, 2148 bp, Artificial Sequence
  Description of Artificial Sequence: Synthetic polynucleotide
atgggcatcctgccaagcccaggaatgcccgccctgctgtctctggtgagcctgctgtccgtgctgctgatgggatgcgtggcagagacaggcacacagtgcgtgaacctgaccacaaggacccagctgccccctgcctataccaattctttcacacggggcgtgtactatcccgacaaggtgtttagaagctccgtgctgcactccacacaggatctgtttctgcctttcttttctaacgtgacctggttccacgccatccacgtgtccggcaccaatggcacaaagcggttcgacaatcccgtgctgccttttaacgatggcgtgtacttcgccagcaccgagaagtccaacatcatcagaggctggatctttggcaccacactggactctaagacacagagcctgctgatcgtgaacaatgccaccaacgtggtgatcaaggtgtgcgagttccagttttgtaatgatccattcctgggcgtgtactatcacaagaacaataagtcctggatggagtctgagtttcgcgtgtattctagcgccaacaattgcacatttgagtacgtgagccagcccttcctgatggacctggagggcaagcagggcaatttcaagaacctgagggagttcgtgtttaagaatatcgatggctacttcaagatctacagcaagcacaccccaatcaacctggtgcgcgacctgccacagggattctccgccctggagccactggtggatctgcccatcggcatcaacatcacccggtttcagacactgctggccctgcacagatcctacctgacaccaggcgactcctctagcggatggaccgcaggagctgccgcctactatgtgggctatctgcagccccggaccttcctgctgaagtacaacgagaatggcaccatcacagacgcagtggattgcgccctggaccccctgtctgagacaaagtgtacactgaagagctttaccgtggagaagggcatctatcagacaagcaatttcagggtgcagcctaccgagtccatcgtgcgctttcccaatatcacaaacctgtgcccttttggcgaggtgttcaacgccaccagattcgccagcgtgtacgcctggaatcggaagagaatctccaactgcgtggccgactattctgtgctgtacaactccgcctctttcagcacctttaagtgctatggcgtgtctcccacaaagctgaatgatctgtgctttaccaacgtgtacgccgatagcttcgtgatcaggggagacgaagtgagacagatcgcaccaggacagacaggaaagatcgcagactacaattataagctgcctgacgatttcaccggctgcgtgatcgcctggaactccaacaatctggattctaaagtgggcggcaactacaattatctgtacaggctgtttcgcaagtccaatctgaagccattcgagcgggacatctccacagagatctaccaggccggctctaccccctgcaatggcgtggagggctttaactgttatttccctctgcagtcttacggcttccagccaacaaacggcgtgggctatcagccctacagagtggtggtgctgtcctttgagctgaaacacgcaccagcaacagtgtgcggcccaaagaagtctaccaatctggtgaagaacaagtgcgtgaacttcaacttcaacggactgaccggcacaggcgtgctgaccgagagcaataagaagttcctgccttttcagcagttcggcagggacatcgcagataccacagacgccgtgcgcgaccctcagaccctggagatcctggacatcacaccatgcagcttcggcggcgtgtccgtgatcacaccaggcaccaatacatccaaccaggtggccgtgctgtatcaggacgtgaattgtaccgaggtgcccgtggcaatccacgcagatcagctgacccctacatggcgggtgtactctaccggcagcaacgtgttccagacaagagccggatgcctgatcggagcagagcacgtgaacaatagctatgagtgcgacatccctatcggcgccggcatctgtgccagctaccagacccagacaaactccccatctggagcaggctcccaccatcaccatcaccatcaccatcaccactga

SEQ ID NO: 3929 - DNA, 2148 bp, Artificial Sequence
  Description of Artificial Sequence: Synthetic polynucleotide
atgggcatcctgccaagcccaggaatgcccgccctgctgtctctggtgagcctgctgtccgtgctgctgatgggatgcgtggcagagacaggcacacagtgcgtgaacctgaccacaaggacccagctgccccctgcctataccaattctttcacacggggcgtgtactatcccgacaaggtgtttagaagctccgtgctgcactccacacaggatctgtttctgcctttcttttctaacgtgacctggttccacgccatccacgtgtccggcaccaatggcacaaagcggttcgacaatcccgtgctgccttttaacgatggcgtgtacttcgccagcaccgagaagtccaacatcatcagaggctggatctttggcaccacactggactctaagacacagagcctgctgatcgtgaacaatgccaccaacgtggtgatcaaggtgtgcgagttccagttttgtaatgatccattcctgggcgtgtactatcacaagaacaataagtcctggatggagtctgagtttcgcgtgtattctagcgccaacaattgcacatttgagtacgtgagccagcccttcctgatggacctggagggcaagcagggcaatttcaagaacctgagggagttcgtgtttaagaatatcgatggctacttcaagatctacagcaagcacaccccaatcaacctggtgcgcgacctgccacagggattctccgccctggagccactggtggatctgcccatcggcatcaacatcacccggtttcagacactgctggccctgcacagatcctacctgacaccaggcgactcctctagcggatggaccgcaggagctgccgcctactatgtgggctatctgcagccccggaccttcctgctgaagtacaacgagaatggcaccatcacagacgcagtggattgcgccctggaccccctgtctgagacaaagtgtacactgaagagctttaccgtggagaagggcatctatcagacaagcaatttcagggtgcagcctaccgagtccatcgtgcgctttcccaatatcacaaacctgtgcccttttggcgaggtgttcaacgccaccagattcgccagcgtgtacgcctggaatcggaagagaatctccaactgcgtggccgactattctgtgctgtacaactccgcctctttcagcacctttaagtgctatggcgtgtctcccacaaagctgaatgatctgtgctttaccaacgtgtacgccgatagcttcgtgatcaggggagacgaagtgagacagatcgcaccaggacagacaggaaagatcgcagactacaattataagctgcctgacgatttcaccggctgcgtgatcgcctggaactccaacaatctggattctaaagtgggcggcaactacaattatctgtacaggctgtttcgcaagtccaatctgaagccattcgagcgggacatctccacagagatctaccaggccggctctaccccctgcaatggcgtggagggctttaactgttatttccctctgcagtcttacggcttccagccaacaaacggcgtgggctatcagccctacagagtggtggtgctgtcctttgagctgctgcacgcaccagcaacagtgtgcggcccaaagaagtctaccaatctggtgaagaacaagtgcgtgaacttcaacttcaacggactgaccggcacaggcgtgctgaccgagagcaataagaagttcctgccttttcagcagttcggcagggacatcgcagataccacagacgccgtgcgcgaccctcagaccctggagatcctggacatcacaccatgcagcttcggcggcgtgtccgtgatcacaccaggcacccgtacatccaaccaggtggccgtgctgtatcaggacgtgaattgtaccgaggtgcccgtggcaatccacgcagatcagctgacccctacatggcgggtgtactctaccggcagcaacgtgttccagacaagagccggatgcctgatcggagcagagcacgtgaacaatagctatgagtgcgacatccctatcggcgccggcatctgtgccagctaccagacccagacaaactccccatctggagcaggctcccaccatcaccatcaccatcaccatcaccactga

SEQ ID NO: 3930 - DNA, 2148 bp, Artificial Sequence
  Description of Artificial Sequence: Synthetic polynucleotide
atgggcatcctgccaagcccaggaatgcccgccctgctgtctctggtgagcctgctgtccgtgctgctgatgggatgcgtggcagagacaggcacacagtgcgtgaacctgaccacaaggacccagctgccccctgcctataccaattctttcacacggggcgtgtactatcccgacaaggtgtttagaagctccgtgctgcactccacacaggatctgtttctgcctttcttttctaacgtgacctggttccacgccatccacgtgtccggcaccaatggcacaaagcggttcgacaatcccgtgctgccttttaacgatggcgtgtacttcgccagcaccgagaagtccaacatcatcagaggctggatctttggcaccacactggactctaagacacagagcctgctgatcgtgaacaatgccaccaacgtggtgatcaaggtgtgcgagttccagttttgtaatgatccattcctgggcgtgtactatcacaagaacaataagtcctggatggagtctgagtttcgcgtgtattctagcgccaacaattgcacatttgagtacgtgagccagcccttcctgatggacctggagggcaagcagggcaatttcaagaacctgagggagttcgtgtttaagaatatcgatggctacttcaagatctacagcaagcacaccccaatcaacctggtgcgcgacctgccacagggattctccgccctggagccactggtggatctgcccatcggcatcaacatcacccggtttcagacactgctggccctgcacagatcctacctgacaccaggcgactcctctagcggatggaccgcaggagctgccgcctactatgtgggctatctgcagccccggaccttcctgctgaagtacaacgagaatggcaccatcacagacgcagtggattgcgccctggaccccctgtctgagacaaagtgtacactgaagagctttaccgtggagaagggcatctatcagacaagcaatttcagggtgcagcctaccgagtccatcgtgcgctttcccaatatcacaaacgcttgcccttttggcgaggtgttcaacgccaccagattcgccagcgtgtacgcctggaatcggaagagaatctccaactgcgtggccgactattctgtgctgtacaactccgcctctttcagcacctttaagtgctatggcgtgtctcccacaaagctgaatgatctgtgctttaccaacgtgtacgccgatagcttcgtgatcaggggagacgaagtgagacagatcgcaccaggacagacaggaaagatcgcagactacaattataagctgcctgacgatttcaccggctgcgtgatcgcctggaactccaacaatctggattctaaagtgggcggcaactacaattatctgtacaggctgtttcgcaagtccaatctgaagccattcgagcgggacatctccacagagatctaccaggccggctctaccccctgcaatggcgtggagggctttaactgttatttccctctgcagtcttacggcttccagccaacaaacggcgtgggctatcagccctacagagtggtggtgctgtcctttgagctgctgcacgcaccagcaacagtgtgcggcccaaagaagtctaccaatctggtgaagaacaagtgcgtgaacttcaacttcaacggactgaccggcacaggcgtgctgaccgagagcaataagaagttcctgccttttcagcagttcggcagggacatcgcagataccacagacgccgtgcgcgaccctcagaccctggagatcctggacatcacaccatgcagcttcggcggcgtgtccgtgatcacaccaggcaccaatacatccaaccaggtggccgtgctgtatcaggacgtgaattgtaccgaggtgcccgtggcaatccacgcagatcagctgacccctacatggcgggtgtactctaccggcagcaacgtgttccagacaagagccggatgcctgatcggagcagagcacgtgaacaatagctatgagtgcgacatccctatcggcgccggcatctgtgccagctaccagacccagacaaactccccatctggagcaggctcccaccatcaccatcaccatcaccatcaccactga

SEQ ID NO: 3931 - DNA, 2148 bp, Artificial Sequence
  Description of Artificial Sequence: Synthetic polynucleotide
atgggcatcctgccaagcccaggaatgcccgccctgctgtctctggtgagcctgctgtccgtgctgctgatgggatgcgtggcagagacaggcacacagtgcgtgaacctgaccacaaggacccagctgccccctgcctataccaattctttcacacggggcgtgtactatcccgacaaggtgtttagaagctccgtgctgcactccacacaggatctgtttctgcctttcttttctaacgtgacctggttccacgccatccacgtgtccggcaccaatggcacaaagcggttcgacaatcccgtgctgccttttaacgatggcgtgtacttcgccagcaccgagaagtccaacatcatcagaggctggatctttggcaccacactggactctaagacacagagcctgctgatcgtgaacaatgccaccaacgtggtgatcaaggtgtgcgagttccagttttgtaatgatccattcctgggcgtgtactatcacaagaacaataagtcctggatggagtctgagtttcgcgtgtattctagcgccaacaattgcacatttgagtacgtgagccagcccttcctgatggacctggagggcaagcagggcaatttcaagaacctgagggagttcgtgtttaagaatatcgatggctacttcaagatctacagcaagcacaccccaatcaacctggtgcgcgacctgccacagggattctccgccctggagccactggtggatctgcccatcggcatcaacatcacccggtttcagacactgctggccctgcacagatcctacctgacaccaggcgactcctctagcggatggaccgcaggagctgccgcctactatgtgggctatctgcagccccggaccttcctgctgaagtacaacgagaatggcaccatcacagacgcagtggattgcgccctggaccccctgtctgagacaaagtgtacactgaagagctttaccgtggagaagggcatctatcagacaagcaatttcagggtgcagcctaccgagtccatcgtgcgctttcccaatatcacaaacctgtgcccttttggcgaggtgttcaacgccaccagattcgccagcgtgtacgcctggaatcggaagagaatctccaactgcgtggccgactattctgtgctgtacaactccgcctctttcagcacctttaagtgctatggcgtgtctcccacaaagctgaatgatctgtgctttaccaacgtgtacgccgatagcttcgtgatcaggggagacgaagtgagacagatcgcaccaggacagacaggaaagatcgcagactacaattataagctgcctgacgatttcaccggctgcgtgatcgcctggaactccaacaatctggattctaaagtgggcggcaactacaattatctgtacaggctgtttcgcaagtccaatctgaagccattcgagcgggacatctccacagagatctaccaggccggctctaccccctgcaatggcgtggagggctttaactgttattgtcctctgcagtcttacggcttccagccaacaaacggcgtgggctatcagccctacagagtggtggtgctgtcctttgagctgctgcacgcaccagcaacagtgtgcggcccaaagaagtctaccaatctggtgaagaacaagtgcgtgaacttcaacttcaacggactgaccggcacaggcgtgctgaccgagagcaataagaagttcctgccttttcagcagttcggcagggacatcgcagataccacagacgccgtgcgcgaccctcagaccctggagatcctggacatcacaccatgcagcttcggcggcgtgtccgtgatcacaccaggcaccaatacatccaaccaggtggccgtgctgtatcaggacgtgaattgtaccgaggtgcccgtggcaatccacgcagatcagctgacccctacatggcgggtgtactctaccggcagcaacgtgttccagacaagagccggatgcctgatcggagcagagcacgtgaacaatagctatgagtgcgacatccctatcggcgccggcatctgtgccagctaccagacccagacaaactccccatctggagcaggctcccaccatcaccatcaccatcaccatcaccactga

SEQ ID NO: 3932 - DNA, 2148 bp, Artificial Sequence
  Description of Artificial Sequence: Synthetic polynucleotide
atgggcatcctgccaagcccaggaatgcccgccctgctgtctctggtgagcctgctgtccgtgctgctgatgggatgcgtggcagagacaggcacacagtgcgtgaacctgaccacaaggacccagctgccccctgcctataccaattctttcacacggggcgtgtactatcccgacaaggtgtttagaagctccgtgctgcactccacacaggatctgtttctgcctttcttttctaacgtgacctggttccacgccatccacgtgtccggcaccaatggcacaaagcggttcgacaatcccgtgctgccttttaacgatggcgtgtacttcgccagcaccgagaagtccaacatcatcagaggctggatctttggcaccacactggactctaagacacagagcctgctgatcgtgaacaatgccaccaacgtggtgatcaaggtgtgcgagttccagttttgtaatgatccattcctgggcgtgtactatcacaagaacaataagtcctggatggagtctgagtttcgcgtgtattctagcgccaacaattgcacatttgagtacgtgagccagcccttcctgatggacctggagggcaagcagggcaatttcaagaacctgagggagttcgtgtttaagaatatcgatggctacttcaagatctacagcaagcacaccccaatcaacctggtgcgcgacctgccacagggattctccgccctggagccactggtggatctgcccatcggcatcaacatcacccggtttcagacactgctggccctgcacagatcctacctgacaccaggcgactcctctagcggatggaccgcaggagctgccgcctactatgtgggctatctgcagccccggaccttcctgctgaagtacaacgagaatggcaccatcacagacgcagtggattgcgccctggaccccctgtctgagacaaagtgtacactgaagagctttaccgtggagaagggcatctatcagacaagcaatttcagggtgcagcctaccgagtccatcgtgcgctttcccaatatcacaaacctgtgcccttttggcgaggtgttcaacgccaccagattcgccagcgtgtacgcctggaatcggaagagaatctccaactgcgtggccgactattctgtgctgtacaactccgcctctttcagcacctttaagtgctatggcgtgtctcccacaaagctgaatgatctgtgctttaccaacgtgtacgccgatagcttcgtgatcaggggagacgaagtgagacagatcgcaccaggacagacaggaaagatcgcagactacaattataagctgcctgacgatttcaccggctgcgtgatcgcctggaactccaacaatctggattctaaagtgggcggcaactacaattatctgtacaggctgtttcgcaagtccaatctgaagccattcgagcgggacatctccacagagatctaccaggccggctctaccccctgcaatggcgtggagggctttaactgtcatttccctctgcagtcttacggcttccagccaacaaacggcgtgggctatcagccctacagagtggtggtgctgtcctttgagctgctgcacgcaccagcaacagtgtgcggcccaaagaagtctaccaatctggtgaagaacaagtgcgtgaacttcaacttcaacggactgaccggcacaggcgtgctgaccgagagcaataagaagttcctgccttttcagcagttcggcagggacatcgcagataccacagacgccgtgcgcgaccctcagaccctggagatcctggacatcacaccatgcagcttcggcggcgtgtccgtgatcacaccaggcaccaatacatccaaccaggtggccgtgctgtatcaggacgtgaattgtaccgaggtgcccgtggcaatccacgcagatcagctgacccctacatggcgggtgtactctaccggcagcaacgtgttccagacaagagccggatgcctgatcggagcagagcacgtgaacaatagctatgagtgcgacatccctatcggcgccggcatctgtgccagctaccagacccagacaaactccccatctggagcaggctcccaccatcaccatcaccatcaccatcaccactga

SEQ ID NO: 3933 - DNA, 2148 bp, Artificial Sequence
  Description of Artificial Sequence: Synthetic polynucleotide
atgggcatcctgccaagcccaggaatgcccgccctgctgtctctggtgagcctgctgtccgtgctgctgatgggatgcgtggcagagacaggcacacagtgcgtgaacctgaccacaaggacccagctgccccctgcctataccaattctttcacacggggcgtgtactatcccgacaaggtgtttagaagctccgtgctgcactccacacaggatctgtttctgcctttcttttctaacgtgacctggttccacgccaaacacgtgtccggcaccaatggcacaaagcggttcgacaatcccgtgctgccttttaacgatggcgtgtacttcgccagcaccgagaagtccaacatcatcagaggctggatctttggcaccacactggactctaagacacagagcctgctgatcgtgaacaatgccaccaacgtggtgatcaaggtgtgcgagttccagttttgtaatgatccattcctgggcgtgtactatcacaagaacaataagtcctggatggagtctgagtttcgcgtgtattctagcgccaacaattgcacatttgagtaccatagccagcccttcctgatggacctggagggcaagcagggcaatttcaagaacctgagggagttcgtgtttaagaatatcgatggctacttcaagatctacagcaagcacaccccaatcaacctggtgcgcgacctgccacagggattctccgccctggagccactggtggatctgcccatcggcatcaacatcacccggtttcagacactgctggccctgcacagatcctacctgacaccaggcgactcctctagcggagaaaccgcaggagctgccgcctactatgtgggctatctgcagccccggaccttcctgctgaagtacaacgagaatggcaccatcacagacgcagtggattgcgccctggaccccctgtctgagacaaagtgtacactgaagagctttaccgtggagaagggcatctatcagacaagcaatttcagggtgcagcctaccgagtccatcgtgcgctttcccaatatcacaaacaaatgcccttttggcgaggtgttcaacgccaccagattcgccagcgtgtacgcctggaatcggaagagaatctccaactgcgtggccgactattctgtgctgtacaactccgcctctttcagcacctttaagtgctatggcgtgtctcccacaaagctgaatgatctgtgctttaccaacgtgtacgccgatagcttcgtgatcaggggagacgaagtgagacagatcgcaccaggacagacaggaaagatcgcagactacaattataagctgcctgacgatttcaccggctgcgtgatcgcctggaactccaacaatctggattctaaagtgggcggcaactacaattatctgtacaggctgtttcgcaagtccaatctgaagccattcgagcgggacatctccacagagatctaccaggccggctctaccccctgcaatggcgtggagggctttaactgttatttccctctgcagtcttacggcttccagccaacaaacggcgtgggccaacagccctacagagtggtggtgctgtcctttgagctgctgcacgcaccagcaacagtgtgcggcccaaagaagtctaccaatctggtgaagaacaagtgcgtgaacttcaacttcaacggactgaccggcacaggcgtgctgaccgagagcaataagaagttcctgccttttcagcagttcggcagggacatcgcagataccacagacgccgtgcgcgaccctcagaccctggagatcctggacatcacaccatgcagcttcggcggcgtgtccgtgatcacaccaggcaccaatacatccaaccaggtggccgtgctgtatcaggacgtgaattgtaccgaggtgcccgatgcaatccacgcagatcagctgacccctacatggcgggtgtactctaccggcagcaacgtgttccagacaagagccggatgcctgatcggagcagagcacgtgaacaatagctatgagtgcgacatccctatcggcgccggcatctgtgccagctaccagacccagacaaactccccatctggagcaggctcccaccatcaccatcaccatcaccatcaccactga

SEQ ID NO: 3934 - DNA, 2148 bp, Artificial Sequence
  Description of Artificial Sequence: Synthetic polynucleotide
atgggcatcctgccaagcccaggaatgcccgccctgctgtctctggtgagcctgctgtccgtgctgctgatgggatgcgtggcagagacaggcacacagtgcgtgaacctgaccacaaggacccagctgccccctgcctataccaattctttcacacggggcgtgtactatcccgacaaggtgtttagaagctccgtgctgcactccacacaggatctgtttctgcctttcttttctaacgtgacctggttccacgccatccacgtgtccggcaccaatggcacaaagcggttcgacaatcccgtgctgccttttaacgatggcgtgtacttcgccagcaccgagaagtccaacatcatcagaggctggatctttggcaccacactggactctaagacacagagcctgctgatcgtgaacaatgccaccaacgtggtgatcaaggtgtgcgagttccagttttgtaatgatccattcctgggcgtgtactatcacaagaacaataagtcctggatggagtctgagtttcgcgtgtattctagcgccaacaattgcacatttgagtacgtgagccagcccttcctgggggacctggagggcaagcagggcaatttcaagaacctgagggagttcgtgtttaagaatatcgatggctacttcaagatctacagcaagcacaccccaatcaacctggtgcgcgacctgccacagggattctccgccctggagccactggtggatctgcccatcggcatcaacatcacccggtttcagacactgctggccctgcacagatcctacctgacaccaggcgactcctctagcggatggaccgcaggagctgccgcctactatgtgggctatctgcagccccggaccttcctgctgaagtacaacgagaatggcaccatcacagacgcagtggattgcgccctggaccccctgtctgagacaaagtgtacactgaagagctttaccgtggagaagggcatctatcagacaagcaatttcagggtgcagcctaccgagtccatcgtgcgctttcccaatatcacaaacctgtgcccttttggcgaggtgttcaacgccaccagattcgccagcgtgtacgcctggaatcggaagagaatctccaactgcgtggccgactattctgtgctgtacaactccgcctctttcagcacctttaagtgctatggcgtgtctcccacaaagctgaatgatctgtgctttaccaacgtgtacgccgatagcttcgtgatcaggggagacgaagtgagacagatcgcaccaggacagacaggaaagatcgcagactacaattataagctgcctgacgatttcaccggctgcgtgatcgcctggaactccaacaatctggattctaaagtgggcggcaactacaattatctgtacaggctgtttcgcaagtccaatctgaagccattcgagcgggacatctccacagagatctaccaggccggctctaccccctgcaatggcgtggagggctttaactgttatttccctctgcagtcttacggcttccagccaacaaacggcgtgggctatcagccctacagagtggtggtgctgtcctttgagctgctgcacgcaccagcaacagtgtgcggcccaaagaagtctaccaatctggtgaagaacaagtgcgtgaacttcaacttcaacggactgaccggcacaggcgtgctgaccgagagcaataagaagttcctgccttttcagcagttcggcagggacatcgcagataccacagacgccgtgcgcgaccctcagaccctggagatcctggacatcacaccatgcagcttcggcggcgtgtccgtgatcacaccaggcaccaatacatccaaccaggtggccgtgctgtatcaggacgtgaattgtaccgaggtgcccgtggcaatccacgcagatcagctgacccctacatggcgggtgtactctaccggcagcaacgtgttccagacaagagccggatgcctgatcggagcagagcacgtgaacaatagctatgagtgcgacatccctatcggcgccggcatctgtgccagctaccagacccagacaaactccccatctggagcaggctcccaccatcaccatcaccatcaccatcaccactga

SEQ ID NO: 3935 - DNA, 2148 bp, Artificial Sequence
  Description of Artificial Sequence: Synthetic polynucleotide
atgggcatcctgccaagcccaggaatgcccgccctgctgtctctggtgagcctgctgtccgtgctgctgatgggatgcgtggcagagacaggcacacagtgcgtgaacctgaccacaaggacccagctgccccctgcctataccaattctttcacacggggcgtgtactatcccgacaaggtgtttagaagctccgtgctgcactccacacaggatctgtttctgcctttcttttctaacgtgacctggttccacgccatccacgtgtccggcaccaatggcacaaagcggttcgacaatcccgtgctgccttttaacgatggcgtgtacttcgccagcaccgagaagtccaacatcatcagaggctggatctttggcaccacactggactctaagacacagagcctgctgatcgtgaacaatgccaccaacgtggtgatcaaggtgtgcgagttccagttttgtaatgatccattcctgggcgtgtactatcacaagaacaataagtcctggatggagtctgagtttcgcgtgtattctagcgccaacaattgcacatttgagtacgtgagccagcccttcctgatggacctggagggcaagcagggcaatttcaagaacctgagggagttcgtgtttaagaatatcgatggctacttcaagatctacagcaagcacaccccaatcaacctggtgcgcgacctgccacagggattctccgccctggagccactggtggatctgcccatcggcatcaacatcacccggtttcagacactgctggccctgcacagatcctacctgacaccaggcgactcctctagcggatggaccgcaggagctgccgcctactatgtgggctatctgcagccccggaccttcctgctgaagtacaacgagaatggcaccatcacagacgcagtggattgcgccctggaccccctgtctgagacaaagtgtacactgaagagctttaccgtggagaagggcatctatcagacaagcaatttcagggtgcagcctaccgagtccatcgtgcgctttcccaatatcacaaacacgtgcccttttggcgaggtgttcaacgccaccagattcgccagcgtgtacgcctggaatcggaagagaatctccaactgcgtggccgactattctgtgctgtacaactccgcctctttcagcacctttaagtgctatggcgtgtctcccacaaagctgaatgatctgtgctttaccaacgtgtacgccgatagcttcgtgatcaggggagacgaagtgagacagatcgcaccaggacagacaggaaagatcgcagactacaattataagctgcctgacgatttcaccggctgcgtgatcgcctggaactccaacaatctggattctaaagtgggcggcaactacaattatctgtacaggctgtttcgcaagtccaatctgaagccattcgagcgggacatctccacagagatctaccaggccggctctaccccctgcaatggcgtggagggctttaactgttatttccctctgcagtcttacggcttccagccaacaaacggcgtgggctatcagccctacagagtggtggtgctgtcctttgagctgctgcacgcaccagcaacagtgtgcggcccaaagaagtctaccaatctggtgaagaacaagtgcgtgaacttcaacttcaacggactgaccggcacaggcgtgctgaccgagagcaataagaagttcctgccttttcagcagttcggcagggacatcgcagataccacagacgccgtgcgcgaccctcagaccctggagatcctggacatcacaccatgcagcttcggcggcgtgtccgtgatcacaccaggcaccaatacatccaaccaggtggccgtgctgtatcaggacgtgaattgtaccgaggtgcccgtggcaatccacgcagatcagctgacccctacatggcgggtgtactctaccggcagcaacgtgttccagacaagagccggatgcctgatcggagcagagcacgtgaacaatagctatgagtgcgacatccctatcggcgccggcatctgtgccagctaccagacccagacaaactccccatctggagcaggctcccaccatcaccatcaccatcaccatcaccactga

SEQ ID NO: 3936 - DNA, 2148 bp, Artificial Sequence
  Description of Artificial Sequence: Synthetic polynucleotide
atgggcatcctgccaagcccaggaatgcccgccctgctgtctctggtgagcctgctgtccgtgctgctgatgggatgcgtggcagagacaggcacacagtgcgtgaacctgaccacaaggacccagctgccccctgcctataccaattctttcacacggggcgtgtactatcccgacaaggtgtttagaagctccgtgctgcactccacacaggatctgtttctgcctttcttttctaacgtgacctggttccacgccatccacgtgtccggcaccaatggcacaaagcggttcgacaatcccgtgctgccttttaacgatggcgtgtacttcgccagcaccgagaagtccaacatcatcagaggctggatctttggcaccacactggactctaagacacagagcctgctgatcgtgaacaatgccaccaacgtggtgatcaaggtgtgcgagttccagttttgtaatgatccattcctgggcgtgtactatcacaagaacaataagtcctggatggagtctgagtttcgcgtgtattctagcgccaacaattgcacatttgagtacgtgagccagcccttcctgatggacctggagggcaagcagggcaatttcaagaacctgagggagttcgtgtttaagaatatcgatggctacttcaagatctacagcaagcacaccccaatcaacctggtgcgcgacctgccacagggattctccgccctggagccactggtggatctgcccatcggcatcaacatcacccggtttcagacactgctggccctgcacagatcctacctgacaccaggcgactcctctagcggatggaccgcaggagctgccgcctactatgtgggctatctgcagccccggaccttcctgctgaagtacaacgagaatggcaccatcacagacgcagtggattgcgccctggaccccctgtctgagacaaagtgtacactgaagagctttaccgtggagaagggcatctatcagacaagcaatttcagggtgcagcctaccgagtccatcgtgcgctttcccaatatcacaaacctgtgcccttttggcgaggtgttcaacgccaccagattcgccagcgtgtacgcctggaatcggaagagaatctccaactgcgtggccgactattctgtgctgtacaactccgcctctttcagcacctttaagtgctatggcgtgtctcccacaaagctgaatgatctgtgctttaccaacgtgtacgccgatagcttcgtgatcaggggagacgaagtgagacagatcgcaccaggacagacaggaaagatcgcagactacaattataagctgcctgacgatttcaccggctgcgtgatcgcctggaactccaacaatctggattctaaagtgggcggcaactacaattatctgtacaggctgtttcgcaagtccaatctgaagccattcgagcgggacatctccacagagatctaccaggccggctctaccccctgcaatggcgtggagggctttaactgttatttccctctgcagtcttacggcttccagccaacaaacggcgtgggcgaacagccctacagagtggtggtgctgtcctttgagctgctgcacgcaccagcaacagtgtgcggcccaaagaagtctaccaatctggtgaagaacaagtgcgtgaacttcaacttcaacggactgaccggcacaggcgtgctgaccgagagcaataagaagttcctgccttttcagcagttcggcagggacatcgcagataccacagacgccgtgcgcgaccctcagaccctggagatcctggacatcacaccatgcagcttcggcggcgtgtccgtgatcacaccaggcaccaatacatccaaccaggtggccgtgctgtatcaggacgtgaattgtaccgaggtgcccgtggcaatccacgcagatcagctgacccctacatggcgggtgtactctaccggcagcaacgtgttccagacaagagccggatgcctgatcggagcagagcacgtgaacaatagctatgagtgcgacatccctatcggcgccggcatctgtgccagctaccagacccagacaaactccccatctggagcaggctcccaccatcaccatcaccatcaccatcaccactga

SEQ ID NO: 3937 - DNA, 2148 bp, Artificial Sequence
  Description of Artificial Sequence: Synthetic polynucleotide
atgggcatcctgccaagcccaggaatgcccgccctgctgtctctggtgagcctgctgtccgtgctgctgatgggatgcgtggcagagacaggcacacagtgcgtgaacctgaccacaaggacccagctgccccctgcctataccaattctttcacacggggcgtgtactatcccgacaaggtgtttagaagctccgtgctgcactccacacaggatctgtttctgcctttcttttctaacgtgacctggttccacgccatccacgtgtccggcaccaatggcacaaagcggttcgacaatcccgtgctgccttttaacgatggcgtgtacttcgccagcaccgagaagtccaacatcatcagaggctggatctttggcaccacactggactctaagacacagagcctgctgatcgtgaacaatgccaccaaagtggtgatcaaggtgtgcgagttccagttttgtaatgatccattcctgggcgtgtactatcacaagaacaataagtcctggatggagtctgagtttcgcgtgtattctagcgccaacaattgcacatttgagtacgtgagccagcccttcctgatggacctggagggcaagcagggcaatttcaagaacctgagggagttcgtgtttaagaatatcgatggctacttcaagatctacagcaagcacaccccaatcaacctggtgcgcgacctgccacagggattctccgccctggagccactggtggatctgcccatcggcatcaacatcacccggtttcagacactgctggccctgcacagatcctacctgacaccaggcgactcctctagcggatggaccgcaggagctgccgcctactatgtgggctatctgcagccccggaccttcctgctgaagtacaacgagaatggcaccatcacagacgcagtggattgcgccctggaccccctgtctgagacaaagtgtacactgaagagctttaccgtggagaagggcatctatcagacaagcaatttcagggtgcagcctaccgagtccatcgtgcgctttcccaatatcacaaacctgtgcccttttggcgaggtgttcaacgccaccagattcgccagcgtgtacgcctggaatcggaagagaatctccaactgcgtggccgactattctgtgctgtacaactccgcctctttcagcacctttaagtgctatggcgtgtctcccacaaagctgaatgatctgtgctttaccaacgtgtacgccgatagcttcgtgatcaggggagacgaagtgagacagatcgcaccaggacagacaggaaagatcgcagactacaattataagctgcctgacgatttcaccggctgcgtgatcgcctggaactccaacaatctggattctaaagtgggcggcaactacaattatctgtacaggctgtttcgcaagtccaatctgaagccattcgagcgggacatctccacagagatctaccaggccggctctaccccctgcaatggcgtggagggctttaactgttatttccctctgcagtcttacggcttccagccaacaaacggcgtgggctatcagccctacagagtggtggtgctgtcctttgagctgctgcacgcaccagcaacagtgtgcggcccaaagaagtctaccaatctggtgaagaacaagtgcgtgaacttcaacttcaacggactgaccggcacaggcgtgctgaccgagagcaataagaagttcctgccttttcagcagttcggcagggacatcgcagataccacagacgccgtgcgcgaccctcagaccctggagatcctggacatcacaccatgcagcttcggcggcgtgtccgtgatcacaccaggcaccaatacatccaaccaggtggccgtgctgtatcaggacgtgaattgtaccgaggtgcccgtggcaatccacgcagatcagctgacccctacatggcgggtgtactctaccggcagcaacgtgttccagacaagagccggatgcctgatcggagcagagcacgtgaacaatagctatgagtgcgacatccctatcggcgccggcatctgtgccagctaccagacccagacaaactccccatctggagcaggctcccaccatcaccatcaccatcaccatcaccactga

SEQ ID NO: 3938 - DNA, 2148 bp, Artificial Sequence
  Description of Artificial Sequence: Synthetic polynucleotide
atgggcatcctgccaagcccaggaatgcccgccctgctgtctctggtgagcctgctgtccgtgctgctgatgggatgcgtggcagagacaggcacacagtgcgtgaacctgaccacaaggacccagctgccccctgcctataccaattctttcacacggggcgtgtactatcccgacaaggtgtttagaagctccgtgctgcactccacacaggatctgtttctgcctttcttttctaacgtgacctggttccacgccatccacgtgtccggcaccaatggcacaaagcggttcgacaatcccgtgctgccttttaacgatggcgtgtacttcgccagcaccgagaagtccaacatcatcagaggctggatctttggcaccacactggactctaagacacagagcctgctgatcgtgaacaatgccaccaacgtggtgatcaaggtgtgcgagttccagttttgtaatgatccattcctgggcgtgtactatcacaagaacaataagtcctggatggagtctgagtttcgcgtgtattctagcgccaacaattgcacatttgagtacgtgagccagcccttcctgatggacctggagggcaagcagggcaatttcaagaacctgagggagttcgtgtttaagaatatcgatggctacttcaagatctacagcaagcacaccccaatcaacctggtgcgcgacctgccacagggattctccgccctggagccactggtggatctgcccatcggcatcaacatcacccggtttcagacactgctggccctgcacagatcctacctgacaccaggcgactcctctagcggatggaccgcaggagctgccgcctactatgtgggctatctgcagccccggaccttcctgctgaagtacaacgagaatggcaccatcacagacgcagtggattgcgccctggaccccctgtctgagacaaagtgtacactgaagagctttaccgtggagaagggcatctatcagacaagcaatttcagggtgcagcctaccatatccatcgtgcgctttcccaatatcacaaacctgtgcccttttggcgaggtgttcaacgccaccagattcgccagcgtgtacgcctggaatcggaagagaatctccaactgcgtggccgactattctgtgctgtacaactccgcctctttcagcacctttaagtgctatggcgtgtctcccacaaagctgaatgatctgtgctttaccaacgtgtacgccgatagcttcgtgatcaggggagacgaagtgagacagatcgcaccaggacagacaggaaagatcgcagactacaattataagctgcctgacgatttcaccggctgcgtgatcgcctggaactccaacaatctggattctaaagtgggcggcaactacaattatctgtacaggctgtttcgcaagtccaatctgaagccattcgagcgggacatctccacagagatctaccaggccggctctaccccctgcaatggcgtggagggctttaactgttatttccctctgcagtcttacggcttccagccaacaaacggcgtgggctatcagccctacagagtggtggtgctgtcctttgagctgctgcacgcaccagcaacagtgtgcggcccaaagaagtctaccaatctggtgaagaacaagtgcgtgaacttcaacttcaacggactgaccggcacaggcgtgctgaccgagagcaataagaagttcctgccttttcagcagttcggcagggacatcgcagataccacagacgccgtgcgcgaccctcagaccctggagatcctggacatcacaccatgcagcttcggcggcgtgtccgtgatcacaccaggcaccaatacatccaaccaggtggccgtgctgtatcaggacgtgaattgtaccgaggtgcccgtggcaatccacgcagatcagctgacccctacatggcgggtgtactctaccggcagcaacgtgttccagacaagagccggatgcctgatcggagcagagcacgtgaacaatagctatgagtgcgacatccctatcggcgccggcatctgtgccagctaccagacccagacaaactccccatctggagcaggctcccaccatcaccatcaccatcaccatcaccactga

SEQ ID NO: 3939 - DNA, 2148 bp, Artificial Sequence
  Description of Artificial Sequence: Synthetic polynucleotide
atgggcatcctgccaagcccaggaatgcccgccctgctgtctctggtgagcctgctgtccgtgctgctgatgggatgcgtggcagagacaggcacacagtgcgtgaacctgaccacaaggacccagctgccccctgcctataccaattctttcacacggggcgtgtactatcccgacaaggtgtttagaagctccgtgctgcactccacacaggatctgtttctgcctttcttttctaacgtgacctggttccacgccgcgcacgtgtccggcaccaatggcacaaagcggttcgacaatcccgtgctgccttttaacgatggcgtgtacttcgccagcaccgagaagtccaacatcatcagaggctggatctttggcaccacactggactctaagacacagagcctgctgatcgtgaacaatgccaccaacgtggtgatcaaggtgtgcgagttccagttttgtaatgatccattcctgggcgtgtactatcacaagaacaataagtcctggatggagtctgagtttcgcgtgtattctagcgccaacaattgcacatttgagtacgtgagccagcccttcctgatggacctggagggcaagcagggcaatttcaagaacctgagggagttcgtgtttaagaatatcgatggctacttcaagatctacagcaagcacaccccaatcaacctggtgcgcgacctgccacagggattctccgccctggagccactggtggatctgcccatcggcatcaacatcacccggtttcagacactgctggccctgcacagatcctacctgacaccaggcgactcctctagcggatggaccgcaggagctgccgcctactatgtgggctatctgcagccccggaccttcctgctgaagtacaacgagaatggcaccatcacagacgcagtggattgcgccctggaccccctgtctgagacaaagtgtacactgaagagctttaccgtggagaagggcatctatcagacaagcaatttcagggtgcagcctaccgagtccatcgtgcgctttcccaatatcacaaacctgtgcccttttggcgaggtgttcaacgccaccagattcgccagcgtgtacgcctggaatcggaagagaatctccaactgcgtggccgactattctgtgctgtacaactccgcctctttcagcacctttaagtgctatggcgtgtctcccacaaagctgaatgatctgtgctttaccaacgtgtacgccgatagcttcgtgatcaggggagacgaagtgagacagatcgcaccaggacagacaggaaagatcgcagactacaattataagctgcctgacgatttcaccggctgcgtgatcgcctggaactccaacaatctggattctaaagtgggcggcaactacaattatctgtacaggctgtttcgcaagtccaatctgaagccattcgagcgggacatctccacagagatctaccaggccggctctaccccctgcaatggcgtggagggctttaactgttatttccctctgcagtcttacggcttccagccaacaaacggcgtgggctatcagccctacagagtggtggtgctgtcctttgagctgctgcacgcaccagcaacagtgtgcggcccaaagaagtctaccaatctggtgaagaacaagtgcgtgaacttcaacttcaacggactgaccggcacaggcgtgctgaccgagagcaataagaagttcctgccttttcagcagttcggcagggacatcgcagataccacagacgccgtgcgcgaccctcagaccctggagatcctggacatcacaccatgcagcttcggcggcgtgtccgtgatcacaccaggcaccaatacatccaaccaggtggccgtgctgtatcaggacgtgaattgtaccgaggtgcccgtggcaatccacgcagatcagctgacccctacatggcgggtgtactctaccggcagcaacgtgttccagacaagagccggatgcctgatcggagcagagcacgtgaacaatagctatgagtgcgacatccctatcggcgccggcatctgtgccagctaccagacccagacaaactccccatctggagcaggctcccaccatcaccatcaccatcaccatcaccactga

SEQ ID NO: 3940 - DNA, 2148 bp, Artificial Sequence
  Description of Artificial Sequence: Synthetic polynucleotide
atgggcatcctgccaagcccaggaatgcccgccctgctgtctctggtgagcctgctgtccgtgctgctgatgggatgcgtggcagagacaggcacacagtgcgtgaacctgaccacaaggacccagctgccccctgcctataccaattctttcacacggggcgtgtactatcccgacaaggtgtttagaagctccgtgctgcactccacacaggatctgtttctgcctttcttttctaacgtgacctggttccacgccatccacgtgtccggcaccaatggcacaaagcggttcgacaatcccgtgctgccttttaacgatggcgtgtacttcgccagcaccgagaagtccaacatcatcagaggctggatctttggcaccacactggactctaagacacagagcctgctgatcgtgaacaatgccaccaacgtggtgatcaaggtgtgcgagttccagttttgtaatgatccattcctgggcgtgtactatcacaagaacaataagtcctggatggagtctgagtttcgcgtgtattctagcgccaacaattgcacatttgagtacgtgagccagcccttcctgatggacctggagggcaagcagggcaatttcaagaacctgagggagttcgtgtttaagaatatcgatggctacttcaagatctacagcaagcacaccccaatcaacctggtgcgcgacctgccacagggattctccgccctggagccactggtggatctgcccatcggcatcaacatcacccggtttcagacactgctggccctgcacagatcctacctgacaccaggcgactcctctagcggatggaccgcaggagctgccgcctactatgtgggctatctgcagccccggaccttcctgctgaagtacaacgagaatggcaccatcacagacgcagtggattgcgccctggaccccctgtctgagacaaagtgtacactgaagagctttaccgtggagaagggcatctatcagacaagcaatttcagggtgcagcctaccgagtccatcgtgcgctttcccaatatcacaaacctgtgcccttttggcgaggtgttcaacgccaccagattcgccagcgtgtacgcctggaatcggaagagaatctccaactgcgtggccgactattctgtgctgtacaactccgcctctttcagcacctttaagtgctatggcgtgtctcccacaaagctgaatgatctgtgctttaccaacgtgtacgccgatagcttcgtgatcaggggagacgaagtgagacagatcgcaccaggacagacaggaaagatcgcagactacaattataagctgcctgacgatttcaccggctgcgtgatcgcctggaactccaacaatctggattctaaagtgggcggcaactacaattatctgtacaggctgtttcgcaagtccaatctgaagccattcgagcgggacatctccacagagatctaccaggccggctctaccccctgcaatggcgtggagggctttaaccaatatttccctctgcagtcttacggcttccagccaacaaacggcgtgggctatcagccctacagagtggtggtgctgtcctttgagctgctgcacgcaccagcaacagtgtgcggcccaaagaagtctaccaatctggtgaagaacaagtgcgtgaacttcaacttcaacggactgaccggcacaggcgtgctgaccgagagcaataagaagttcctgccttttcagcagttcggcagggacatcgcagataccacagacgccgtgcgcgaccctcagaccctggagatcctggacatcacaccatgcagcttcggcggcgtgtccgtgatcacaccaggcaccaatacatccaaccaggtggccgtgctgtatcaggacgtgaattgtaccgaggtgcccgtggcaatccacgcagatcagctgacccctacatggcgggtgtactctaccggcagcaacgtgttccagacaagagccggatgcctgatcggagcagagcacgtgaacaatagctatgagtgcgacatccctatcggcgccggcatctgtgccagctaccagacccagacaaactccccatctggagcaggctcccaccatcaccatcaccatcaccatcaccactga

SEQ ID NO: 3941 - DNA, 2148 bp, Artificial Sequence
  Description of Artificial Sequence: Synthetic polynucleotide
atgggcatcctgccaagcccaggaatgcccgccctgctgtctctggtgagcctgctgtccgtgctgctgatgggatgcgtggcagagacaggcacacagtgcgtgaacctgaccacaaggacccagctgccccctgcctataccaattctttcacacggggcgtgtactatcccgacaaggtgtttagaagctccgtgctgcactccacacaggatctgtttctgcctttcttttctaacgtgacctggttccacgccatccacgtgtccggcaccaatggcacaaagcggttcgacaatcccgtgctgccttttaacgatggcgtgtacttcgccagcaccgagaagtccaacatcatcagaggctggatctttggcaccacactggactctaagacacagagcctgctgatcgtgaacaatgccaccaacgtggtgatcaaggtgtgccgtttccagttttgtaatgatccattcctgggcgtgtactatcacaagaacaataagtcctggatggagtctgagtttcgcgtgtattctagcgccaacaattgcacatttgagtacgtgagccagcccttcctgatggacctggagggcaagcagggcaatttcaagaacctgagggagttcgtgtttaagaatatcgatggctacttcaagatctacagcaagcacaccccaatcaacctggtgcgcgacctgccacagggattctccgccctggagccactggtggatctgcccatcggcatcaacatcacccggtttcagacactgctggccctgcacagatcctacctgacaccaggcgactcctctagcggatggaccgcaggagctgccgcctactatgtgggctatctgcagccccggaccttcctgctgaagtacaacgagaatggcaccatcacagacgcagtggattgcgccctggaccccctgtctgagacaaagtgtacactgaagagctttaccgtggagaagggcatctatcagacaagcaatttcagggtgcagcctaccgagtccatcgtgcgctttcccaatatcacaaacctgtgcccttttggcgaggtgttcaacgccaccagattcgccagcgtgtacgcctggaatcggaagagaatctccaactgcgtggccgactattctgtgctgtacaactccgcctctttcagcacctttaagtgctatggcgtgtctcccacaaagctgaatgatctgtgctttaccaacgtgtacgccgatagcttcgtgatcaggggagacgaagtgagacagatcgcaccaggacagacaggaaagatcgcagactacaattataagctgcctgacgatttcaccggctgcgtgatcgcctggaactccaacaatctggattctaaagtgggcggcaactacaattatctgtacaggctgtttcgcaagtccaatctgaagccattcgagcgggacatctccacagagatctaccaggccggctctaccccctgcaatggcgtggagggctttaactgttatttccctctgcagtcttacggcttccagccaacaaacggcgtgggctatcagccctacagagtggtggtgctgtcctttgagctgctgcacgcaccagcaacagtgtgcggcccaaagaagtctaccaatctggtgaagaacaagtgcgtgaacttcaacttcaacggactgaccggcacaggcgtgctgaccgagagcaataagaagttcctgccttttcagcagttcggcagggacatcgcagataccacagacgccgtgcgcgaccctcagaccctggagatcctggacatcacaccatgcagcttcggcggcgtgtccgtgatcacaccaggcaccaatacatccaaccaggtggccgtgctgtatcaggacgtgaattgtaccgaggtgcccgtggcaatccacgcagatcagctgacccctacatggcgggtgtactctaccggcagcaacgtgttccagacaagagccggatgcctgatcggagcagagcacgtgaacaatagctatgagtgcgacatccctatcggcgccggcatctgtgccagctaccagacccagacaaactccccatctggagcaggctcccaccatcaccatcaccatcaccatcaccactga

SEQ ID NO: 3942 - DNA, 2148 bp, Artificial Sequence
  Description of Artificial Sequence: Synthetic polynucleotide
atgggcatcctgccaagcccaggaatgcccgccctgctgtctctggtgagcctgctgtccgtgctgctgatgggatgcgtggcagagacaggcacacagtgcgtgaacctgaccacaaggacccagctgccccctgcctataccaattctttcacacggggcgtgtactatcccgacaaggtgtttagaagctccgtgctgcactccacacaggatctgtttctgcctttcttttctaacgtgacctggttccacgccatccacgtgtccggcaccaatggcacaaagcggttcgacaatcccgtgctgccttttaacgatggcgtgtacttcgccagcaccgagaagtccaacatcatcagaggctggatctttggcaccacactggactctaagacacagagcctgctgatcgtgaacaatgccaccaacgtggtgatcaaggtgtgcgagttccagttttgtaatgatccattcctgggcgtgtactatcacaagaacaataagtcctggatggagtctgagtttcgcgtgtattctagcgccaacaattgcacatttgagtacgtgagccagcccttcctgatggacctggagggcaagcagggcaatttcaagaacctgagggagttcgtgtttaagaatatcgatggctacttcaagatctacagcaagcacaccccaatcaacctggtgcgcgacctgccacagggattctccgccctggagccactggtggatctgcccatcggcatcaacatcacccggtttcagacactgctggccctgcacagatcctacctgacaccaggcgactcctctagcggatggaccgcaggagctgccgcctactatgtgggctatctgcagccccggaccttcctgctgaagtacaacgagaatggcaccatcacagacgcagtggattgcgccctggaccccctgtctgagacaaagtgtacactgaagagctttaccgtggagaagggcatctatcagacaagcaatttcagggtgcagcctaccgagtccatcgtgcgctttcccaatatcacaaacctgtgcccttttggcgaggtgttcaacgccaccagattcgccagctcgtacgcctggaatcggaagagaatctccaactgcgtggccgactattctgtgctgtacaactccgcctctttcagcacctttaagtgctatggcgtgtctcccacaaagctgaatgatctgtgctttaccaacgtgtacgccgatagcttcgtgatcaggggagacgaagtgagacagatcgcaccaggacagacaggaaagatcgcagactacaattataagctgcctgacgatttcaccggctgcgtgatcgcctggaactccaacaatctggattctaaagtgggcggcaactacaattatctgtacaggctgtttcgcaagtccaatctgaagccattcgagcgggacatctccacagagatctaccaggccggctctaccccctgcaatggcgtggagggctttaactgttatttccctctgcagtcttacggcttccagccaacaaacggcgtgggctatcagccctacagagtggtggtgctgtcctttgagctgctgcacgcaccagcaacagtgtgcggcccaaagaagtctaccaatctggtgaagaacaagtgcgtgaacttcaacttcaacggactgaccggcacaggcgtgctgaccgagagcaataagaagttcctgccttttcagcagttcggcagggacatcgcagataccacagacgccgtgcgcgaccctcagaccctggagatcctggacatcacaccatgcagcttcggcggcgtgtccgtgatcacaccaggcaccaatacatccaaccaggtggccgtgctgtatcaggacgtgaattgtaccgaggtgcccgtggcaatccacgcagatcagctgacccctacatggcgggtgtactctaccggcagcaacgtgttccagacaagagccggatgcctgatcggagcagagcacgtgaacaatagctatgagtgcgacatccctatcggcgccggcatctgtgccagctaccagacccagacaaactccccatctggagcaggctcccaccatcaccatcaccatcaccatcaccactga

SEQ ID NO: 3943 - DNA, 2148 bp, Artificial Sequence
  Description of Artificial Sequence: Synthetic polynucleotide
atgggcatcctgccaagcccaggaatgcccgccctgctgtctctggtgagcctgctgtccgtgctgctgatgggatgcgtggcagagacaggcacacagtgcgtgaacctgaccacaaggacccagctgccccctgcctataccaattctttcacacggggcgtgtactatcccgacaaggtgtttagaagctccgtgctgcactccacacaggatctgtttctgcctttcttttctaacgtgacctggttccacgccatccacgtgtccggcaccaatggcacaaagcggttcgacaatcccgtgctgccttttaacgatggcgtgtacttcgccagcaccgagaagtccaacatcatcagaggctggatctttggcaccacactggactctaagacacagagcctgctgatcgtgaacaatgccaccaacgtggtgatcaaggtgtgcgagttccagttttgtaatgatccattcctgggcgtgtactatcacaagaacaataagtcctggatggagtctgagtttcgcgtgtattctagcgccaacaattgcacatttgagtacgtgagccagcccttcctgatggacctggagggcaagcagggcaatttcaagaacctgagggagttcgtgtttaagaatatcgatggctacttcaagatctacagcaagcacaccccaatcaacctggtgcgcgacctgccacagggattctccgccctggagccactggtggatctgcccatcggcatcaacatcacccggtttcagacactgctggccctgcacagatcctacctgacaccaggcgactcctctagcggatggaccgcaggagctgccgcctactatgtgggctatctgcagccccggaccttcctgctgaagtacaacgagaatggcaccatcacagacgcagtggattgcgccctggaccccctgtctgagacaaagtgtacactgaagagctttaccgtggagaagggcatctatcagacaagcaatttcagggtgcagcctaccgagtccatcgtgcgctttcccaatatcacaaacctgtgcccttttggcgaggtgttcaacgccaccagattcgccagcgtgtacgcctggaatcggaagagaatctccaactgcgtggccgactattctgtgctgtacaactccgcctctttcagcacctttaagtgctatggcgtgtctcccacaaagctgaatgatctgtgctttaccaacgtgtacgccgatagcttcgtgatcaggggagacgaagtgagacagatcgcaccaggacagacaggaaagatcgcagactacaattataagctgcctgacgatttcaccggctgcgtgatcgcctggaactccaacaatctggattctaaagtgggcggcaactacaattatctgtacaggctgtttcgcaagtccaatctgaagccattcgagcgggacatctccacagagatctaccaggccggctctaccccctgcaatggcgtggagggctttaactgttatttccctctgcagtcttacggcttccagccaacaaacggcgtgggctatcagccctacagagtggtggtgctgtcctttgagctgcatcacgcaccagcaacagtgtgcggcccaaagaagtctaccaatctggtgaagaacaagtgcgtgaacttcaacttcaacggactgaccggcacaggcgtgctgaccgagagcaataagaagttcctgccttttcagcagttcggcagggacatcgcagataccacagacgccgtgcgcgaccctcagaccctggagatcctggacatcacaccatgcagcttcggcggcgtgtccgtgatcacaccaggcaccaatacatccaaccaggtggccgtgctgtatcaggacgtgaattgtaccgaggtgcccgtggcaatccacgcagatcagctgacccctacatggcgggtgtactctaccggcagcaacgtgttccagacaagagccggatgcctgatcggagcagagcacgtgaacaatagctatgagtgcgacatccctatcggcgccggcatctgtgccagctaccagacccagacaaactccccatctggagcaggctcccaccatcaccatcaccatcaccatcaccactga

SEQ ID NO: 3944 - DNA, 2148 bp, Artificial Sequence
  Description of Artificial Sequence: Synthetic polynucleotide
atgggcatcctgccaagcccaggaatgcccgccctgctgtctctggtgagcctgctgtccgtgctgctgatgggatgcgtggcagagacaggcacacagtgcgtgaacctgaccacaaggacccagctgccccctgcctataccaattctttcacacggggcgtgtactatcccgacaaggtgtttagaagctccgtgctgcactccacacaggatctgtttctgcctttcttttctaacgtgacctggttccacgccatccacgtgtccggcaccaatggcacaaagcggttcgacaatcccgtgctgccttttaacgatggcgtgtacttcgccagcaccgagaagtccaacatcatcagaggctggatctttggcaccacactggactctaagacacagagcctgctgatcgtgaacaatgccaccaacgtggtgatcaaggtgtgcgagttccagttttgtaatgatccattcctgggcgtgtactatcacaagaacaataagtcctggatggagtctgagtttcgcgtgtattctagcgccaacaattgcacatttgagtacgtgagccagcccttcctgatggacctggagggcaagcagggcaatttcaagaacctgagggagttcgtgtttaagaatatcgatggctacttcaagatctacagcaagcacaccccaatcaacctgtatcgcgacctgccacagggattctccgccctggagccactggtggatctgcccatcggcatcaacatcacccggtttcagacactgctggccctgcacagatcctacctgacaccaggcgactcctctagcggatggaccgcaggagctgccgcctactatgtgggctatctgcagccccggaccttcctgctgaagtacaacgagaatggcaccatcacagacgcagtggattgcgccctggaccccctgtctgagacaaagtgtacactgaagagctttaccgtggagaagggcatctatcagacaagcaatttcagggtgcagcctaccgagtccatcgtgcgctttcccaatatcacaaacctgtgcccttttggcgaggtgttcaacgccaccagattcgccagcgtgtacgcctggaatcggaagagaatctccaactgcgtggccgactattctgtgctgtacaactccgcctctttcagcacctttaagtgctatggcgtgtctcccacaaagctgaatgatctgtgctttaccaacgtgtacgccgatagcttcgtgatcaggggagacgaagtgagacagatcgcaccaggacagacaggaaagatcgcagactacaattataagctgcctgacgatttcaccggctgcgtgatcgcctggaactccaacaatctggattctaaagtgggcggcaactacaattatctgtacaggctgtttcgcaagtccaatctgaagccattcgagcgggacatctccacagagatctaccaggccggctctaccccctgcaatggcgtggagggctttaactgttatttccctctgcagtcttacggcttccagccaacaaacggcgtgggctatcagccctacagagtggtggtgctgtcctttgagctgctgcacgcaccagcaacagtgtgcggcccaaagaagtctaccaatctggtgaagaacaagtgcgtgaacttcaacttcaacggactgaccggcacaggcgtgctgaccgagagcaataagaagttcctgccttttcagcagttcggcagggacatcgcagataccacagacgccgtgcgcgaccctcagaccctggagatcctggacatcacaccatgcagcttcggcggcgtgtccgtgatcacaccaggcaccaatacatccaaccaggtggccgtgctgtatcaggacgtgaattgtaccgaggtgcccgtggcaatccacgcagatcagctgacccctacatggcgggtgtactctaccggcagcaacgtgttccagacaagagccggatgcctgatcggagcagagcacgtgaacaatagctatgagtgcgacatccctatcggcgccggcatctgtgccagctaccagacccagacaaactccccatctggagcaggctcccaccatcaccatcaccatcaccatcaccactga

SEQ ID NO: 3945 - DNA, 2148 bp, Artificial Sequence
  Description of Artificial Sequence: Synthetic polynucleotide
atgggcatcctgccaagcccaggaatgcccgccctgctgtctctggtgagcctgctgtccgtgctgctgatgggatgcgtggcagagacaggcacacagtgcgtgaacctgaccacaaggacccagctgccccctgcctataccaattctttcacacggggcgtgtactatcccgacaaggtgtttagaagctccgtgctgcactccacacaggatctgtttctgcctttcttttctaacgtgacctggttccacgccatccacgtgtccggcaccaatggcacaaagcggttcgacaatcccgtgctgccttttaacgatggcgtgtacttcgccatgaccgagaagtccaacatcatcagaggctggatctttggcaccacactggactctaagacacagagcctgctgatcgtgaacaatgccaccaacgtggtgatcaaggtgtgcgagttccagttttgtaatgatccattcctgggcgtgtactatcacaagaacaataagtcctggatggagtctgagtttcgcgtgtattctagcgccaacaattgcacatttgagtacgtgagccagcccttcctgatggacctggagggcaagcagggcaatttcaagaacctgagggagttcgtgtttaagaatatcgatggctacttcaagatctacagcaagcacaccccaatcaacctggtgcgcgacctgccacagggattctccgccctggagccactggtggatctgcccatcggcatcaacatcacccggtttcagacactgctggccctgcacagatcctacctgacaccaggcgactcctctagcggatggaccgcaggagctgccgcctactatgtgggctatctgcagccccggaccttcctgctgaagtacaacgagaatggcaccatcacagacgcagtggattgcgccctggaccccctgtctgagacaaagtgtacactgaagagctttaccgtggagaagggcatctatcagacaagcaatttcagggtgcagcctaccgagtccatcgtgcgctttcccaatatcacaaacctgtgcccttttggcgaggtgttcaacgccaccagattcgccagcgtgtacgcctggaatcggaagagaatctccaactgcgtggccgactattctgtgctgtacaactccgcctctttcagcacctttaagtgctatggcgtgtctcccacaaagctgaatgatctgtgctttaccaacgtgtacgccgatagcttcgtgatcaggggagacgaagtgagacagatcgcaccaggacagacaggaaagatcgcagactacaattataagctgcctgacgatttcaccggctgcgtgatcgcctggaactccaacaatctggattctaaagtgggcggcaactacaattatctgtacaggctgtttcgcaagtccaatctgaagccattcgagcgggacatctccacagagatctaccaggccggctctaccccctgcaatggcgtggagggctttaactgttatttccctctgcagtcttacggcttccagccaacaaacggcgtgggctatcagccctacagagtggtggtgctgtcctttgagctgctgcacgcaccagcaacagtgtgcggcccaaagaagtctaccaatctggtgaagaacaagtgcgtgaacttcaacttcaacggactgaccggcacaggcgtgctgaccgagagcaataagaagttcctgccttttcagcagttcggcagggacatcgcagataccacagacgccgtgcgcgaccctcagaccctggagatcctggacatcacaccatgcagcttcggcggcgtgtccgtgatcacaccaggcaccaatacatccaaccaggtggccgtgctgtatcaggacgtgaattgtaccgaggtgcccgtggcaatccacgcagatcagctgacccctacatggcgggtgtactctaccggcagcaacgtgttccagacaagagccggatgcctgatcggagcagagcacgtgaacaatagctatgagtgcgacatccctatcggcgccggcatctgtgccagctaccagacccagacaaactccccatctggagcaggctcccaccatcaccatcaccatcaccatcaccactga

SEQ ID NO: 3946 - DNA, 2148 bp, Artificial Sequence
  Description of Artificial Sequence: Synthetic polynucleotide
atgggcatcctgccaagcccaggaatgcccgccctgctgtctctggtgagcctgctgtccgtgctgctgatgggatgcgtggcagagacaggcacacagtgcgtgaacctgaccacaaggacccagctgccccctgcctataccaattctttcacacggggcgtgtactatcccgacaaggtgtttagaagctccgtgctgcactccacacaggatctgtttctgcctttcttttctaacgtgacctggttccacgccaatcacgtgtccggcaccaatggcacaaagcggttcgacaatcccgtgctgccttttaacgatggcgtgtacttcgccagcaccgagaagtccaacatcatcagaggctggatctttggcaccacactggactctaagacacagagcctgctgatcgtgaacaatgccaccaacgtggtgatcaaggtgtgcgagttccagttttgtaatgatccattcctgggcgtgtactatcacaagaacaataagtcctggatggagtctgagtttcgcgtgtattctagcgccaacaattgcacatttgagtacgtgagccagcccttcctgatggacctggagggcaagcagggcaatttcaagaacctgagggagttcgtgtttaagaatatcgatggctacttcaagatctacagcaagcacaccccaatcaacctggtgcgcgacctgccacagggattctccgccctggagccactggtggatctgcccatcggcatcaacatcacccggtttcagacactgctggccctgcacagatcctacctgacaccaggcgactcctctagcggatggaccgcaggagctgccgcctactatgtgggctatctgcagccccggaccttcctgctgaagtacaacgagaatggcaccatcacagacgcagtggattgcgccctggaccccctgtctgagacaaagtgtacactgaagagctttaccgtggagaagggcatctatcagacaagcaatttcagggtgcagcctaccgagtccatcgtgcgctttcccaatatcacaaacctgtgcccttttggcgaggtgttcaacgccaccagattcgccagcgtgtacgcctggaatcggaagagaatctccaactgcgtggccgactattctgtgctgtacaactccgcctctttcagcacctttaagtgctatggcgtgtctcccacaaagctgaatgatctgtgctttaccaacgtgtacgccgatagcttcgtgatcaggggagacgaagtgagacagatcgcaccaggacagacaggaaagatcgcagactacaattataagctgcctgacgatttcaccggctgcgtgatcgcctggaactccaacaatctggattctaaagtgggcggcaactacaattatctgtacaggctgtttcgcaagtccaatctgaagccattcgagcgggacatctccacagagatctaccaggccggctctaccccctgcaatggcgtggagggctttaactgttatttccctctgcagtcttacggcttccagccaacaaacggcgtgggctatcagccctacagagtggtggtgctgtcctttgagctgctgcacgcaccagcaacagtgtgcggcccaaagaagtctaccaatctggtgaagaacaagtgcgtgaacttcaacttcaacggactgaccggcacaggcgtgctgaccgagagcaataagaagttcctgccttttcagcagttcggcagggacatcgcagataccacagacgccgtgcgcgaccctcagaccctggagatcctggacatcacaccatgcagcttcggcggcgtgtccgtgatcacaccaggcaccaatacatccaaccaggtggccgtgctgtatcaggacgtgaattgtaccgaggtgcccgtggcaatccacgcagatcagctgacccctacatggcgggtgtactctaccggcagcaacgtgttccagacaagagccggatgcctgatcggagcagagcacgtgaacaatagctatgagtgcgacatccctatcggcgccggcatctgtgccagctaccagacccagacaaactccccatctggagcaggctcccaccatcaccatcaccatcaccatcaccactga

SEQ ID NO: 3947 - DNA, 2148 bp, Artificial Sequence
  Description of Artificial Sequence: Synthetic polynucleotide
atgggcatcctgccaagcccaggaatgcccgccctgctgtctctggtgagcctgctgtccgtgctgctgatgggatgcgtggcagagacaggcacacagtgcgtgaacctgaccacaaggacccagctgccccctgcctataccaattctttcacacggggcgtgtactatcccgacaaggtgtttagaagctccgtgctgcactccacacaggatctgtttctgcctttcttttctaacgtgacctggttccacgccatccacgtgtccggcaccaatggcacaaagcggttcgacaatcccgtgctgccttttaacgatggcgtgtacttcgccagcaccgagaagtccaacatcatcagaggctggatctttggcaccacactggactctaagacacagagcctgctgatcgtgaacaatgccaccaacgtggtgatcaaggtgtgcgagttccagttttgtaatgatccattcctgggcgtgtactatcacaagaacaataagtcctggatggagtctgagtttcgcgtgtattctagcgccaacaattgcacatttgagtacgtgagccagcccttcctgatggacctggagggcaagcagggcaatttcaagaacctgagggagttcgtgtttaagaatatcgatggctacttcaagatctacagcaagcacaccccaatcaacctggtgcgcgacctgccacagggattctccgccctggagccactggtggatctgcccatcggcatcaacatcacccggtttcagacactgctggccctgcacagatcctacctgacaccaggcgactcctctagcggatggaccgcaggagctgccgcctactatgtgggctatctgcagccccggaccttcctgctgaagtacaacgagaatggcaccatcacagacgcagtggattgcgccctggaccccctgtctgagacaaagtgtacactgaagagctttaccgtggagaagggcatctatcagacaagcaatttcagggtgcagcctaccgagtccatcgtgcgctttcccaatatcacaaacctgtgcccttttggcgaggtgttcaacgccaccagattcgccagcgtgtacgcctggaatcggaagagaatctccaactgcgtggccgactattctgtgctgtacaactccgcctctttcagcacctttaagtgctatggcgtgtctcccacaaagctgaatgatctgtgctttaccaacgtgtacgccgatagcttcgtgatcaggggagacgaagtgagacagatcgcaccaggacagacaggaaagatcgcagactacaattataagctgcctgacgatttcaccggctgcgtgatcgcctggaactcctcaaatctggattctaaagtgggcggcaactacaattatctgtacaggctgtttcgcaagtccaatctgaagccattcgagcgggacatctccacagagatctaccaggccggctctaccccctgcaatggcgtggagggctttaactgttatttccctctgcagtcttacggcttccagccaacaaacggcgtgggctatcagccctacagagtggtggtgctgtcctttgagctgctgcacgcaccagcaacagtgtgcggcccaaagaagtctaccaatctggtgaagaacaagtgcgtgaacttcaacttcaacggactgaccggcacaggcgtgctgaccgagagcaataagaagttcctgccttttcagcagttcggcagggacatcgcagataccacagacgccgtgcgcgaccctcagaccctggagatcctggacatcacaccatgcagcttcggcggcgtgtccgtgatcacaccaggcaccaatacatccaaccaggtggccgtgctgtatcaggacgtgaattgtaccgaggtgcccgtggcaatccacgcagatcagctgacccctacatggcgggtgtactctaccggcagcaacgtgttccagacaagagccggatgcctgatcggagcagagcacgtgaacaatagctatgagtgcgacatccctatcggcgccggcatctgtgccagctaccagacccagacaaactccccatctggagcaggctcccaccatcaccatcaccatcaccatcaccactga

SEQ ID NO: 3948 - DNA, 2148 bp, Artificial Sequence
  Description of Artificial Sequence: Synthetic polynucleotide
atgggcatcctgccaagcccaggaatgcccgccctgctgtctctggtgagcctgctgtccgtgctgctgatgggatgcgtggcagagacaggcacacagtgcgtgaacctgaccacaaggacccagctgccccctgcctataccaattctttcacacggggcgtgtactatcccgacaaggtgtttagaagctccgtgctgcactccacacaggatctgtttctgcctttcttttctaacgtgacctggttccacgccatccacgtgtccggcaccaatggcacaaagcggttcgacaatcccgtgctgccttttaacgatggcgtgtacttcgccagcaccgagaagtccaacatcatcagaggctggatctttggcaccacactggactctaagacacagagcctgctgatcgtgaacaatgccaccaacgtggtgatcaaggtgtgcgagttccagttttgtaatgatccattcctgggcgtgtactatcacaagaacaataagtcctggatggagtctgagtttcgcgtgtattctagcgccaacaattgcacatttgagtacgtgagccagcccttcctgatggacctggagggcaagcagggcaatttcaagaacctgagggagttcgtgtttaagaatatcgatggctacttcaagatctacagcaagcacaccccaatcaacctggtgcgcgacctgccacagggattctccgccctggagccactggtggatctgcccatcggcatcaacatcacccggtttcagacactgctggccctgcacagatcctacctgacaccaggcgactcctctagcggatggaccgcaggagctgccgcctactatgtgggctatctgcagccccggaccttcctgctgaagtacaacgagaatggcaccatcacagacgcagtggattgcgccctggaccccctgtctgagacaaagtgtacactgaagagctttaccgtggagaagggcatctatcagacaagcaatttcagggtgcagcctaccgagtccatcgtgcgctttcccaatatcacaaacctgtgcccttttggcgaggtgttcaacgccaccagattcgccagcgtgtacgcctggaatcggaagagaatctccaactgcgtggccgactattctgtgctgtacaactccgcctctttcagcacctttaagtgctatggcgtgtctcccacaaagctgaatgatctgtgctttaccaacgtgtacgccgatagcttcgtgatcaggggagacgaagtgagacagatcgcaccaggacagacaggaaagatcgcagactacaattataagctgcctgacgatttcaccggctgcgtgatcgcctggaactccaacaatctggattctaaagtgggcggcaactacaattatctgtacaggctgtttcgcaagtccaatctgaagccattcgagcgggacatctccacagagatctaccaggccggctctaccccctgcaatggcgtggagggctttaactgtcaattccctctgcagtcttacggcttccagccaacaaacggcgtgggctatcagccctacagagtggtggtgctgtcctttgagctgctgcacgcaccagcaacagtgtgcggcccaaagaagtctaccaatctggtgaagaacaagtgcgtgaacttcaacttcaacggactgaccggcacaggcgtgctgaccgagagcaataagaagttcctgccttttcagcagttcggcagggacatcgcagataccacagacgccgtgcgcgaccctcagaccctggagatcctggacatcacaccatgcagcttcggcggcgtgtccgtgatcacaccaggcaccaatacatccaaccaggtggccgtgctgtatcaggacgtgaattgtaccgaggtgcccgtggcaatccacgcagatcagctgacccctacatggcgggtgtactctaccggcagcaacgtgttccagacaagagccggatgcctgatcggagcagagcacgtgaacaatagctatgagtgcgacatccctatcggcgccggcatctgtgccagctaccagacccagacaaactccccatctggagcaggctcccaccatcaccatcaccatcaccatcaccactga

SEQ ID NO: 3949 - DNA, 2148 bp, Artificial Sequence
  Description of Artificial Sequence: Synthetic polynucleotide
atgggcatcctgccaagcccaggaatgcccgccctgctgtctctggtgagcctgctgtccgtgctgctgatgggatgcgtggcagagacaggcacacagtgcgtgaacctgaccacaaggacccagctgccccctgcctataccaattctttcacacggggcgtgtactatcccgacaaggtgtttagaagctccgtgctgcactccacacaggatctgtttctgcctttcttttctaacgtgacctggttccacgccatccacgtgtccggcaccaatggcacaaagcggttcgacaatcccgtgctgccttttaacgatggcgtgtacttcgccagcaccgagaagtccaacatcatcagaggctggatctttggcaccacactggactctaagacacagagcctgctgatcgtgaacaatgccaccaacgtggtgatcaaggtgtgcgagttccagttttgtaatgatccattcctgggcgtgtactatcacaagaacaataagtcctggatggagtctgagtttcgcgtgtattctagcgccaacaattgcacatttgagtacgtgagccagcccttcctgatggacctggagggcaagcagggcaatttcaagaacctgagggagttcgtgtttaagaatatcgatggctacttcaagatctacagcaagcacaccccaatcaacctggtgcgcgacctgccacagggattctccgccctggagccactggtggatctgcccatcggcatcaacatcacccggtttcagacactgctggccctgcacagatcctacctgacaccaggcgactcctctagcggatggaccgcaggagctgccgcctactatgtgggctatctgcagccccggaccttcctgctgaagtacaacgagaatggcaccatcacagacgcagtggattgcgccctggaccccctgtctgagataaagtgtacactgaagagctttaccgtggagaagggcatctatcagacaagcaatttcagggtgcagcctaccgagtccatcgtgcgctttcccaatatcacaaacctgtgcccttttggcgaggtgttcaacgccaccagattcgccagcgtgtacgcctggaatcggaagagaatctccaactgcgtggccgactattctgtgctgtacaactccgcctctttcagcacctttaagtgctatggcgtgtctcccacaaagctgaatgatctgtgctttaccaacgtgtacgccgatagcttcgtgatcaggggagacgaagtgagacagatcgcaccaggacagacaggaaagatcgcagactacaattataagctgcctgacgatttcaccggctgcgtgatcgcctggaactccaacaatctggattctaaagtgggcggcaactacaattatctgtacaggctgtttcgcaagtccaatctgaagccattcgagcgggacatctccacagagatctaccaggccggctctaccccctgcaatggcgtggagggctttaactgttatttccctctgcagtcttacggcttccagccaacaaacggcgtgggctatcagccctacagagtggtggtgctgtcctttgagctgctgcacgcaccagcaacagtgtgcggcccaaagaagtctaccaatctggtgaagaacaagtgcgtgaacttcaacttcaacggactgaccggcacaggcgtgctgaccgagagcaataagaagttcctgccttttcagcagttcggcagggacatcgcagataccacagacgccgtgcgcgaccctcagaccctggagatcctggacatcacaccatgcagcttcggcggcgtgtccgtgatcacaccaggcaccaatacatccaaccaggtggccgtgctgtatcaggacgtgaattgtaccgaggtgcccgtggcaatccacgcagatcagctgacccctacatggcgggtgtactctaccggcagcaacgtgttccagacaagagccggatgcctgatcggagcagagcacgtgaacaatagctatgagtgcgacatccctatcggcgccggcatctgtgccagctaccagacccagacaaactccccatctggagcaggctcccaccatcaccatcaccatcaccatcaccactga

SEQ ID NO: 3950 - DNA, 2148 bp, Artificial Sequence
  Description of Artificial Sequence: Synthetic polynucleotide
atgggcatcctgccaagcccaggaatgcccgccctgctgtctctggtgagcctgctgtccgtgctgctgatgggatgcgtggcagagacaggcacacagtgcgtgaacctgaccacaaggacccagctgccccctgcctataccaattctttcacacggggcgtgtactatcccgacaaggtgtttagaagctccgtgctgcactccacacaggatctgtttctgcctttcttttctaacgtgacctggttccacgccatccacgtgtccggcaccaatggcacaaagcggttcgacaatcccgtgctgccttttaacgatggcgtgtacttcgccagcaccgagaagtccaacatcatcagaggctggatctttggcaccacactggactctaagacacagagcctgctgatcgtgaacaatgccaccaacgtggtgatcaaggtgtgcgagttccagttttgtaatgatccattcctgggcgtgtactatcacaagaacaataagtcctggatggagtctgagtttcgcgtgtattctagcgccaacaattgcacatttgagtacgtgagccagcccttcctgatggacctggagggcaagcagggcaatttcaagaacctgagggagttcgtgtttaagaatatcgatggctacttcaagatctacagcaagcacaccccaatcaacctggtgcgcgacctgccacagggattctccgccctggagccactggtggatctgcccatcggcatcaacatcacccggtttcagacactgctggccctgcacagatcctacctgacaccaggcgactcctctagcggatggaccgcaggagctgccgcctactatgtgggctatctgcagccccggaccttcctgctgaagtacaacgagaatggcaccatcacagacgcagtggattgcgccctggaccccctgtctgagacaaagtgtacactgaagagctttaccgtggagaagggcatctatcagacaagcaatttcagggtgcagcctaccgagtccatcgtgcgctttcccaatatcacaaacctgtgcccttttggcgaggtgttcaacgccaccagattcgccagcgtgtacgcctggaatcggaagagaatctccaactgcgtggccgactattctgtgctgtacaactccgcctctttcagcacctttaagtgctatggcgtgtctcccacaaagctgaatgatctgtgctttaccaacgtgtacgccgatagcttcgtgatcaggggagacgaagtgagacagatcgcaccaggacagacaggaaagatcgcagactacaattataagctgcctgacgatttcaccggctgcgtgatcgcctggaactccaacaatctggattctaaagtgggcggcaactacaattatctgtacaggctgtttcgcaagtccaatctgaagccattcgagcgggacatctccacagagatctaccaggccggctctaccccctgcaatggcgtggagggctttaactgttatttccctctgcagtcttacggcttccagccaacaaacggcccgggctatcagccctacagagtggtggtgctgtcctttgagctgctgcacgcaccagcaacagtgtgcggcccaaagaagtctaccaatctggtgaagaacaagtgcgtgaacttcaacttcaacggactgaccggcacaggcgtgctgaccgagagcaataagaagttcctgccttttcagcagttcggcagggacatcgcagataccacagacgccgtgcgcgaccctcagaccctggagatcctggacatcacaccatgcagcttcggcggcgtgtccgtgatcacaccaggcaccaatacatccaaccaggtggccgtgctgtatcaggacgtgaattgtaccgaggtgcccgtggcaatccacgcagatcagctgacccctacatggcgggtgtactctaccggcagcaacgtgttccagacaagagccggatgcctgatcggagcagagcacgtgaacaatagctatgagtgcgacatccctatcggcgccggcatctgtgccagctaccagacccagacaaactccccatctggagcaggctcccaccatcaccatcaccatcaccatcaccactga

SEQ ID NO: 3951 - DNA, 2148 bp, Artificial Sequence
  Description of Artificial Sequence: Synthetic polynucleotide
atgggcatcctgccaagcccaggaatgcccgccctgctgtctctggtgagcctgctgtccgtgctgctgatgggatgcgtggcagagacaggcacacagtgcgtgaacctgaccacaaggacccagctgccccctgcctataccaattctttcacacggggcgtgtactatcccgacaaggtgtttagaagctccgtgctgcactccacacaggatctgtttctgcctttcttttctaacgtgacctggttccacgccatccacgtgtccggcaccaatggcacaaagcggttcgacaatcccgtgctgccttttaacgatggcgtgtacttcgccagcaccgagaagtccaacatcatcagaggctggatctttggcgttacactggactctaagacacagagcctgctgatcgtgaacaatgccaccaacgtggtgatcaaggtgtgcgagttccagttttgtaatgatccattcctgggcgtgtactatcacaagaacaataagtcctggatggagtctgagtttcgcgtgtattctagcgccaacaattgcacatttgagtacgtgagccagcccttcctgatggacctggagggcaagcagggcaatttcaagaacctgagggagttcgtgtttaagaatatcgatggctacttcaagatctacagcaagcacaccccaatcaacctggtgcgcgacctgccacagggattctccgccctggagccactggtggatctgcccatcggcatcaacatcacccggtttcagacactgctggccctgcacagatcctacctgacaccaggcgactcctctagcggatggaccgcaggagctgccgcctactatgtgggctatctgcagccccggaccttcctgctgaagtacaacgagaatggcaccatcacagacgcagtggattgcgccctggaccccctgtctgagacaaagtgtacactgaagagctttaccgtggagaagggcatctatcagacaagcaatttcagggtgcagcctaccgagtccatcgtgcgctttcccaatatcacaaacctgtgcccttttggcgaggtgttcaacgccaccagattcgccagcgtgtacgcctggaatcggaagagaatctccaactgcgtggccgactattctgtgctgtacaactccgcctctttcagcacctttaagtgctatggcgtgtctcccacaaagctgaatgatctgtgctttaccaacgtgtacgccgatagcttcgtgatcaggggagacgaagtgagacagatcgcaccaggacagacaggaaagatcgcagactacaattataagctgcctgacgatttcaccggctgcgtgatcgcctggaactccaacaatctggattctaaagtgggcggcaactacaattatctgtacaggctgtttcgcaagtccaatctgaagccattcgagcgggacatctccacagagatctaccaggccggctctaccccctgcaatggcgtggagggctttaactgttatttccctctgcagtcttacggcttccagccaacaaacggcgtgggctatcagccctacagagtggtggtgctgtcctttgagctgctgcacgcaccagcaacagtgtgcggcccaaagaagtctaccaatctggtgaagaacaagtgcgtgaacttcaacttcaacggactgaccggcacaggcgtgctgaccgagagcaataagaagttcctgccttttcagcagttcggcagggacatcgcagataccacagacgccgtgcgcgaccctcagaccctggagatcctggacatcacaccatgcagcttcggcggcgtgtccgtgatcacaccaggcaccaatacatccaaccaggtggccgtgctgtatcaggacgtgaattgtaccgaggtgcccgtggcaatccacgcagatcagctgacccctacatggcgggtgtactctaccggcagcaacgtgttccagacaagagccggatgcctgatcggagcagagcacgtgaacaatagctatgagtgcgacatccctatcggcgccggcatctgtgccagctaccagacccagacaaactccccatctggagcaggctcccaccatcaccatcaccatcaccatcaccactga

SEQ ID NO: 3952 - DNA, 2148 bp, Artificial Sequence
  Description of Artificial Sequence: Synthetic polynucleotide
atgggcatcctgccaagcccaggaatgcccgccctgctgtctctggtgagcctgctgtccgtgctgctgatgggatgcgtggcagagacaggcacacagtgcgtgaacctgaccacaaggacccagctgccccctgcctataccaattctttcacacggggcgtgtactatcccgacaaggtgtttagaagctccgtgctgcactccacacaggatctgtttctgcctttcttttctaacgtgacctggttccacgccatccacgtgtccggcaccaatggcacaaagcggttcgacaatcccgtgctgccttttaacgatggcgtgtacttcgccagcaccgagaagtccaacatcatcagaggctggatctttggcaccacactggactctaagacacagagcctgctgatcgtgaacaatgccaccaacgtggtgatcaaggtgtgcgagttccagttttgtaatgatccattcctgggcgtgtactatcacaagaacaataagtcctggatggagtctgagtttcgcgtgtattctagcgccaacaattgcacatttgagtacgtgagccagcccttcctgatggacctggagggcaagcagggcaatttcaagaacctgagggagttcgtgtttaagaatatcgatggctacttcaagatctacagcaagcacaccccaatcaacctggtgcgcgacctgccacagggattctccgccctggagccactggtggatctgcccatcggcatcaacatcacccggtttcagacactgctggccctgcacagatcctacctgacaccaggcgactcctctagcggatggaccgcaggagctgccgcctactatgtgggctatctgcagccccggaccttcctgctgaagtacaacgagaatggcaccatcacagacgcagtggattgcgccctggaccccctgtctgagacaaagtgtacactgaagagctttaccgtggagaagggcatctatcagacaagcaatttcagggtgcagcctaccgagtccatcgtgcgctttcccaatatcacaaacctgtgcccttttggcgaggtgttcaacgccaccagattcgccagcgtgtacgcctggaatcggaagagaatctccaactgcgtggccgactattctgtgctgtacaactccgcctctttcagcacctttaagtgctatggcgtgtctcccacaaagctgaatgatctgtgctttaccaacgtgtacgccgatagcttcgtgatcaggggagacgaagtgagacagatcgcaccaggacagacaggaaagatcgcagactacaattataagctgcctgacgatttcaccggctgcgtgatcgcctggaactccaacaatctggattctaaagtgggcggcaactacaattatctgtacaggctgtttcgcaagtccaatctgaagccattcgagcgggacatctccacagagatctaccaggccggctctaccccctgcaatggcgtggagggctttaactgttatttccctctgcagtcttacggcttccagccaacaaacggcgtgggctatcagccctacagagtggtggtgctgtcctttgagctgctggacgcaccagcaacagtgtgcggcccaaagaagtctaccaatctggtgaagaacaagtgcgtgaacttcaacttcaacggactgaccggcacaggcgtgctgaccgagagcaataagaagttcctgccttttcagcagttcggcagggacatcgcagataccacagacgccgtgcgcgaccctcagaccctggagatcctggacatcacaccatgcagcttcggcggcgtgtccgtgatcacaccaggcaccaatacatccaaccaggtggccgtgctgtatcaggacgtgaattgtaccgaggtgcccgtggcaatccacgcagatcagctgacccctacatggcgggtgtactctaccggcagcaacgtgttccagacaagagccggatgcctgatcggagcagagcacgtgaacaatagctatgagtgcgacatccctatcggcgccggcatctgtgccagctaccagacccagacaaactccccatctggagcaggctcccaccatcaccatcaccatcaccatcaccactga

SEQ ID NO: 3953 - DNA, 2148 bp, Artificial Sequence
  Description of Artificial Sequence: Synthetic polynucleotide
atgggcatcctgccaagcccaggaatgcccgccctgctgtctctggtgagcctgctgtccgtgctgctgatgggatgcgtggcagagacaggcacacagtgcgtgaacctgaccacaaggacccagctgccccctgcctataccaattctttcacacggggcgtgtactatcccgacaaggtgtttagaagctccgtgctgcactccacacaggatctgtttctgcctttcttttctaacgtgacctggttccacgccatccacgtgtccggcaccaatggcacaaagcggttcgacaatcccgtgctgccttttaacgatggcgtgtacttcgccagcaccgagaagtccaacatcatcagaggctggatctttggcaccacactggactctaagacacagagcctgctgatcgtgaacaatgccaccaacgtggtgatcaaggtgtgcgagttccagttttgtaatgatccattcctgggcgtgtactatcacaagaacaataagtcctggatggagtctgagtttcgcgtgtattctagcgccaacaattgcacatttgagtacgtgagccagcccttcctgatggacctggagggcaagcagggcaatttcaagaacctgagggagttcgtgtttaagaatatcgatggctacttcaagatctacagcaagcacaccccaatcaacctggtgcgcgacctgccacagggattctccgccctggagccactggtggatctgcccatcggcatcaacatcacccggtttcagacactgctggccctgcacagatcctacctgacaccaggcgactcctctagcggatggaccgcaggagctgccgcctactatgtgggctatctgcagccccggaccttcctgctgaagtacaacgagaatggcaccatcacagacgcagtggattgcgccctggaccccctgtctgagacaaagtgtacactgaagagctttaccgtggagaagggcatctatcagacaagcaatttcagggtgcagcctaccgagtccatcgtgcgctttcccaatatcacaaacctgtgcccttttggcgaggtgttcaacgccaccagattcgccagcgtgtacgcctggaatcggaagagaatctccaactgcgtggccgactattctgtgctgtacaactccgcctctttcagcacctttaagtgctatggcgtgtctcccacaaagctgaatgatctgtgctttaccaacgtgtacgccgatagcttcgtgatcaggggagacgaagtgagacagatcgcaccaggacagacaggaaagatcgcagactacaattataagctgcctgacgatttcaccggctgcgtgatcgcctggaactccaacaatctggattctaaagtgggcggcaactacaattatctgtacaggctgtttcgcaagtccaatctgaagccattcgagcgggacatctccacagagatctaccaggccggctctaccccctgcaatggcgtggagggctttaactgttatttccctctgcagtcttacggcttccagccaacaaacggcgtgggctatcagccctacagagtggtggtgctgtcctttgagctgctgcacgcaccagcaacagtgtgcggcccaaagaagtctaccaatctggtgaagaacaagtgcgtgaacttcaacttcaacggactgaccggcacaggcgtgctgaccgagagcaataagaagttcctgccttttcagcagttcggccttgacatcgcagataccacagacgccgtgcgcgaccctcagaccctggagatcctggacatcacaccatgcagcttcggcggcgtgtccgtgatcacaccaggcaccaatacatccaaccaggtggccgtgctgtatcaggacgtgaattgtaccgaggtgcccgtggcaatccacgcagatcagctgacccctacatggcgggtgtactctaccggcagcaacgtgttccagacaagagccggatgcctgatcggagcagagcacgtgaacaatagctatgagtgcgacatccctatcggcgccggcatctgtgccagctaccagacccagacaaactccccatctggagcaggctcccaccatcaccatcaccatcaccatcaccactga

SEQ ID NO: 3954 - DNA, 2148 bp, Artificial Sequence
  Description of Artificial Sequence: Synthetic polynucleotide
atgggcatcctgccaagcccaggaatgcccgccctgctgtctctggtgagcctgctgtccgtgctgctgatgggatgcgtggcagagacaggcacacagtgcgtgaacctgaccacaaggacccagctgccccctgcctataccaattctttcacacggggcgtgtactatcccgacaaggtgtttagaagctccgtgctgcactccacacaggatctgtttctgcctttcttttctaacgtgacctggttccacgccatccacgtgtccggcaccaatggcacaaagcggttcgacaatcccgtgctgccttttaacgatggcgtgtacttcgccagcaccgagaagtccaacatcatcagaggctggatctttggcaccacactggactctaagacacagagcctgctgatcgtgaacaatgccaccaacgtggtgatcaaggtgtgcgagttccagttttgtaatgatccattcctgggcgtgtactatcacaagaacaataagtcctggatggagtctgagtttcgcgtgtattctagcgccaacaattgcacatttgagtacgtgagccagcccttcctgatggacctggagggcaagcagggcaatttcaagaacctgagggagttcgtgtttaagaatatcgatggctacttcaagatctacagcaagcacaccccaatcaacctggtgcgcgacctgccacagggattctccgccctggagccactggtggatctgcccatcggcatcaacatcacccggtttcagacactgctggccctgcacagatcctacctgacaccaggcgactcctctagcggatggaccgcaggagctgccgcctactatgtgggctatctgcagccccggaccttcctgctgaagtacaacgagaatggcaccatcacagacgcagtggattgcgccctggaccccctgtctgagacaaagtgtacactgaagagctttaccgtggagaagggcatctatcagacaagcaatttcagggtgcagcctaccgagtccatcgtgcgctttcccaatatcacaaacctgtgcccttttggcgaggtgttcaacgccaccagattcgccagcgtgtacgcctggaatcggaagagaatctccaactgcgtggccgactattctgtgctgtacaactccgcctctttcagcacctttaagtgctatggcgtgtctcccacaaagctgaatgatctgtgctttaccaacgtgtacgccgatagcttcgtgatcaggggagacgaagtgagacagatcgcaccaggacagacaggagaaatcgcagactacaattataagctgcctgacgatttcaccggctgcgtgatcgcctggaactccaacaatctggattctaaagtgggcggcaactacaattatctgtacaggctgtttcgcaagtccaatctgaagccattcgagcgggacatctccacagagatctaccaggccggctctaccccctgcaatggcgtggagggctttaactgttatttccctctgcagtcttacggcttccagccaacaaacggcgtgggctatcagccctacagagtggtggtgctgtcctttgagctgctgcacgcaccagcaacagtgtgcggcccaaagaagtctaccaatctggtgaagaacaagtgcgtgaacttcaacttcaacggactgaccggcacaggcgtgctgaccgagagcaataagaagttcctgccttttcagcagttcggcagggacatcgcagataccacagacgccgtgcgcgaccctcagaccctggagatcctggacatcacaccatgcagcttcggcggcgtgtccgtgatcacaccaggcaccaatacatccaaccaggtggccgtgctgtatcaggacgtgaattgtaccgaggtgcccgtggcaatccacgcagatcagctgacccctacatggcgggtgtactctaccggcagcaacgtgttccagacaagagccggatgcctgatcggagcagagcacgtgaacaatagctatgagtgcgacatccctatcggcgccggcatctgtgccagctaccagacccagacaaactccccatctggagcaggctcccaccatcaccatcaccatcaccatcaccactga

SEQ ID NO: 3955 - DNA, 2148 bp, Artificial Sequence
  Description of Artificial Sequence: Synthetic polynucleotide
atgggcatcctgccaagcccaggaatgcccgccctgctgtctctggtgagcctgctgtccgtgctgctgatgggatgcgtggcagagacaggcacacagtgcgtgaacctgaccacaaggacccagctgccccctgcctataccaattctttcacacggggcgtgtactatcccgacaaggtgtttagaagctccgtgctgcactccacacaggatctgtttctgcctttcttttctaacgtgacctggttccacgccatccacgtgtccggcaccaatggcacaaagcggttcgacaatcccgtgctgccttttaacgatggcgtgtacttcgccagcaccgagaagtccaacatcatcagaggctggatctttggcaccacactggactctaagacacagagcctgctgatcgtgaacaatgccaccaacgtggtgatcaaggtgtgcgagttccagtttttcaatgatccattcctgggcgtgtactatcacaagaacaataagtcctggatggagtctgagtttcgcgtgtattctagcgccaacaattgcacatttgagtacgtgagccagcccttcctgatggacctggagggcaagcagggcaatttcaagaacctgagggagttcgtgtttaagaatatcgatggctacttcaagatctacagcaagcacaccccaatcaacctggtgcgcgacctgccacagggattctccgccctggagccactggtggatctgcccatcggcatcaacatcacccggtttcagacactgctggccctgcacagatcctacctgacaccaggcgactcctctagcggatggaccgcaggagctgccgcctactatgtgggctatctgcagccccggaccttcctgctgaagtacaacgagaatggcaccatcacagacgcagtggattgcgccctggaccccctgtctgagacaaagtgtacactgaagagctttaccgtggagaagggcatctatcagacaagcaatttcagggtgcagcctaccgagtccatcgtgcgctttcccaatatcacaaacctgtgcccttttggcgaggtgttcaacgccaccagattcgccagcgtgtacgcctggaatcggaagagaatctccaactgcgtggccgactattctgtgctgtacaactccgcctctttcagcacctttaagtgctatggcgtgtctcccacaaagctgaatgatctgtgctttaccaacgtgtacgccgatagcttcgtgatcaggggagacgaagtgagacagatcgcaccaggacagacaggaaagatcgcagactacaattataagctgcctgacgatttcaccggctgcgtgatcgcctggaactccaacaatctggattctaaagtgggcggcaactacaattatctgtacaggctgtttcgcaagtccaatctgaagccattcgagcgggacatctccacagagatctaccaggccggctctaccccctgcaatggcgtggagggctttaactgttatttccctctgcagtcttacggcttccagccaacaaacggcgtgggctatcagccctacagagtggtggtgctgtcctttgagctgctgcacgcaccagcaacagtgtgcggcccaaagaagtctaccaatctggtgaagaacaagtgcgtgaacttcaacttcaacggactgaccggcacaggcgtgctgaccgagagcaataagaagttcctgccttttcagcagttcggcagggacatcgcagataccacagacgccgtgcgcgaccctcagaccctggagatcctggacatcacaccatgcagcttcggcggcgtgtccgtgatcacaccaggcaccaatacatccaaccaggtggccgtgctgtatcaggacgtgaattgtaccgaggtgcccgtggcaatccacgcagatcagctgacccctacatggcgggtgtactctaccggcagcaacgtgttccagacaagagccggatgcctgatcggagcagagcacgtgaacaatagctatgagtgcgacatccctatcggcgccggcatctgtgccagctaccagacccagacaaactccccatctggagcaggctcccaccatcaccatcaccatcaccatcaccactga

SEQ ID NO: 3956 - DNA, 2148 bp, Artificial Sequence
  Description of Artificial Sequence: Synthetic polynucleotide
atgggcatcctgccaagcccaggaatgcccgccctgctgtctctggtgagcctgctgtccgtgctgctgatgggatgcgtggcagagacaggcacacagtgcgtgaacctgaccacaaggacccagctgccccctgcctataccaattctttcacacggggcgtgtactatcccgacaaggtgtttagaagctccgtgctgcactccacacaggatctgtttctgcctttcttttctaacgtgacctggttccacgccatccacgtgtccggcaccaatggcacaaagcggttcgacaatcccgtgctgccttttaacgatggcgtgtacttcgccagcaccgagaagtccaacatcatcagaggctggatctttggcaccacactggactctaagacacagagcctgctgatcgtgaacaatgccaccaacgtggtgatcaaggtgtgcgagttccagttttgtaatgatccattcctgggcgtgtactatcacaagaacaataagtcctggatggagtctgagtttcgcgtgtattctagcgccaacaattgcacatttgagtacgtgagccagcccttcctgatggacctggagggcaagcagggcaatttcaagaacctgagggagttcgtgtttaagaatatcgatggctacttcaagatctacagcaagcacaccccaatcaacctggtgcgcgacctgccacagggattctccgccctggagccactggtggatctgcccatcggcatcaacatcacccggtttcagacactgctggccctgcacagatcctacctgacaccaggcgactcctctagcggatggaccgcaggagctgccgcctactatgtgggctatctgcagccccggaccttcctgctgaagtacaacgagaatggcaccatcacagacgcagtggattgcgccctggaccccctgtctgagacaaagtgtacactgaagagctttaccgtggagaagggcatctatcagacaagcaatttcagggtgcagcctaccgagtccatcgtgcgctttcccaatatcacaaacctgtgcccttttggcgaggtgttcaacgccaccagattcgccagcagttacgcctggaatcggaagagaatctccaactgcgtggccgactattctgtgctgtacaactccgcctctttcagcacctttaagtgctatggcgtgtctcccacaaagctgaatgatctgtgctttaccaacgtgtacgccgatcgattcgtgatcaggggagacgaagtgagacagatcgcaccaggacagacaggaaagatcgcagactacaattataagctgcctgacgatttcaccggctgcgtgatcgcctggaactccaacaatctggatgcaaaagtgggcggcaactacaattatctgtacaggctgtttcgcaagtccaatctgaagccattcgagcggtttatctccacagagatctaccaggccggctctacccccactaatggcgtggagggctttaactgttatttccctctgcagtcttacgtcttccagccaacaaacggcgtgacttatcagccctacagagtggtggtgctgtcctttgagctgctgcacgcaccacatacagtgtgcggcccaaagaagtctaccaatctggtgaagaacaagtgcgtgaacttcaacttcaacggactgaccggcacaggcgtgctgaccgagagcaataagaagttcctgccttttcagcagttcggcagggacatcgcagataccacagacgccgtgcgcgaccctcagaccctggagatcctggacatcacaccatgcagcttcggcggcgtgtccgtgatcacaccaggcaccaatacatccaaccaggtggccgtgctgtatcaggacgtgaattgtaccgaggtgcccgtggcaatccacgcagatcagctgacccctacatggcgggtgtactctaccggcagcaacgtgttccagacaagagccggatgcctgatcggagcagagcacgtgaacaatagctatgagtgcgacatccctatcggcgccggcatctgtgccagctaccagacccagacaaactccccatctggagcaggctcccaccatcaccatcaccatcaccatcaccactga

SEQ ID NO: 3957 - DNA, 2148 bp, Artificial Sequence
  Description of Artificial Sequence: Synthetic polynucleotide
atgggcatcctgccaagcccaggaatgcccgccctgctgtctctggtgagcctgctgtccgtgctgctgatgggatgcgtggcagagacaggcacacagtgcgtgaacctgaccacaaggacccagctgccccctgcctataccaattctttcacacggggcgtgtactatcccgacaaggtgtttagaagctccgtgctgcactccacacaggatctgtttctgcctttcttttctaacgtgacctggttccacgccatccacgtgtccggcaccaatggcacaaagcggttcgacaatcccgtgctgccttttaacgatggcgtgtacttcgccagcaccgagaagtccaacatcatcagaggctggatctttggcaccacactggacggaaagacacagagcctgctgatcgtgaacaatgccaccaacgtggtgatcaaggtgtgcgagttccagttttgtaatgatccattcctgggcgtgtactatcacaagaacaataagtcctggatggagtctgagtttcgcgtgtattctagcgccaacaattgcacatttgagtacgtgagccagcccttcctgatggacctggagggcaagcagggcaatttcaagaacctgagggagttcgtgtttaagaatatcgatggctacttcaagatctacagcaagcacaccccaatcaacctggtgcgcgacctgccacagggattctccgccctggagccactggtggatctgcccatcggcatcaacatcacccggtttcagacactgctggccctgcacagatcctacctgacaccaggcgactcctctagcggatggaccgcaggagctgccgcctactatgtgggctatctgcagccccggaccttcctgctgaagtacaacgagaatggcaccatcacagacgcagtggattgcgccctggaccccctgtctgagacaaagtgtacactgaagagctttaccgtggagaagggcatctatcagacaagcaatttcagggtgcagcctaccgagtccatcgtgcgctttcccaatatcacaaacctgtgcccttttggcgaggtgttcaacgccaccagattcgccagcgtgtacgcctggaatcggaagagaatctccaactgcgtggccgactattctgtgctgtacaactccgcctctttcagcacctttaagtgctatggcgtgtctcccacaaagctgaatgatctgtgctttaccaacgtgtacgccgatagcttcgtgatcaggggagacgaagtgagacagatcgcaccaggacagacaggaaagatcgcagactacaattataagctgcctgacgatttcaccggctgcgtgatcgcctggaactccaacaatctggattctaaagtgggcggcaactacaattatctgtacaggctgtttcgcaagtccaatctgaagccattcgagcgggacatctccacagagatctaccaggccggctctaccccctgcaatggcgtggagggctttaactgttatttccctctgcagtcttacggcttccagccaacaaacggcgtgggctatcagccctacagagtggtggtgctgtcctttgagctgctgcacgcaccagcaacagtgtgcggcccaaagaagtctaccaatctggtgaagaacaagtgcgtgaacttcaacttcaacggactgaccggcacaggcgtgctgaccgagagcaataagaagttcctgccttttcagcagttcggcagggacatcgcagataccacagacgccgtgcgcgaccctcagaccctggagatcctggacatcacaccatgcagcttcggcggcgtgtccgtgatcacaccaggcaccaatacatccaaccaggtggccgtgctgtatcaggacgtgaattgtaccgaggtgcccgtggcaatccacgcagatcagctgacccctacatggcgggtgtactctaccggcagcaacgtgttccagacaagagccggatgcctgatcggagcagagcacgtgaacaatagctatgagtgcgacatccctatcggcgccggcatctgtgccagctaccagacccagacaaactccccatctggagcaggctcccaccatcaccatcaccatcaccatcaccactga

SEQ ID NO: 3958 - DNA, 2148 bp, Artificial Sequence
  Description of Artificial Sequence: Synthetic polynucleotide
atgggcatcctgccaagcccaggaatgcccgccctgctgtctctggtgagcctgctgtccgtgctgctgatgggatgcgtggcagagacaggcacacagtgcgtgaacctgaccacaaggacccagctgccccctgcctataccaattctttcacacggggcgtgtactatcccgacaaggtgtttagaagctccgtgctgcactccacacaggatctgtttctgcctttcttttctaacgtgacctggttccacgccatccacgtgtccggcaccaatggcacaaagcggttcgacaatcccgtgctgccttttaacgatggcgtgtacttcgccagcaccgagaagtccaacatcatcagaggctggatctttggcaccacactggactctaagacacagagcctgctgatcgtgaacaatgccaccaacgtggtgatcaaggtgtgcgagttccagttttgtaatgatccattcctgggcgtgtactatcacaagaacaataagtcctggatggagtctgagtttcgcgtgtattctagcgccaacaattgcacatttgagtacgtgagccagcccttcctgatggacctggagggcaagcagggcaatttcaagaacctgagggagttcgtgtttaagaatatcgatggctacttcaagatctacagcaagcacaccccaatcaacctggtgcgcgacctgccacagggattctccgccctggagccactggtggatctgcccatcggcatcaacatcacccggtttcagacactgctggccctgcacagatcctacctgacaccaggcgactcctctagcggatggaccgcaggagctgccgcctactatgtgggctatctgcagccccggaccttcctgctgaagtacaacgagaatggcaccatcacagacgcagtggattgcgccctggaccccctgtctgagacaaagtgtacactgaagagctttaccgtggagaagggcatctatcagacaagcaatttcagggtgcagcctaccgagtccatcgtgcgctttcccaatatcacaaacctgtgcccttttggcgaggtgttcaacgccaccagattcgccagcgtgtacgcctggaatcggaagagaatctccaactgcgtggccgactattctgtgctgtacaactccgcctctttcagcacctttaagtgctatggcgtgtctcccacaaagctgaatgatctgtgctttaccaacgtgtacgccgatagcttcgtgatcaggggagacgaagtgagacagatcgcaccaggacagacaggaaagatcgcagactacaattataagctgcctgacgatttcaccggctgcgtgatcgcctggaactccaacaatctggattctaaagtgggcggcaactacaattatctgtacaggctgtttcgcaagtccaatctgaagccattcgagcgggacatctccacagagatctaccaggccggctctaccccctgcaatggcgtggagggctttaactgttatttccctctgcagtcttacggcttccagccaacaaacggcgtgggctatcagccctacagagtggtggtgctgtcctttgagctgctgcacgcaccagcaacagtgtgcggcccaaagaagtctaccaatctggtgaagaacaagtgcgtgaacttcaacttcaacggactgaccggcacaggcgtgctgaccgagagcaataagaagttcctgccttttcagcagttcggcagggacatcgcagataccacagacgccgtgcgcgaccctcagaccctggagatcctggacatcacaccatgcagcttcggcggcgtgtccgtgatcacaccaggcaccaatacatccaaccaggtggccgtgctgtatcaggacgtgaattgtaccgaggtgcccgtggcaatccacgcagatcagctgacccctacatggcgggattactctaccggcagcaacgtgttccagacaagagccggatgcctgatcggagcagagcacgtgaacaatagctatgagtgcgacatccctatcggcgccggcatctgtgccagctaccagacccagacaaactccccatctggagcaggctcccaccatcaccatcaccatcaccatcaccactga

SEQ ID NO: 3959 - DNA, 2148 bp, Artificial Sequence
  Description of Artificial Sequence: Synthetic polynucleotide
atgggcatcctgccaagcccaggaatgcccgccctgctgtctctggtgagcctgctgtccgtgctgctgatgggatgcgtggcagagacaggcacacagtgcgtgaacctgaccacaaggacccagctgccccctgcctataccaattctttcacacggggcgtgtactatcccgacaaggtgtttagaagctccgtgctgcactccacacaggatctgtttctgcctttcttttctaacgtgacctggttccacgccatccacgtgtccggcaccaatggcacaaagcggttcgacaatcccgtgctgccttttaacgatggcgtgtacttcgccagcaccgagaagtccaacatcatcagaggctggatctttggcaccacactggactctaagacacagagcctgctgatcgtgaacaatgccaccaacgtggtgatcaaggtgtgcgagttccagttttgtaatgatccattcctgggcgtgtactatcacaagaacaataagtcctggatggagtctgagtttcgcgtgtattctagcgccaacaattgcacatttgagtacgtgagccagcccttcctgatggacctggagggcaagcagggcaatttcaagaacctgagggagttcgtgtttaagaatatcgatggctacttcaagatctacagcaagcacaccccaatcaacctggtgcgcgacctgccacagggattctccgccctggagccactggtggatctgcccatcggcatcaacatcacccggtttcagacactgctggccctgcacagatcctacctgacaccaggcgactcctctagcggatggaccgcaggagctgccgcctactatgtgggctatctgcagccccggaccttcctgctgaagtacaacgagaatggcaccatcacagacgcagtggattgcgccctggaccccctgtctgagacaaagtgtacactgaagagctttaccgtggagaagggcatctatcagacaagcaatttcagggtgcagcctaccgagtccatcgtgcgctttcccaatatcacaaacctgtgcccttttggcgaggtgttcaacgccaccagattcgccagcgtgtacgcctggaatcggaagagaatctccaactgcgtggccgactattctgtgctgtacaactccgcctctttcagcacctttaagtgctatggcgtgtctcccacaaagctgaatgatctgtgctttaccaacgtgtacgccgatagcttcgtgatcaggggagacgaagtgagacagatcgcaccaggacagacaggaaagatcgcagactacaattataagctgcctgacgatttcaccggctgcgtgatcgcctggaactccaacaatctggattctaaagtgggcggcaactacaattatctgtacaggctgtttcgcaagtccaatctgaagccattcgagcgggacatctccacagagatctaccaggccggctctaccccctgcaatggcgtggagggctttaactgttatttccctctgcagtcttacggcttccagccaacaaacggcgtgggctatcagccctacagagtggtggtgctgtcctttgagctgctgcacgcaccagcaacagtgtgcggcccaaagaagtctaccaatctggtgaagaacaagtgcgtgaacttcaacttcaacggactgaccggcacaggcgtgctgaccgagagcaataagaagttcctgccttttcagcagttcggcagggacgatgcagataccacagacgccgtgcgcgaccctcagaccctggagatcctggacatcacaccatgcagcttcggcggcgtgtccgtgatcacaccaggcaccaatacatccaaccaggtggccgtgctgtatcaggacgtgaattgtaccgaggtgcccgtggcaatccacgcagatcagctgacccctacatggcgggtgtactctaccggcagcaacgtgttccagacaagagccggatgcctgatcggagcagagcacgtgaacaatagctatgagtgcgacatccctatcggcgccggcatctgtgccagctaccagacccagacaaactccccatctggagcaggctcccaccatcaccatcaccatcaccatcaccactga

SEQ ID NO: 3960 - DNA, 2148 bp, Artificial Sequence
  Description of Artificial Sequence: Synthetic polynucleotide
atgggcatcctgccaagcccaggaatgcccgccctgctgtctctggtgagcctgctgtccgtgctgctgatgggatgcgtggcagagacaggcacacagtgcgtgaacctgaccacaaggacccagctgccccctgcctataccaattctttcacacggggcgtgtactatcccgacaaggtgtttagaagctccgtgctgcactccacacaggatctgtttctgcctttcttttctaacgtgacctggttccacgccatccacgtgtccggcaccaatggcacaaagcggttcgacaatcccgtgctgccttttaacgatggcgtgtacttcgccagcaccgagaagtccaacatcatcagaggctggatctttggcaccacactggactctaagacacagagcctgctgatcgtgaacaatgccaccaacgtggtgatcaaggtgtgcgagttccagtttcataatgatccattcctgggcgtgtactatcacaagaacaataagtcctggatggagtctgagtttcgcgtgtattctagcgccaacaattgcacatttgagtacgtgagccagcccttcctgatggacctggagggcaagcagggcaatttcaagaacctgagggagttcgtgtttaagaatatcgatggctacttcaagatctacagcaagcacaccccaatcaacctggtgcgcgacctgccacagggattctccgccctggagccactggtggatctgcccatcggcatcaacatcacccggtttcagacactgctggccctgcacagatcctacctgacaccaggcgactcctctagcggatggaccgcaggagctgccgcctactatgtgggctatctgcagccccggaccttcctgctgaagtacaacgagaatggcaccatcacagacgcagtggattgcgccctggaccccctgtctgagacaaagtgtacactgaagagctttaccgtggagaagggcatctatcagacaagcaatttcagggtgcagcctaccgagtccatcgtgcgctttcccaatatcacaaacctgtgcccttttggcgaggtgttcaacgccaccagattcgccagcgtgtacgcctggaatcggaagagaatctccaactgcgtggccgactattctgtgctgtacaactccgcctctttcagcacctttaagtgctatggcgtgtctcccacaaagctgaatgatctgtgctttaccaacgtgtacgccgatagcttcgtgatcaggggagacgaagtgagacagatcgcaccaggacagacaggaaagatcgcagactacaattataagctgcctgacgatttcaccggctgcgtgatcgcctggaactccaacaatctggattctaaagtgggcggcaactacaattatctgtacaggctgtttcgcaagtccaatctgaagccattcgagcgggacatctccacagagatctaccaggccggctctaccccctgcaatggcgtggagggctttaactgttatttccctctgcagtcttacggcttccagccaacaaacggcgtgggctatcagccctacagagtggtggtgctgtcctttgagctgctgcacgcaccagcaacagtgtgcggcccaaagaagtctaccaatctggtgaagaacaagtgcgtgaacttcaacttcaacggactgaccggcacaggcgtgctgaccgagagcaataagaagttcctgccttttcagcagttcggcagggacatcgcagataccacagacgccgtgcgcgaccctcagaccctggagatcctggacatcacaccatgcagcttcggcggcgtgtccgtgatcacaccaggcaccaatacatccaaccaggtggccgtgctgtatcaggacgtgaattgtaccgaggtgcccgtggcaatccacgcagatcagctgacccctacatggcgggtgtactctaccggcagcaacgtgttccagacaagagccggatgcctgatcggagcagagcacgtgaacaatagctatgagtgcgacatccctatcggcgccggcatctgtgccagctaccagacccagacaaactccccatctggagcaggctcccaccatcaccatcaccatcaccatcaccactga

SEQ ID NO: 3961 - DNA, 2148 bp, Artificial Sequence
  Description of Artificial Sequence: Synthetic polynucleotide
atgggcatcctgccaagcccaggaatgcccgccctgctgtctctggtgagcctgctgtccgtgctgctgatgggatgcgtggcagagacaggcacacagtgcgtgaacctgaccacaaggacccagctgccccctgcctataccaattctttcacacggggcgtgtactatcccgacaaggtgtttagaagctccgtgctgcactccacacaggatctgtttctgcctttcttttctaacgtgacctggttccacgccatccacgtgtccggcaccaatggcacaaagcggttcgacaatcccgtgctgccttttaacgatggcgtgtacttcgccagcaccgagaagtccaacatcatcagaggctggatctttggcaccacactggactctaagacacagagcctgctgatcgtgaacaatgccaccaacgtggtgatcaaggtgtgcgagttccagttttgtaatgatccattcctgggcgtgtactatcacaagaacaataagtcctggatggagtctgagtttcgcaaatattctagcgccaacaattgcacatttgagtacgtgagccagcccttcctgatggacctggagggcaagcagggcaatttcaagaacctgagggagttcgtgtttaagaatatcgatggctacttcaagatctacagcaagcacaccccaatcaacctggtgcgcgacctgccacagggattctccgccctggagccactggtggatctgcccatcggcatcaacatcacccggtttcagacactgctggccctgcacagatcctacctgacaccaggcgactcctctagcggatggaccgcaggagctgccgcctactatgtgggctatctgcagccccggaccttcctgctgaagtacaacgagaatggcaccatcacagacgcagtggattgcgccctggaccccctgtctgagacaaagtgtacactgaagagctttaccgtggagaagggcatctatcagacaagcaatttcagggtgcagcctaccgagtccatcgtgcgctttcccaatatcacaaacctgtgcccttttggcgaggtgttcaacgccaccagattcgccagcgtgtacgcctggaatcggaagagaatctccaactgcgtggccgactattctgtgctgtacaactccgcctctttcagcacctttaagtgctatggcgtgtctcccacaaagctgaatgatctgtgctttaccaacgtgtacgccgatagcttcgtgatcaggggagacgaagtgagacagatcgcaccaggacagacaggaaagatcgcagactacaattataagctgcctgacgatttcaccggctgcgtgatcgcctggaactccaacaatctggattctaaagtgggcggcaactacaattatctgtacaggctgtttcgcaagtccaatctgaagccattcgagcgggacatctccacagagatctaccaggccggctctaccccctgcaatggcgtggagggctttaactgttatttccctctgcagtcttacggcttccagccaacaaacggcgtgggctatcagccctacagagtggtggtgctgtcctttgagctgctgcacgcaccagcaacagtgtgcggcccaaagaagtctaccaatctggtgaagaacaagtgcgtgaacttcaacttcaacggactgaccggcacaggcgtgctgaccgagagcaataagaagttcctgccttttcagcagttcggcagggacatcgcagataccacagacgccgtgcgcgaccctcagaccctggagatcctggacatcacaccatgcagcttcggcggcgtgtccgtgatcacaccaggcaccaatacatccaaccaggtggccgtgctgtatcaggacgtgaattgtaccgaggtgcccgtggcaatccacgcagatcagctgacccctacatggcgggtgtactctaccggcagcaacgtgttccagacaagagccggatgcctgatcggagcagagcacgtgaacaatagctatgagtgcgacatccctatcggcgccggcatctgtgccagctaccagacccagacaaactccccatctggagcaggctcccaccatcaccatcaccatcaccatcaccactga

SEQ ID NO: 3962 - DNA, 2148 bp, Artificial Sequence
  Description of Artificial Sequence: Synthetic polynucleotide
atgggcatcctgccaagcccaggaatgcccgccctgctgtctctggtgagcctgctgtccgtgctgctgatgggatgcgtggcagagacaggcacacagtgcgtgaacctgaccacaaggacccagctgccccctgcctataccaattctttcacacggggcgtgtactatcccgacaaggtgtttagaagctccgtgctgcactccacacaggatctgtttctgcctttcttttctaacgtgacctggttccacgccatccacgtgtccggcaccaatggcacaaagcggttcgacaatcccgtgctgccttttaacgatggcgtgtacttcgccagcaccgagaagtccaacatcatcagaggctggatctttggcaccacactggactctaagacacagagcctgctgatcgtgaacaatgccaccaacgtggtgatcaaggtgtgcgagttccagttttgtaatgatccattcctgggcgtgtactatcacaagaacaataagtcctggatggagtctgagtttcgcgtgtattctagcgccaacaattgcacatttgagtacgtgagccagcccttcctgtcagacctggagggcaagcagggcaatttcaagaacctgagggagttcgtgtttaagaatatcgatggctacttcaagatctacagcaagcacaccccaatcaacctggtgcgcgacctgccacagggattctccgccctggagccactggtggatctgcccatcggcatcaacatcacccggtttcagacactgctggccctgcacagatcctacctgacaccaggcgactcctctagcggatggaccgcaggagctgccgcctactatgtgggctatctgcagccccggaccttcctgctgaagtacaacgagaatggcaccatcacagacgcagtggattgcgccctggaccccctgtctgagacaaagtgtacactgaagagctttaccgtggagaagggcatctatcagacaagcaatttcagggtgcagcctaccgagtccatcgtgcgctttcccaatatcacaaacctgtgcccttttggcgaggtgttcaacgccaccagattcgccagcgtgtacgcctggaatcggaagagaatctccaactgcgtggccgactattctgtgctgtacaactccgcctctttcagcacctttaagtgctatggcgtgtctcccacaaagctgaatgatctgtgctttaccaacgtgtacgccgatagcttcgtgatcaggggagacgaagtgagacagatcgcaccaggacagacaggaaagatcgcagactacaattataagctgcctgacgatttcaccggctgcgtgatcgcctggaactccaacaatctggattctaaagtgggcggcaactacaattatctgtacaggctgtttcgcaagtccaatctgaagccattcgagcgggacatctccacagagatctaccaggccggctctaccccctgcaatggcgtggagggctttaactgttatttccctctgcagtcttacggcttccagccaacaaacggcgtgggctatcagccctacagagtggtggtgctgtcctttgagctgctgcacgcaccagcaacagtgtgcggcccaaagaagtctaccaatctggtgaagaacaagtgcgtgaacttcaacttcaacggactgaccggcacaggcgtgctgaccgagagcaataagaagttcctgccttttcagcagttcggcagggacatcgcagataccacagacgccgtgcgcgaccctcagaccctggagatcctggacatcacaccatgcagcttcggcggcgtgtccgtgatcacaccaggcaccaatacatccaaccaggtggccgtgctgtatcaggacgtgaattgtaccgaggtgcccgtggcaatccacgcagatcagctgacccctacatggcgggtgtactctaccggcagcaacgtgttccagacaagagccggatgcctgatcggagcagagcacgtgaacaatagctatgagtgcgacatccctatcggcgccggcatctgtgccagctaccagacccagacaaactccccatctggagcaggctcccaccatcaccatcaccatcaccatcaccactga

SEQ ID NO: 3963 - DNA, 2148 bp, Artificial Sequence
  Description of Artificial Sequence: Synthetic polynucleotide
atgggcatcctgccaagcccaggaatgcccgccctgctgtctctggtgagcctgctgtccgtgctgctgatgggatgcgtggcagagacaggcacacagtgcgtgaacctgaccacaaggacccagctgccccctgcctataccaattctttcacacggggcgtgtactatcccgacaaggtgtttagaagctccgtgctgcactccacacaggatctgtttctgcctttcttttctaacgtgacctggttccacgccgaacacgtgtccggcaccaatggcacaaagcggttcgacaatcccgtgctgccttttaacgatggcgtgtacttcgccagcaccgagaagtccaacatcatcagaggctggatctttggcaccacactggactctaagacacagagcctgctgatcgtgaacaatgccaccaacgtggtgatcaaggtgtgcgagttccagttttgtaatgatccattcctgggcgtgtactatcacaagaacaataagtcctggatggagtctgagtttcgcgtgtattctagcgccaacaattgcacatttgagtaccatagccagcccttcctgatggacctggagggcaagcagggcaatttcaagaacctgagggagttcgtgtttaagaatatcgatggctacttcaagatctacagcaagcacaccccaatcaacctggtgcgcgacctgccacagggattctccgccctggagccactggtggatctgcccatcggcatcaacatcacccggtttcagacactgctggccctgcacagatcctacctgacaccaggcgactcctctagcggagaaaccgcaggagctgccgcctactatgtgggctatctgcagccccggaccttcctgctgaagtacaacgagaatggcaccatcacagacgcagtggattgcgccctggaccccctgtctgagacaaagtgtacactgaagagctttaccgtggagaagggcatctatcagacaagcaatttcagggtgcagcctaccgagtccatcgtgcgctttcccaatatcacaaacccttgcccttttggcgaggtgttcaacgccaccagattcgccagcgtgtacgcctggaatcggaagagaatctccaactgcgtggccgactattctgtgctgtacaactccgcctctttcagcacctttaagtgctatggcgtgtctcccacaaagctgaatgatctgtgctttaccaacgtgtacgccgatagcttcgtgatcaggggagacgaagtgagacagatcgcaccaggacagacaggaaagatcgcagactacaattataagctgcctgacgatttcaccggctgcgtgatcgcctggaactccaacaatctggattctaaagtgggcggcaactacaattatctgtacaggctgtttcgcaagtccaatctgaagccattcgagcgggacatctccacagagatctaccaggccggctctaccccctgcaatggcgtggagggctttaactgttatttccctctgcagtcttacggcttccagccaacaaacggcccgggctatcagccctacagagtggtggtgctgtcctttgagctgctgcacgcaccagcaacagtgtgcggcccaaagaagtctaccaatctggtgaagaacaagtgcgtgaacttcaacttcaacggactgaccggcacaggcgtgctgaccgagagcaataagaagttcctgccttttcagcagttcggcagggacatcgcagataccacagacgccgtgcgcgaccctcagaccctggagatcctggacatcacaccatgcagcttcggcggcgtgtccgtgatcacaccaggcaccaatacatccaaccaggtggccgtgctgtatcaggacgtgaattgtaccgaggtgcccgacgcaatccacgcagatcagctgacccctacatggcgggtgtactctaccggcagcaacgtgttccagacaagagccggatgcctgatcggagcagagcacgtgaacaatagctatgagtgcgacatccctatcggcgccggcatctgtgccagctaccagacccagacaaactccccatctggagcaggctcccaccatcaccatcaccatcaccatcaccactga

SEQ ID NO: 3964 - DNA, 2148 bp, Artificial Sequence
  Description of Artificial Sequence: Synthetic polynucleotide
atgggcatcctgccaagcccaggaatgcccgccctgctgtctctggtgagcctgctgtccgtgctgctgatgggatgcgtggcagagacaggcacacagtgcgtgaacctgaccacaaggacccagctgccccctgcctataccaattctttcacacggggcgtgtactatcccgacaaggtgtttagaagctccgtgctgcactccacacaggatctgtttctgcctttcttttctaacgtgacctggttccacgccatccacgtgtccggcaccaatggcacaaagcggttcgacaatcccgtgctgccttttaacgatggcgtgtacttcgccagcaccgagaagtccaacatcatcagaggctggatctttggcaccacactggactctaagacacagagcctgctgatcgtgaacaatgccaccaacgtggtgatcaaggtgtgcgagttccagttttgtaatgatccattcctgggcgtgtactatcacaagaacaataagtcctggatggagtctgagtttcgcgtgtattctagcgccaacaattgcacatttgagtacgtgagccagcccttcctgatggacctggagggcaagcagggcaatttcaagaacctgagggagttcgtgtttaagaatatcgatggctacttcaagatctacagcaagcacaccccaatcaacctggtgcgcgacctgccacagggattctccgccctggagccactggtggatctgcccatcggcatcaacatcacccggtttcagacactgctggccctgcacagatcctacctgacaccagaagactcctctagcggatggaccgcaggagctgccgcctactatgtgggctatctgcagccccggaccttcctgctgaagtacaacgagaatggcaccatcacagacgcagtggattgcgccctggaccccctgtctgagacaaagtgtacactgaagagctttaccgtggagaagggcatctatcagacaagcaatttcagggtgcagcctaccgagtccatcgtgcgctttcccaatatcacaaacctgtgcccttttggcgaggtgttcaacgccaccagattcgccagcgtgtacgcctggaatcggaagagaatctccaactgcgtggccgactattctgtgctgtacaactccgcctctttcagcacctttaagtgctatggcgtgtctcccacaaagctgaatgatctgtgctttaccaacgtgtacgccgatagcttcgtgatcaggggagacgaagtgagacagatcgcaccaggacagacaggaaagatcgcagactacaattataagctgcctgacgatttcaccggctgcgtgatcgcctggaactccaacaatctggattctaaagtgggcggcaactacaattatctgtacaggctgtttcgcaagtccaatctgaagccattcgagcgggacatctccacagagatctaccaggccggctctaccccctgcaatggcgtggagggctttaactgttatttccctctgcagtcttacggcttccagccaacaaacggcgtgggctatcagccctacagagtggtggtgctgtcctttgagctgctgcacgcaccagcaacagtgtgcggcccaaagaagtctaccaatctggtgaagaacaagtgcgtgaacttcaacttcaacggactgaccggcacaggcgtgctgaccgagagcaataagaagttcctgccttttcagcagttcggcagggacatcgcagataccacagacgccgtgcgcgaccctcagaccctggagatcctggacatcacaccatgcagcttcggcggcgtgtccgtgatcacaccaggcaccaatacatccaaccaggtggccgtgctgtatcaggacgtgaattgtaccgaggtgcccgtggcaatccacgcagatcagctgacccctacatggcgggtgtactctaccggcagcaacgtgttccagacaagagccggatgcctgatcggagcagagcacgtgaacaatagctatgagtgcgacatccctatcggcgccggcatctgtgccagctaccagacccagacaaactccccatctggagcaggctcccaccatcaccatcaccatcaccatcaccactga

SEQ ID NO: 3965 - DNA, 2148 bp, Artificial Sequence
  Description of Artificial Sequence: Synthetic polynucleotide
atgggcatcctgccaagcccaggaatgcccgccctgctgtctctggtgagcctgctgtccgtgctgctgatgggatgcgtggcagagacaggcacacagtgcgtgaacctgaccacaaggacccagctgccccctgcctataccaattctttcacacggggcgtgtactatcccgacaaggtgtttagaagctccgtgctgcactccacacaggatctgtttctgcctttcttttctaacgtgacctggttccacgccatccacgtgtccggcaccaatggcacaaagcggttcgacaatcccgtgctgccttttaacgatggcgtgtacttcgccagcaccgagaagtccaacatcatcagaggctggatctttggcaccacactggactctaagacacagagcctgctgatcgtgaacaatgccaccaacgtggtgatcaaggtgtgcgagttccagttttgtaatgatccattcctgggcgtgtactatcacaagaacaataagtcctggatggagtctgagtttcgcgtgtattctagcgccaacaattgcacatttgagtacgtgagccagcccttcctgatggacctggagggcaagcagggcaatttcaagaacctgagggagttcgtgtttaagaatatcgatggctacttcaagatctacagcaagcacaccccaatcaacctggtgcgcgacctgccacagggattctccgccctggagccactggtggatctgcccatcggcatcaacatcacccggtttcagacactgctggccctgcacagatcctacctgacaccaggcgactcctctagcggatggaccgcaggagctgccgcctactatgtgggctatctgcagccccggaccttcctgctgaagtacaacgagaatggcaccatcacagacgcagtggattgcgccctggaccccctgtctgagacaaagtgtacactgaagagctttaccgtggagaagggcatctatcagacaagcaatttcagggtgcagcctaccgagtccatcgtgcgctttcccaatatcacaaacctgtgcccttttggcgaggtgttcaacgccaccagattcgccagcgtgtacgcctggaatcggaagagaatctccaactgcgtggccgactattctgtgctgtacaactccgcctctttcagcacctttaagtgctatggcgtgtctcccacaaagctgaatgatctgtgctttaccaacgtgtacgccgatagcttcgtgatcaggggagacgaagtgagacagatcgcaccaggacagacaggaaagatcgcagactacaattataagctgcctgacgatttcaccggctgcgtgatcgcctggaactccaacaatctggattctaaagtgggcggcaactacaattatctgtacaggctgtttcgcaagtccaatctgaagccattcgagcgggacatctccacagagatctaccaggccggctctaccccctgcaatggcgtggagggctttaactgttatttccctctgcagtcttacggcttccagccaacaaacggcgtgggcgatcagccctacagagtggtggtgctgtcctttgagctgctgcacgcaccagcaacagtgtgcggcccaaagaagtctaccaatctggtgaagaacaagtgcgtgaacttcaacttcaacggactgaccggcacaggcgtgctgaccgagagcaataagaagttcctgccttttcagcagttcggcagggacatcgcagataccacagacgccgtgcgcgaccctcagaccctggagatcctggacatcacaccatgcagcttcggcggcgtgtccgtgatcacaccaggcaccaatacatccaaccaggtggccgtgctgtatcaggacgtgaattgtaccgaggtgcccgtggcaatccacgcagatcagctgacccctacatggcgggtgtactctaccggcagcaacgtgttccagacaagagccggatgcctgatcggagcagagcacgtgaacaatagctatgagtgcgacatccctatcggcgccggcatctgtgccagctaccagacccagacaaactccccatctggagcaggctcccaccatcaccatcaccatcaccatcaccactga

SEQ ID NO: 3966 - DNA, 2148 bp, Artificial Sequence
  Description of Artificial Sequence: Synthetic polynucleotide
atgggcatcctgccaagcccaggaatgcccgccctgctgtctctggtgagcctgctgtccgtgctgctgatgggatgcgtggcagagacaggcacacagtgcgtgaacctgaccacaaggacccagctgccccctgcctataccaattctttcacacggggcgtgtactatcccgacaaggtgtttagaagctccgtgctgcactccacacaggatctgtttctgcctttcttttctaacgtgacctggttccacgccatccacgtgtccggcaccaatggcacaaagcggttcgacaatcccgtgctgccttttaacgatggcgtgtacttcgccagcaccgagaagtccaacatcatcagaggctggatctttggcaccacactggactctaagacacagagcctgctgatcgtgaacaatgccaccaacgtggtgatcaaggtgtgcttcttccagttttgtaatgatccattcctgggcgtgtactatcacaagaacaataagtcctggatggagtctgagtttcgcgtgtattctagcgccaacaattgcacatttgagtacgtgagccagcccttcctgatggacctggagggcaagcagggcaatttcaagaacctgagggagttcgtgtttaagaatatcgatggctacttcaagatctacagcaagcacaccccaatcaacctggtgcgcgacctgccacagggattctccgccctggagccactggtggatctgcccatcggcatcaacatcacccggtttcagacactgctggccctgcacagatcctacctgacaccaggcgactcctctagcggatggaccgcaggagctgccgcctactatgtgggctatctgcagccccggaccttcctgctgaagtacaacgagaatggcaccatcacagacgcagtggattgcgccctggaccccctgtctgagacaaagtgtacactgaagagctttaccgtggagaagggcatctatcagacaagcaatttcagggtgcagcctaccgagtccatcgtgcgctttcccaatatcacaaacctgtgcccttttggcgaggtgttcaacgccaccagattcgccagcgtgtacgcctggaatcggaagagaatctccaactgcgtggccgactattctgtgctgtacaactccgcctctttcagcacctttaagtgctatggcgtgtctcccacaaagctgaatgatctgtgctttaccaacgtgtacgccgatagcttcgtgatcaggggagacgaagtgagacagatcgcaccaggacagacaggaaagatcgcagactacaattataagctgcctgacgatttcaccggctgcgtgatcgcctggaactccaacaatctggattctaaagtgggcggcaactacaattatctgtacaggctgtttcgcaagtccaatctgaagccattcgagcgggacatctccacagagatctaccaggccggctctaccccctgcaatggcgtggagggctttaactgttatttccctctgcagtcttacggcttccagccaacaaacggcgtgggctatcagccctacagagtggtggtgctgtcctttgagctgctgcacgcaccagcaacagtgtgcggcccaaagaagtctaccaatctggtgaagaacaagtgcgtgaacttcaacttcaacggactgaccggcacaggcgtgctgaccgagagcaataagaagttcctgccttttcagcagttcggcagggacatcgcagataccacagacgccgtgcgcgaccctcagaccctggagatcctggacatcacaccatgcagcttcggcggcgtgtccgtgatcacaccaggcaccaatacatccaaccaggtggccgtgctgtatcaggacgtgaattgtaccgaggtgcccgtggcaatccacgcagatcagctgacccctacatggcgggtgtactctaccggcagcaacgtgttccagacaagagccggatgcctgatcggagcagagcacgtgaacaatagctatgagtgcgacatccctatcggcgccggcatctgtgccagctaccagacccagacaaactccccatctggagcaggctcccaccatcaccatcaccatcaccatcaccactga

SEQ ID NO: 3967 - DNA, 2148 bp, Artificial Sequence
  Description of Artificial Sequence: Synthetic polynucleotide
atgggcatcctgccaagcccaggaatgcccgccctgctgtctctggtgagcctgctgtccgtgctgctgatgggatgcgtggcagagacaggcacacagtgcgtgaacctgaccacaaggacccagctgccccctgcctataccaattctttcacacggggcgtgtactatcccgacaaggtgtttagaagctccgtgctgcactccacacaggatctgtttctgcctttcttttctaacgtgacctggttccacgccatccacgtgtccggcaccaatggcacaaagcggttcgacaatcccgtgctgccttttaacgatggcgtgtacttcgccagcaccgagaagtccaacatcatcagaggctggatctttggcaccacactggactctaagacacagagcctgctgatcgtgaacaatgccaccaacgtggtgatcaaggtgtgcgagttccagttttgtaatgatccattcctgggcgtgtactatcacaagaacaataagtcctggatggagtctgagtttcgcgtgtattctagcgccaacaattgcacatttgagtacgtgagccagcccttcctgatggacctggagggcaagcagggcaatttcaagaacctgagggagttcgtgtttaagaatatcgatggctacttcaagatctacagcaagcacaccccaatcaacctggtgcgcgacctgccacagggattctccgccctggagccactggtggatctgcccatcggcatcaacatcacccggtttcagacactgctggccctgcacagatcctacctgacaccaggcgactcctctagcggatggaccgcaggagctgccgcctactatgtgggctatctgcagccccggaccttcctgctgaagtacaacgagaatggcaccatcacagacgcagtggattgcgccctggaccccctgtctgagacaaagtgtacactgaagagctttaccgtggagaagggcatctatcagacaagcaatttcagggtgcagcctaccgagtccatcgtgcgctttcccaatatcacaaacctgtgcccttttggcgaggtgttcaacgccaccagattcgccagcgtgtacgcctggaatcggaagagaatctccaactgcgtggccgactattctgtgctgtacaactccgcctctttcagcacctttaagtgctatggcgtgtctcccacaaagctgaatgatctgtgctttaccaacgtgtacgccgatagcttcgtgatcaggggagacgaagtgagacagatcgcaccaggacagacaggaaagatcgcagactacaattataagctgcctgacgatttcaccggctgcgtgatcgcctggaactccaacaatctggattctaaagtgggcggcaactacaattatctgtacaggctgtttcgcaagtccaatctgaagccattcgagcgggacatctcccgagagatctaccaggccggctctaccccctgcaatggcgtggagggctttaactgttatttccctctgcagtcttacggcttccagccaacaaacggcgtgggctatcagccctacagagtggtggtgctgtcctttgagctgctgcacgcaccagcaacagtgtgcggcccaaagaagtctaccaatctggtgaagaacaagtgcgtgaacttcaacttcaacggactgaccggcacaggcgtgctgaccgagagcaataagaagttcctgccttttcagcagttcggcagggacatcgcagataccacagacgccgtgcgcgaccctcagaccctggagatcctggacatcacaccatgcagcttcggcggcgtgtccgtgatcacaccaggcaccaatacatccaaccaggtggccgtgctgtatcaggacgtgaattgtaccgaggtgcccgtggcaatccacgcagatcagctgacccctacatggcgggtgtactctaccggcagcaacgtgttccagacaagagccggatgcctgatcggagcagagcacgtgaacaatagctatgagtgcgacatccctatcggcgccggcatctgtgccagctaccagacccagacaaactccccatctggagcaggctcccaccatcaccatcaccatcaccatcaccactga

SEQ ID NO: 3968 - DNA, 2148 bp, Artificial Sequence
  Description of Artificial Sequence: Synthetic polynucleotide
atgggcatcctgccaagcccaggaatgcccgccctgctgtctctggtgagcctgctgtccgtgctgctgatgggatgcgtggcagagacaggcacacagtgcgtgaacctgaccacaaggacccagctgccccctgcctataccaattctttcacacggggcgtgtactatcccgacaaggtgtttagaagctccgtgctgcactccacacaggatctgtttctgcctttcttttctaacgtgacctggttccacgccgaacacgtgtccggcaccaatggcacaaagcggttcgacaatcccgtgctgccttttaacgatggcgtgtacttcgccagcaccgagaagtccaacatcatcagaggctggatctttggcaccacactggactctaagacacagagcctgctgatcgtgaacaatgccaccaacgtggtgatcaaggtgtgcgagttccagttttgtaatgatccattcctgggcgtgtactatcacaagaacaataagtcctggatggagtctgagtttcgcgtgtattctagcgccaacaattgcacatttgagtaccatagccagcccttcctgatggacctggagggcaagcagggcaatttcaagaacctgagggagttcgtgtttaagaatatcgatggctacttcaagatctacagcaagcacaccccaatcaacctggtgcgcgacctgccacagggattctccgccctggagccactggtggatctgcccatcggcatcaacatcacccggtttcagacactgctggccctgcacagatcctacctgacaccaggcgactcctctagcggagaaaccgcaggagctgccgcctactatgtgggctatctgcagccccggaccttcctgctgaagtacaacgagaatggcaccatcacagacgcagtggattgcgccctggaccccctgtctgagacaaagtgtacactgaagagctttaccgtggagaagggcatctatcagacaagcaatttcagggtgcagcctaccgagtccatcgtgcgctttcccaatatcacaaaccattgcccttttggcgaggtgttcaacgccaccagattcgccagcgtgtacgcctggaatcggaagagaatctccaactgcgtggccgactattctgtgctgtacaactccgcctctttcagcacctttaagtgctatggcgtgtctcccacaaagctgaatgatctgtgctttaccaacgtgtacgccgatagcttcgtgatcaggggagacgaagtgagacagatcgcaccaggacagacaggaaagatcgcagactacaattataagctgcctgacgatttcaccggctgcgtgatcgcctggaactccaacaatctggattctaaagtgggcggcaactacaattatctgtacaggctgtttcgcaagtccaatctgaagccattcgagcgggacatctccacagagatctaccaggccggctctaccccctgcaatggcgtggagggctttaactgttatttccctctgcagtcttacggcttccagccaacaaacggcccgggccaacagccctacagagtggtggtgctgtcctttgagctgctgcacgcaccagcaacagtgtgcggcccaaagaagtctaccaatctggtgaagaacaagtgcgtgaacttcaacttcaacggactgaccggcacaggcgtgctgaccgagagcaataagaagttcctgccttttcagcagttcggcagggacatcgcagataccacagacgccgtgcgcgaccctcagaccctggagatcctggacatcacaccatgcagcttcggcggcgtgtccgtgatcacaccaggcaccaatacatccaaccaggtggccgtgctgtatcaggacgtgaattgtaccgaggtgcccgtggcaatccacgcagatcagctgacccctacatggcgggtgtactctaccggcagcaacgtgttccagacaagagccggatgcctgatcggagcagagcacgtgaacaatagctatgagtgcgacatccctatcggcgccggcatctgtgccagctaccagacccagacaaactccccatctggagcaggctcccaccatcaccatcaccatcaccatcaccactga

SEQ ID NO: 3969 - DNA, 2148 bp, Artificial Sequence
  Description of Artificial Sequence: Synthetic polynucleotide
atgggcatcctgccaagcccaggaatgcccgccctgctgtctctggtgagcctgctgtccgtgctgctgatgggatgcgtggcagagacaggcacacagtgcgtgaacctgaccacaaggacccagctgccccctgcctataccaattctttcacacggggcgtgtactatcccgacaaggtgtttagaagctccgtgctgcactccacacaggatctgtttctgcctttcttttctaacgtgacctggttccacgccatccacgtgtccggcaccaatggcacaaagcggttcgacaatcccgtgctgccttttaacgatggcgtgtacttcgccagcaccgagaagtccaacatcatcagaggctggatctttggcaccacactggactctaagacacagagcctgctgatcgtgaacaatgccaccaacgtggtgatcaaggtgtgcgagttccagttttgtaatgatccattcctgggcgtgtactatcacaagaacaataagtcctggatggagtctgagtttcgcgtgtattctagcgccaacaattgcacatttgagtacgtgagccagcccttcctgatggacctggagggcaagcagggcaatttcaagaacctgagggagttcgtgtttaagaatatcgatggctacttcaagatctacagcaagcacaccccaatcaacctggtgcgcgacctgccacagggattctccgccctggagccactggtggatctgcccatcggcatcaacatcacccggtttcagacactgctggccctgcacagatcctacctgacaccaggcgactcctctagcggatggaccgcaggagctgccgcctactatgtgggctatctgcagccccggaccttcctgctgaagtacaacgagaatggcaccatcacagacgcagtggattgcgccctggaccccctgtctgagacaaagtgtacactgaagagctttaccgtggagaagggcatctatcagacaagcaatttcagggtgcagcctaccgagtccatcgtgcgctttcccaatatcacaaacctgtgcccttttggcgaggtgttcaacgccaccagattcgccagcgtgtacgcctggaatcggaagagaatctccaactgcgtggccgactattctgtgctgtacaactccgcctctttcagcacctttaagtgctatggcgtgtctcccacaaagctgaatgatctgtgctttaccaacgtgtacgccgatagcttcgtgatcaggggagacgaagtgagacagatcgcaccaggacagacaggaaagatcgcagactacaattataagctgcctgacgatttcaccggctgcgtgatcgcctggaactccaacaatctggattctaaagtgggcggcaactacaattatctgtacaggctgtttcgcaagtccaatctgaagccattcgagcgggacatctccgtcgagatctaccaggccggctctaccccctgcaatggcgtggagggctttaactgttatttccctctgcagtcttacggcttccagccaacaaacggcgtgggctatcagccctacagagtggtggtgctgtcctttgagctgctgcacgcaccagcaacagtgtgcggcccaaagaagtctaccaatctggtgaagaacaagtgcgtgaacttcaacttcaacggactgaccggcacaggcgtgctgaccgagagcaataagaagttcctgccttttcagcagttcggcagggacatcgcagataccacagacgccgtgcgcgaccctcagaccctggagatcctggacatcacaccatgcagcttcggcggcgtgtccgtgatcacaccaggcaccaatacatccaaccaggtggccgtgctgtatcaggacgtgaattgtaccgaggtgcccgtggcaatccacgcagatcagctgacccctacatggcgggtgtactctaccggcagcaacgtgttccagacaagagccggatgcctgatcggagcagagcacgtgaacaatagctatgagtgcgacatccctatcggcgccggcatctgtgccagctaccagacccagacaaactccccatctggagcaggctcccaccatcaccatcaccatcaccatcaccactga

SEQ ID NO: 3970 - DNA, 2148 bp, Artificial Sequence
  Description of Artificial Sequence: Synthetic polynucleotide
atgggcatcctgccaagcccaggaatgcccgccctgctgtctctggtgagcctgctgtccgtgctgctgatgggatgcgtggcagagacaggcacacagtgcgtgaacctgaccacaaggacccagctgccccctgcctataccaattctttcacacggggcgtgtactatcccgacaaggtgtttagaagctccgtgctgcactccacacaggatctgtttctgcctttcttttctaacgtgacctggttccacgccatccacgtgtccggcaccaatggcacaaagcggttcgacaatcccgtgctgccttttaacgatggcgtgtacttcgccagcaccgagaagtccaacatcatcagaggctggatctttggcaccacactggactctaagacacagagcctgctgatcgtgaacaatgccaccaacgtggtgatcaaggtgtgcgagttccagttttgtaatgatccattcctgggcgtgtactatcacaagaacaataagtcctggatggagtctgagtttcgcgtgtattctagcgccaacaattgcacatttgagtacgtgagccagcccttcctgatggacctggagggcaagcagggcaatttcaagaacctgagggagttcgtgtttaagaatatcgatggctacttcaagatctacagcaagcacaccccaatcaacctggtgcgcgacctgccacagggattctccgccctggagccactggtggatctgcccatcggcatcaacatcacccggtttcagacactgctggccctgcacagatcctacctgacaccaggcgactcctctagcggatggaccgcaggagctgccgcctactatgtgggctatctgcagccccggaccttcctgctgaagtacaacgagaatggcaccatcacagacgcagtggattgcgccctggaccccctgtctgagacaaagtgtacactgaagagctttaccgtggagaagggcatctatcagacaagcaatttcagggtgcagcctaccgagtccatcgtgcgctttcccaatatcacaaacctgtgcccttttggcgaggtgttcaacgccaccagattcgccagcgtgtacgcctggaatcggaagagaatctccaactgcgtggccgactattctgtgctgtacaactccgcctctttcagcacctttaagtgctatggcgtgtctcccacaaagctgaatgatctgtgctttaccaacgtgtacgccgatagcttcgtgatcaggggagacgaagtgagacagatcgcaccaggacagacaggaaagatcgcagactacaattataagctgcctgacgatttcaccggctgcgtgatcgcctggaactccaacaatctggattctaaagtgggcggcaactacaattatctgtacaggctgtttcgcaagtccaatctgaagccattcgagcgggacatctccacagagatctaccaggccggctctaccccctgcaatggcgtggagggctttaactgttatttccctctgcagtcttacggcttccagccaacaaacggcgtgggctatcagccctacagagtggtggtgctgtcctttgagctgctgcacgcaccagcaacagtgtgcggcccacgtaagtctaccaatctggtgaagaacaagtgcgtgaacttcaacttcaacggactgaccggcacaggcgtgctgaccgagagcaataagaagttcctgccttttcagcagttcggcagggacatcgcagataccacagacgccgtgcgcgaccctcagaccctggagatcctggacatcacaccatgcagcttcggcggcgtgtccgtgatcacaccaggcaccaatacatccaaccaggtggccgtgctgtatcaggacgtgaattgtaccgaggtgcccgtggcaatccacgcagatcagctgacccctacatggcgggtgtactctaccggcagcaacgtgttccagacaagagccggatgcctgatcggagcagagcacgtgaacaatagctatgagtgcgacatccctatcggcgccggcatctgtgccagctaccagacccagacaaactccccatctggagcaggctcccaccatcaccatcaccatcaccatcaccactga

SEQ ID NO: 3971 - DNA, 2148 bp, Artificial Sequence
  Description of Artificial Sequence: Synthetic polynucleotide
atgggcatcctgccaagcccaggaatgcccgccctgctgtctctggtgagcctgctgtccgtgctgctgatgggatgcgtggcagagacaggcacacagtgcgtgaacctgaccacaaggacccagctgccccctgcctataccaattctttcacacggggcgtgtactatcccgacaaggtgtttagaagctccgtgctgcactccacacaggatctgtttctgcctttcttttctaacgtgacctggttccacgcctggcacgtgtccggcaccaatggcacaaagcggttcgacaatcccgtgctgccttttaacgatggcgtgtacttcgccagcaccgagaagtccaacatcatcagaggctggatctttggcaccacactggactctaagacacagagcctgctgatcgtgaacaatgccaccaacgtggtgatcaaggtgtgcgagttccagttttgtaatgatccattcctgggcgtgtactatcacaagaacaataagtcctggatggagtctgagtttcgcgtgtattctagcgccaacaattgcacatttgagtacgtgagccagcccttcctgatggacctggagggcaagcagggcaatttcaagaacctgagggagttcgtgtttaagaatatcgatggctacttcaagatctacagcaagcacaccccaatcaacctggtgcgcgacctgccacagggattctccgccctggagccactggtggatctgcccatcggcatcaacatcacccggtttcagacactgctggccctgcacagatcctacctgacaccaggcgactcctctagcggatggaccgcaggagctgccgcctactatgtgggctatctgcagccccggaccttcctgctgaagtacaacgagaatggcaccatcacagacgcagtggattgcgccctggaccccctgtctgagacaaagtgtacactgaagagctttaccgtggagaagggcatctatcagacaagcaatttcagggtgcagcctaccgagtccatcgtgcgctttcccaatatcacaaacctgtgcccttttggcgaggtgttcaacgccaccagattcgccagcgtgtacgcctggaatcggaagagaatctccaactgcgtggccgactattctgtgctgtacaactccgcctctttcagcacctttaagtgctatggcgtgtctcccacaaagctgaatgatctgtgctttaccaacgtgtacgccgatagcttcgtgatcaggggagacgaagtgagacagatcgcaccaggacagacaggaaagatcgcagactacaattataagctgcctgacgatttcaccggctgcgtgatcgcctggaactccaacaatctggattctaaagtgggcggcaactacaattatctgtacaggctgtttcgcaagtccaatctgaagccattcgagcgggacatctccacagagatctaccaggccggctctaccccctgcaatggcgtggagggctttaactgttatttccctctgcagtcttacggcttccagccaacaaacggcgtgggctatcagccctacagagtggtggtgctgtcctttgagctgctgcacgcaccagcaacagtgtgcggcccaaagaagtctaccaatctggtgaagaacaagtgcgtgaacttcaacttcaacggactgaccggcacaggcgtgctgaccgagagcaataagaagttcctgccttttcagcagttcggcagggacatcgcagataccacagacgccgtgcgcgaccctcagaccctggagatcctggacatcacaccatgcagcttcggcggcgtgtccgtgatcacaccaggcaccaatacatccaaccaggtggccgtgctgtatcaggacgtgaattgtaccgaggtgcccgtggcaatccacgcagatcagctgacccctacatggcgggtgtactctaccggcagcaacgtgttccagacaagagccggatgcctgatcggagcagagcacgtgaacaatagctatgagtgcgacatccctatcggcgccggcatctgtgccagctaccagacccagacaaactccccatctggagcaggctcccaccatcaccatcaccatcaccatcaccactga

SEQ ID NO: 3972 - DNA, 2148 bp, Artificial Sequence
  Description of Artificial Sequence: Synthetic polynucleotide
atgggcatcctgccaagcccaggaatgcccgccctgctgtctctggtgagcctgctgtccgtgctgctgatgggatgcgtggcagagacaggcacacagtgcgtgaacctgaccacaaggacccagctgccccctgcctataccaattctttcacacggggcgtgtactatcccgacaaggtgtttagaagctccgtgctgcactccacacaggatctgtttctgcctttcttttctaacgtgacctggttccacgcctaccacgtgtccggcaccaatggcacaaagcggttcgacaatcccgtgctgccttttaacgatggcgtgtacttcgccagcaccgagaagtccaacatcatcagaggctggatctttggcaccacactggactctaagacacagagcctgctgatcgtgaacaatgccaccaacgtggtgatcaaggtgtgcgagttccagttttgtaatgatccattcctgggcgtgtactatcacaagaacaataagtcctggatggagtctgagtttcgcgtgtattctagcgccaacaattgcacatttgagtaccatagccagcccttcctgatggacctggagggcaagcagggcaatttcaagaacctgagggagttcgtgtttaagaatatcgatggctacttcaagatctacagcaagcacaccccaatcaacctggtgcgcgacctgccacagggattctccgccctggagccactggtggatctgcccatcggcatcaacatcacccggtttcagacactgctggccctgcacagatcctacctgacaccaggcgactcctctagcggagaaaccgcaggagctgccgcctactatgtgggctatctgcagccccggaccttcctgctgaagtacaacgagaatggcaccatcacagacgcagtggattgcgccctggaccccctgtctgagacaaagtgtacactgaagagctttaccgtggagaagggcatctatcagacaagcaatttcagggtgcagcctaccgagtccatcgtgcgctttcccaatatcacaaaccattgcccttttggcgaggtgttcaacgccaccagattcgccagcgtgtacgcctggaatcggaagagaatctccaactgcgtggccgactattctgtgctgtacaactccgcctctttcagcacctttaagtgctatggcgtgtctcccacaaagctgaatgatctgtgctttaccaacgtgtacgccgatagcttcgtgatcaggggagacgaagtgagacagatcgcaccaggacagacaggaaagatcgcagactacaattataagctgcctgacgatttcaccggctgcgtgatcgcctggaactccaacaatctggattctaaagtgggcggcaactacaattatctgtacaggctgtttcgcaagtccaatctgaagccattcgagcgggacatctccacagagatctaccaggccggctctaccccctgcaatggcgtggagggctttaactgttatttccctctgcagtcttacggcttccagccaacaaacggcccgggctatcagccctacagagtggtggtgctgtcctttgagctgctgcacgcaccagcaacagtgtgcggcccaaagaagtctaccaatctggtgaagaacaagtgcgtgaacttcaacttcaacggactgaccggcacaggcgtgctgaccgagagcaataagaagttcctgccttttcagcagttcggcagggacatcgcagataccacagacgccgtgcgcgaccctcagaccctggagatcctggacatcacaccatgcagcttcggcggcgtgtccgtgatcacaccaggcaccaatacatccaaccaggtggccgtgctgtatcaggacgtgaattgtaccgaggtgcccgatgcaatccacgcagatcagctgacccctacatggcgggtgtactctaccggcagcaacgtgttccagacaagagccggatgcctgatcggagcagagcacgtgaacaatagctatgagtgcgacatccctatcggcgccggcatctgtgccagctaccagacccagacaaactccccatctggagcaggctcccaccatcaccatcaccatcaccatcaccactga

SEQ ID NO: 3973 - DNA, 2148 bp, Artificial Sequence
  Description of Artificial Sequence: Synthetic polynucleotide
atgggcatcctgccaagcccaggaatgcccgccctgctgtctctggtgagcctgctgtccgtgctgctgatgggatgcgtggcagagacaggcacacagtgcgtgaacctgaccacaaggacccagctgccccctgcctataccaattctttcacacggggcgtgtactatcccgacaaggtgtttagaagctccgtgctgcactccacacaggatctgtttctgcctttcttttctaacgtgacctggttccacgccatccacgtgtccggcaccaatggcacaaagcggttcgacaatcccgtgctgccttttaacgatggcgtgtacttcgccagcaccgagaagtccaacatcatcagaggctggatctttggcaccacactggactctaagacacagagcctgctgatcgtgaacaatgccaccaacgtggtgatcaaggtgtgcgagttccagttttgtaatgatccattcctgggcgtgtactatcacaagaacaataagtcctggatggagtctgagtttcgcgtgtattctagcgccaacaattgcacatttgagtacgtgagccagcccttcctgatggacctggagggcaagcagggcaatttcaagaacctgagggagttcgtgtttaagaatatcgatggctacttcaagatctacagcaagcacaccccaatcaacctggtgcgcgacctgccacagggattctccgccctggagccactggtggatctgcccatcggcatcaacatcacccggtttcagacactgctggccctgcacagatcctacctgacaccaggcgactcctctagcggatggaccgcaggagctgccgcctactatgtgggctatctgcagccccggaccttcctgctgaagtacaacgagaatggcaccatcacagacgcagtggattgcgccctggaccccctgtctgagacaaagtgtacactgaagagctttaccgtggagaagggcatctatcagacaagcaatttcagggtgcagcctaccgagtccatcgtgcgctttcccaatatcacaaacctgtgccctttgggcgaggtgttcaacgccaccagattcgccagcgtgtacgcctggaatcggaagagaatctccaactgcgtggccgactattctgtgctgtacaactccgcctctttcagcacctttaagtgctatggcgtgtctcccacaaagctgaatgatctgtgctttaccaacgtgtacgccgatagcttcgtgatcaggggagacgaagtgagacagatcgcaccaggacagacaggaaagatcgcagactacaattataagctgcctgacgatttcaccggctgcgtgatcgcctggaactccaacaatctggattctaaagtgggcggcaactacaattatctgtacaggctgtttcgcaagtccaatctgaagccattcgagcgggacatctccacagagatctaccaggccggctctaccccctgcaatggcgtggagggctttaactgttatttccctctgcagtcttacggcttccagccaacaaacggcgtgggctatcagccctacagagtggtggtgctgtcctttgagctgctgcacgcaccagcaacagtgtgcggcccaaagaagtctaccaatctggtgaagaacaagtgcgtgaacttcaacttcaacggactgaccggcacaggcgtgctgaccgagagcaataagaagttcctgccttttcagcagttcggcagggacatcgcagataccacagacgccgtgcgcgaccctcagaccctggagatcctggacatcacaccatgcagcttcggcggcgtgtccgtgatcacaccaggcaccaatacatccaaccaggtggccgtgctgtatcaggacgtgaattgtaccgaggtgcccgtggcaatccacgcagatcagctgacccctacatggcgggtgtactctaccggcagcaacgtgttccagacaagagccggatgcctgatcggagcagagcacgtgaacaatagctatgagtgcgacatccctatcggcgccggcatctgtgccagctaccagacccagacaaactccccatctggagcaggctcccaccatcaccatcaccatcaccatcaccactga

SEQ ID NO: 3974 - DNA, 2148 bp, Artificial Sequence
  Description of Artificial Sequence: Synthetic polynucleotide
atgggcatcctgccaagcccaggaatgcccgccctgctgtctctggtgagcctgctgtccgtgctgctgatgggatgcgtggcagagacaggcacacagtgcgtgaacctgaccacaaggacccagctgccccctgcctataccaattctttcacacggggcgtgtactatcccgacaaggtgtttagaagctccgtgctgcactccacacaggatctgtttctgcctttcttttctaacgtgacctggttccacgccatccacgtgtccggcaccaatggcacaaagcggttcgacaatcccgtgctgccttttaacgatggcgtgtacttcgccagcaccgagaagtccaacatcatcagaggctggatctttggcaccacactggactctaagacacagagcctgctgatcgtgaacaatgccaccaacgtggtgatcaaggtgtgcgagttccagttttgtaatgatccattcctgggcgtgtactatcacaagaacaataagtcctggatggagtctgagtttcgcgtgtattctagcgccaacaattgcacatttgagtacgtgagccagcccttcctgatggacctggagggcaagcagggcaatttcaagaacctgagggagttcgtgtttaagaatatcgatggctacttcaagatctacagcaagcacaccccaatcaacctggtgcgcgacctgccacagggattctccgccctggagccactggtggatctgcccatcggcatcaacatcacccggtttcagacactgctggccctgcacagatcctacctgacaccaggcgactcctctagcggatggaccgcaggagctgccgcctactatgtgggctatctgcagccccggaccttcctgctgaagtacaacgagaatggcaccatcacagacgcagtggattgcgccctggaccccctgtctgagacaaagtgtacactgaagagctttaccgtggagaagggcatctatcagacaagcaatttcagggtgcagcctaccgagtccatcgtgcgctttcccaatatcacaaacctgtgcccttttggcgaggtgttcaacgccaccagattcgccagcgtgtacgcctggaatcggaagagaatctccaactgcgtggccgactattctgtgctgtacaactccgcctctttcagcacctttaagtgctatggcgtgtctcccacaaagctgaatgatctgtgctttaccaacgtgtacgccgatagcttcgtgatcaggggagacgaagtgagacagatcgcaccaggacagacaggaaagatcgcagactacaattataagctgcctgacgatttcaccggctgcgtgatcgcctggaactccaacaatctggattctaaagtgggcggcaactacaattatctgtacaggctgtttcgcaagtccaatctgaagccattcgagcgggacatctccacagagatctaccaggccggctctaccccctgcaatggcgtggagggctttaactgttatttccctctgcagtcttacggcttccagccaacaaacggcgtgggctatcagccctacagagtggtggtgctgtcctttgagctgctgcacgcaccagcaacagtgtgcggcccaaagaagtctaccaatctggtgaagaacaagtgcgtgaacttcaacttcaacggactgaccggcacaggcgtgctgaccgagagcaataagaagttcctgccttttcagcagttcggcagggacatcgcagataccacagacgccgtgcgcgaccctcagaccctggagatcctggacatcacaccatgcagcttcggcggcgtgtccgtgatcacaccaggcaccaatacatccaaccaggtggccgtgctgtatcaggacgtgaattgtaccgaggtgcccgtggcaatccacgcagatcagctgacccctacatggcgggtgtactctaccggcagcaacgtgttccagacaagagccggatgcctgatcggagcagagtttgtgaacaatagctatgagtgcgacatccctatcggcgccggcatctgtgccagctaccagacccagacaaactccccatctggagcaggctcccaccatcaccatcaccatcaccatcaccactga

SEQ ID NO: 3975 - DNA, 2148 bp, Artificial Sequence
  Description of Artificial Sequence: Synthetic polynucleotide
atgggcatcctgccaagcccaggaatgcccgccctgctgtctctggtgagcctgctgtccgtgctgctgatgggatgcgtggcagagacaggcacacagtgcgtgaacctgaccacaaggacccagctgccccctgcctataccaattctttcacacggggcgtgtactatcccgacaaggtgtttagaagctccgtgctgcactccacacaggatctgtttctgcctttcttttctaacgtgacctggttccacgccatccacgtgaaaggcaccaatggcacaaagcggttcgacaatcccgtgctgccttttaacgatggcgtgtacttcgccagcaccgagaagtccaacatcatcagaggctggatctttggcaccacactggactctaagacacagagcctgctgatcgtgaacaatgccaccaacgtggtgatcaaggtgtgcgagttccagttttgtaatgatccattcctgggcgtgtactatcacaagaacaataagtcctggatggagtctgagtttcgcgtgtattctagcgccaacaattgcacatttgagtacgtgagccagcccttcctgatggacctggagggcaagcagggcaatttcaagaacctgagggagttcgtgtttaagaatatcgatggctacttcaagatctacagcaagcacaccccaatcaacctggtgcgcgacctgccacagggattctccgccctggagccactggtggatctgcccatcggcatcaacatcacccggtttcagacactgctggccctgcacagatcctacctgacaccaggcgactcctctagcggatggaccgcaggagctgccgcctactatgtgggctatctgcagccccggaccttcctgctgaagtacaacgagaatggcaccatcacagacgcagtggattgcgccctggaccccctgtctgagacaaagtgtacactgaagagctttaccgtggagaagggcatctatcagacaagcaatttcagggtgcagcctaccgagtccatcgtgcgctttcccaatatcacaaacctgtgcccttttggcgaggtgttcaacgccaccagattcgccagcgtgtacgcctggaatcggaagagaatctccaactgcgtggccgactattctgtgctgtacaactccgcctctttcagcacctttaagtgctatggcgtgtctcccacaaagctgaatgatctgtgctttaccaacgtgtacgccgatagcttcgtgatcaggggagacgaagtgagacagatcgcaccaggacagacaggaaagatcgcagactacaattataagctgcctgacgatttcaccggctgcgtgatcgcctggaactccaacaatctggattctaaagtgggcggcaactacaattatctgtacaggctgtttcgcaagtccaatctgaagccattcgagcgggacatctccacagagatctaccaggccggctctaccccctgcaatggcgtggagggctttaactgttatttccctctgcagtcttacggcttccagccaacaaacggcgtgggctatcagccctacagagtggtggtgctgtcctttgagctgctgcacgcaccagcaacagtgtgcggcccaaagaagtctaccaatctggtgaagaacaagtgcgtgaacttcaacttcaacggactgaccggcacaggcgtgctgaccgagagcaataagaagttcctgccttttcagcagttcggcagggacatcgcagataccacagacgccgtgcgcgaccctcagaccctggagatcctggacatcacaccatgcagcttcggcggcgtgtccgtgatcacaccaggcaccaatacatccaaccaggtggccgtgctgtatcaggacgtgaattgtaccgaggtgcccgtggcaatccacgcagatcagctgacccctacatggcgggtgtactctaccggcagcaacgtgttccagacaagagccggatgcctgatcggagcagagcacgtgaacaatagctatgagtgcgacatccctatcggcgccggcatctgtgccagctaccagacccagacaaactccccatctggagcaggctcccaccatcaccatcaccatcaccatcaccactga

SEQ ID NO: 3976 - DNA, 2148 bp, Artificial Sequence
  Description of Artificial Sequence: Synthetic polynucleotide
atgggcatcctgccaagcccaggaatgcccgccctgctgtctctggtgagcctgctgtccgtgctgctgatgggatgcgtggcagagacaggcacacagtgcgtgaacctgaccacaaggacccagctgccccctgcctataccaattctttcacacggggcgtgtactatcccgacaaggtgtttagaagctccgtgctgcactccacacaggatctgtttctgcctttcttttctaacgtgacctggttccacgccgagcacgtgtccggcaccaatggcacaaagcggttcgacaatcccgtgctgccttttaacgatggcgtgtacttcgccagcaccgagaagtccaacatcatcagaggctggatctttggcaccacactggactctaagacacagagcctgctgatcgtgaacaatgccaccaacgtggtgatcaaggtgtgcgagttccagttttgtaatgatccattcctgggcgtgtactatcacaagaacaataagtcctggatggagtctgagtttcgcgtgtattctagcgccaacaattgcacatttgagtacgtgagccagcccttcctgatggacctggagggcaagcagggcaatttcaagaacctgagggagttcgtgtttaagaatatcgatggctacttcaagatctacagcaagcacaccccaatcaacctggtgcgcgacctgccacagggattctccgccctggagccactggtggatctgcccatcggcatcaacatcacccggtttcagacactgctggccctgcacagatcctacctgacaccaggcgactcctctagcggatggaccgcaggagctgccgcctactatgtgggctatctgcagccccggaccttcctgctgaagtacaacgagaatggcaccatcacagacgcagtggattgcgccctggaccccctgtctgagacaaagtgtacactgaagagctttaccgtggagaagggcatctatcagacaagcaatttcagggtgcagcctaccgagtccatcgtgcgctttcccaatatcacaaacctgtgcccttttggcgaggtgttcaacgccaccagattcgccagcgtgtacgcctggaatcggaagagaatctccaactgcgtggccgactattctgtgctgtacaactccgcctctttcagcacctttaagtgctatggcgtgtctcccacaaagctgaatgatctgtgctttaccaacgtgtacgccgatagcttcgtgatcaggggagacgaagtgagacagatcgcaccaggacagacaggaaagatcgcagactacaattataagctgcctgacgatttcaccggctgcgtgatcgcctggaactccaacaatctggattctaaagtgggcggcaactacaattatctgtacaggctgtttcgcaagtccaatctgaagccattcgagcgggacatctccacagagatctaccaggccggctctaccccctgcaatggcgtggagggctttaactgttatttccctctgcagtcttacggcttccagccaacaaacggcgtgggctatcagccctacagagtggtggtgctgtcctttgagctgctgcacgcaccagcaacagtgtgcggcccaaagaagtctaccaatctggtgaagaacaagtgcgtgaacttcaacttcaacggactgaccggcacaggcgtgctgaccgagagcaataagaagttcctgccttttcagcagttcggcagggacatcgcagataccacagacgccgtgcgcgaccctcagaccctggagatcctggacatcacaccatgcagcttcggcggcgtgtccgtgatcacaccaggcaccaatacatccaaccaggtggccgtgctgtatcaggacgtgaattgtaccgaggtgcccgtggcaatccacgcagatcagctgacccctacatggcgggtgtactctaccggcagcaacgtgttccagacaagagccggatgcctgatcggagcagagcacgtgaacaatagctatgagtgcgacatccctatcggcgccggcatctgtgccagctaccagacccagacaaactccccatctggagcaggctcccaccatcaccatcaccatcaccatcaccactga

SEQ ID NO: 3977 - DNA, 2148 bp, Artificial Sequence
  Description of Artificial Sequence: Synthetic polynucleotide
atgggcatcctgccaagcccaggaatgcccgccctgctgtctctggtgagcctgctgtccgtgctgctgatgggatgcgtggcagagacaggcacacagtgcgtgaacctgaccacaaggacccagctgccccctgcctataccaattctttcacacggggcgtgtactatcccgacaaggtgtttagaagctccgtgctgcactccacacaggatctgtttctgcctttcttttctaacgtgacctggttccacgccatccacgtgtccggcaccaatggcacaaagcggttcgacaatcccgtgctgccttttaacgatggcgtgtacttcgccagcaccgagaagtccaacatcatcagaggctggatctttggcaccacactggactctaagacacagagcctgctgatcgtgaacaatgccaccaacgtggtgatcaaggtgtgcgagttccagttttgtaatgatccattcctgggcgtgtactatcacaagaacaataagtcctggatggagtctgagtttcgcgtgtattctagcgccaacaattgcacatttgagtacgtgagccagcccttcctgatggacctggagggcaagcagggcaatttcaagaacctgagggagttcgtgtttaagaatatcgatggctacttcaagatctacagcaagcacaccccaatcaacctggtgcgcgacctgccacagggattctccgccctggagccactggtggatctgcccatcggcatcaacatcacccggtttcagacactgctggccctgcacagatcctacctgacaccaggcgactcctctagcggatggaccgcaggagctgccgcctactatgtgggctatctgcagccccggaccttcctgctgaagtacaacgagaatggcaccatcacagacgcagtggattgcgccctggaccccctgtctgagacaaagtgtacactgaagagctttaccgtggagaagggcatctatcagacaagcaatttcagggtgcagcctaccgagtccatcgtgcgctttcccaatatcacaaacctgtgcccttttggcgaggtgttcaacgccaccagattcgccagcgtgtacgcctggaatcggaagagaatctccaactgcgtggccgactattctgtgctgtacaactccgcctctttcagcacctttaagtgctatggcgtgtctcccacaaagctgaatgatctgtgctttaccaacgtgtacgccgatagcttcgtgatcaggggagacgaagtgagacagatcgcaccaggacagacaggaaagatcgcagactacaattataagctgcctgacgatttcaccggctgcgtgatcgcctggaactccaacaatctggattctaaagtgggcggcaactacaattatctgtacaggctgtttcgcaagtccaatctgaagccattcgagcgggacatctccacagagatctaccaggccggctctaccccctgcaatggcgtggagggctttaactgttatttccctctgcagtcttacggcttccagccaacaaacggcgtgggctatcagccctacagagtggtggtgctgtcctttgagctgctgcttgcaccagcaacagtgtgcggcccaaagaagtctaccaatctggtgaagaacaagtgcgtgaacttcaacttcaacggactgaccggcacaggcgtgctgaccgagagcaataagaagttcctgccttttcagcagttcggcagggacatcgcagataccacagacgccgtgcgcgaccctcagaccctggagatcctggacatcacaccatgcagcttcggcggcgtgtccgtgatcacaccaggcaccaatacatccaaccaggtggccgtgctgtatcaggacgtgaattgtaccgaggtgcccgtggcaatccacgcagatcagctgacccctacatggcgggtgtactctaccggcagcaacgtgttccagacaagagccggatgcctgatcggagcagagcacgtgaacaatagctatgagtgcgacatccctatcggcgccggcatctgtgccagctaccagacccagacaaactccccatctggagcaggctcccaccatcaccatcaccatcaccatcaccactga

SEQ ID NO: 3978 - DNA, 2148 bp, Artificial Sequence
  Description of Artificial Sequence: Synthetic polynucleotide
atgggcatcctgccaagcccaggaatgcccgccctgctgtctctggtgagcctgctgtccgtgctgctgatgggatgcgtggcagagacaggcacacagtgcgtgaacctgaccacaaggacccagctgccccctgcctataccaattctttcacacggggcgtgtactatcccgacaaggtgtttagaagctccgtgctgcactccacacaggatctgtttctgcctttcttttctaacgtgacctggttccacgccatccacgtgtccggcaccaatggcacaaagcggttcgacaatcccgtgctgccttttaacgatggcgtgtacttcgccagcaccgagaagtccaacatcatcagaggctggatctttggcaccacactggactctaagacacagagcctgctgatcgtgaacaatgccaccaacgtggtgatcaaggtgtgcgagttccagttttgtaatgatccattcctgggcgtgtactatcacaagaacaataagtcctggatggagtctgagtttcgcgtgtattctagcgccaacaattgcacatttgagtacgtgagccagcccttcctgatggacctggagggcaagcagggcaatttcaagaacctgagggagttcgtgtttaagaatatcgatggctacttcaagatctacagcaagcacaccccaatcaacctggtgcgcgacctgccacagggattctccgccctggagccactggtggatctgcccatcggcatcaacatcacccggtttcagacactgctggccctgcacagatcctacctgacaccaggcgactcctctagcggatggaccgcaggagctgccgcctactatgtgggctatctgcagccccggaccttcctgctgaagtacaacgagaatggcaccatcacagacgcagtggattgcgccctggaccccctgtctgagacaaagtgtacactgaagagctttaccgtggagaagggcatctatcagacaagcaatttcagggtgcagcctaccgagtccatcgtgcgctttcccaatatcacaaacctgtgcccttttggcgaggtgttcaacgccaccagattcgccagcgtgtacgcctggaatcggaagagaatctccaactgcgtggccgactattctgtgctgtacaactccgcctctttcagcacctttaagtgctatggcgtgtctcccacaaagctgaatgatctgtgctttaccaacgtgtacgccgatgatttcgtgatcaggggagacgaagtgagacagatcgcaccaggacagacaggaaagatcgcagactacaattataagctgcctgacgatttcaccggctgcgtgatcgcctggaactccaacaatctggattctaaagtgggcggcaactacaattatctgtacaggctgtttcgcaagtccaatctgaagccattcgagcgggacatctccacagagatctaccaggccggctctaccccctgcaatggcgtggagggctttaactgttatttccctctgcagtcttacggcttccagccaacaaacggcgtgggctatcagccctacagagtggtggtgctgtcctttgagctgctgcacgcaccagcaacagtgtgcggcccaaagaagtctaccaatctggtgaagaacaagtgcgtgaacttcaacttcaacggactgaccggcacaggcgtgctgaccgagagcaataagaagttcctgccttttcagcagttcggcagggacatcgcagataccacagacgccgtgcgcgaccctcagaccctggagatcctggacatcacaccatgcagcttcggcggcgtgtccgtgatcacaccaggcaccaatacatccaaccaggtggccgtgctgtatcaggacgtgaattgtaccgaggtgcccgtggcaatccacgcagatcagctgacccctacatggcgggtgtactctaccggcagcaacgtgttccagacaagagccggatgcctgatcggagcagagcacgtgaacaatagctatgagtgcgacatccctatcggcgccggcatctgtgccagctaccagacccagacaaactccccatctggagcaggctcccaccatcaccatcaccatcaccatcaccactga

SEQ ID NO: 3979 - DNA, 2148 bp, Artificial Sequence
  Description of Artificial Sequence: Synthetic polynucleotide
atgggcatcctgccaagcccaggaatgcccgccctgctgtctctggtgagcctgctgtccgtgctgctgatgggatgcgtggcagagacaggcacacagtgcgtgaacctgaccacaaggacccagctgccccctgcctataccaattctttcacacggggcgtgtactatcccgacaaggtgtttagaagctccgtgctgcactccacacaggatctgtttctgcctttcttttctaacgtgacctggttccacgccatccacgtgtccggcaccaatggcacaaagcggttcgacaatcccgtgctgccttttaacgatggcgtgtacttcgccagcaccgagaagtccaacatcatcagaggctggatctttggcaccacactggactctaagacacagagcctgctgatcgtgaacaatgccaccaacgtggtgatcaaggtgtgcgagttccagttttgtaatgatccattcctgggcgtgtactatcacaagaacaataagtcctggatggagtctgagtttcgcgtgtattctagcgccaacaattgcacatttgagtacgtgagccagcccttcctgatggacctggagggcaagcagggcaatttcaagaacctgagggagttcgtgtttaagaatatcgatggctacttcaagatctacagcaagcacaccccaatcaacctggtgcgcgacctgccacagggattctccgccctggagccactggtggatctgcccatcggcatcaacatcacccggtttcagacactgctggccctgcacagatcctacctgacaccaggcgactcctctagcggatggaccgcaggagctgccgcctactatgtgggctatctgcagccccggaccttcctgctgaagtacaacgagaatggcaccatcacagacgcagtggattgcgccctggaccccctgtctgagacaaagtgtacactgaagagctttaccgtggagaagggcatctatcagacaagcaatttcagggtgcagcctaccgagtccatcgtgcgctttcccaatatcacaaacctgtgcccttttggcgaggtgttcaacgccaccagattcgccagcgtgtacgcctggaatcggaagagaatctccaactgcgtggccgactattctgtgctgtacaactccgcctctttcagcacctttaagtgctatggcgtgtctcccacaaagctgaatgatctgtgctttaccaacgtgtacgccgatagcttcgtgatcaggggagacgaagtgagacagatcgcaccaggacagacaggaaagatcgcagactacaattataagctgcctgacgatttcaccggctgcgtgatcgcctggaactccaacaatctggattctaaagtgggcggcaactacaattatctgtacaggctgtttcgcaagtccaatctgaagccattcgagcgggacatctccacagagatctaccaggccggctctaccccctgcaatggcgtggagggctttaactgttatttccctctgcagtcttacggcttccagccaacaaacggcgtgggctatcagccctacagagtggtggtgctgtcctttgagctgctgcacgcaccagcaacagtgtgcggcccaaagaagtctaccaatctggtgaagaacaagtgcgtgaacttcaacttcaacggactgaccggcacaggcgtgctgaccgagagcaataagaagttcctgccttttcagcagttcggcagggacatcgcagataccacagacgccgtgcgcgaccctcagaccctggagatcctggacatcacaccatgcagcttcggcggcgtgtccgtgatcacaccaggcaccaatacatccaaccaggtggccgtgctgtatcaggacgtgaattgtaccgaggtgcccgtggcaatccacgcagatcagctgacccctacatggcggcaatactctaccggcagcaacgtgttccagacaagagccggatgcctgatcggagcagagcacgtgaacaatagctatgagtgcgacatccctatcggcgccggcatctgtgccagctaccagacccagacaaactccccatctggagcaggctcccaccatcaccatcaccatcaccatcaccactga

SEQ ID NO: 3980 - DNA, 2148 bp, Artificial Sequence
  Description of Artificial Sequence: Synthetic polynucleotide
atgggcatcctgccaagcccaggaatgcccgccctgctgtctctggtgagcctgctgtccgtgctgctgatgggatgcgtggcagagacaggcacacagtgcgtgaacctgaccacaaggacccagctgccccctgcctataccaattctttcacacggggcgtgtactatcccgacaaggtgtttagaagctccgtgctgcactccacacaggatctgtttctgcctttcttttctaacgtgacctggttccacgccatccacgtgtccggcaccaatggcacaaagcggttcgacaatcccgtgctgccttttaacgatggcgtgtacttcgccagcaccgagaagtccaacatcatcagaggctggatctttggcaccacactggactctaagacacagagcctgctgatcgtgaacaatgccaccaacgtggtgatcaaggtgtgcgagttccagttttgtaatgatccattcctgggcgtgtactatcacaagaacaataagtcctggatggagtctgagtttcgcgtgtattctagcgccaacaattgcacatttgagtacgtgagccagcccttcctgatggacctggagggcaagcagggcaatttcaagaacctgagggagttcgtgtttaagaatatcgatggctacttcaagatctacagcaagcacaccccaatcaacctggtgcgcgacctgccacagggattctccgccctggagccactggtggatctgcccatcggcatcaacatcacccggtttcagacactgctggccctgcacagatcctacctgacaccaggcgactcctctagcggatggaccgcaggagctgccgcctactatgtgggctatctgcagccccggaccttcctgctgaagtacaacgagaatggcaccatcacagacgcagtggattgcgccctggaccccctgtctgagacaaagtgtacactgaagagctttaccgtggagaagggcatctatcagacaagcaatttcagggtgcagcctaccgagtccatcgtgcgctttcccaatatcacaaacctgtgcccttttggcgaggtgttcaacgccaccagattcgccagcgtgtacgcctggaatcggaagagaatctccaactgcgtggccgactattctgtgctgtacaactccgcctctttcagcacctttaagtgctatggcgtgtctcccacaaagctgaatgatctgtgctttaccaacgtgtacgccgatagcttcgtgatcaggggagacgaagtgagacagatcgcaccaggacagacaggaaagatcgcagactacaattataagctgcctgacgatttcaccggctgcgtgatcgcctggaactccaacaatctggattctaaagtgggcggcaactacaattatctgtacaggctgtttcgcaagtccaatctgaagccattcgagcgggacatctccacagagatctaccaggccggctctaccccctgcaatggcgtggagggctttaactgttatttccctctgcagtcttacggcttccagccaacaaacggcgtgggctatcagccctacagagtggtggtgctgtcctttgagactctgcacgcaccagcaacagtgtgcggcccaaagaagtctaccaatctggtgaagaacaagtgcgtgaacttcaacttcaacggactgaccggcacaggcgtgctgaccgagagcaataagaagttcctgccttttcagcagttcggcagggacatcgcagataccacagacgccgtgcgcgaccctcagaccctggagatcctggacatcacaccatgcagcttcggcggcgtgtccgtgatcacaccaggcaccaatacatccaaccaggtggccgtgctgtatcaggacgtgaattgtaccgaggtgcccgtggcaatccacgcagatcagctgacccctacatggcgggtgtactctaccggcagcaacgtgttccagacaagagccggatgcctgatcggagcagagcacgtgaacaatagctatgagtgcgacatccctatcggcgccggcatctgtgccagctaccagacccagacaaactccccatctggagcaggctcccaccatcaccatcaccatcaccatcaccactga

SEQ ID NO: 3981 - DNA, 2148 bp, Artificial Sequence
  Description of Artificial Sequence: Synthetic polynucleotide
atgggcatcctgccaagcccaggaatgcccgccctgctgtctctggtgagcctgctgtccgtgctgctgatgggatgcgtggcagagacaggcacacagtgcgtgaacctgaccacaaggacccagctgccccctgcctataccaattctttcacacggggcgtgtactatcccgacaaggtgtttagaagctccgtgctgcactccacacaggatctgtttctgcctttcttttctaacgtgacctggttccacgccatccacgtgtccggcaccaatggcacaaagcggttcgacaatcccgtgctgccttttaacgatggcgtgtacttcgccagcaccgagaagtccaacatcatcagaggctggatctttggcaccacactggactctaagacacagagcctgctgatcgtgaacaatgccaccaacgtggtgatcaaggtgtgcgagttccagttttgtaatgatccattcctgggcgtgtactatcacaagaacaataagtcctggatggagtctgagtttcgcgtgtattctagcgccaacaattgcacatttgagtacgtgagccagcccttcctgatggacctggagggcaagcagggcaatttcaagaacctgagggagttcgtgtttaagaatatcgatggctacttcaagatctacagcaagcacaccccaatcaacctggtgcgcgacctgccacagggattctccgccctggagccactggtggatctgcccatcggcatcaacatcacccggtttcagacactgctggccctgcacagatcctacctgacaccaggcgactcctctagcggatggaccgcaggagctgccgcctactatgtgggctatctgcagccccggaccttcctgctgaagtacaacgagaatggcaccatcacagacgcagtggattgcgccctggaccccctgtctgagacaaagtgtacactgaagagctttaccgtggagaagggcatctatcagacaagcaatttcagggtgcagcctaccgagtccatcgtgcgctttcccaatatcacaaacctgtgcccttttggcgaggtgttcaacgccaccagattcgccagcgtgtacgcctggaatcggaagagaatctccaactgcgtggccgactattctgtgctgtacaactccgcctctttcagcacctttaagtgctatggcgtgtctcccacaaagctgaatgatctgtgctttaccaacgtgtacgccgatagcttcgtgatcaggggagacgaagtgagacagatcgcaccaggacagacaggaaagatcgcagactacaattataagctgcctgacgatttcaccggctgcgtgatcgcctggaactccaacaatctggattctaaagtgggcggcaactacaattatctgtacaggctgtttcgcaagtccaatctgaagccattcgagcgggacatctccacagagatctaccaggccggctctaccccctgcaatggcgtggagggctttaactgttatttccctctgcagtcttacggcttccagccaacaaacggcgtgggctatcagccctacagagtggtggtgctgtcctttgagctgctgcacgcaccagcaacagtgtgcggcccaaagaagtctaccaatctggtgaagaacaagtgcgtgaacttcaacttcaacggactgaccggcacaggcgtgctgaccgagagcaataagaagttcctgccttttcagcagttcggcagggacatcgcagataccacagacgccgtgcgcgaccctcagaccctggagatcctggacatcacaccatgcagcttcggcggcgtgtccgtgatcacaccaggcaccaatacatccaaccaggtggccgtgctgtatcaggacgtgaattgtaccgaggtgcccgtgcaaatccacgcagatcagctgacccctacatggcgggtgtactctaccggcagcaacgtgttccagacaagagccggatgcctgatcggagcagagcacgtgaacaatagctatgagtgcgacatccctatcggcgccggcatctgtgccagctaccagacccagacaaactccccatctggagcaggctcccaccatcaccatcaccatcaccatcaccactga

SEQ ID NO: 3982 - DNA, 2148 bp, Artificial Sequence
  Description of Artificial Sequence: Synthetic polynucleotide
atgggcatcctgccaagcccaggaatgcccgccctgctgtctctggtgagcctgctgtccgtgctgctgatgggatgcgtggcagagacaggcacacagtgcgtgaacctgaccacaaggacccagctgccccctgcctataccaattctttcacacggggcgtgtactatcccgacaaggtgtttagaagctccgtgctgcactccacacaggatctgtttctgcctttcttttctaacgtgacctggttccacgccatccacgtgtccggcaccaatggcacaaagcggttcgacaatcccgtgctgccttttaacgatggcgtgtacttcgccagcaccgagaagtccaacatcatcagaggctggatctttggcaccacactggactctaagacacagagcctgctgatcgtgaacaatgccaccaacgtggtgatcaaggtgtgcgagttccagttttgtaatgatccattcctgggcgtgtactatcacaagaacaataagtcctggccagagtctgagtttcgcgtgtattctagcgccaacaattgcacatttgagtacgtgagccagcccttcctgatggacctggagggcaagcagggcaatttcaagaacctgagggagttcgtgtttaagaatatcgatggctacttcaagatctacagcaagcacaccccaatcaacctggtgcgcgacctgccacagggattctccgccctggagccactggtggatctgcccatcggcatcaacatcacccggtttcagacactgctggccctgcacagatcctacctgacaccaggcgactcctctagcggatggaccgcaggagctgccgcctactatgtgggctatctgcagccccggaccttcctgctgaagtacaacgagaatggcaccatcacagacgcagtggattgcgccctggaccccctgtctgagacaaagtgtacactgaagagctttaccgtggagaagggcatctatcagacaagcaatttcagggtgcagcctaccgagtccatcgtgcgctttcccaatatcacaaacctgtgcccttttggcgaggtgttcaacgccaccagattcgccagcgtgtacgcctggaatcggaagagaatctccaactgcgtggccgactattctgtgctgtacaactccgcctctttcagcacctttaagtgctatggcgtgtctcccacaaagctgaatgatctgtgctttaccaacgtgtacgccgatagcttcgtgatcaggggagacgaagtgagacagatcgcaccaggacagacaggaaagatcgcagactacaattataagctgcctgacgatttcaccggctgcgtgatcgcctggaactccaacaatctggattctaaagtgggcggcaactacaattatctgtacaggctgtttcgcaagtccaatctgaagccattcgagcgggacatctccacagagatctaccaggccggctctaccccctgcaatggcgtggagggctttaactgttatttccctctgcagtcttacggcttccagccaacaaacggcgtgggctatcagccctacagagtggtggtgctgtcctttgagctgctgcacgcaccagcaacagtgtgcggcccaaagaagtctaccaatctggtgaagaacaagtgcgtgaacttcaacttcaacggactgaccggcacaggcgtgctgaccgagagcaataagaagttcctgccttttcagcagttcggcagggacatcgcagataccacagacgccgtgcgcgaccctcagaccctggagatcctggacatcacaccatgcagcttcggcggcgtgtccgtgatcacaccaggcaccaatacatccaaccaggtggccgtgctgtatcaggacgtgaattgtaccgaggtgcccgtggcaatccacgcagatcagctgacccctacatggcgggtgtactctaccggcagcaacgtgttccagacaagagccggatgcctgatcggagcagagcacgtgaacaatagctatgagtgcgacatccctatcggcgccggcatctgtgccagctaccagacccagacaaactccccatctggagcaggctcccaccatcaccatcaccatcaccatcaccactga

SEQ ID NO: 3983 - DNA, 2148 bp, Artificial Sequence
  Description of Artificial Sequence: Synthetic polynucleotide
atgggcatcctgccaagcccaggaatgcccgccctgctgtctctggtgagcctgctgtccgtgctgctgatgggatgcgtggcagagacaggcacacagtgcgtgaacctgaccacaaggacccagctgccccctgcctataccaattctttcacacggggcgtgtactatcccgacaaggtgtttagaagctccgtgctgcactccacacaggatctgtttctgcctttcttttctaacgtgacctggttccacgccatccacgtgtccggcaccaatggcacaaagcggttcgacaatcccgtgctgccttttaacgatggcgtgtacttcgccagcaccgagaagtccaacatcatcagaggctggatctttggcaccacactggactctaagacacagagcctgctgatcgtgaacaatgccaccaacgtggtgatcaaggtgtgcgagttccagttttgtaatgatccattcctgggcgtgtactatcacaagaacaataagtcctggatggagtctgagtttcgcgtgtattctagcgccaacaattgcacatttgagtacgtgagccagcccttcctgatggacctggagggcaagcagggcaatttcaagaacctgagggagttcgtgtttaagaatatcgatggctacttcaagatctacagcaagcacaccccaatcaacctggtgcgcgacctgccacagggattctccgccctggagccactggtggatctgcccatcggcatcaacatcacccggtttcagacactgctggccctgcacagatcctacctgacaccaggcgactcctctagcggatggaccgcaggagctgccgcctactatgtgggctatctgcagccccggaccttcctgctgaagtacaacgagaatggcaccatcacagacgcagtggattgcgccctggaccccctgtctgagacaaagtgtacactgaagagctttaccgtggagaagggcatctatcagacaagcaatttcagggtgcagcctaccgagtccatcgtgcgctttcccaatatcacaaacctgtgcccttttggcgaggtgttcaacgccaccagattcgccagcgtgtacgcctggaatcggaagagaatctccaactgcgtggccgactattctgtgctgtacaactccgcctctttcagcacctttaagtgctatggcgtgtctcccacaaagctgaatgatctgtgctttaccaacgtgtacgccgatagcttcgtgatcaggggagacgaagtgagacagatcgcaccaggacagacaggaaagatcgcagactacaattataagctgcctgacgatttcaccggctgcgtgatcgcctggaactccaacaatctggattctaaagtgggcggcaactacaattatctgtacaggctgtttcgcaagtccaatctgaagccattcgagcgggacatctccacagagatctaccaggccggctctaccccctgcaatggcgtggagggctttaactgttatttccctctgcagtcttacggcttccagccaacaaacggcgtgggctatcagccctacagagtggtggtgctgtcctttgagctgctgcacgcaccagcaacagtgtgcggcccaaagaagtctaccaatctggtgaagaacaagtgcgtgaacttcaacttcaacggactgaccggcacaggcgtgctgaccgagagcaataagaagttcctgccttttcagcagttcggcagggacatcgcagataccacagacgccgtgcgcgaccctcagaccctggagatcctggacatcacaccatgcagcttcggcggcgtgtccgtgatcacaccaggcaccaatacatccaaccaggtggccgtgctgtatcaggacgtgaattgtaccgaggtgcccagtgcaatccacgcagatcagctgacccctacatggcgggtgtactctaccggcagcaacgtgttccagacaagagccggatgcctgatcggagcagagcacgtgaacaatagctatgagtgcgacatccctatcggcgccggcatctgtgccagctaccagacccagacaaactccccatctggagcaggctcccaccatcaccatcaccatcaccatcaccactga

SEQ ID NO: 3984 - DNA, 2148 bp, Artificial Sequence
  Description of Artificial Sequence: Synthetic polynucleotide
atgggcatcctgccaagcccaggaatgcccgccctgctgtctctggtgagcctgctgtccgtgctgctgatgggatgcgtggcagagacaggcacacagtgcgtgaacctgaccacaaggacccagctgccccctgcctataccaattctttcacacggggcgtgtactatcccgacaaggtgtttagaagctccgtgctgcactccacacaggatctgtttctgcctttcttttctaacgtgacctggttccacgccatccacgtgtccggcaccaatggcacaaagcggttcgacaatcccgtgctgccttttaacgatggcgtgtacttcgccagcaccgagaagtccaacatcatcagaggctggatctttggcaccacactggactctaagacacagagcctgctgatcgtgaacaatgccaccaacgtggtgatcaaggtgtgcgagttccagttttgtaatgatccattcctgggcgtgtactatcacaagaacaataagtcctggatggagtctgagtttcgcgtgtattctagcgccaacaattgcacatttgagtacgtgagccagcccttcctgatggacctggagggcaagcagggcaatttcaagaacctgagggagttcgtgtttaagaatatcgatggctacttcaagatctacagcaagcacaccccaatcaacctggtgcgcgacctgccacagggattctccgccctggagccactggtggatctgcccatcggcatcaacatcacccggtttcagacactgctggccctgcacagatcctacctgacaccaggcgactcctctagcggatggaccgcaggagctgccgcctactatgtgggctatctgcagccccggaccttcctgctgaagtacaacgagaatggcaccatcacagacgcagtggattgcgccctggaccccctgtctgagacaaagtgtacactgaagagctttaccgtggagaagggcatctatcagacaagcaatttcagggtgcagcctaccgagtccatcgtgcgctttcccaatatcacaaacctgtgcccttttggcgaggtgttcaacgccaccagattcgccagcgtgtacgcctggaatcggaagagaatctccaactgcgtggccgactattctgtgctgtacaactccgcctctttcagcacctttaagtgctatggcgtgtctcccacaaagctgaatgatctgtgctttaccaacgtgtacgccgatagcttcgtgatcaggggagacgaagtgagacagatcgcaccaggacagacaggaaagatcgcagactacaattataagctgcctgacgatttcaccggctgcgtgatcgcctggaactccaacaatctggattctaaagtgggcggcaactacaattatctgtacaggctgtttcgcaagtccaatctgaagccattcgagcgggacatctccacagagatctaccaggccggctctaccccctgcaatggcgtggagggctttaactgttatttccctctgcagtcttacggcttccagccaacaaacggcgtgggccgacagccctacagagtggtggtgctgtcctttgagctgctgcacgcaccagcaacagtgtgcggcccaaagaagtctaccaatctggtgaagaacaagtgcgtgaacttcaacttcaacggactgaccggcacaggcgtgctgaccgagagcaataagaagttcctgccttttcagcagttcggcagggacatcgcagataccacagacgccgtgcgcgaccctcagaccctggagatcctggacatcacaccatgcagcttcggcggcgtgtccgtgatcacaccaggcaccaatacatccaaccaggtggccgtgctgtatcaggacgtgaattgtaccgaggtgcccgtggcaatccacgcagatcagctgacccctacatggcgggtgtactctaccggcagcaacgtgttccagacaagagccggatgcctgatcggagcagagcacgtgaacaatagctatgagtgcgacatccctatcggcgccggcatctgtgccagctaccagacccagacaaactccccatctggagcaggctcccaccatcaccatcaccatcaccatcaccactga

SEQ ID NO: 3985 - DNA, 2148 bp, Artificial Sequence
  Description of Artificial Sequence: Synthetic polynucleotide
atgggcatcctgccaagcccaggaatgcccgccctgctgtctctggtgagcctgctgtccgtgctgctgatgggatgcgtggcagagacaggcacacagtgcgtgaacctgaccacaaggacccagctgccccctgcctataccaattctttcacacggggcgtgtactatcccgacaaggtgtttagaagctccgtgctgcactccacacaggatctgtttctgcctttcttttctaacgtgacctggttccacgccatccacgtgtccggcaccaatggcacaaagcggttcgacaatcccgtgctgccttttaacgatggcgtgtacttcgccagcaccgagaagtccaacatcatcagaggctggatctttggcaccacactggactctaagacacagagcctgctgatcgtgaacaatgccaccaacgtggtgatcaaggtgtgcgagttccagttttgtaatgatccattcctgggcgtgtactatcacaagaacaataagtcctggatggagtctgagtttcgcgtgtattctagcgccaacaattgcacatttgagtacgtgagccagcccttcctgatggacctggagggcaagcagggcaatttcaagaacctgagggagttcgtgtttaagaatatcgatggctacttcaagatctacagcaagcacaccccaatcaacctggtgcgcgacctgccacagggattctccgccctggagccactggtggatctgcccatcggcatcaacatcacccggtttcagacactgctggccctgcacagatcctacctgacaccaggcgactcctctagcggatggaccgcaggagctgccgcctactatgtgggctatctgcagccccggaccttcctgctgaagtacaacgagaatggcaccatcacagacgcagtggattgcgccctggaccccctgtctgagacaaagtgtacactgaagagctttaccgtggagaagggcatctatcagacaagcaatttcagggtgcagcctaccgagtccatcgtgcgctttcccaatatcacaaacctgtgcccttttggcgaggtgttcaacgccaccagattcgccagcgtgtacgcctggaatcggaagagaatctccaactgcgtggccgactattctgtgctgtacaactccgcctctttcagcacctttaagtgctatggcgtgtctcccacaaagctgaatgatctgtgctttaccaacgtgtacgccgatagcttcgtgatcaggggagacgaagtgagacagatcgcaccaggacagacaggaaagatcgcagactacaattataagctgcctgacgatttcaccggctgcgtgatcgcctggaactccaacaatctggattctaaagtgggcggcaactacaattatctgtacaggctgtttcgcaagtccaatctgaagccattcgagcgggacatctccacagagatctaccaggccggctctaccccctgcaatggcgtggagggctttaactgttatttccctctgcagtcttacggcttccagccaacaaacggcgtgggccatcagccctacagagtggtggtgctgtcctttgagctgctgcacgcaccagcaacagtgtgcggcccaaagaagtctaccaatctggtgaagaacaagtgcgtgaacttcaacttcaacggactgaccggcacaggcgtgctgaccgagagcaataagaagttcctgccttttcagcagttcggcagggacatcgcagataccacagacgccgtgcgcgaccctcagaccctggagatcctggacatcacaccatgcagcttcggcggcgtgtccgtgatcacaccaggcaccaatacatccaaccaggtggccgtgctgtatcaggacgtgaattgtaccgaggtgcccgtggcaatccacgcagatcagctgacccctacatggcgggtgtactctaccggcagcaacgtgttccagacaagagccggatgcctgatcggagcagagcacgtgaacaatagctatgagtgcgacatccctatcggcgccggcatctgtgccagctaccagacccagacaaactccccatctggagcaggctcccaccatcaccatcaccatcaccatcaccactga

SEQ ID NO: 3986 - DNA, 2148 bp, Artificial Sequence
  Description of Artificial Sequence: Synthetic polynucleotide
atgggcatcctgccaagcccaggaatgcccgccctgctgtctctggtgagcctgctgtccgtgctgctgatgggatgcgtggcagagacaggcacacagtgcgtgaacctgaccacaaggacccagctgccccctgcctataccaattctttcacacggggcgtgtactatcccgacaaggtgtttagaagctccgtgctgcactccacacaggatctgtttctgcctttcttttctaacgtgacctggttccacgccatccacgtgtccggcaccaatggcacaaagcggttcgacaatcccgtgctgccttttaacgatggcgtgtacttcgccagcaccgagaagtccaacatcatcagaggctggatctttggcaccacactggactctaagacacagagcctgctgatcgtgaacaatgccaccaacgtggtgatcaaggtgtgcgagttccagttttgtaatgatccattcctgggcgtgtactatcacaagaacaataagtcctggatggagtctgagtttcgcgtgtattctagcgccaacaattgcacatttgagtacgtgagccagcccttcctgatggacctggagggcaagcagggcaatttcaagaacctgagggagttcgtgtttaagaatatcgatggctacttcaagatctacagcaagcacaccccaatcaacctggtgcgcgacctgccacagggattctccgccctggagccactggtggatctgcccatcggcatcaacatcacccggtttcagacactgctggccctgcacagatcctacctgacaccaggcgactcctctagcggatggaccgcaggagctgccgcctactatgtgggctatctgcagccccggaccttcctgctgaagtacaacgagaatggcaccatcacagacgcagtggattgcactctggaccccctgtctgagacaaagtgtacactgaagagctttaccgtggagaagggcatctatcagacaagcaatttcagggtgcagcctaccgagtccatcgtgcgctttcccaatatcacaaacctgtgcccttttggcgaggtgttcaacgccaccagattcgccagcgtgtacgcctggaatcggaagagaatctccaactgcgtggccgactattctgtgctgtacaactccgcctctttcagcacctttaagtgctatggcgtgtctcccacaaagctgaatgatctgtgctttaccaacgtgtacgccgatagcttcgtgatcaggggagacgaagtgagacagatcgcaccaggacagacaggaaagatcgcagactacaattataagctgcctgacgatttcaccggctgcgtgatcgcctggaactccaacaatctggattctaaagtgggcggcaactacaattatctgtacaggctgtttcgcaagtccaatctgaagccattcgagcgggacatctccacagagatctaccaggccggctctaccccctgcaatggcgtggagggctttaactgttatttccctctgcagtcttacggcttccagccaacaaacggcgtgggctatcagccctacagagtggtggtgctgtcctttgagctgctgcacgcaccagcaacagtgtgcggcccaaagaagtctaccaatctggtgaagaacaagtgcgtgaacttcaacttcaacggactgaccggcacaggcgtgctgaccgagagcaataagaagttcctgccttttcagcagttcggcagggacatcgcagataccacagacgccgtgcgcgaccctcagaccctggagatcctggacatcacaccatgcagcttcggcggcgtgtccgtgatcacaccaggcaccaatacatccaaccaggtggccgtgctgtatcaggacgtgaattgtaccgaggtgcccgtggcaatccacgcagatcagctgacccctacatggcgggtgtactctaccggcagcaacgtgttccagacaagagccggatgcctgatcggagcagagcacgtgaacaatagctatgagtgcgacatccctatcggcgccggcatctgtgccagctaccagacccagacaaactccccatctggagcaggctcccaccatcaccatcaccatcaccatcaccactga

SEQ ID NO: 3987 - DNA, 2148 bp, Artificial Sequence
  Description of Artificial Sequence: Synthetic polynucleotide
atgggcatcctgccaagcccaggaatgcccgccctgctgtctctggtgagcctgctgtccgtgctgctgatgggatgcgtggcagagacaggcacacagtgcgtgaacctgaccacaaggacccagctgccccctgcctataccaattctttcacacggggcgtgtactatcccgacaaggtgtttagaagctccgtgctgcactccacacaggatctgtttctgcctttcttttctaacgtgacctggttccacgccatccacgtgtccggcaccaatggcacaaagcggttcgacaatcccgtgctgccttttaacgatggcgtgtacttcgccagcaccgagaagtccaacatcatcagaggctggatctttggcaccacactggactctaagacacagagcctgctgatcgtgaacaatgccaccaacgtggtgatcaaggtgtgcgagttccagttttgtaatgatccattcctgggcgtgtactatcacaagaacaataagtcctggatggagaaagagtttcgcgtgtattctagcgccaacaattgcacatttgagtacgtgagccagcccttcctgatggacctggagggcaagcagggcaatttcaagaacctgagggagttcgtgtttaagaatatcgatggctacttcaagatctacagcaagcacaccccaatcaacctggtgcgcgacctgccacagggattctccgccctggagccactggtggatctgcccatcggcatcaacatcacccggtttcagacactgctggccctgcacagatcctacctgacaccaggcgactcctctagcggatggaccgcaggagctgccgcctactatgtgggctatctgcagccccggaccttcctgctgaagtacaacgagaatggcaccatcacagacgcagtggattgcgccctggaccccctgtctgagacaaagtgtacactgaagagctttaccgtggagaagggcatctatcagacaagcaatttcagggtgcagcctaccgagtccatcgtgcgctttcccaatatcacaaacctgtgcccttttggcgaggtgttcaacgccaccagattcgccagcgtgtacgcctggaatcggaagagaatctccaactgcgtggccgactattctgtgctgtacaactccgcctctttcagcacctttaagtgctatggcgtgtctcccacaaagctgaatgatctgtgctttaccaacgtgtacgccgatagcttcgtgatcaggggagacgaagtgagacagatcgcaccaggacagacaggaaagatcgcagactacaattataagctgcctgacgatttcaccggctgcgtgatcgcctggaactccaacaatctggattctaaagtgggcggcaactacaattatctgtacaggctgtttcgcaagtccaatctgaagccattcgagcgggacatctccacagagatctaccaggccggctctaccccctgcaatggcgtggagggctttaactgttatttccctctgcagtcttacggcttccagccaacaaacggcgtgggctatcagccctacagagtggtggtgctgtcctttgagctgctgcacgcaccagcaacagtgtgcggcccaaagaagtctaccaatctggtgaagaacaagtgcgtgaacttcaacttcaacggactgaccggcacaggcgtgctgaccgagagcaataagaagttcctgccttttcagcagttcggcagggacatcgcagataccacagacgccgtgcgcgaccctcagaccctggagatcctggacatcacaccatgcagcttcggcggcgtgtccgtgatcacaccaggcaccaatacatccaaccaggtggccgtgctgtatcaggacgtgaattgtaccgaggtgcccgtggcaatccacgcagatcagctgacccctacatggcgggtgtactctaccggcagcaacgtgttccagacaagagccggatgcctgatcggagcagagcacgtgaacaatagctatgagtgcgacatccctatcggcgccggcatctgtgccagctaccagacccagacaaactccccatctggagcaggctcccaccatcaccatcaccatcaccatcaccactga

SEQ ID NO: 3988 - DNA, 2148 bp, Artificial Sequence
  Description of Artificial Sequence: Synthetic polynucleotide
atgggcatcctgccaagcccaggaatgcccgccctgctgtctctggtgagcctgctgtccgtgctgctgatgggatgcgtggcagagacaggcacacagtgcgtgaacctgaccacaaggacccagctgccccctgcctataccaattctttcacacggggcgtgtactatcccgacaaggtgtttagaagctccgtgctgcactccacacaggatctgtttctgcctttcttttctaacgtgacctggttccacgccatccacgtgtccggcaccaatggcacaaagcggttcgacaatcccgtgctgccttttaacgatggcgtgtacttcgccagcaccgagaagtccaacatcatcagaggctggatctttggcaccacactggactctaagacacagagcctgctgatcgtgaacaatgccaccaacgtggtgatcaaggtgtgcgagttccagttttgtaatgatccattcctgggcgtgtactatcacaagaacaataagtcctggatggagtctgagtttcgcgtgtattctagcgccaacaattgcacatttgagtacgtgagccagcccttcctgatggacctggagggcaagcagggcaatttcaagaacctgagggagttcgtgtttaagaatatcgatggctacttcaagatctacagcaagcacaccccaatcaacctggtgcgcgacctgccacagggattctccgccctggagccactggtggatctgcccatcggcatcaacatcacccggtttcagacactgctggccctgcacagatcctacctgacaccaggcgactcctctagcggatggaccgcaggagctgccgcctactatgtgggctatctgcagccccggaccttcctgctgaagtacaacgagaatggcaccatcacagacgcagtggattgcgccctggaccccctgtctgagacaaagtgtacactgaagagctttaccgtggagaagggcatctatcagacaagcaatttcagggtgcagcctaccgagtccatcgtgcgctttcccaatatcacaaacctgtgcccttttggcgaggtgttcaacgccaccagattcgccagcgtgtacgcctggaatcggaagagaatctccaactgcgtggccgactattctgtgctgtacaactccgcctctttcagcaccataaagtgctatggcgtgtctcccacaaagctgaatgatctgtgctttaccaacgtgtacgccgatagcttcgtgatcaggggagacgaagtgagacagatcgcaccaggacagacaggaaagatcgcagactacaattataagctgcctgacgatttcaccggctgcgtgatcgcctggaactccaacaatctggattctaaagtgggcggcaactacaattatctgtacaggctgtttcgcaagtccaatctgaagccattcgagcgggacatctccacagagatctaccaggccggctctaccccctgcaatggcgtggagggctttaactgttatttccctctgcagtcttacggcttccagccaacaaacggcgtgggctatcagccctacagagtggtggtgctgtcctttgagctgctgcacgcaccagcaacagtgtgcggcccaaagaagtctaccaatctggtgaagaacaagtgcgtgaacttcaacttcaacggactgaccggcacaggcgtgctgaccgagagcaataagaagttcctgccttttcagcagttcggcagggacatcgcagataccacagacgccgtgcgcgaccctcagaccctggagatcctggacatcacaccatgcagcttcggcggcgtgtccgtgatcacaccaggcaccaatacatccaaccaggtggccgtgctgtatcaggacgtgaattgtaccgaggtgcccgtggcaatccacgcagatcagctgacccctacatggcgggtgtactctaccggcagcaacgtgttccagacaagagccggatgcctgatcggagcagagcacgtgaacaatagctatgagtgcgacatccctatcggcgccggcatctgtgccagctaccagacccagacaaactccccatctggagcaggctcccaccatcaccatcaccatcaccatcaccactga

SEQ ID NO: 3989 - DNA, 2148 bp, Artificial Sequence
  Description of Artificial Sequence: Synthetic polynucleotide
atgggcatcctgccaagcccaggaatgcccgccctgctgtctctggtgagcctgctgtccgtgctgctgatgggatgcgtggcagagacaggcacacagtgcgtgaacctgaccacaaggacccagctgccccctgcctataccaattctttcacacggggcgtgtactatcccgacaaggtgtttagaagctccgtgctgcactccacacaggatctgtttctgcctttcttttctaacgtgacctggttccacgccatccacgtgtccggcaccaatggcacaaagcggttcgacaatcccgtgctgccttttaacgatggcgtgtacttcgccagcaccgagaagtccaacatcatcagaggctggatctttggcaccacactggactctaagacacagagcctgctgatcgtgaacaatgccaccaacgtggtgatcaaggtgtgcgagttccagttttgtaatgatccattcctgggcgtgtactatcacaagaacaataagtcctggatggagtctgagtttcgcgtgtattctagcgccaacaattgcacatttgagtacgtgagccagcccttcctgatggacctggagggcaagcagggcaatttcaagaacctgagggagttcgtgtttaagaatatcgatggctacttcaagatctacagcaagcacaccccaatcaacctggtgcgcgacctgccacagggattctccgccctggagccactggtggatctgcccatcggcatcaacatcacccggtttcagacactgctggccctgcacagatcctacctgacaccaggcgactcctctagcggatggaccgcaggagctgccgcctactatgtgggctatctgcagccccggaccttcctgctgaagtacaacgagaatggcaccatcacagacgcagtggattgcgccctggaccccctgtctgagacaaagtgtacactgaagagctttaccgtggagaagggcatctatcagacaagcaatttcagggtgcagcctaccgagtccatcgtgcgctttcccaatatcacaaacctgtgcccttttggcgaggtgttcaacgccaccagattcgccagcgtgtacgcctggaatcggaagagaatctccaactgcgtggccgactattctgtgctgtacaactccgcctctttcagcacctttaagtgctatggcgtgtctcccacaaagctgaatgatctgtgctttaccaacgtgtacgccgatagcttcgtgatcaggggagacgaagtgagacagatcgcaccaggacagacaggaaagatcgcagactacaattataagctgcctgacgatttcaccggctgcgtgatcgcctggaactccaacaatctggattctaaagtgggcggcaactacaattatctgtacaggctgtttcgcaagtccaatctgaagccattcgagcgggacatctccacagagatctaccaggccggctctaccccctgcaatggcgtggagggctttccgtgttatttccctctgcagtcttacggcttccagccaacaaacggcgtgggctatcagccctacagagtggtggtgctgtcctttgagctgctgcacgcaccagcaacagtgtgcggcccaaagaagtctaccaatctggtgaagaacaagtgcgtgaacttcaacttcaacggactgaccggcacaggcgtgctgaccgagagcaataagaagttcctgccttttcagcagttcggcagggacatcgcagataccacagacgccgtgcgcgaccctcagaccctggagatcctggacatcacaccatgcagcttcggcggcgtgtccgtgatcacaccaggcaccaatacatccaaccaggtggccgtgctgtatcaggacgtgaattgtaccgaggtgcccgtggcaatccacgcagatcagctgacccctacatggcgggtgtactctaccggcagcaacgtgttccagacaagagccggatgcctgatcggagcagagcacgtgaacaatagctatgagtgcgacatccctatcggcgccggcatctgtgccagctaccagacccagacaaactccccatctggagcaggctcccaccatcaccatcaccatcaccatcaccactga

SEQ ID NO: 3990 - DNA, 2148 bp, Artificial Sequence
  Description of Artificial Sequence: Synthetic polynucleotide
atgggcatcctgccaagcccaggaatgcccgccctgctgtctctggtgagcctgctgtccgtgctgctgatgggatgcgtggcagagacaggcacacagtgcgtgaacctgaccacaaggacccagctgccccctgcctataccaattctttcacacggggcgtgtactatcccgacaaggtgtttagaagctccgtgctgcactccacacaggatctgtttctgcctttcttttctaacgtgacctggttccacgccatccacgtgtccggcaccaatggcacaaagcggttcgacaatcccgtgctgccttttaacgatggcgtgtacttcgccagcaccgagaagtccaacatcatcagaggctggatctttggcaccacactggactctaagacacagagcctgctgatcgtgaacaatgccaccaacgtggtgatcaaggtgtgcgagttccagttttgtaatgatccattcctgggcgtgtactatcacaagaacaataagtcctggatggagtctgagtttcgcgtgtattctagcgccaacaattgcacatttgagtacgtgagccagcccttcctgatggacctggagggcaagcagggcaatttcaagaacctgagggagttcgtgtttaagaatatcgatggctacttcaagatctacagcaagcacaccccaatcaacctggtgcgcgacctgccacagggattctccgccctggagccactggtggatctgcccatcggcatcaacatcacccggtttcagacactgctggccctgcacagatcctacctgacaccaggcgactcctctagcggatggaccgcaggagctgccgcctactatgtgggctatctgcagccccggaccttcctgctgaagtacaacgagaatggcaccatcacagacgcagtggattgcgccctggaccccctgtctgagacaaagtgtacactgaagagctttaccgtggagaagggcatctatcagacaagcaatttcagggtgcagcctaccgagtccatcgtgcgctttcccaatatcacaaacctgtgcccttttggcgaggtgttcaacgccaccagattcgccagcgtgtacgcctggaatcggaagagaatctccaactgcgtggccgactattctgtgctgtacaactccgcctctttcagcacctttaagtgctatggcgtgtctcccacaaagctgaatgatctgtgctttaccaacgtgtacgccgatagcttcgtgatcaggggagacgaagtgagacagatcgcaccaggacagacaggaaagatcgcagactacaattataagctgcctgacgatttcaccggctgcgtgatcgcctggaactccaacaatctggattctaaagtgggcggcaactacaattatctgtacaggctgtttcgcaagtccaatctgaagccattcgagcgggacatctccacagagatctaccaggccggctctaccccctgcaatggcgtggagggctttaactgttatttccctctgcagtcttacggcttccagccaacaaacggcgtgggctatcagccctacagagtggtggtgctgtcctttgagctgctgcacgcaccagcaacagtgtgcggcccaaagaagtctaccaatctggtgaagaacaagtgcgtgaacttcaacttcaacggactgaccggcacaggcgtgctgaccgagagcaataagaagttcctgccttttcagcagttcatgagggacatcgcagataccacagacgccgtgcgcgaccctcagaccctggagatcctggacatcacaccatgcagcttcggcggcgtgtccgtgatcacaccaggcaccaatacatccaaccaggtggccgtgctgtatcaggacgtgaattgtaccgaggtgcccgtggcaatccacgcagatcagctgacccctacatggcgggtgtactctaccggcagcaacgtgttccagacaagagccggatgcctgatcggagcagagcacgtgaacaatagctatgagtgcgacatccctatcggcgccggcatctgtgccagctaccagacccagacaaactccccatctggagcaggctcccaccatcaccatcaccatcaccatcaccactga

SEQ ID NO: 3991 - DNA, 2148 bp, Artificial Sequence
  Description of Artificial Sequence: Synthetic polynucleotide
atgggcatcctgccaagcccaggaatgcccgccctgctgtctctggtgagcctgctgtccgtgctgctgatgggatgcgtggcagagacaggcacacagtgcgtgaacctgaccacaaggacccagctgccccctgcctataccaattctttcacacggggcgtgtactatcccgacaaggtgtttagaagctccgtgctgcactccacacaggatctgtttctgcctttcttttctaacgtgacctggttccacgccatccacgtgtccggcaccaatggcacaaagcggttcgacaatcccgtgctgccttttaacgatggcgtgtacttcgccagcaccgagaagtccaacatcatcagaggctggatctttggcaccacactggactctaagacacagagcctgctgatcgtgaacaatgccaccaacgtggtgatcaaggtgtgcgagttccagttttgtaatgatccattcctgggcgtgtactatcacaagaacaataagtcctggatggagtctgagtttcgcgtgtattctagcgccaacaattgcacatttgagtacgtgagccagcccttcctgatggacctggagggcaagcagggcaatttcaagaacctgagggagttcgtgtttaagaatatcgatggctacttcaagatctacagcaagcacaccccaatcaacctggtgcgcgacctgccacagggattctccgccctggagccactggtggatctgcccatcggcatcaacatcacccggtttcagacactgctggccctgcacagatcctacctgacaccacgagactcctctagcggatggaccgcaggagctgccgcctactatgtgggctatctgcagccccggaccttcctgctgaagtacaacgagaatggcaccatcacagacgcagtggattgcgccctggaccccctgtctgagacaaagtgtacactgaagagctttaccgtggagaagggcatctatcagacaagcaatttcagggtgcagcctaccgagtccatcgtgcgctttcccaatatcacaaacctgtgcccttttggcgaggtgttcaacgccaccagattcgccagcgtgtacgcctggaatcggaagagaatctccaactgcgtggccgactattctgtgctgtacaactccgcctctttcagcacctttaagtgctatggcgtgtctcccacaaagctgaatgatctgtgctttaccaacgtgtacgccgatagcttcgtgatcaggggagacgaagtgagacagatcgcaccaggacagacaggaaagatcgcagactacaattataagctgcctgacgatttcaccggctgcgtgatcgcctggaactccaacaatctggattctaaagtgggcggcaactacaattatctgtacaggctgtttcgcaagtccaatctgaagccattcgagcgggacatctccacagagatctaccaggccggctctaccccctgcaatggcgtggagggctttaactgttatttccctctgcagtcttacggcttccagccaacaaacggcgtgggctatcagccctacagagtggtggtgctgtcctttgagctgctgcacgcaccagcaacagtgtgcggcccaaagaagtctaccaatctggtgaagaacaagtgcgtgaacttcaacttcaacggactgaccggcacaggcgtgctgaccgagagcaataagaagttcctgccttttcagcagttcggcagggacatcgcagataccacagacgccgtgcgcgaccctcagaccctggagatcctggacatcacaccatgcagcttcggcggcgtgtccgtgatcacaccaggcaccaatacatccaaccaggtggccgtgctgtatcaggacgtgaattgtaccgaggtgcccgtggcaatccacgcagatcagctgacccctacatggcgggtgtactctaccggcagcaacgtgttccagacaagagccggatgcctgatcggagcagagcacgtgaacaatagctatgagtgcgacatccctatcggcgccggcatctgtgccagctaccagacccagacaaactccccatctggagcaggctcccaccatcaccatcaccatcaccatcaccactga

SEQ ID NO: 3992 - DNA, 2148 bp, Artificial Sequence
  Description of Artificial Sequence: Synthetic polynucleotide
atgggcatcctgccaagcccaggaatgcccgccctgctgtctctggtgagcctgctgtccgtgctgctgatgggatgcgtggcagagacaggcacacagtgcgtgaacctgaccacaaggacccagctgccccctgcctataccaattctttcacacggggcgtgtactatcccgacaaggtgtttagaagctccgtgctgcactccacacaggatctgtttctgcctttcttttctaacgtgacctggttccacgccatccacgtgtccggcaccaatggcacaaagcggttcgacaatcccgtgctgccttttaacgatggcgtgtacttcgccagcaccgagaagtccaacatcatcagaggctggatctttggcaccacactggactctaagacacagagcctgctgatcgtgaacaatgccaccaacgtggtgatcaaggtgtgcgagttccagttttgtaatgatccattcctgggcgtgtactatcacaagaacaataagtcctggatggagtctgagtttcgcgtgtattctagcgccaacaattgcacatttgagtacgtgagccagcccttcctgatggacctggagggcaagcagggcaatttcaagaacctgagggagttcgtgtttaagaatatcgatggctacttcaagatctacagcaagcacaccccaatcaacctggtgcgcgacctgccacagggattctccgccctggagccactggtggatctgcccatcggcatcaacatcacccggtttcagacactgctggccctgcacagatcctacctgacaccaggcgactcctctagcggatggaccgcaggagctgccgcctactatgtgggctatctgcagccccggaccttcctgctgaagtacaacgagaatggcaccatcacagacgcagtggattgcgccctggaccccctgtctgagacaaagtgtacactgaagagctttaccgtggagaagggcatctatcagacaagcaatttcagggtgcagcctaccgagtccatcgtgcgctttcccaatatcacaaacctgtgcccttttggcgaggtgttcaacgccaccagattcgccagcgtgtacgcctggaatcggaagagaatctccaactgcgtggccgactattctgtgctgtacaactccgcctctttcagcacctttaagtgctatggcgtgtctcccacaaagctgaatgatctgtgctttaccaacgtgtacgccgatagcttcgtgatcaggggagacgaagtgagacagatcgcaccaggacagacaggaaagatcgcagactacaattataagctgcctgacgatttcaccggctgcgtgatcgcctggaactccaacaatctggattctaaagtgggcggcaactacaattatctgtacaggctgtttcgcaagtccaatctgaagccattcgagcgggacatctccacagagatctaccaggccggctctaccccctgcaatggcgtggagggctttaactgttatttccctctgcagtcttacggcttccagccaacaaacggcgtggactatcagccctacagagtggtggtgctgtcctttgagctgctgcacgcaccagcaacagtgtgcggcccaaagaagtctaccaatctggtgaagaacaagtgcgtgaacttcaacttcaacggactgaccggcacaggcgtgctgaccgagagcaataagaagttcctgccttttcagcagttcggcagggacatcgcagataccacagacgccgtgcgcgaccctcagaccctggagatcctggacatcacaccatgcagcttcggcggcgtgtccgtgatcacaccaggcaccaatacatccaaccaggtggccgtgctgtatcaggacgtgaattgtaccgaggtgcccgtggcaatccacgcagatcagctgacccctacatggcgggtgtactctaccggcagcaacgtgttccagacaagagccggatgcctgatcggagcagagcacgtgaacaatagctatgagtgcgacatccctatcggcgccggcatctgtgccagctaccagacccagacaaactccccatctggagcaggctcccaccatcaccatcaccatcaccatcaccactga

SEQ ID NO: 3993 - DNA, 2148 bp, Artificial Sequence
  Description of Artificial Sequence: Synthetic polynucleotide
atgggcatcctgccaagcccaggaatgcccgccctgctgtctctggtgagcctgctgtccgtgctgctgatgggatgcgtggcagagacaggcacacagtgcgtgaacctgaccacaaggacccagctgccccctgcctataccaattctttcacacggggcgtgtactatcccgacaaggtgtttagaagctccgtgctgcactccacacaggatctgtttctgcctttcttttctaacgtgacctggttccacgccatccacgtgtccggcaccaatggcacaaagcggttcgacaatcccgtgctgccttttaacgatggcgtgtacttcgccagcaccgagaagtccaacatcatcagaggctggatctttggcaccacactggactctaagacacagagcctgctgatcgtgaacaatgccaccaacgtggtgatcaaggtgtgcgagttccagttttgtaatgatccattcctgggcgtgtactatcacaagaacaataagtcctggatggagtctgagtttcgcgtgtattctagcgccaacaattgcacatttgagtacgtgagccagcccttcctgatggacctggagggcaagcagggcaatttcaagaacctgagggagttcgtgtttaagaatatcgatggctacttcaagatctacagcaagcacaccccaatcaacctggtgcgcgacctgccacagggattctccgccctggagccactggtggatctgcccatcggcatcaacatcacccggtttcagacactgctggccctgcacagatcctacctgacaccaggcgactcctctagcggatggaccgcaggagctgccgcctactatgtgggctatctgcagccccggaccttcctgctgaagtacaacgagaatggcaccatcacagacgcagtggattgcgccctggaccccctgtctgagacaaagtgtacactgaagagctttaccgtggagaagggcatctatcagacaagcaatttcagggtgcagcctaccgagtccatcgtgcgctttcccaatatcacaaacctgtgcccttttggcgaggtgttcaacgccaccagattcgccagcgtgtacgcctggaatcggaagagaatctccaactgcgtggccgactattctgtgctgtacaactccgcctctttcagcacctttaagtgctatggcgtgtctcccacaaagctgaatgatctgtgctttaccaacgtgtacgccgatagcttcgtgatcaggggagacgaagtgagacagatcgcaccaggacagacaggaaagatcgcagactacaattataagctgcctgacgatttcaccggctgcgtgatcgcctggaactccaacaatctggattctaaagtgggcggcaactacaattatctgtacaggctgtttcgcaagtccaatctgaagccattcgagcgggacatctccacagagcattaccaggccggctctaccccctgcaatggcgtggagggctttaactgttatttccctctgcagtcttacggcttccagccaacaaacggcgtgggctatcagccctacagagtggtggtgctgtcctttgagctgctgcacgcaccagcaacagtgtgcggcccaaagaagtctaccaatctggtgaagaacaagtgcgtgaacttcaacttcaacggactgaccggcacaggcgtgctgaccgagagcaataagaagttcctgccttttcagcagttcggcagggacatcgcagataccacagacgccgtgcgcgaccctcagaccctggagatcctggacatcacaccatgcagcttcggcggcgtgtccgtgatcacaccaggcaccaatacatccaaccaggtggccgtgctgtatcaggacgtgaattgtaccgaggtgcccgtggcaatccacgcagatcagctgacccctacatggcgggtgtactctaccggcagcaacgtgttccagacaagagccggatgcctgatcggagcagagcacgtgaacaatagctatgagtgcgacatccctatcggcgccggcatctgtgccagctaccagacccagacaaactccccatctggagcaggctcccaccatcaccatcaccatcaccatcaccactga

SEQ ID NO: 3994 - DNA, 2148 bp, Artificial Sequence
  Description of Artificial Sequence: Synthetic polynucleotide
atgggcatcctgccaagcccaggaatgcccgccctgctgtctctggtgagcctgctgtccgtgctgctgatgggatgcgtggcagagacaggcacacagtgcgtgaacctgaccacaaggacccagctgccccctgcctataccaattctttcacacggggcgtgtactatcccgacaaggtgtttagaagctccgtgctgcactccacacaggatctgtttctgcctttcttttctaacgtgacctggttccacgccatccacgtgtccggcaccaatggcacaaagcggttcgacaatcccgtgctgccttttaacgatggcgtgtacttcgccagcaccgagaagtccaacatcatcagaggctggatctttggcaccacactggactctaagacacagagcctgctgatcgtgaacaatgccaccaacgtggtgatcaaggtgtgcgagttccagttttgtaatgatccattcctgggcgtgtactatcacaagaacaataagtcctggatggagtctgagtttcgcgtgtattctagcgccaacaattgcacatttgagtacgtgagccagcccttcctgatggacctggagggcaagcagggcaatttcaagaacctgagggagttcgtgtttaagaatatcgatggctacttcaagatctacagcaagcacaccccaatcaacctggtgcgcgacctgccacagggattctccgccctggagccactggtggatctgcccatcggcatcaacatcacccggtttcagacactgctggccctgcacagatcctacctgacaccaggcgactcctctagcggatggaccgcaggagctgccgcctactatgtgggctatctgcagccccggaccttcctgctgaagtacaacgagaatggcaccatcacagacgcagtggattgcgccctggaccccctgtctgagacaaagtgtacactgaagagctttaccgtggagaagggcatctatcagacaagcaatttcagggtgcagcctaccgagtccatcgtgcgctttcccaatatcacaaacctgtgccctctcggcgaggtgttcaacgccaccagattcgccagctcatacgcctggaatcggaagagaatctccaactgcgtggccgactattctgtgctgtacaactccgcctctttcagcacctttaagtgctatggcgtgtctcccacaaagctgaatgatctgtgctttaccaacgtgtacgccgatcgattcgtgatcaggggagacgaagtgagacagatcgcaccaggacagacaggaaagatcgcagactacaattataagctgcctgacgatttcaccggctgcgtgatcgcctggaactccaacaatctggatgcgaaagtgggcggcaactacaattatctgtacaggctgtttcgcaagtccaatctgaagccattcgagcggttcatctccacagagatctaccaggccggctctaccccctcgaatggcgtggagggctttaactgttatttccctctgcagtcttacggcttccagccaacaaacggcgtgggctatcagccctacagagtggtggtgctgtcctttgagctgctgcacgcaccacatacagtgtgcggcccaaagaagtctaccaatctggtgaagaacaagtgcgtgaacttcaacttcaacggactgaccggcacaggcgtgctgaccgagagcaataagaagttcctgccttttcagcagttcggcagggacatcgcagataccacagacgccgtgcgcgaccctcagaccctggagatcctggacatcacaccatgcagcttcggcggcgtgtccgtgatcacaccaggcaccaatacatccaaccaggtggccgtgctgtatcaggacgtgaattgtaccgaggtgcccgtggcaatccacgcagatcagctgacccctacatggcgggtgtactctaccggcagcaacgtgttccagacaagagccggatgcctgatcggagcagagcacgtgaacaatagctatgagtgcgacatccctatcggcgccggcatctgtgccagctaccagacccagacaaactccccatctggagcaggctcccaccatcaccatcaccatcaccatcaccactga

SEQ ID NO: 3995 - DNA, 2148 bp, Artificial Sequence
  Description of Artificial Sequence: Synthetic polynucleotide
atgggcatcctgccaagcccaggaatgcccgccctgctgtctctggtgagcctgctgtccgtgctgctgatgggatgcgtggcagagacaggcacacagtgcgtgaacctgaccacaaggacccagctgccccctgcctataccaattctttcacacggggcgtgtactatcccgacaaggtgtttagaagctccgtgctgcactccacacaggatctgtttctgcctttcttttctaacgtgacctggttccacgccatccacgtgtccggcaccaatggcacaaagcggttcgacaatcccgtgctgccttttaacgatggcgtgtacttcgccagcaccgagaagtccaacatcatcagaggctggatctttggcaccacactggactctaagacacagagcctgctgatcgtgaacaatgccaccaacgtggtgatcaaggtgtgcgagttccagttttgtaatgatccattcctgggcgtgtactatcacaagaacaataagtcctggatggagtctgagtttcgcgtgtattctagcgccaacaattgcacatttgagtacgtgagccagcccttcctgatggacctggagggcaagcagggcaatttcaagaacctgagggagttcgtgtttaagaatatcgatggctacttcaagatctacagcaagcacaccccaatcaacctggtgcgcgacctgccacagggattctccgccctggagccactggtggatctgcccatcggcatcaacatcacccggtttcagacactgctggccctgcacagatcctacctgacaccaggcgactcctctagcggatggaccatgggagctgccgcctactatgtgggctatctgcagccccggaccttcctgctgaagtacaacgagaatggcaccatcacagacgcagtggattgcgccctggaccccctgtctgagacaaagtgtacactgaagagctttaccgtggagaagggcatctatcagacaagcaatttcagggtgcagcctaccgagtccatcgtgcgctttcccaatatcacaaacctgtgcccttttggcgaggtgttcaacgccaccagattcgccagcgtgtacgcctggaatcggaagagaatctccaactgcgtggccgactattctgtgctgtacaactccgcctctttcagcacctttaagtgctatggcgtgtctcccacaaagctgaatgatctgtgctttaccaacgtgtacgccgatagcttcgtgatcaggggagacgaagtgagacagatcgcaccaggacagacaggaaagatcgcagactacaattataagctgcctgacgatttcaccggctgcgtgatcgcctggaactccaacaatctggattctaaagtgggcggcaactacaattatctgtacaggctgtttcgcaagtccaatctgaagccattcgagcgggacatctccacagagatctaccaggccggctctaccccctgcaatggcgtggagggctttaactgttatttccctctgcagtcttacggcttccagccaacaaacggcgtgggctatcagccctacagagtggtggtgctgtcctttgagctgctgcacgcaccagcaacagtgtgcggcccaaagaagtctaccaatctggtgaagaacaagtgcgtgaacttcaacttcaacggactgaccggcacaggcgtgctgaccgagagcaataagaagttcctgccttttcagcagttcggcagggacatcgcagataccacagacgccgtgcgcgaccctcagaccctggagatcctggacatcacaccatgcagcttcggcggcgtgtccgtgatcacaccaggcaccaatacatccaaccaggtggccgtgctgtatcaggacgtgaattgtaccgaggtgcccgtggcaatccacgcagatcagctgacccctacatggcgggtgtactctaccggcagcaacgtgttccagacaagagccggatgcctgatcggagcagagcacgtgaacaatagctatgagtgcgacatccctatcggcgccggcatctgtgccagctaccagacccagacaaactccccatctggagcaggctcccaccatcaccatcaccatcaccatcaccactga

SEQ ID NO: 3996 - DNA, 2148 bp, Artificial Sequence
  Description of Artificial Sequence: Synthetic polynucleotide
atgggcatcctgccaagcccaggaatgcccgccctgctgtctctggtgagcctgctgtccgtgctgctgatgggatgcgtggcagagacaggcacacagtgcgtgaacctgaccacaaggacccagctgccccctgcctataccaattctttcacacggggcgtgtactatcccgacaaggtgtttagaagctccgtgctgcactccacacaggatctgtttctgcctttcttttctaacgtgacctggttccacgccatccacgtgtccggcaccaatggcacaaagcggttcgacaatcccgtgctgccttttaacgatggcgtgtacttcgccagcaccgagaagtccaacatcatcagaggctggatctttggcaccacactggactctaagacacagagcctgctgatcgtgaacaatgccaccaacgtggtgatcaaggtgtgcgagttccagttttgtaatgatccattcctgggcgtgtactatcacaagaacaataagtcctggatggagtctgagtttcgcgtgtattctagcgccaacaattgcacatttgagtacgtgagccagcccttcctgatggacctggagggcaagcagggcaatttcaagaacctgagggagttcgtgtttaagaatatcgatggctacttcaagatctacagcaagcacaccccaatcaacctggtgcgcgacctgccacagggattctccgccctggagccactggtggatctgcccatcggcatcaacatcaccatttttcagacactgctggccctgcacagatcctacctgacaccaggcgactcctctagcggatggaccgcaggagctgccgcctactatgtgggctatctgcagccccggaccttcctgctgaagtacaacgagaatggcaccatcacagacgcagtggattgcgccctggaccccctgtctgagacaaagtgtacactgaagagctttaccgtggagaagggcatctatcagacaagcaatttcagggtgcagcctaccgagtccatcgtgcgctttcccaatatcacaaacctgtgcccttttggcgaggtgttcaacgccaccagattcgccagcgtgtacgcctggaatcggaagagaatctccaactgcgtggccgactattctgtgctgtacaactccgcctctttcagcacctttaagtgctatggcgtgtctcccacaaagctgaatgatctgtgctttaccaacgtgtacgccgatagcttcgtgatcaggggagacgaagtgagacagatcgcaccaggacagacaggaaagatcgcagactacaattataagctgcctgacgatttcaccggctgcgtgatcgcctggaactccaacaatctggattctaaagtgggcggcaactacaattatctgtacaggctgtttcgcaagtccaatctgaagccattcgagcgggacatctccacagagatctaccaggccggctctaccccctgcaatggcgtggagggctttaactgttatttccctctgcagtcttacggcttccagccaacaaacggcgtgggctatcagccctacagagtggtggtgctgtcctttgagctgctgcacgcaccagcaacagtgtgcggcccaaagaagtctaccaatctggtgaagaacaagtgcgtgaacttcaacttcaacggactgaccggcacaggcgtgctgaccgagagcaataagaagttcctgccttttcagcagttcggcagggacatcgcagataccacagacgccgtgcgcgaccctcagaccctggagatcctggacatcacaccatgcagcttcggcggcgtgtccgtgatcacaccaggcaccaatacatccaaccaggtggccgtgctgtatcaggacgtgaattgtaccgaggtgcccgtggcaatccacgcagatcagctgacccctacatggcgggtgtactctaccggcagcaacgtgttccagacaagagccggatgcctgatcggagcagagcacgtgaacaatagctatgagtgcgacatccctatcggcgccggcatctgtgccagctaccagacccagacaaactccccatctggagcaggctcccaccatcaccatcaccatcaccatcaccactga

SEQ ID NO: 3997 - DNA, 2148 bp, Artificial Sequence
  Description of Artificial Sequence: Synthetic polynucleotide
atgggcatcctgccaagcccaggaatgcccgccctgctgtctctggtgagcctgctgtccgtgctgctgatgggatgcgtggcagagacaggcacacagtgcgtgaacctgaccacaaggacccagctgccccctgcctataccaattctttcacacggggcgtgtactatcccgacaaggtgtttagaagctccgtgctgcactccacacaggatctgtttctgcctttcttttctaacgtgacctggttccacgccatccacgtgtccggcaccaatggcacaaagcggttcgacaatcccgtgctgccttttaacgatggcgtgtacttcgccagcaccgagaagtccaacatcatcagaggctggatctttggcaccacactggactctaagacacagagcctgctgatcgtgaacaatgccaccaacgtggtgatcaaggtgtgcgagttccagttttgtaatgatccattcctgggcgtgtactatcacaagaacaataagtcctggatggagtctgagtttcgcgtgtattctagcgccaacaattgcacatttgagtacgtgagccagcccttcctgatggacctggagggcaagcagggcaatttcaagaacctgagggagttcgtgtttaagaatatcgatggctacttcaagatctacagcaagcacaccccaatcaacctggtgcgcgacctgccacagggattctccgccctggagccactggtggatctgcccatcggcatcaacatcacccggtttcagacactgctggccctgcacagatcctacctgacaccaggcgactcctctagcggatggaccgcaggagctgccgcctactatgtgggctatctgcagccccggaccttcctgctgaagtacaacgagaatggcaccatcacagacgcagtggattgcgccctggaccccctgtctgagacaaagtgtacactgaagagctttaccgtggagaagggcatctatcagacaagcaatttcagggtgcagcctaccgagtccatcgtgcgctttcccaatatcacaaacctgtgcccttttggcgaggtgttcaacgccaccagattcgccagcgtgtacgcctggaatcggaagagaatctccaactgcgtggccgactattctgtgctgtacaactccgcctctttcagcacctttaagtgctatggcgtgtctcccacaaagctgaatgatctgtgctttaccaacgtgtacgccgatagcttcgtgatcaggggagacgaagtgagacagatcgcaccaggacagacaggaaagatcgcagactacaattataagctgcctgacgatttcaccggctgcgtgatcgcctggaactccaacaatctggattctaaagtgggcggcaactacaattatctgtacaggctgtttcgcaagtccaatctgaagccattcgagcgggacatctccacagagatctaccaggccggctctaccccctgcaatggcgtggagggctttaactgttatttccctctgcagtcttacggcttccagccaacaaacggcgtgggctatcagccctacagagtggtggtgctgtcctttgagctgctgcacgcaccacatacagtgtgcggcccaaagaagtctaccaatctggtgaagaacaagtgcgtgaacttcaacttcaacggactgaccggcacaggcgtgctgaccgagagcaataagaagttcctgccttttcagcagttcggcagggacatcgcagataccacagacgccgtgcgcgaccctcagaccctggagatcctggacatcacaccatgcagcttcggcggcgtgtccgtgatcacaccaggcaccaatacatccaaccaggtggccgtgctgtatcaggacgtgaattgtaccgaggtgcccgtggcaatccacgcagatcagctgacccctacatggcgggtgtactctaccggcagcaacgtgttccagacaagagccggatgcctgatcggagcagagcacgtgaacaatagctatgagtgcgacatccctatcggcgccggcatctgtgccagctaccagacccagacaaactccccatctggagcaggctcccaccatcaccatcaccatcaccatcaccactga

SEQ ID NO: 3998 - DNA, 2148 bp, Artificial Sequence
  Description of Artificial Sequence: Synthetic polynucleotide
atgggcatcctgccaagcccaggaatgcccgccctgctgtctctggtgagcctgctgtccgtgctgctgatgggatgcgtggcagagacaggcacacagtgcgtgaacctgaccacaaggacccagctgccccctgcctataccaattctttcacacggggcgtgtactatcccgacaaggtgtttagaagctccgtgctgcactccacacaggatctgtttctgcctttcttttctaacgtgacctggttccacgccatccacgtgtccggcaccaatggcacaaagcggttcgacaatcccgtgctgccttttaacgatggcgtgtacttcgccagcaccgagaagtccaacatcatcagaggctggatctttggcaccacactggactctaagacacagagcctgctgatcgtgaacaatgccaccaacgtggtgatcaaggtgtgcgagttccagttttgtaatgatccattcctgggcgtgtactatcacaagaacaataagtcctggatggagtctgagtttcgcgtgtattctagcgccaacaattgcacatttgagtacgtgagccagcccttcctgatggacctggagggcaagcagggcaatttcaagaacctgagggagttcgtgtttaagaatatcgatggctacttcaagatctacagcaagcacaccccaatcaacctggtgcgcgacctgccacagggattctccgccctggagccactggtggatctgcccatcggcatcaacatcacccggtttcagacactgctggccctgcacagatcctacctgacaccaggcgactcctctagcggatggaccgcaggagctgccgcctactatgtgggctatctgcagccccggaccttcctgctgaagtacaacgagaatggcaccatcacagacgcagtggattgcgccctggaccccctgtctgagacaaagtgtacactgaagagctttaccgtggagaagggcatctatcagacaagcaatttcagggtgcagcctaccgagtccatcgtgcgctatcccaatatcacaaacctgtgcccttttggcgaggtgttcaacgccaccagattcgccagcgtgtacgcctggaatcggaagagaatctccaactgcgtggccgactattctgtgctgtacaactccgcctctttcagcacctttaagtgctatggcgtgtctcccacaaagctgaatgatctgtgctttaccaacgtgtacgccgatagcttcgtgatcaggggagacgaagtgagacagatcgcaccaggacagacaggaaagatcgcagactacaattataagctgcctgacgatttcaccggctgcgtgatcgcctggaactccaacaatctggattctaaagtgggcggcaactacaattatctgtacaggctgtttcgcaagtccaatctgaagccattcgagcgggacatctccacagagatctaccaggccggctctaccccctgcaatggcgtggagggctttaactgttatttccctctgcagtcttacggcttccagccaacaaacggcgtgggctatcagccctacagagtggtggtgctgtcctttgagctgctgcacgcaccagcaacagtgtgcggcccaaagaagtctaccaatctggtgaagaacaagtgcgtgaacttcaacttcaacggactgaccggcacaggcgtgctgaccgagagcaataagaagttcctgccttttcagcagttcatgagggacatcgcagataccacagacgccgtgcgcgaccctcagaccctggagatcctggacatcacaccatgcagcttcggcggcgtgtccgtgatcacaccaggcaccaatacatccaaccaggtggccgtgctgtatcaggacgtgaattgtaccgaggtgcccgtggcaatccacgcagatcagctgacccctacatggcgggtgtactctaccggcagcaacgtgttccagacaagagccggatgcctgatcggagcagagcacgtgaacaatagctatgagtgcgacatccctatcggcgccggcatctgtgccagctaccagacccagacaaactccccatctggagcaggctcccaccatcaccatcaccatcaccatcaccactga

SEQ ID NO: 3999 - DNA, 2148 bp, Artificial Sequence
  Description of Artificial Sequence: Synthetic polynucleotide
atgggcatcctgccaagcccaggaatgcccgccctgctgtctctggtgagcctgctgtccgtgctgctgatgggatgcgtggcagagacaggcacacagtgcgtgaacctgaccacaaggacccagctgccccctgcctataccaattctttcacacggggcgtgtactatcccgacaaggtgtttagaagctccgtgctgcactccacacaggatctgtttctgcctttcttttctaacgtgacctggttccacgccatccacgtgtccggcaccaatggcacaaagcggttcgacaatcccgtgctgccttttaacgatggcgtgtacttcgccagcaccgagaagtccaacatcatcagaggctggatctttggcaccacactggactctaagacacagagcctgctgatcgtgaacaatgccaccaacgtggtgatcaaggtgtgcgagttccagttttgtaatgatccattcctgggcgtgtactatcacaagaacaataagtcctggatggagtctgagtttcgcgtgtattctagcgccaacaattgcacatttgagtacgtgagccagcccttcctgatggacctggagggcaagcagggcaatttcaagaacctgagggagttcgtgtttaagaatatcgatggctacttcaagatctacagcaagcacaccccaatcaacctggtgcgcgacctgccacagggattctccgccctggagccactggtggatctgcccatcggcatcaacatcacccggtttcagacactgctggccctgcacagatcctacctgacaccaggcgactcctctagcggatggaccgcaggagctgccgcctactatgtgggctatctgcagccccggaccttcctgctgaagtacaacgagaatggcaccatcacagacgcagtggattgcgccctggaccccctgtctgagacaaagtgtacactgaagagctttaccgtggagaagggcatctatcagacaagcaatttcagggtgcagcctaccgagtccatcgtgcgctttcccaatatcacaaacctgtgcccttttggcgaggtgttcaacgccaccagattcgccagcgtgtacgcctggaatcggaagagaatctccaactgcgtggccgactattctgtgctgtacaactccgcctctttcagcacctttaagtggtatggcgtgtctcccacaaagctgaatgatctgtgctttaccaacgtgtacgccgatagcttcgtgatcaggggagacgaagtgagacagatcgcaccaggacagacaggaaagatcgcagactacaattataagctgcctgacgatttcaccggctgcgtgatcgcctggaactccaacaatctggattctaaagtgggcggcaactacaattatctgtacaggctgtttcgcaagtccaatctgaagccattcgagcgggacatctccacagagatctaccaggccggctctaccccctgcaatggcgtggagggctttaactgttatttccctctgcagtcttacggcttccagccaacaaacggcgtgggctatcagccctacagagtggtggtgctgtcctttgagctgctgcacgcaccagcaacagtgtgcggcccaaagaagtctaccaatctggtgaagaacaagtgcgtgaacttcaacttcaacggactgaccggcacaggcgtgctgaccgagagcaataagaagttcctgccttttcagcagttcggcagggacatcgcagataccacagacgccgtgcgcgaccctcagaccctggagatcctggacatcacaccatgcagcttcggcggcgtgtccgtgatcacaccaggcaccaatacatccaaccaggtggccgtgctgtatcaggacgtgaattgtaccgaggtgcccgtggcaatccacgcagatcagctgacccctacatggcgggtgtactctaccggcagcaacgtgttccagacaagagccggatgcctgatcggagcagagcacgtgaacaatagctatgagtgcgacatccctatcggcgccggcatctgtgccagctaccagacccagacaaactccccatctggagcaggctcccaccatcaccatcaccatcaccatcaccactga

SEQ ID NO: 4000 - DNA, 2148 bp, Artificial Sequence
  Description of Artificial Sequence: Synthetic polynucleotide
atgggcatcctgccaagcccaggaatgcccgccctgctgtctctggtgagcctgctgtccgtgctgctgatgggatgcgtggcagagacaggcacacagtgcgtgaacctgaccacaaggacccagctgccccctgcctataccaattctttcacacggggcgtgtactatcccgacaaggtgtttagaagctccgtgctgcactccacacaggatctgtttctgcctttcttttctaacgtgacctggttccacgccatccacgtgtccggcaccaatggcacaaagcggttcgacaatcccgtgctgccttttaacgatggcgtgtacttcgccagcaccgagaagtccaacatcatcagaggctggatctttggcaccacactggactctaagacacagagcctgctgatcgtgaacaatgccaccaacgtggtgatcaaggtgtgcgagttccagttttgtaatgatccattcctgggcgtgtactatcacaagaacaataagtcctggatggagtctgagtttcgcgtgtattctagcgccaacaattgcacatttgagtacgtgagccagcccttcctgatggacctggagggcaagcagggcaatttcaagaacctgagggagttcgtgtttaagaatatcgatggctacttcaagatctacagcaagcacaccccaatcaacctggtgcgcgacctgccacagggattctccgccctggagccactggtggatctgcccatcggcatcaacatcacccggtttcagacactgctggccctgcacagatcctacctgacaccaggcgactcctctagcggatggaccgcaggagctgccgcctactatgtgggctatctgcagccccggaccttcctgctgaagtacaacgagaatggcaccatcacagacgcagtggattgcgccctggaccccctgtctgagacaaagtgtacactgaagagctttaccgtggagaagggcatctatcagacaagcaatttcagggtgcagcctaccgagtccatcgtgcgctttcccaatatcacaaacctgtgcccttttggcgaggtgttcaacgccaccagattcgccagcgtgtacgcctggaatcggaagagaatctccaactgcgtggccgactattctgtgctgtacaactccgcctctttcagcacctttaagtgctatggcgtgtctcccacaaagctgaatgatctgtgctttaccaacgtgtacgccgatagcttcgtgatcaggggagacgaagtgagacagatcgcaccaggacagacaggaaagatcgcagactacaattataagctgcctgacgatttcaccggctgcgtgatcgcctggaactccaacaatctggattctaaagtgggcggcaactacaattatctgtacaggctgtttcgcaagtccaatctgaagccattcgagcgggacatctccacagagcaataccaggccggctctaccccctgcaatggcgtggagggctttaactgttatttccctctgcagtcttacggcttccagccaacaaacggcgtgggctatcagccctacagagtggtggtgctgtcctttgagctgctgcacgcaccagcaacagtgtgcggcccaaagaagtctaccaatctggtgaagaacaagtgcgtgaacttcaacttcaacggactgaccggcacaggcgtgctgaccgagagcaataagaagttcctgccttttcagcagttcggcagggacatcgcagataccacagacgccgtgcgcgaccctcagaccctggagatcctggacatcacaccatgcagcttcggcggcgtgtccgtgatcacaccaggcaccaatacatccaaccaggtggccgtgctgtatcaggacgtgaattgtaccgaggtgcccgtggcaatccacgcagatcagctgacccctacatggcgggtgtactctaccggcagcaacgtgttccagacaagagccggatgcctgatcggagcagagcacgtgaacaatagctatgagtgcgacatccctatcggcgccggcatctgtgccagctaccagacccagacaaactccccatctggagcaggctcccaccatcaccatcaccatcaccatcaccactga

SEQ ID NO: 4001 - DNA, 2148 bp, Artificial Sequence
  Description of Artificial Sequence: Synthetic polynucleotide
atgggcatcctgccaagcccaggaatgcccgccctgctgtctctggtgagcctgctgtccgtgctgctgatgggatgcgtggcagagacaggcacacagtgcgtgaacctgaccacaaggacccagctgccccctgcctataccaattctttcacacggggcgtgtactatcccgacaaggtgtttagaagctccgtgctgcactccacacaggatctgtttctgcctttcttttctaacgtgacctggttccacgccatccacgtgtccggcaccaatggcacaaagcggttcgacaatcccgtgctgccttttaacgatggcgtgtacttcgccagcaccgagaagtccaacatcatcagaggctggatctttggcaccacactggactctaagacacagagcctgctgatcgtgaacaatgccaccaacgtggtgatcaaggtgtgcgagttccagttttgtaatgatccattcctgggcgtgtactatcacaagaacaataagtcctggatggagtctgagtttcgcgtgtattctagcgccaacaattgcacatttgagtacgtgagccagcccttcctgatggacctggagggcaagcagggcaatttcaagaacctgagggagttcgtgtttaagaatatcgatggctacttcaagatctacagcaagcacaccccaatcaacctggtgcgcgacctgccacagggattctccgccctggagccactggtggatctgcccatcggcatcaacatcacccggtttcagacactgctggccctgcacagatcctacctgacaccaggcgactcctctagcggatggaccgcaggagctgccgcctactatgtgggctatctgcagccccggaccttcctgctgaagtacaacgagaatggcaccatcacagacgcagtggattgcgccctggaccccctgtctgagacaaagtgtacactgaagagctttaccgtggagaagggcatctatcagacaagcaatttcagggtgcagcctaccgagtccatcgtgcgctttcccaatatcacaaacctgtgcccttttggcgaggtgttcaacgccaccagattcgccagcgtgtacgcctggaatcggaagagaatctccaactgcgtggccgactattctgtgctgtacaactccgcctctttcagcacctttaagtgctatggcgtgtctcccacaaagctgaatgatctgtgctttaccaacgtgtacgccgatagcttcgtgatcaggggagacgaagtgagacagatcgcaccaggacagacaggaaatatcgcagactacaattataagctgcctgacgatttcaccggctgcgtgatcgcctggaactccaacaatctggattctaaagtgggcggcaactacaattatctgtacaggctgtttcgcaagtccaatctgaagccattcgagcgggacatctccacagagatctaccaggccggctctaccccctgcaatggcgtggagggctttaactgttatttccctctgcagtcttacggcttccagccaacaaacggcgtgggctatcagccctacagagtggtggtgctgtcctttgagctgctgcacgcaccagcaacagtgtgcggcccaaagaagtctaccaatctggtgaagaacaagtgcgtgaacttcaacttcaacggactgaccggcacaggcgtgctgaccgagagcaataagaagttcctgccttttcagcagttcggcagggacatcgcagataccacagacgccgtgcgcgaccctcagaccctggagatcctggacatcacaccatgcagcttcggcggcgtgtccgtgatcacaccaggcaccaatacatccaaccaggtggccgtgctgtatcaggacgtgaattgtaccgaggtgcccgtggcaatccacgcagatcagctgacccctacatggcgggtgtactctaccggcagcaacgtgttccagacaagagccggatgcctgatcggagcagagcacgtgaacaatagctatgagtgcgacatccctatcggcgccggcatctgtgccagctaccagacccagacaaactccccatctggagcaggctcccaccatcaccatcaccatcaccatcaccactga

SEQ ID NO: 4002 - DNA, 2148 bp, Artificial Sequence
  Description of Artificial Sequence: Synthetic polynucleotide
atgggcatcctgccaagcccaggaatgcccgccctgctgtctctggtgagcctgctgtccgtgctgctgatgggatgcgtggcagagacaggcacacagtgcgtgaacctgaccacaaggacccagctgccccctgcctataccaattctttcacacggggcgtgtactatcccgacaaggtgtttagaagctccgtgctgcactccacacaggatctgtttctgcctttcttttctaacgtgacctggttccacgccatccacgtgtccggcaccaatggcacaaagcggttcgacaatcccgtgctgccttttaacgatggcgtgtacttcgccagcaccgagaagtccaacatcatcagaggctggatctttggcaccacactggactctaagacacagagcctgctgatcgtgaacaatgccaccaacgtggtgatcaaggtgtgcgagttccagttttgtaatgatccattcctgggcgtgtactatcacaagaacaataagtcctggatggagtctgagtttcgcgtgtattctagcgccaacaattgcacatttgagtacgtgagccagcccttcctgatggacctggagggcaagcagggcaatttcaagaacctgagggagttcgtgtttaagaatatcgatggctacttcaagatctacagcaagcacaccccaatcaacctggtgcgcgacctgccacagggattctccgccctggagccactggtggatctgcccatcggcatcaacatcacccggtttcagtatctgctggccctgcacagatcctacctgacaccaggcgactcctctagcggatggaccgcaggagctgccgcctactatgtgggctatctgcagccccggaccttcctgctgaagtacaacgagaatggcaccatcacagacgcagtggattgcgccctggaccccctgtctgagacaaagtgtacactgaagagctttaccgtggagaagggcatctatcagacaagcaatttcagggtgcagcctaccgagtccatcgtgcgctttcccaatatcacaaacctgtgcccttttggcgaggtgttcaacgccaccagattcgccagcgtgtacgcctggaatcggaagagaatctccaactgcgtggccgactattctgtgctgtacaactccgcctctttcagcacctttaagtgctatggcgtgtctcccacaaagctgaatgatctgtgctttaccaacgtgtacgccgatagcttcgtgatcaggggagacgaagtgagacagatcgcaccaggacagacaggaaagatcgcagactacaattataagctgcctgacgatttcaccggctgcgtgatcgcctggaactccaacaatctggattctaaagtgggcggcaactacaattatctgtacaggctgtttcgcaagtccaatctgaagccattcgagcgggacatctccacagagatctaccaggccggctctaccccctgcaatggcgtggagggctttaactgttatttccctctgcagtcttacggcttccagccaacaaacggcgtgggctatcagccctacagagtggtggtgctgtcctttgagctgctgcacgcaccagcaacagtgtgcggcccaaagaagtctaccaatctggtgaagaacaagtgcgtgaacttcaacttcaacggactgaccggcacaggcgtgctgaccgagagcaataagaagttcctgccttttcagcagttcggcagggacatcgcagataccacagacgccgtgcgcgaccctcagaccctggagatcctggacatcacaccatgcagcttcggcggcgtgtccgtgatcacaccaggcaccaatacatccaaccaggtggccgtgctgtatcaggacgtgaattgtaccgaggtgcccgtggcaatccacgcagatcagctgacccctacatggcgggtgtactctaccggcagcaacgtgttccagacaagagccggatgcctgatcggagcagagcacgtgaacaatagctatgagtgcgacatccctatcggcgccggcatctgtgccagctaccagacccagacaaactccccatctggagcaggctcccaccatcaccatcaccatcaccatcaccactga

SEQ ID NO: 4003 - DNA, 2148 bp, Artificial Sequence
  Description of Artificial Sequence: Synthetic polynucleotide
atgggcatcctgccaagcccaggaatgcccgccctgctgtctctggtgagcctgctgtccgtgctgctgatgggatgcgtggcagagacaggcacacagtgcgtgaacctgaccacaaggacccagctgccccctgcctataccaattctttcacacggggcgtgtactatcccgacaaggtgtttagaagctccgtgctgcactccacacaggatctgtttctgcctttcttttctaacgtgacctggttccacgcctaccacgtgtccggcaccaatggcacaaagcggttcgacaatcccgtgctgccttttaacgatggcgtgtacttcgccagcaccgagaagtccaacatcatcagaggctggatctttggcaccacactggactctaagacacagagcctgctgatcgtgaacaatgccaccaacgtggtgatcaaggtgtgcgagttccagttttgtaatgatccattcctgggcgtgtactatcacaagaacaataagtcctggatggagtctgagtttcgcgtgtattctagcgccaacaattgcacatttgagtaccatagccagcccttcctgatggacctggagggcaagcagggcaatttcaagaacctgagggagttcgtgtttaagaatatcgatggctacttcaagatctacagcaagcacaccccaatcaacctggtgcgcgacctgccacagggattctccgccctggagccactggtggatctgcccatcggcatcaacatcacccggtttcagacactgctggccctgcacagatcctacctgacaccaggcgactcctctagcggatggaccgcaggagctgccgcctactatgtgggctatctgcagccccggaccttcctgctgaagtacaacgagaatggcaccatcacagacgcagtggattgcgccctggaccccctgtctgagacaaagtgtacactgaagagctttaccgtggagaagggcatctatcagacaagcaatttcagggtgcagcctaccgagtccatcgtgcgctttcccaatatcacaaacaaatgcccttttggcgaggtgttcaacgccaccagattcgccagcgtgtacgcctggaatcggaagagaatctccaactgcgtggccgactattctgtgctgtacaactccgcctctttcagcacctttaagtgctatggcgtgtctcccacaaagctgaatgatctgtgctttaccaacgtgtacgccgatagcttcgtgatcaggggagacgaagtgagacagatcgcaccaggacagacaggaaagatcgcagactacaattataagctgcctgacgatttcaccggctgcgtgatcgcctggaactccaacaatctggattctaaagtgggcggcaactacaattatctgtacaggctgtttcgcaagtccaatctgaagccattcgagcgggacatctccacagagatctaccaggccggctctaccccctgcaatggcgtggagggctttaactgttatttccctctgcagtcttacggcttccagccaacaaacggcccgggccaacagccctacagagtggtggtgctgtcctttgagctgctgcacgcaccagcaacagtgtgcggcccaaagaagtctaccaatctggtgaagaacaagtgcgtgaacttcaacttcaacggactgaccggcacaggcgtgctgaccgagagcaataagaagttcctgccttttcagcagttcggcagggacatcgcagataccacagacgccgtgcgcgaccctcagaccctggagatcctggacatcacaccatgcagcttcggcggcgtgtccgtgatcacaccaggcaccaatacatccaaccaggtggccgtgctgtatcaggacgtgaattgtaccgaggtgcccgatgcaatccacgcagatcagctgacccctacatggcgggtgtactctaccggcagcaacgtgttccagacaagagccggatgcctgatcggagcagagcacgtgaacaatagctatgagtgcgacatccctatcggcgccggcatctgtgccagctaccagacccagacaaactccccatctggagcaggctcccaccatcaccatcaccatcaccatcaccactga

SEQ ID NO: 4004 - DNA, 2148 bp, Artificial Sequence
  Description of Artificial Sequence: Synthetic polynucleotide
atgggcatcctgccaagcccaggaatgcccgccctgctgtctctggtgagcctgctgtccgtgctgctgatgggatgcgtggcagagacaggcacacagtgcgtgaacctgaccacaaggacccagctgccccctgcctataccaattctttcacacggggcgtgtactatcccgacaaggtgtttagaagctccgtgctgcactccacacaggatctgtttctgcctttcttttctaacgtgacctggttccacgccatccacgtgtccggcaccaatggcacaaagcggttcgacaatcccgtgctgccttttaacgatggcgtgtacttcgccagcaccgagaagtccaacatcatcagaggctggatctttggcaccacactggactctaagacacagagcctgctgatcgtgaacaatgccaccaacgtggtgatcaaggtgtgcgagttccagttttgtaatgatccattcctgggcgtgtactatcacaagaacaataagtcctggatggagtctgagtttcgcgtgtattctagcgccaacaattgcacatttgagtacgtgagccagcccttcctgatggacctggagggcaagcagggcaatttcaagaacctgagggagttcgtgtttaagaatatcgatggctacttcaagatctacagcaagcacaccccaatcaacctggtgcgcgacctgccacagggattctccgccctggagccactggtggatctgcccatcggcatcaacatcacccggtttcagacactgctggccctgcacagatcctacctgacaccaggcgactcctctagcggatggaccgcaggagctgccgcctactatgtgggctatctgcagccccggaccttcctgctgaagtacaacgagaatggcaccatcacagacgcagtggattgcgccctggaccccctgtctgagacaaagtgtacactgaagagctttaccgtggagaagggcatctatcagacaagcaatttcagggtgcagcctaccgagtccatcgtgcgctttcccaatatcacaaacctgtgcccttttggcgaggtgttcaacgccaccagattcgccagcgtgtacgcctggaatcggaagagaatctccaactgcgtggccgactattctgtgctgtacaactccgcctctttcagcacctttaagtgctatggcgtgtctcccacaaagctgaatgatctgtgctttaccaacgtgtacgccgatagcttcgtgatcaggggagacgaagtgagacagatcgcaccaggacagacaggaaagatcgcagactacaattataagctgcctgacgatttcaccggctgcgtgatcgcctggaactccaacaatctggattctaaaccgggcggcaactacaattatctgtacaggctgtttcgcaagtccaatctgaagccattcgagcgggacatctccacagagatctaccaggccggctctaccccctgcaatggcgtggagggctttaactgttatttccctctgcagtcttacggcttccagccaacaaacggcgtgggctatcagccctacagagtggtggtgctgtcctttgagctgctgcacgcaccagcaacagtgtgcggcccaaagaagtctaccaatctggtgaagaacaagtgcgtgaacttcaacttcaacggactgaccggcacaggcgtgctgaccgagagcaataagaagttcctgccttttcagcagttcggcagggacatcgcagataccacagacgccgtgcgcgaccctcagaccctggagatcctggacatcacaccatgcagcttcggcggcgtgtccgtgatcacaccaggcaccaatacatccaaccaggtggccgtgctgtatcaggacgtgaattgtaccgaggtgcccgtggcaatccacgcagatcagctgacccctacatggcgggtgtactctaccggcagcaacgtgttccagacaagagccggatgcctgatcggagcagagcacgtgaacaatagctatgagtgcgacatccctatcggcgccggcatctgtgccagctaccagacccagacaaactccccatctggagcaggctcccaccatcaccatcaccatcaccatcaccactga

SEQ ID NO: 4005 - DNA, 2148 bp, Artificial Sequence
  Description of Artificial Sequence: Synthetic polynucleotide
atgggcatcctgccaagcccaggaatgcccgccctgctgtctctggtgagcctgctgtccgtgctgctgatgggatgcgtggcagagacaggcacacagtgcgtgaacctgaccacaaggacccagctgccccctgcctataccaattctttcacacggggcgtgtactatcccgacaaggtgtttagaagcaatgtgctgcactccacacaggatctgtttctgcctttcttttctaacgtgacctggttccacgccatccacgtgtccggcaccaatggcacaaagcggttcgacaatcccgtgctgccttttaacgatggcgtgtacttcgccagcaccgagaagtccaacatcatcagaggctggatctttggcaccacactggactctaagacacagagcctgctgatcgtgaacaatgccaccaacgtggtgatcaaggtgtgcgagttccagttttgtaatgatccattcctgggcgtgtactatcacaagaacaataagtcctggatggagtctgagtttcgcgtgtattctagcgccaacaattgcacatttgagtacgtgagccagcccttcctgatggacctggagggcaagcagggcaatttcaagaacctgagggagttcgtgtttaagaatatcgatggctacttcaagatctacagcaagcacaccccaatcaacctggtgcgcgacctgccacagggattctccgccctggagccactggtggatctgcccatcggcatcaacatcacccggtttcagacactgctggccctgcacagatcctacctgacaccaggcgactcctctagcggatggaccgcaggagctgccgcctactatgtgggctatctgcagccccggaccttcctgctgaagtacaacgagaatggcaccatcacagacgcagtggattgcgccctggaccccctgtctgagacaaagtgtacactgaagagctttaccgtggagaagggcatctatcagacaagcaatttcagggtgcagcctaccgagtccatcgtgcgctttcccaatatcacaaacctgtgcccttttggcgaggtgttcaacgccaccagattcgccagcgtgtacgcctggaatcggaagagaatctccaactgcgtggccgactattctgtgctgtacaactccgcctctttcagcacctttaagtgctatggcgtgtctcccacaaagctgaatgatctgtgctttaccaacgtgtacgccgatagcttcgtgatcaggggagacgaagtgagacagatcgcaccaggacagacaggaaagatcgcagactacaattataagctgcctgacgatttcaccggctgcgtgatcgcctggaactccaacaatctggattctaaagtgggcggcaactacaattatctgtacaggctgtttcgcaagtccaatctgaagccattcgagcgggacatctccacagagatctaccaggccggctctaccccctgcaatggcgtggagggctttaactgttatttccctctgcagtcttacggcttccagccaacaaacggcgtgggctatcagccctacagagtggtggtgctgtcctttgagctgctgcacgcaccagcaacagtgtgcggcccaaagaagtctaccaatctggtgaagaacaagtgcgtgaacttcaacttcaacggactgaccggcacaggcgtgctgaccgagagcaataagaagttcctgccttttcagcagttcggcagggacatcgcagataccacagacgccgtgcgcgaccctcagaccctggagatcctggacatcacaccatgcagcttcggcggcgtgtccgtgatcacaccaggcaccaatacatccaaccaggtggccgtgctgtatcaggacgtgaattgtaccgaggtgcccgtggcaatccacgcagatcagctgacccctacatggcgggtgtactctaccggcagcaacgtgttccagacaagagccggatgcctgatcggagcagagcacgtgaacaatagctatgagtgcgacatccctatcggcgccggcatctgtgccagctaccagacccagacaaactccccatctggagcaggctcccaccatcaccatcaccatcaccatcaccactga

SEQ ID NO: 4006 - DNA, 2148 bp, Artificial Sequence
  Description of Artificial Sequence: Synthetic polynucleotide
atgggcatcctgccaagcccaggaatgcccgccctgctgtctctggtgagcctgctgtccgtgctgctgatgggatgcgtggcagagacaggcacacagtgcgtgaacctgaccacaaggacccagctgccccctgcctataccaattctttcacacggggcgtgtactatcccgacaaggtgtttagaagctccgtgctgcactccacacaggatctgtttctgcctttcttttctaacgtgacctggttccacgccatccacgtgtccggcaccaatggcacaaagcggttcgacaatcccgtgctgccttttaacgatggcgtgtacttcgccagcaccgagaagtccaacatcatcagaggctggatctttggcaccacactggactctaagacacagagcctgctgatcgtgaacaatgccaccaacgtggtgatcaaggtgtgcgagttccagttttgtaatgatccattcctgggcgtgtactatcacaagaacaataagtcctggatggagtctgagtttcgcgtgtattctagcgccaacaattgcacatttgagtacgtgagccagcccttcctgatggacctggagggcaagcagggcaatttcaagaacctgagggagttcgtgtttaagaatatcgatggctacttcaagatctacagcaagcacaccccaatcaacctggtgcgcgacctgccacagggattctccgccctggagccactggtggatctgcccatcggcatcaacatcacccggtttcagacactgctggccctgcacagatcctacctgacaccaggcgactcctctagcggatggaccgcaggagctgccgcctactatgtgggctatctgcagccccggaccttcctgctgaagtacaacgagaatggcaccatcacagacgcagtggattgcgccctggaccccctgtctgagacaaagtgtacactgaagagctttaccgtggagaagggcatctatcagacaagcaatttcagggtgcagcctaccgagtccatcgtgcgctttcccaatatcacaaacctgtgcccttttggcgaggtgttcaacgccaccagattcgccagcgtgtacgcctggaatcggaagagaatctccaactgcgtggccgactattctgtgctgtacaactccgcctctttcagcacctttaagtgctatggcgtgtctcccacaaagctgaatgatctgtgctttaccaacgtgtacgccgatagcttcgtgatcaggggagacgaagtgagacagatcgcaccaggacagacaggaaagatcgcactttacaattataagctgcctgacgatttcaccggctgcgtgatcgcctggaactccaacaatctggattctaaagtgggcggcaactacaattatctgtacaggctgtttcgcaagtccaatctgaagccattcgagcgggacatctccacagagatctaccaggccggctctaccccctgcaatggcgtggagggctttaactgttatttccctctgcagtcttacggcttccagccaacaaacggcgtgggctatcagccctacagagtggtggtgctgtcctttgagctgctgcacgcaccagcaacagtgtgcggcccaaagaagtctaccaatctggtgaagaacaagtgcgtgaacttcaacttcaacggactgaccggcacaggcgtgctgaccgagagcaataagaagttcctgccttttcagcagttcggcagggacatcgcagataccacagacgccgtgcgcgaccctcagaccctggagatcctggacatcacaccatgcagcttcggcggcgtgtccgtgatcacaccaggcaccaatacatccaaccaggtggccgtgctgtatcaggacgtgaattgtaccgaggtgcccgtggcaatccacgcagatcagctgacccctacatggcgggtgtactctaccggcagcaacgtgttccagacaagagccggatgcctgatcggagcagagcacgtgaacaatagctatgagtgcgacatccctatcggcgccggcatctgtgccagctaccagacccagacaaactccccatctggagcaggctcccaccatcaccatcaccatcaccatcaccactga

SEQ ID NO: 4007 - DNA, 2148 bp, Artificial Sequence
  Description of Artificial Sequence: Synthetic polynucleotide
atgggcatcctgccaagcccaggaatgcccgccctgctgtctctggtgagcctgctgtccgtgctgctgatgggatgcgtggcagagacaggcacacagtgcgtgaacctgaccacaaggacccagctgccccctgcctataccaattctttcacacggggcgtgtactatcccgacaaggtgtttagaagctccgtgctgcactccacacaggatctgtttctgcctttcttttctaacgtgacctggttccacgccatccacgtgtccggcaccaatggcacaaagcggttcgacaatcccgtgctgccttttaacgatggcgtgtacttcgccagcaccgagaagtccaacatcatcagaggctggatctttggcaccacactggactctaagacacagagcctgctgatcgtgaacaatgccaccaacgtggtgatcaaggtgtgcgagttccagttttgtaatgatccattcctgggcgtgtactatcacaagaacaataagtcctggatggagtctgagtttcgcgtgtattctagcgccaacaattgcacatttgagtacgtgagccagcccttcctgatggacctggagggcaagcagggcaatttcaagaacctgagggagttcgtgtttaagaatatcgatggctacttcaagatctacagcaagcacaccccaatcaacctggtgcgcgacctgccacagggattctccgccctggagccactggtggatctgcccatcggcatcaacatcacccggtttcagacactgctggccctgcacagatcctacctgacaccaggcgactcctctagcggatggaccgcaggagctgccgcctactatgtgggctatctgcagccccggaccttcctgctgaagtacaacgagaatggcaccatcacagacgcagtggattgcgccctggaccccctgtctgagacaaagtgtacactgaagagctttaccgtggagaagggcatctatcagacaagcaatttcagggtgcagcctaccgagtccatcgtgcgctttcccaatatcacaaacctgtgcccttttggcgaggtgttcaacgccaccagattcgccagcgtgtacgcctggaatcggaagagaatctccaactgcgtggccgactattctgtgctgtacaactccgcctctttcagcacctttaagtgctatggcgtgtctcccacaaagctgaatgatctgtgctttaccaacgtgtacgccgatagcttcgtgatcaggggagacgaagtgagacagatcgcaccaggacagacaggaaagatcgcagactacaattataagctgcctgacgatttcaccggctgcgtgatcgcctggaactccaacaatctggattctaaagtgggcggcaactacaattatctgtacaggctgtttcgcaagtccaatctgaagccattcgagcgggacatctccacagagatctaccaggccggctctaccccctgcaatggcgtggagggctttaactgttatttccctctgcagtcttacggcttccagccaacaaacggcgtgggcaaacagccctacagagtggtggtgctgtcctttgagctgctgcacgcaccagcaacagtgtgcggcccaaagaagtctaccaatctggtgaagaacaagtgcgtgaacttcaacttcaacggactgaccggcacaggcgtgctgaccgagagcaataagaagttcctgccttttcagcagttcggcagggacatcgcagataccacagacgccgtgcgcgaccctcagaccctggagatcctggacatcacaccatgcagcttcggcggcgtgtccgtgatcacaccaggcaccaatacatccaaccaggtggccgtgctgtatcaggacgtgaattgtaccgaggtgcccgtggcaatccacgcagatcagctgacccctacatggcgggtgtactctaccggcagcaacgtgttccagacaagagccggatgcctgatcggagcagagcacgtgaacaatagctatgagtgcgacatccctatcggcgccggcatctgtgccagctaccagacccagacaaactccccatctggagcaggctcccaccatcaccatcaccatcaccatcaccactga

SEQ ID NO: 4008 - DNA, 2148 bp, Artificial Sequence
  Description of Artificial Sequence: Synthetic polynucleotide
atgggcatcctgccaagcccaggaatgcccgccctgctgtctctggtgagcctgctgtccgtgctgctgatgggatgcgtggcagagacaggcacacagtgcgtgaacctgaccacaaggacccagctgccccctgcctataccaattctttcacacggggcgtgtactatcccgacaaggtgtttagaagctccgtgctgcactccacacaggatctgtttctgcctttcttttctaacgtgacctggttccacgccatccacgtgtccggcaccaatggcacaaagcggttcgactttcccgtgctgccttttaacgatggcgtgtacttcgccagcaccgagaagtccaacatcatcagaggctggatctttggcaccacactggactctaagacacagagcctgctgatcgtgaacaatgccaccaacgtggtgatcaaggtgtgcgagttccagttttgtaatgatccattcctgggcgtgtactatcacaagaacaataagtcctggatggagtctgagtttcgcgtgtattctagcgccaacaattgcacatttgagtacgtgagccagcccttcctgatggacctggagggcaagcagggcaatttcaagaacctgagggagttcgtgtttaagaatatcgatggctacttcaagatctacagcaagcacaccccaatcaacctggtgcgcgacctgccacagggattctccgccctggagccactggtggatctgcccatcggcatcaacatcacccggtttcagacactgctggccctgcacagatcctacctgacaccaggcgactcctctagcggatggaccgcaggagctgccgcctactatgtgggctatctgcagccccggaccttcctgctgaagtacaacgagaatggcaccatcacagacgcagtggattgcgccctggaccccctgtctgagacaaagtgtacactgaagagctttaccgtggagaagggcatctatcagacaagcaatttcagggtgcagcctaccgagtccatcgtgcgctttcccaatatcacaaacctgtgcccttttggcgaggtgttcaacgccaccagattcgccagcgtgtacgcctggaatcggaagagaatctccaactgcgtggccgactattctgtgctgtacaactccgcctctttcagcacctttaagtgctatggcgtgtctcccacaaagctgaatgatctgtgctttaccaacgtgtacgccgatagcttcgtgatcaggggagacgaagtgagacagatcgcaccaggacagacaggaaagatcgcagactacaattataagctgcctgacgatttcaccggctgcgtgatcgcctggaactccaacaatctggattctaaagtgggcggcaactacaattatctgtacaggctgtttcgcaagtccaatctgaagccattcgagcgggacatctccacagagatctaccaggccggctctaccccctgcaatggcgtggagggctttaactgttatttccctctgcagtcttacggcttccagccaacaaacggcgtgggctatcagccctacagagtggtggtgctgtcctttgagctgctgcacgcaccagcaacagtgtgcggcccaaagaagtctaccaatctggtgaagaacaagtgcgtgaacttcaacttcaacggactgaccggcacaggcgtgctgaccgagagcaataagaagttcctgccttttcagcagttcggcagggacatcgcagataccacagacgccgtgcgcgaccctcagaccctggagatcctggacatcacaccatgcagcttcggcggcgtgtccgtgatcacaccaggcaccaatacatccaaccaggtggccgtgctgtatcaggacgtgaattgtaccgaggtgcccgtggcaatccacgcagatcagctgacccctacatggcgggtgtactctaccggcagcaacgtgttccagacaagagccggatgcctgatcggagcagagcacgtgaacaatagctatgagtgcgacatccctatcggcgccggcatctgtgccagctaccagacccagacaaactccccatctggagcaggctcccaccatcaccatcaccatcaccatcaccactga

SEQ ID NO: 4009 - DNA, 2148 bp, Artificial Sequence
  Description of Artificial Sequence: Synthetic polynucleotide
atgggcatcctgccaagcccaggaatgcccgccctgctgtctctggtgagcctgctgtccgtgctgctgatgggatgcgtggcagagacaggcacacagtgcgtgaacctgaccacaaggacccagctgccccctgcctataccaattctttcacacggggcgtgtactatcccgacaaggtgtttagaagctccgtgctgcactccacacaggatctgtttctgcctttcttttctaacgtgacctggttccacgccatccacgtgtccggcaccaatggcacaaagcggttcgactaccccgtgctgccttttaacgatggcgtgtacttcgccagcaccgagaagtccaacatcatcagaggctggatctttggcaccacactggactctaagacacagagcctgctgatcgtgaacaatgccaccaacgtggtgatcaaggtgtgcgagttccagttttgtaatgatccattcctgggcgtgtactatcacaagaacaataagtcctggatggagtctgagtttcgcgtgtattctagcgccaacaattgcacatttgagtacgtgagccagcccttcctgatggacctggagggcaagcagggcaatttcaagaacctgagggagttcgtgtttaagaatatcgatggctacttcaagatctacagcaagcacaccccaatcaacctggtgcgcgacctgccacagggattctccgccctggagccactggtggatctgcccatcggcatcaacatcacccggtttcagacactgctggccctgcacagatcctacctgacaccaggcgactcctctagcggatggaccgcaggagctgccgcctactatgtgggctatctgcagccccggaccttcctgctgaagtacaacgagaatggcaccatcacagacgcagtggattgcgccctggaccccctgtctgagacaaagtgtacactgaagagctttaccgtggagaagggcatctatcagacaagcaatttcagggtgcagcctaccgagtccatcgtgcgctttcccaatatcacaaacctgtgcccttttggcgaggtgttcaacgccaccagattcgccagcgtgtacgcctggaatcggaagagaatctccaactgcgtggccgactattctgtgctgtacaactccgcctctttcagcacctttaagtgctatggcgtgtctcccacaaagctgaatgatctgtgctttaccaacgtgtacgccgatagcttcgtgatcaggggagacgaagtgagacagatcgcaccaggacagacaggaaagatcgcagactacaattataagctgcctgacgatttcaccggctgcgtgatcgcctggaactccaacaatctggattctaaagtgggcggcaactacaattatctgtacaggctgtttcgcaagtccaatctgaagccattcgagcgggacatctccacagagatctaccaggccggctctaccccctgcaatggcgtggagggctttaactgttatttccctctgcagtcttacggcttccagccaacaaacggcgtgggctatcagccctacagagtggtggtgctgtcctttgagctgctgcacgcaccagcaacagtgtgcggcccaaagaagtctaccaatctggtgaagaacaagtgcgtgaacttcaacttcaacggactgaccggcacaggcgtgctgaccgagagcaataagaagttcctgccttttcagcagttcggcagggacatcgcagataccacagacgccgtgcgcgaccctcagaccctggagatcctggacatcacaccatgcagcttcggcggcgtgtccgtgatcacaccaggcaccaatacatccaaccaggtggccgtgctgtatcaggacgtgaattgtaccgaggtgcccgtggcaatccacgcagatcagctgacccctacatggcgggtgtactctaccggcagcaacgtgttccagacaagagccggatgcctgatcggagcagagcacgtgaacaatagctatgagtgcgacatccctatcggcgccggcatctgtgccagctaccagacccagacaaactccccatctggagcaggctcccaccatcaccatcaccatcaccatcaccactga

SEQ ID NO: 4010 - DNA, 2148 bp, Artificial Sequence
  Description of Artificial Sequence: Synthetic polynucleotide
atgggcatcctgccaagcccaggaatgcccgccctgctgtctctggtgagcctgctgtccgtgctgctgatgggatgcgtggcagagacaggcacacagtgcgtgaacctgaccacaaggacccagctgccccctgcctataccaattctttcacacggggcgtgtactatcccgacaaggtgtttagaagctccgtgctgcaccttacacaggatctgtttctgcctttcttttctaacgtgacctggttccacgccatccacgtgtccggcaccaatggcacaaagcggttcgacaatcccgtgctgccttttaacgatggcgtgtacttcgccagcaccgagaagtccaacatcatcagaggctggatctttggcaccacactggactctaagacacagagcctgctgatcgtgaacaatgccaccaacgtggtgatcaaggtgtgcgagttccagttttgtaatgatccattcctgggcgtgtactatcacaagaacaataagtcctggatggagtctgagtttcgcgtgtattctagcgccaacaattgcacatttgagtacgtgagccagcccttcctgatggacctggagggcaagcagggcaatttcaagaacctgagggagttcgtgtttaagaatatcgatggctacttcaagatctacagcaagcacaccccaatcaacctggtgcgcgacctgccacagggattctccgccctggagccactggtggatctgcccatcggcatcaacatcacccggtttcagacactgctggccctgcacagatcctacctgacaccaggcgactcctctagcggatggaccgcaggagctgccgcctactatgtgggctatctgcagccccggaccttcctgctgaagtacaacgagaatggcaccatcacagacgcagtggattgcgccctggaccccctgtctgagacaaagtgtacactgaagagctttaccgtggagaagggcatctatcagacaagcaatttcagggtgcagcctaccgagtccatcgtgcgctttcccaatatcacaaacctgtgcccttttggcgaggtgttcaacgccaccagattcgccagcgtgtacgcctggaatcggaagagaatctccaactgcgtggccgactattctgtgctgtacaactccgcctctttcagcacctttaagtgctatggcgtgtctcccacaaagctgaatgatctgtgctttaccaacgtgtacgccgatagcttcgtgatcaggggagacgaagtgagacagatcgcaccaggacagacaggaaagatcgcagactacaattataagctgcctgacgatttcaccggctgcgtgatcgcctggaactccaacaatctggattctaaagtgggcggcaactacaattatctgtacaggctgtttcgcaagtccaatctgaagccattcgagcgggacatctccacagagatctaccaggccggctctaccccctgcaatggcgtggagggctttaactgttatttccctctgcagtcttacggcttccagccaacaaacggcgtgggctatcagccctacagagtggtggtgctgtcctttgagctgctgcacgcaccagcaacagtgtgcggcccaaagaagtctaccaatctggtgaagaacaagtgcgtgaacttcaacttcaacggactgaccggcacaggcgtgctgaccgagagcaataagaagttcctgccttttcagcagttcggcagggacatcgcagataccacagacgccgtgcgcgaccctcagaccctggagatcctggacatcacaccatgcagcttcggcggcgtgtccgtgatcacaccaggcaccaatacatccaaccaggtggccgtgctgtatcaggacgtgaattgtaccgaggtgcccgtggcaatccacgcagatcagctgacccctacatggcgggtgtactctaccggcagcaacgtgttccagacaagagccggatgcctgatcggagcagagcacgtgaacaatagctatgagtgcgacatccctatcggcgccggcatctgtgccagctaccagacccagacaaactccccatctggagcaggctcccaccatcaccatcaccatcaccatcaccactga

SEQ ID NO: 4011 - DNA, 2148 bp, Artificial Sequence
  Description of Artificial Sequence: Synthetic polynucleotide
atgggcatcctgccaagcccaggaatgcccgccctgctgtctctggtgagcctgctgtccgtgctgctgatgggatgcgtggcagagacaggcacacagtgcgtgaacctgaccacaaggacccagctgccccctgcctataccaattctttcacacggggcgtgtactatcccgacaaggtgtttagaagctccgtgctgcactccacacaggatctgtttctgcctttcttttctaacgtgacctggttccacgccaaacacgtgtccggcaccaatggcacaaagcggttcgacaatcccgtgctgccttttaacgatggcgtgtacttcgccagcaccgagaagtccaacatcatcagaggctggatctttggcaccacactggactctaagacacagagcctgctgatcgtgaacaatgccaccaacgtggtgatcaaggtgtgcgagttccagttttgtaatgatccattcctgggcgtgtactatcacaagaacaataagtcctggatggagtctgagtttcgcgtgtattctagcgccaacaattgcacatttgagtaccatagccagcccttcctgatggacctggagggcaagcagggcaatttcaagaacctgagggagttcgtgtttaagaatatcgatggctacttcaagatctacagcaagcacaccccaatcaacctggtgcgcgacctgccacagggattctccgccctggagccactggtggatctgcccatcggcatcaacatcacccggtttcagacactgctggccctgcacagatcctacctgacaccaggcgactcctctagcggagaaaccgcaggagctgccgcctactatgtgggctatctgcagccccggaccttcctgctgaagtacaacgagaatggcaccatcacagacgcagtggattgcgccctggaccccctgtctgagacaaagtgtacactgaagagctttaccgtggagaagggcatctatcagacaagcaatttcagggtgcagcctaccgagtccatcgtgcgctttcccaatatcacaaaccattgcccttttggcgaggtgttcaacgccaccagattcgccagcgtgtacgcctggaatcggaagagaatctccaactgcgtggccgactattctgtgctgtacaactccgcctctttcagcacctttaagtgctatggcgtgtctcccacaaagctgaatgatctgtgctttaccaacgtgtacgccgatagcttcgtgatcaggggagacgaagtgagacagatcgcaccaggacagacaggaaagatcgcagactacaattataagctgcctgacgatttcaccggctgcgtgatcgcctggaactccaacaatctggattctaaagtgggcggcaactacaattatctgtacaggctgtttcgcaagtccaatctgaagccattcgagcgggacatctccacagagatctaccaggccggctctaccccctgcaatggcgtggagggctttaactgttatttccctctgcagtcttacggcttccagccaacaaacggcccgggccaacagccctacagagtggtggtgctgtcctttgagctgctgcacgcaccagcaacagtgtgcggcccaaagaagtctaccaatctggtgaagaacaagtgcgtgaacttcaacttcaacggactgaccggcacaggcgtgctgaccgagagcaataagaagttcctgccttttcagcagttcggcagggacatcgcagataccacagacgccgtgcgcgaccctcagaccctggagatcctggacatcacaccatgcagcttcggcggcgtgtccgtgatcacaccaggcaccaatacatccaaccaggtggccgtgctgtatcaggacgtgaattgtaccgaggtgcccgatgcaatccacgcagatcagctgacccctacatggcgggtgtactctaccggcagcaacgtgttccagacaagagccggatgcctgatcggagcagagcacgtgaacaatagctatgagtgcgacatccctatcggcgccggcatctgtgccagctaccagacccagacaaactccccatctggagcaggctcccaccatcaccatcaccatcaccatcaccactga

SEQ ID NO: 4012 - DNA, 2148 bp, Artificial Sequence
  Description of Artificial Sequence: Synthetic polynucleotide
atgggcatcctgccaagcccaggaatgcccgccctgctgtctctggtgagcctgctgtccgtgctgctgatgggatgcgtggcagagacaggcacacagtgcgtgaacctgaccacaaggacccagctgccccctgcctataccaattctttcacacggggcgtgtactatcccgacaaggtgtttagaagctccgtgctgcactccacacaggatctgtttctgcctttcttttctaacgtgacctggttccacgccatccacgtgtccggcaccaatggcacaaagcggttcgacaatcccgtgctgccttttaacgatggcgtgtacttcgccagcaccgagaagtccaacatcatcagaggctggatctttggcaccacactggactctaagacacagagcctgctgatcgtgaacaatgccaccaacgtggtgatcaaggtgtgcgagttccagttttgtaatgatccattcctgggcgtgtactatcacaagaacaataagtcctggatggagtctgagtttcgcgtgtattctagcgccaacaattgcacatttgagtacgtgagccagcccttcctgatggacctggagggcaagcagggcaatttcaagaacctgagggagttcgtgtttaagaatatcgatggctacttcaagatctacagcaagcacaccccaatcaacctggtgcgcgacctgccacagggattctccgccctggagccactggtggatctgcccatcggcatcaacatcacccggtttcagacactgctggccctgcacagatcctacctgacaccaggcgactcctctagcggatggaccgcaggagctgccgcctactatgtgggctatctgcagccccggaccttcctgctgaagtacaacgagaatggcaccatcacagacgcagtggattgcgccctggaccccctgtctgagacaaagtgtacactgaagagctttaccgtggagaagggcatctatcagacaagcaatttcagggtgcagcctaccgagtccatcgtgcgctttcccaatatcacaaacctgtgcccttttggcgaggtgttcaacgccaccagattcgccagcgtgtacgcctggaatcggaagagaatctccaactgcgtggccgactattctgtgctgtacaactccgcctctttcagcacctttaagtgctatggcgtgtctcccacaaagctgaatgatctgtgctttaccaacgtgtacgccgatagcttcgtgatcaggggagacgaagtgagacagatcgcaccaggacagacaggaaagatcgcagactacaattataagctgcctgacgatttcaccggctgcgtgatcgcctggaactccaacaatctggattctaaagtgggcggcaactacaattatctgtacaggctgtttcgcaagtccaatctgaagccattcgagcgggacatctccacagagatctaccaggccggctctaccccctgcaatggcgtggagggctttaactgttatttccctctgcagtcttacggcttccagccaacaaacggcgacggctatcagccctacagagtggtggtgctgtcctttgagctgctgcacgcaccagcaacagtgtgcggcccaaagaagtctaccaatctggtgaagaacaagtgcgtgaacttcaacttcaacggactgaccggcacaggcgtgctgaccgagagcaataagaagttcctgccttttcagcagttcggcagggacatcgcagataccacagacgccgtgcgcgaccctcagaccctggagatcctggacatcacaccatgcagcttcggcggcgtgtccgtgatcacaccaggcaccaatacatccaaccaggtggccgtgctgtatcaggacgtgaattgtaccgaggtgcccgtggcaatccacgcagatcagctgacccctacatggcgggtgtactctaccggcagcaacgtgttccagacaagagccggatgcctgatcggagcagagcacgtgaacaatagctatgagtgcgacatccctatcggcgccggcatctgtgccagctaccagacccagacaaactccccatctggagcaggctcccaccatcaccatcaccatcaccatcaccactga

SEQ ID NO: 4013 - DNA, 2148 bp, Artificial Sequence
  Description of Artificial Sequence: Synthetic polynucleotide
atgggcatcctgccaagcccaggaatgcccgccctgctgtctctggtgagcctgctgtccgtgctgctgatgggatgcgtggcagagacaggcacacagtgcgtgaacctgaccacaaggacccagctgccccctgcctataccaattctttcacacggggcgtgtactatcccgacaaggtgtttagaagctccgtgctgcactccacacaggatctgtttctgcctttcttttctaacgtgacctggttccacgccatccacgtgtccggcaccaatggcacaaagcggttcgacaatcccgtgctgccttttaacgatggcgtgtacttcgccagcaccgagaagtccaacatcatcagaggctggatctttggcaccacactggactctaagacacagagcctgctgatcgtgaacaatgccaccaacgtggtgatcaaggtgtgcgagttccagttttgtaatgatccattcctgggcgtgtactatcacaagaacaataagtcctggatggagtctgagtttcgcgtgtattctagcgccaacaattgcacatttgagtacgtgagccagcccttcctgatggacctggagggcaagcagggcaatttcaagaacctgagggagttcgtgtttaagaatatcgatggctacttcaagatctacagcaagcacaccccaatcaacctggtgcgcgacctgccacagggattctccgccctggagccactggtggatctgcccatcggcatcaacatcacccggtttcagacactgctggccctgcacagatcctacctgacaccaggcgactcctctagcggatggaccgcaggagctgccgcctactatgtgggctatctgcagccccggaccttcctgctgaagtacaacgagaatggcaccatcacagacgcagtggattgcgccctggaccccctgtctgagacaaagtgtacactgaagagctttaccgtggagaagggcatctatcagacaagcaatttcagggtgcagcctaccgagtccatcgtgcgctttcccaatatcacaaacctgtgcccttttggcgaggtgttcaacgccaccagattcgccagcgtgtacgcctggaatcggaagagaatctccaactgcgtggccgactattctgtgctgtacaactccgcctctttcagcacctttaagtgctatggcgtgtctcccacaaagctgaatgatctgtgctttaccaacgtgtacgccgatagcttcgtgatcaggggagacgaagtgagacagatcgcaccaggacagacaggaaagatcgcagactacaattataagctgcctgacgatttcaccggctgcgtgatcgcctggaactccaacaatctggattctaaagtgggcggcaactacaattatctgtacaggctgtttcgcaagtccaatctgaagccattcgagcgggacatctccacagagatctaccaggccggctctaccccctgcaatggcgtggagggctttaactgttatttccctctgcagtcttacggcttccagccaacaaacggcaaaggctatcagccctacagagtggtggtgctgtcctttgagctgctgcacgcaccagcaacagtgtgcggcccaaagaagtctaccaatctggtgaagaacaagtgcgtgaacttcaacttcaacggactgaccggcacaggcgtgctgaccgagagcaataagaagttcctgccttttcagcagttcggcagggacatcgcagataccacagacgccgtgcgcgaccctcagaccctggagatcctggacatcacaccatgcagcttcggcggcgtgtccgtgatcacaccaggcaccaatacatccaaccaggtggccgtgctgtatcaggacgtgaattgtaccgaggtgcccgtggcaatccacgcagatcagctgacccctacatggcgggtgtactctaccggcagcaacgtgttccagacaagagccggatgcctgatcggagcagagcacgtgaacaatagctatgagtgcgacatccctatcggcgccggcatctgtgccagctaccagacccagacaaactccccatctggagcaggctcccaccatcaccatcaccatcaccatcaccactga

SEQ ID NO: 4014 - DNA, 2148 bp, Artificial Sequence
  Description of Artificial Sequence: Synthetic polynucleotide
atgggcatcctgccaagcccaggaatgcccgccctgctgtctctggtgagcctgctgtccgtgctgctgatgggatgcgtggcagagacaggcacacagtgcgtgaacctgaccacaaggacccagctgccccctgcctataccaattctttcacacggggcgtgtactatcccgacaaggtgtttagaagctccgtgctgcactccacacaggatctgtttctgcctttcttttctaacgtgacctggttccacgccatccacgtgtccggcaccaatggcacaaagcggttcgacaatcccgtgctgccttttaacgatggcgtgtacttcgccagcaccgagaagtccaacatcatcagaggctggatctttggcaccacactggactctaagacacagagcctgctgatcgtgaacaatgccaccaacgtggtgatcaaggtgtgcgagttccagttttgtaatgatccattcctgggcgtgtactatcacaagaacaataagtcctggatggagtctgagtttcgcgtgtattctagcgccaacaattgcacatttgagtacgtgagccagcccttcctgatggacctggagggcaagcagggcaatttcaagaacctgagggagttcgtgtttaagaatatcgatggctacttcaagatctacagcaagcacaccccaatcaacctggtgcgcgacctgccacagggattctccgccctggagccactggtggatctgcccatcggcatcaacatcacccggtttcagacactgctggccctgcacagatcctacctgacaccaggcgactcctctagcggatggaccgcaggagctgccgcctactatgtgggctatctgcagccccggaccttcctgctgaagtacaacgagaatggcaccatcacagacgcagtggattgcgccctggaccccctgtctgagacaaagtgtacactgaagagctttaccgtggagaagggcatctatcagacaagcaatttcagggtgcagcctaccgagtccatcgtgcgctttcccaatatcacaaacctgtgcccttttggcgaggtgttcaacgccaccagattcgccagcgtgtacgcctggaatcggaagagaatctccaactgcgtggccgactattctgtgctgtacaactccgcctctttcagcacctttaagtgctatggcgtgtctcccacaaagctgaatgatctgtgctttaccaacgtgtacgccgatagcttcgtgatcaggggagacgaagtgagacagatcgcaccaggacagacaggaaagatcgcagactacaattataagctgcctgacgatttcaccggctgcgtgatcgcctggaactccaacaatctggattctaaagtgggcggcaactacaattatctgtacaggctgtttcgcaagtccaatctgaagccattcgagcgggacatctccacagagatctaccaggccggctctaccccctgcaatggcgtggagggctttttgtgttatttccctctgcagtcttacggcttccagccaacaaacggcgtgggctatcagccctacagagtggtggtgctgtcctttgagctgctgcacgcaccagcaacagtgtgcggcccaaagaagtctaccaatctggtgaagaacaagtgcgtgaacttcaacttcaacggactgaccggcacaggcgtgctgaccgagagcaataagaagttcctgccttttcagcagttcggcagggacatcgcagataccacagacgccgtgcgcgaccctcagaccctggagatcctggacatcacaccatgcagcttcggcggcgtgtccgtgatcacaccaggcaccaatacatccaaccaggtggccgtgctgtatcaggacgtgaattgtaccgaggtgcccgtggcaatccacgcagatcagctgacccctacatggcgggtgtactctaccggcagcaacgtgttccagacaagagccggatgcctgatcggagcagagcacgtgaacaatagctatgagtgcgacatccctatcggcgccggcatctgtgccagctaccagacccagacaaactccccatctggagcaggctcccaccatcaccatcaccatcaccatcaccactga

SEQ ID NO: 4015 - DNA, 2148 bp, Artificial Sequence
  Description of Artificial Sequence: Synthetic polynucleotide
atgggcatcctgccaagcccaggaatgcccgccctgctgtctctggtgagcctgctgtccgtgctgctgatgggatgcgtggcagagacaggcacacagtgcgtgaacctgaccacaaggacccagctgccccctgcctataccaattctttcacacggggcgtgtactatcccgacaaggtgtttagaagctccgtgctgcactccacacaggatctgtttctgcctttcttttctaacgtgacctggttccacgccatccacgtgtccggcaccaatggcacaaagcggttcgacaatcccgtgctgccttttaacgatggcgtgtacttcgccagcaccgagaagtccaacatcatcagaggctggatctttggcaccacactggactctaagacacagagcctgctgatcgtgaacaatgccaccaacgtggtgatcaaggtgtgcgagttccagttttgtaatgatccattcctgggcgtgtactatcacaagaacaataagtcctggatggagtctgagtttcgcgtgtattctagcgccaacaattgcacatttgagtacgtgagccagcccttcctgatggacctggagggcaagcagggcaatttcaagaacctgagggagttcgtgtttaagaatatcgatggctacttcaagatctacagcaagcacaccccaatcaacctggtgcgcgacctgccacagggattctccgccctggagccactggtggatctgcccatcggcatcaacatcacccggtttcagacactgctggccctgcacagatcctacctgacaccaggcgactcctctagcggatggaccgcaggagctgccgcctactatgtgggctatctgcagccccggaccttcctgctgaagtacaacgagaatggcaccatcacagacgcagtggattgcgccctggaccccctgtctgagacaaagtgtacactgaagagctttaccgtggagaagggcatctatcagacaagcaatttcagggtgcagcctaccgagtccatcgtgcgctttcccaatatcacaaacctgtgcccttttggcgaggtgttcaacgccaccagattcgccagcgtgtacgcctggaatcggaagagaatctccaactgcgtggccgactattctgtgctgtacaactccgcctctttcagcacctttaagtgctatggcgtgtctcccacaaagctgaatgatctgtgctttaccaacgtgtacgccgatagcttcgtgatcaggggagacgaagtgagacagatcgcaccaggacagacaggaaagatcgcagactacaattataagctgcctgacgatttcaccggctgcgtgatcgcctggaactccaacaatctggattctaaagtgggcggcaactacaattatctgtacaggctgtttcgcaagtccaatctgaagccattcgagcgggacatctccacagagatctaccaggccggctctaccccctgcaatggcgtggagggctttaactgttatttccctctgcagtcttacggcttccagccaacaaacggcgtgggctatcagccctacagagtggtggtgctgtcctttgagctgctgcacgcaccagcaacagtgtgcggcccaaagaagtctaccaatctggtgaagaacaagtgcgtgaacttcaacttcaacggactgaccggcacaggcgtgctgaccgagagcaataagaagttcctgccttttcagcagttcggcagggacatcgcagataccacagacgccgtgcgcgaccctcagaccctggagatcctggacatcacaccatgcagcttcggcggcgtgtatgtgatcacaccaggcaccaatacatccaaccaggtggccgtgctgtatcaggacgtgaattgtaccgaggtgcccgtggcaatccacgcagatcagctgacccctacatggcgggtgtactctaccggcagcaacgtgttccagacaagagccggatgcctgatcggagcagagcacgtgaacaatagctatgagtgcgacatccctatcggcgccggcatctgtgccagctaccagacccagacaaactccccatctggagcaggctcccaccatcaccatcaccatcaccatcaccactga

SEQ ID NO: 4016 - DNA, 2148 bp, Artificial Sequence
  Description of Artificial Sequence: Synthetic polynucleotide
atgggcatcctgccaagcccaggaatgcccgccctgctgtctctggtgagcctgctgtccgtgctgctgatgggatgcgtggcagagacaggcacacagtgcgtgaacctgaccacaaggacccagctgccccctgcctataccaattctttcacacggggcgtgtactatcccgacaaggtgtttagaagctccgtgctgcactccacacaggatctgtttctgcctttcttttctaacgtgacctggttccacgccatccacgtgtccggcaccaatggcacaaagcggttcgacaatcccgtgctgccttttaacgatggcgtgtacttcgccagcaccgagaagtccaacatcatcagaggctggatctttggcaccacactggactctaagacacagagcctgctgatcgtgaacaatgccaccaacgtggtgatcaaggtgtgcgagttccagttttgtaatgatccattcctgggcgtgtactatcacaagaacaataagtcctggatggagtctgagtttcgcgtgtattctagcgccaacaattgcacatttgagtacgtgagccagcccttcctgatggacctggagggcaagcagggcaatttcaagaacctgagggagttcgtgtttaagaatatcgatggctacttcaagatctacagcaagcacaccccaatcaacctggtgcgcgacctgccacagggattctccgccctggagccactggtggatctgcccatcggcatcaacatcacccggtttcagacactgctggccctgcacagatcctacctgacaccaggcgactcctctagcggatggaccgcaggagctgccgcctactatgtgggctatctgcagccccggaccttcctgctgaagtacaacgagaatggcaccatcacagacgcagtggattgcgccctggaccccctgtctgagacaaagtgtacactgaagagctttaccgtggagaagggcatctatcagacaagcaatttcagggtgcagcctaccgagtccatcgtgcgctttcccaatatcacaaacctgtgcccttttggcgaggtgttcaacgccaccagattcgccagcgtgtacgcctggaatcggaagagaatctccaactgcgtggccgactattctgtgctgtacaactccgcctctttcagcacctttaagtgctatggcgtgtctcccacaaagctgaatgatctgtgctttaccaacgtgtacgccgatagcttcgtgatcaggggagacgaagtgagacagatcgcaccaggacagacaggaaagatccatgactacaattataagctgcctgacgatttcaccggctgcgtgatcgcctggaactccaacaatctggattctaaagtgggcggcaactacaattatctgtacaggctgtttcgcaagtccaatctgaagccattcgagcgggacatctccacagagatctaccaggccggctctaccccctgcaatggcgtggagggctttaactgttatttccctctgcagtcttacggcttccagccaacaaacggcgtgggctatcagccctacagagtggtggtgctgtcctttgagctgctgcacgcaccagcaacagtgtgcggcccaaagaagtctaccaatctggtgaagaacaagtgcgtgaacttcaacttcaacggactgaccggcacaggcgtgctgaccgagagcaataagaagttcctgccttttcagcagttcggcagggacatcgcagataccacagacgccgtgcgcgaccctcagaccctggagatcctggacatcacaccatgcagcttcggcggcgtgtccgtgatcacaccaggcaccaatacatccaaccaggtggccgtgctgtatcaggacgtgaattgtaccgaggtgcccgtggcaatccacgcagatcagctgacccctacatggcgggtgtactctaccggcagcaacgtgttccagacaagagccggatgcctgatcggagcagagcacgtgaacaatagctatgagtgcgacatccctatcggcgccggcatctgtgccagctaccagacccagacaaactccccatctggagcaggctcccaccatcaccatcaccatcaccatcaccactga

SEQ ID NO: 4017 - DNA, 2148 bp, Artificial Sequence
  Description of Artificial Sequence: Synthetic polynucleotide
atgggcatcctgccaagcccaggaatgcccgccctgctgtctctggtgagcctgctgtccgtgctgctgatgggatgcgtggcagagacaggcacacagtgcgtgaacctgaccacaaggacccagctgccccctgcctataccaattctttcacacggggcgtgtactatcccgacaaggtgtttagaagctccgtgctgcactccacacaggatctgtttctgcctttcttttctaacgtgacctggttccacgccatccacgtgtccggcaccaatggcacaaagcggttcgacaatcccgtgctgccttttaacgatggcgtgtacttcgccagcaccgagaagtccaacatcatcagaggctggatctttggcaccacactggactctaagacacagagcctgctgatcgtgaacaatgccaccaacgtggtgatcaaggtgtgcgagttccagttttgtaatgatccattcctgggcgtgtactatcacaagaacaataagtcctggatggagtctgagtttcgcgtgtattctagcgccaacaattgcacatttgagtacgtgagccagcccttcctgatggacctggagggcaagcagggcaatttcaagaacctgagggagttcgtgtttaagaatatcgatggctacttcaagatctacagcaagcacaccccaatcaacctggtgcgcgacctgccacagggattctccgccctggagccactggtggatctgcccatcggcatcaacatcacccggtttcagacactgctggccctgcacagatcctacctgacaccaggcgactcctctagcggatggaccgcaggagctgccgcctactatgtgggctatctgcagccccggaccttcctgctgaagtacaacgagaatggcaccatcacagacgcagtggattgcgccctggaccccctgtctgagacaaagtgtacactgaagagctttaccgtggagaagggcatctatcagacaagcaatttcagggtgcagcctaccgagtccatcgtgcgctttcccaatatcacaaacctgtgcccttttggcgaggtgttcaacgccaccagattcgccagcgtgtacgcctggaatcggaagagaatctccaactgcgtggccgactattctgtgctgtacaactccgcctctttcagcacctttaagtgctatggcgtgtctcccacaaagctgaatgatctgtgctttaccaacgtgtacgccgatagcttcgtgatcaggggagacgaagtgagacagatcgcaccaggacagacaggaaagatcgcagactacaattataagctgcctgacgatttcaccggctgcgtgatcgcctggaactccaacaatctggattctaaagtgggcggcaactacaattatctgtacaggctgtttcgcaagtccaatctgaagccattcgagcgggacatctccacagaggaataccaggccggctctaccccctgcaatggcgtggagggctttaactgttatttccctctgcagtcttacggcttccagccaacaaacggcgtgggctatcagccctacagagtggtggtgctgtcctttgagctgctgcacgcaccagcaacagtgtgcggcccaaagaagtctaccaatctggtgaagaacaagtgcgtgaacttcaacttcaacggactgaccggcacaggcgtgctgaccgagagcaataagaagttcctgccttttcagcagttcggcagggacatcgcagataccacagacgccgtgcgcgaccctcagaccctggagatcctggacatcacaccatgcagcttcggcggcgtgtccgtgatcacaccaggcaccaatacatccaaccaggtggccgtgctgtatcaggacgtgaattgtaccgaggtgcccgtggcaatccacgcagatcagctgacccctacatggcgggtgtactctaccggcagcaacgtgttccagacaagagccggatgcctgatcggagcagagcacgtgaacaatagctatgagtgcgacatccctatcggcgccggcatctgtgccagctaccagacccagacaaactccccatctggagcaggctcccaccatcaccatcaccatcaccatcaccactga

SEQ ID NO: 4018 - DNA, 2148 bp, Artificial Sequence
  Description of Artificial Sequence: Synthetic polynucleotide
atgggcatcctgccaagcccaggaatgcccgccctgctgtctctggtgagcctgctgtccgtgctgctgatgggatgcgtggcagagacaggcacacagtgcgtgaacctgaccacaaggacccagctgccccctgcctataccaattctttcacacggggcgtgtactatcccgacaaggtgtttagaagctccgtgctgcactccacacaggatctgtttctgcctttcttttctaacgtgacctggttccacgccatccacgtgtccggcaccaatggcacaaagcggttcgacaatcccgtgctgccttttaacgatggcgtgtacttcgccagcaccgagaagtccaacatcatcagaggctggatctttggcaccacactggactctaagacacagagcctgctgatcgtgaacaatgccaccaacgtggtgatcaaggtgtgcgagttccagttttgtaatgatccattcctgggcgtgtactatgaaaagaacaataagtcctggatggagtctgagtttcgcgtgtattctagcgccaacaattgcacatttgagtacgtgagccagcccttcctgatggacctggagggcaagcagggcaatttcaagaacctgagggagttcgtgtttaagaatatcgatggctacttcaagatctacagcaagcacaccccaatcaacctggtgcgcgacctgccacagggattctccgccctggagccactggtggatctgcccatcggcatcaacatcacccggtttcagacactgctggccctgcacagatcctacctgacaccaggcgactcctctagcggatggaccgcaggagctgccgcctactatgtgggctatctgcagccccggaccttcctgctgaagtacaacgagaatggcaccatcacagacgcagtggattgcgccctggaccccctgtctgagacaaagtgtacactgaagagctttaccgtggagaagggcatctatcagacaagcaatttcagggtgcagcctaccgagtccatcgtgcgctttcccaatatcacaaacctgtgcccttttggcgaggtgttcaacgccaccagattcgccagcgtgtacgcctggaatcggaagagaatctccaactgcgtggccgactattctgtgctgtacaactccgcctctttcagcacctttaagtgctatggcgtgtctcccacaaagctgaatgatctgtgctttaccaacgtgtacgccgatagcttcgtgatcaggggagacgaagtgagacagatcgcaccaggacagacaggaaagatcgcagactacaattataagctgcctgacgatttcaccggctgcgtgatcgcctggaactccaacaatctggattctaaagtgggcggcaactacaattatctgtacaggctgtttcgcaagtccaatctgaagccattcgagcgggacatctccacagagatctaccaggccggctctaccccctgcaatggcgtggagggctttaactgttatttccctctgcagtcttacggcttccagccaacaaacggcgtgggctatcagccctacagagtggtggtgctgtcctttgagctgctgcacgcaccagcaacagtgtgcggcccaaagaagtctaccaatctggtgaagaacaagtgcgtgaacttcaacttcaacggactgaccggcacaggcgtgctgaccgagagcaataagaagttcctgccttttcagcagttcggcagggacatcgcagataccacagacgccgtgcgcgaccctcagaccctggagatcctggacatcacaccatgcagcttcggcggcgtgtccgtgatcacaccaggcaccaatacatccaaccaggtggccgtgctgtatcaggacgtgaattgtaccgaggtgcccgtggcaatccacgcagatcagctgacccctacatggcgggtgtactctaccggcagcaacgtgttccagacaagagccggatgcctgatcggagcagagcacgtgaacaatagctatgagtgcgacatccctatcggcgccggcatctgtgccagctaccagacccagacaaactccccatctggagcaggctcccaccatcaccatcaccatcaccatcaccactga

SEQ ID NO: 4019 - DNA, 2148 bp, Artificial Sequence
  Description of Artificial Sequence: Synthetic polynucleotide
atgggcatcctgccaagcccaggaatgcccgccctgctgtctctggtgagcctgctgtccgtgctgctgatgggatgcgtggcagagacaggcacacagtgcgtgaacctgaccacaaggacccagctgccccctgcctataccaattctttcacacggggcgtgtactatcccgacaaggtgtttagaagctccgtgctgcactccacacaggatctgtttctgcctttcttttctaacgtgacctggttccacgccatccacgtgtccggcaccaatggcacaaagcggttcgacaatcccgtgctgccttttaacgatggcgtgtacttcgccagcaccgagaagtccaacatcatcagaggctggatctttggcaccacactggactctaagacacagagcctgctgatcgtgaacaatgccaccaacgtggtgatcaaggtgtgcgagttccagttttgtaatgatccattcctgggcgtgtactatcacaagaacaataagtcctggatggagtctgagtttcgcgtgtattctagcgccaacaattgcacatttgagtacgtgagccagcccttcctgatggacctggagggcaagcagggcaatttcaagaacctgagggagttcgtgtttaagaatatcgatggctacttcaagatctacagcaagcacaccccaatcaacctggtgcgcgacctgccacagggattctccgccctggagccactggtggatctgcccatcggcatcaacatcacccggtttcagacactgctggccctgcacagatcctacctgacaccaggcgactcctctagcggatggaccgcaggagctgccgcctactatgtgggctatctgcagccccggaccttcctgctgaagtacaacgagaatggcaccatcacagacgcagtggattgcgccctggaccccctgtctgagacaaagtgtacactgaagagctttaccgtggagaagggcatctatcagacaagcaatttcagggtgcagcctaccgagtccatcgtgcgctttcccaatatcacaaacctgtgcccttttggcgaggtgttcaacgccaccagattcgccagcgtgtacgcctggaatcggaagagaatctccaactgcgtggccgactattctgtgctgtacaactccgcctctttcagcacctttaagtgctatggcgtgtctcccacaaagctgaatgatctgtgctttaccaacgtgtacgccgatagcttcgtgatcaggggagacgaagtgagacagatcgcaccaggacagacaggagtcatcgcagactacaattataagctgcctgacgatttcaccggctgcgtgatcgcctggaactccaacaatctggattctaaagtgggcggcaactacaattatctgtacaggctgtttcgcaagtccaatctgaagccattcgagcgggacatctccacagagatctaccaggccggctctaccccctgcaatggcgtggagggctttaactgttatttccctctgcagtcttacggcttccagccaacaaacggcgtgggctatcagccctacagagtggtggtgctgtcctttgagctgctgcacgcaccagcaacagtgtgcggcccaaagaagtctaccaatctggtgaagaacaagtgcgtgaacttcaacttcaacggactgaccggcacaggcgtgctgaccgagagcaataagaagttcctgccttttcagcagttcggcagggacatcgcagataccacagacgccgtgcgcgaccctcagaccctggagatcctggacatcacaccatgcagcttcggcggcgtgtccgtgatcacaccaggcaccaatacatccaaccaggtggccgtgctgtatcaggacgtgaattgtaccgaggtgcccgtggcaatccacgcagatcagctgacccctacatggcgggtgtactctaccggcagcaacgtgttccagacaagagccggatgcctgatcggagcagagcacgtgaacaatagctatgagtgcgacatccctatcggcgccggcatctgtgccagctaccagacccagacaaactccccatctggagcaggctcccaccatcaccatcaccatcaccatcaccactga

SEQ ID NO: 4020 - DNA, 2148 bp, Artificial Sequence
  Description of Artificial Sequence: Synthetic polynucleotide
atgggcatcctgccaagcccaggaatgcccgccctgctgtctctggtgagcctgctgtccgtgctgctgatgggatgcgtggcagagacaggcacacagtgcgtgaacctgaccacaaggacccagctgccccctgcctataccaattctttcacacggggcgtgtactatcccgacaaggtgtttagaagctccgtgctgcactccacacaggatctgtttctgcctttcttttctaacgtgacctggttccacgccatccacgtgtccggcaccaatggcacaaagcggttcgacaatcccgtgctgccttttaacgatggcgtgtacttcgccagcaccgagaagtccaacatcatcagaggctggatctttggcaccacactggactctaagacacagagcctgctgatcgtgaacaatgccaccaacgtggtgatcaaggtgtgcgagttccagttttgtaatgatccattcctgggcgtgtactatcacaagaacaataagtcctggatggagtctgagtttcgcgtgtattctagcgccaacaattgcacatttgagtacgtgagccagcccttcctgatggacctggagggcaagcagggcaatttcaagaacctgagggagttcgtgtttaagaatatcgatggctacttcaagatctacagcaagcacaccccaatcaacctggtgcgcgacctgccacagggattctccgccctggagccactggtggatctgcccatcggcatcaacatcacccggtttcagacactgctggccctgcacagatcctacctgacaccaggcgactcctctagcggatggaccgcaggagctgccgcctactatgtgggctatctgcagccccggaccttcctgctgaagtacaacgagaatggctggatcacagacgcagtggattgcgccctggaccccctgtctgagacaaagtgtacactgaagagctttaccgtggagaagggcatctatcagacaagcaatttcagggtgcagcctaccgagtccatcgtgcgctttcccaatatcacaaacctgtgcccttttggcgaggtgttcaacgccaccagattcgccagcgtgtacgcctggaatcggaagagaatctccaactgcgtggccgactattctgtgctgtacaactccgcctctttcagcacctttaagtgctatggcgtgtctcccacaaagctgaatgatctgtgctttaccaacgtgtacgccgatagcttcgtgatcaggggagacgaagtgagacagatcgcaccaggacagacaggaaagatcgcagactacaattataagctgcctgacgatttcaccggctgcgtgatcgcctggaactccaacaatctggattctaaagtgggcggcaactacaattatctgtacaggctgtttcgcaagtccaatctgaagccattcgagcgggacatctccacagagatctaccaggccggctctaccccctgcaatggcgtggagggctttaactgttatttccctctgcagtcttacggcttccagccaacaaacggcgtgggctatcagccctacagagtggtggtgctgtcctttgagctgctgcacgcaccagcaacagtgtgcggcccaaagaagtctaccaatctggtgaagaacaagtgcgtgaacttcaacttcaacggactgaccggcacaggcgtgctgaccgagagcaataagaagttcctgccttttcagcagttcggcagggacatcgcagataccacagacgccgtgcgcgaccctcagaccctggagatcctggacatcacaccatgcagcttcggcggcgtgtccgtgatcacaccaggcaccaatacatccaaccaggtggccgtgctgtatcaggacgtgaattgtaccgaggtgcccgtggcaatccacgcagatcagctgacccctacatggcgggtgtactctaccggcagcaacgtgttccagacaagagccggatgcctgatcggagcagagcacgtgaacaatagctatgagtgcgacatccctatcggcgccggcatctgtgccagctaccagacccagacaaactccccatctggagcaggctcccaccatcaccatcaccatcaccatcaccactga

SEQ ID NO: 4021 - DNA, 2148 bp, Artificial Sequence
  Description of Artificial Sequence: Synthetic polynucleotide
atgggcatcctgccaagcccaggaatgcccgccctgctgtctctggtgagcctgctgtccgtgctgctgatgggatgcgtggcagagacaggcacacagtgcgtgaacctgaccacaaggacccagctgccccctgcctataccaattctttcacacggggcgtgtactatcccgacaaggtgtttagaagctccgtgctgcactccacacaggatctgtttctgcctttcttttctaacgtgacctggttccacgccatccacgtgtccggcaccaatggcacaaagcggttcgacaatcccgtgctgccttttaacgatggcgtgtacttcgccagcaccgagaagtccaacatcatcagaggctggatctttggcaccacactggactctaagacacagagcctgctgatcgtgaacaatgccaccaacgtggtgatcaaggtgtgcgagttccagttttgtaatgatccattcctgggcgtgtactatcacaagaacaataagtcctggatggagtctgagtttcgcgtgtattctagcgccaacaattgcacatttgagtacgtgagccagcccttcctgatggacctggagggcaagcagggcaatttcaagaacctgagggagttcgtgtttaagaatatcgatggctacttcaagatctacagcaagcacaccccaatcaacctggtgcgcgacctgccacagggattctccgccctggagccactggtggatctgcccatcggcatcaacatcacccggtttgcaacactgctggccctgcacagatcctacctgacaccaggcgactcctctagcggatggaccgcaggagctgccgcctactatgtgggctatctgcagccccggaccttcctgctgaagtacaacgagaatggcaccatcacagacgcagtggattgcgccctggaccccctgtctgagacaaagtgtacactgaagagctttaccgtggagaagggcatctatcagacaagcaatttcagggtgcagcctaccgagtccatcgtgcgctttcccaatatcacaaacctgtgcccttttggcgaggtgttcaacgccaccagattcgccagcgtgtacgcctggaatcggaagagaatctccaactgcgtggccgactattctgtgctgtacaactccgcctctttcagcacctttaagtgctatggcgtgtctcccacaaagctgaatgatctgtgctttaccaacgtgtacgccgatagcttcgtgatcaggggagacgaagtgagacagatcgcaccaggacagacaggaaagatcgcagactacaattataagctgcctgacgatttcaccggctgcgtgatcgcctggaactccaacaatctggattctaaagtgggcggcaactacaattatctgtacaggctgtttcgcaagtccaatctgaagccattcgagcgggacatctccacagagatctaccaggccggctctaccccctgcaatggcgtggagggctttaactgttatttccctctgcagtcttacggcttccagccaacaaacggcgtgggctatcagccctacagagtggtggtgctgtcctttgagctgctgcacgcaccagcaacagtgtgcggcccaaagaagtctaccaatctggtgaagaacaagtgcgtgaacttcaacttcaacggactgaccggcacaggcgtgctgaccgagagcaataagaagttcctgccttttcagcagttcggcagggacatcgcagataccacagacgccgtgcgcgaccctcagaccctggagatcctggacatcacaccatgcagcttcggcggcgtgtccgtgatcacaccaggcaccaatacatccaaccaggtggccgtgctgtatcaggacgtgaattgtaccgaggtgcccgtggcaatccacgcagatcagctgacccctacatggcgggtgtactctaccggcagcaacgtgttccagacaagagccggatgcctgatcggagcagagcacgtgaacaatagctatgagtgcgacatccctatcggcgccggcatctgtgccagctaccagacccagacaaactccccatctggagcaggctcccaccatcaccatcaccatcaccatcaccactga

SEQ ID NO: 4022 - DNA, 2148 bp, Artificial Sequence
  Description of Artificial Sequence: Synthetic polynucleotide
atgggcatcctgccaagcccaggaatgcccgccctgctgtctctggtgagcctgctgtccgtgctgctgatgggatgcgtggcagagacaggcacacagtgcgtgaacctgaccacaaggacccagctgccccctgcctataccaattctttcacacggggcgtgtactatcccgacaaggtgtttagaagctccgtgctgcactccacacaggatctgtttctgcctttcttttctaacgtgacctggttccacgccatccacgtgtccggcaccaatggcacaaagcggttcgacaatcccgtgctgccttttaacgatggcgtgtacttcgccagcatagagaagtccaacatcatcagaggctggatctttggcaccacactggactctaagacacagagcctgctgatcgtgaacaatgccaccaacgtggtgatcaaggtgtgcgagttccagttttgtaatgatccattcctgggcgtgtactatcacaagaacaataagtcctggatggagtctgagtttcgcgtgtattctagcgccaacaattgcacatttgagtacgtgagccagcccttcctgatggacctggagggcaagcagggcaatttcaagaacctgagggagttcgtgtttaagaatatcgatggctacttcaagatctacagcaagcacaccccaatcaacctggtgcgcgacctgccacagggattctccgccctggagccactggtggatctgcccatcggcatcaacatcacccggtttcagacactgctggccctgcacagatcctacctgacaccaggcgactcctctagcggatggaccgcaggagctgccgcctactatgtgggctatctgcagccccggaccttcctgctgaagtacaacgagaatggcaccatcacagacgcagtggattgcgccctggaccccctgtctgagacaaagtgtacactgaagagctttaccgtggagaagggcatctatcagacaagcaatttcagggtgcagcctaccgagtccatcgtgcgctttcccaatatcacaaacctgtgcccttttggcgaggtgttcaacgccaccagattcgccagcgtgtacgcctggaatcggaagagaatctccaactgcgtggccgactattctgtgctgtacaactccgcctctttcagcacctttaagtgctatggcgtgtctcccacaaagctgaatgatctgtgctttaccaacgtgtacgccgatagcttcgtgatcaggggagacgaagtgagacagatcgcaccaggacagacaggaaagatcgcagactacaattataagctgcctgacgatttcaccggctgcgtgatcgcctggaactccaacaatctggattctaaagtgggcggcaactacaattatctgtacaggctgtttcgcaagtccaatctgaagccattcgagcgggacatctccacagagatctaccaggccggctctaccccctgcaatggcgtggagggctttaactgttatttccctctgcagtcttacggcttccagccaacaaacggcgtgggctatcagccctacagagtggtggtgctgtcctttgagctgctgcacgcaccagcaacagtgtgcggcccaaagaagtctaccaatctggtgaagaacaagtgcgtgaacttcaacttcaacggactgaccggcacaggcgtgctgaccgagagcaataagaagttcctgccttttcagcagttcggcagggacatcgcagataccacagacgccgtgcgcgaccctcagaccctggagatcctggacatcacaccatgcagcttcggcggcgtgtccgtgatcacaccaggcaccaatacatccaaccaggtggccgtgctgtatcaggacgtgaattgtaccgaggtgcccgtggcaatccacgcagatcagctgacccctacatggcgggtgtactctaccggcagcaacgtgttccagacaagagccggatgcctgatcggagcagagcacgtgaacaatagctatgagtgcgacatccctatcggcgccggcatctgtgccagctaccagacccagacaaactccccatctggagcaggctcccaccatcaccatcaccatcaccatcaccactga

SEQ ID NO: 4023 - DNA, 2148 bp, Artificial Sequence
  Description of Artificial Sequence: Synthetic polynucleotide
atgggcatcctgccaagcccaggaatgcccgccctgctgtctctggtgagcctgctgtccgtgctgctgatgggatgcgtggcagagacaggcacacagtgcgtgaacctgaccacaaggacccagctgccccctgcctataccaattctttcacacggggcgtgtactatcccgacaaggtgtttagaagctccgtgctgcactccacacaggatctgtttctgcctttcttttctaacgtgacctggttccacgccatccacgtgcaaggcaccaatggcacaaagcggttcgacaatcccgtgctgccttttaacgatggcgtgtacttcgccagcaccgagaagtccaacatcatcagaggctggatctttggcaccacactggactctaagacacagagcctgctgatcgtgaacaatgccaccaacgtggtgatcaaggtgtgcgagttccagttttgtaatgatccattcctgggcgtgtactatcacaagaacaataagtcctggatggagtctgagtttcgcgtgtattctagcgccaacaattgcacatttgagtacgtgagccagcccttcctgatggacctggagggcaagcagggcaatttcaagaacctgagggagttcgtgtttaagaatatcgatggctacttcaagatctacagcaagcacaccccaatcaacctggtgcgcgacctgccacagggattctccgccctggagccactggtggatctgcccatcggcatcaacatcacccggtttcagacactgctggccctgcacagatcctacctgacaccaggcgactcctctagcggatggaccgcaggagctgccgcctactatgtgggctatctgcagccccggaccttcctgctgaagtacaacgagaatggcaccatcacagacgcagtggattgcgccctggaccccctgtctgagacaaagtgtacactgaagagctttaccgtggagaagggcatctatcagacaagcaatttcagggtgcagcctaccgagtccatcgtgcgctttcccaatatcacaaacctgtgcccttttggcgaggtgttcaacgccaccagattcgccagcgtgtacgcctggaatcggaagagaatctccaactgcgtggccgactattctgtgctgtacaactccgcctctttcagcacctttaagtgctatggcgtgtctcccacaaagctgaatgatctgtgctttaccaacgtgtacgccgatagcttcgtgatcaggggagacgaagtgagacagatcgcaccaggacagacaggaaagatcgcagactacaattataagctgcctgacgatttcaccggctgcgtgatcgcctggaactccaacaatctggattctaaagtgggcggcaactacaattatctgtacaggctgtttcgcaagtccaatctgaagccattcgagcgggacatctccacagagatctaccaggccggctctaccccctgcaatggcgtggagggctttaactgttatttccctctgcagtcttacggcttccagccaacaaacggcgtgggctatcagccctacagagtggtggtgctgtcctttgagctgctgcacgcaccagcaacagtgtgcggcccaaagaagtctaccaatctggtgaagaacaagtgcgtgaacttcaacttcaacggactgaccggcacaggcgtgctgaccgagagcaataagaagttcctgccttttcagcagttcggcagggacatcgcagataccacagacgccgtgcgcgaccctcagaccctggagatcctggacatcacaccatgcagcttcggcggcgtgtccgtgatcacaccaggcaccaatacatccaaccaggtggccgtgctgtatcaggacgtgaattgtaccgaggtgcccgtggcaatccacgcagatcagctgacccctacatggcgggtgtactctaccggcagcaacgtgttccagacaagagccggatgcctgatcggagcagagcacgtgaacaatagctatgagtgcgacatccctatcggcgccggcatctgtgccagctaccagacccagacaaactccccatctggagcaggctcccaccatcaccatcaccatcaccatcaccactga

SEQ ID NO: 4024 - DNA, 2148 bp, Artificial Sequence
  Description of Artificial Sequence: Synthetic polynucleotide
atgggcatcctgccaagcccaggaatgcccgccctgctgtctctggtgagcctgctgtccgtgctgctgatgggatgcgtggcagagacaggcacacagtgcgtgaacctgaccacaaggacccagctgccccctgcctataccaattctttcacacggggcgtgtactatcccgacaaggtgtttagaagctccgtgctgcactccacacaggatctgtttctgcctttcttttctaacgtgacctggttccacgccatccacgtgtccggcaccaatggcacaaagcggttcgacaatcccgtgctgccttttaacgatggcgtgtacttcgccagcaccgagaagtccaacatcatcagaggctggatctttggcaccacactggactctaagacacagagcctgctgatcgtgaacaatgccaccaacgtggtgatcaaggtgtgcgagttccagttttgtaatgatccattcctgggcgtgtactatcacaagaacaataagtcctggatggagtctgagtttcgcgtgtattctagcgccaacaattgcaaatttgagtacgtgagccagcccttcctgatggacctggagggcaagcagggcaatttcaagaacctgagggagttcgtgtttaagaatatcgatggctacttcaagatctacagcaagcacaccccaatcaacctggtgcgcgacctgccacagggattctccgccctggagccactggtggatctgcccatcggcatcaacatcacccggtttcagacactgctggccctgcacagatcctacctgacaccaggcgactcctctagcggatggaccgcaggagctgccgcctactatgtgggctatctgcagccccggaccttcctgctgaagtacaacgagaatggcaccatcacagacgcagtggattgcgccctggaccccctgtctgagacaaagtgtacactgaagagctttaccgtggagaagggcatctatcagacaagcaatttcagggtgcagcctaccgagtccatcgtgcgctttcccaatatcacaaacctgtgcccttttggcgaggtgttcaacgccaccagattcgccagcgtgtacgcctggaatcggaagagaatctccaactgcgtggccgactattctgtgctgtacaactccgcctctttcagcacctttaagtgctatggcgtgtctcccacaaagctgaatgatctgtgctttaccaacgtgtacgccgatagcttcgtgatcaggggagacgaagtgagacagatcgcaccaggacagacaggaaagatcgcagactacaattataagctgcctgacgatttcaccggctgcgtgatcgcctggaactccaacaatctggattctaaagtgggcggcaactacaattatctgtacaggctgtttcgcaagtccaatctgaagccattcgagcgggacatctccacagagatctaccaggccggctctaccccctgcaatggcgtggagggctttaactgttatttccctctgcagtcttacggcttccagccaacaaacggcgtgggctatcagccctacagagtggtggtgctgtcctttgagctgctgcacgcaccagcaacagtgtgcggcccaaagaagtctaccaatctggtgaagaacaagtgcgtgaacttcaacttcaacggactgaccggcacaggcgtgctgaccgagagcaataagaagttcctgccttttcagcagttcggcagggacatcgcagataccacagacgccgtgcgcgaccctcagaccctggagatcctggacatcacaccatgcagcttcggcggcgtgtccgtgatcacaccaggcaccaatacatccaaccaggtggccgtgctgtatcaggacgtgaattgtaccgaggtgcccgtggcaatccacgcagatcagctgacccctacatggcgggtgtactctaccggcagcaacgtgttccagacaagagccggatgcctgatcggagcagagcacgtgaacaatagctatgagtgcgacatccctatcggcgccggcatctgtgccagctaccagacccagacaaactccccatctggagcaggctcccaccatcaccatcaccatcaccatcaccactga

SEQ ID NO: 4025 - DNA, 2148 bp, Artificial Sequence
  Description of Artificial Sequence: Synthetic polynucleotide
atgggcatcctgccaagcccaggaatgcccgccctgctgtctctggtgagcctgctgtccgtgctgctgatgggatgcgtggcagagacaggcacacagtgcgtgaacctgaccacaaggacccagctgccccctgcctataccaattctttcacacggggcgtgtactatcccgacaaggtgtttagaagctccgtgctgcactccacacaggatctgtttctgcctttcttttctaacgtgacctggttccacgccatccacgtgtccggcaccaatggcacaaagcggttcgacaatcccgtgctgccttttaacgatggcgtgtacttcgccagcaccgagaagtccaacatcatcagaggctggatctttggcaccacactggactctaagacacagagcctgctgatcgtgaacaatgccaccaacgtggtgatcaaggtgtgcgagttccagttttgtaatgatccattcctgggcgtgtactatcacaagaacaataagtcctggatggagtctgagtttcgcgtgtattctagcgccaacaattgcacatttgagtacgtgagccagcccttcctgatggacctggagggcaagcagggcaatttcaagaacctgagggagttcgtgtttaagaatatcgatggctacttcaagatctacagcaagcacaccccaatcaacctggtgcgcgacctgccacagggattctccgccctggagccactggtggatctgcccatcggcatcaacatcacccggtttcagacactgctggccctgcacagatcctacctgacaccaggcgactcctctagcggatggaccgcaggagctgccgcctactatgtgggctatctgcagccccggaccttcctgctgaagtacaacgagaatggcaccatcacagacgcagtggattgcgccctggaccccctgtctgagacaaagtgtacactgaagagctttaccgtggagaagggcatctatcagacaagcaatttcagggtgcagcctaccgagtccatcgtgcgctttcccaatatcacaaacctgtgcccttttggcgaggtgttcaacgccaccagattcgccagcgtgtacgcctggaatcggaagagaatctccaactgcgtggccgactattctgtgctgtacaactccgcctctttcagcacctttaagtgctatggcgtgtctcccacaaagctgaatgatctgtgctttaccaacgtgtacgccgatagcttcgtgatcaggggagacgaagtgagacagatcgcaccaggacagacaggaaagatcgcagactacaattataagctgcctgacgatttcaccggctgcgtgatcgcctggaactccaacaatctggattctaaagtgggcggcaactacaattatctgtacaggctgtttcgcaagtccaatctgaagccattcgagcgggacatctccacagagatctaccaggccggctctaccccctgcaatggcgtggagggctttaactgttatttccctctgcagtcttacggcttccagccaacaaacggcgtgggctatcagccctacagagtggtggtgctgtcctttgagctgctgcacgcaccagcaacagtgtgcggcccaaagaagtctaccaatctggtgaagaacaagtgcgtgaacttcaacttcaacggactgaccggcacaggcgtgctgaccgagagcaataagaagttcctgccttttcagcagttcggcagggacatcgcagataccacagacgccgtgcgcgaccctcagaccctggagatcctggacatcacaccatgcagcttcggcggcgtgtccgtgatcacaccaggcaccaatacatccaaccaggtggccgtgctgtatcaggacgtgaattgtaccgaggtgcccgtggcaatccacgcagatcagctgacccctacatggcggaattactctaccggcagcaacgtgttccagacaagagccggatgcctgatcggagcagagcacgtgaacaatagctatgagtgcgacatccctatcggcgccggcatctgtgccagctaccagacccagacaaactccccatctggagcaggctcccaccatcaccatcaccatcaccatcaccactga

SEQ ID NO: 4026 - DNA, 2148 bp, Artificial Sequence
  Description of Artificial Sequence: Synthetic polynucleotide
atgggcatcctgccaagcccaggaatgcccgccctgctgtctctggtgagcctgctgtccgtgctgctgatgggatgcgtggcagagacaggcacacagtgcgtgaacctgaccacaaggacccagctgccccctgcctataccaattctttcacacggggcgtgtactatcccgacaaggtgtttagaagctccgtgctgcactccacacaggatctgtttctgcctttcttttctaacgtgacctggttccacgccatccacgtgtccggcaccaatggcacaaagcggttcgacaatcccgtgctgccttttaacgatggcgtgtacttcgccagcaccgagaagtccaacatcatcagaggctggatctttggcaccacactggactctaagacacagagcctgctgatcgtgaacaatgccaccaacgtggtgatcaaggtgtgcgagttccagttttgtaatgatccattcctgggcgtgtactatcacaagaacaataagtcctggatggagtctgagtttcgcgtgtattctagcgccaacaattgcacatttgagtacgtgagccagcccttcctgatggacctggagggcaagcagggcaatttcaagaacctgagggagttcgtgtttaagaatatcgatggctacttcaagatctacagcaagcacaccccaatcaacctggtgcgcgacctgccacagggattctccgccctggagccactggtggatctgcccatcggcatcaacatcacccggtttcagacaatactggccctgcacagatcctacctgacaccaggcgactcctctagcggatggaccgcaggagctgccgcctactatgtgggctatctgcagccccggaccttcctgctgaagtacaacgagaatggcaccatcacagacgcagtggattgcgccctggaccccctgtctgagacaaagtgtacactgaagagctttaccgtggagaagggcatctatcagacaagcaatttcagggtgcagcctaccgagtccatcgtgcgctttcccaatatcacaaacctgtgcccttttggcgaggtgttcaacgccaccagattcgccagcgtgtacgcctggaatcggaagagaatctccaactgcgtggccgactattctgtgctgtacaactccgcctctttcagcacctttaagtgctatggcgtgtctcccacaaagctgaatgatctgtgctttaccaacgtgtacgccgatagcttcgtgatcaggggagacgaagtgagacagatcgcaccaggacagacaggaaagatcgcagactacaattataagctgcctgacgatttcaccggctgcgtgatcgcctggaactccaacaatctggattctaaagtgggcggcaactacaattatctgtacaggctgtttcgcaagtccaatctgaagccattcgagcgggacatctccacagagatctaccaggccggctctaccccctgcaatggcgtggagggctttaactgttatttccctctgcagtcttacggcttccagccaacaaacggcgtgggctatcagccctacagagtggtggtgctgtcctttgagctgctgcacgcaccagcaacagtgtgcggcccaaagaagtctaccaatctggtgaagaacaagtgcgtgaacttcaacttcaacggactgaccggcacaggcgtgctgaccgagagcaataagaagttcctgccttttcagcagttcggcagggacatcgcagataccacagacgccgtgcgcgaccctcagaccctggagatcctggacatcacaccatgcagcttcggcggcgtgtccgtgatcacaccaggcaccaatacatccaaccaggtggccgtgctgtatcaggacgtgaattgtaccgaggtgcccgtggcaatccacgcagatcagctgacccctacatggcgggtgtactctaccggcagcaacgtgttccagacaagagccggatgcctgatcggagcagagcacgtgaacaatagctatgagtgcgacatccctatcggcgccggcatctgtgccagctaccagacccagacaaactccccatctggagcaggctcccaccatcaccatcaccatcaccatcaccactga

SEQ ID NO: 4027 - DNA, 2148 bp, Artificial Sequence
  Description of Artificial Sequence: Synthetic polynucleotide
atgggcatcctgccaagcccaggaatgcccgccctgctgtctctggtgagcctgctgtccgtgctgctgatgggatgcgtggcagagacaggcacacagtgcgtgaacctgaccacaaggacccagctgccccctgcctataccaattctttcacacggggcgtgtactatcccgacaaggtgtttagaagctcctggctgcactccacacaggatctgtttctgcctttcttttctaacgtgacctggttccacgccatccacgtgtccggcaccaatggcacaaagcggttcgacaatcccgtgctgccttttaacgatggcgtgtacttcgccagcaccgagaagtccaacatcatcagaggctggatctttggcaccacactggactctaagacacagagcctgctgatcgtgaacaatgccaccaacgtggtgatcaaggtgtgcgagttccagttttgtaatgatccattcctgggcgtgtactatcacaagaacaataagtcctggatggagtctgagtttcgcgtgtattctagcgccaacaattgcacatttgagtacgtgagccagcccttcctgatggacctggagggcaagcagggcaatttcaagaacctgagggagttcgtgtttaagaatatcgatggctacttcaagatctacagcaagcacaccccaatcaacctggtgcgcgacctgccacagggattctccgccctggagccactggtggatctgcccatcggcatcaacatcacccggtttcagacactgctggccctgcacagatcctacctgacaccaggcgactcctctagcggatggaccgcaggagctgccgcctactatgtgggctatctgcagccccggaccttcctgctgaagtacaacgagaatggcaccatcacagacgcagtggattgcgccctggaccccctgtctgagacaaagtgtacactgaagagctttaccgtggagaagggcatctatcagacaagcaatttcagggtgcagcctaccgagtccatcgtgcgctttcccaatatcacaaacctgtgcccttttggcgaggtgttcaacgccaccagattcgccagcgtgtacgcctggaatcggaagagaatctccaactgcgtggccgactattctgtgctgtacaactccgcctctttcagcacctttaagtgctatggcgtgtctcccacaaagctgaatgatctgtgctttaccaacgtgtacgccgatagcttcgtgatcaggggagacgaagtgagacagatcgcaccaggacagacaggaaagatcgcagactacaattataagctgcctgacgatttcaccggctgcgtgatcgcctggaactccaacaatctggattctaaagtgggcggcaactacaattatctgtacaggctgtttcgcaagtccaatctgaagccattcgagcgggacatctccacagagatctaccaggccggctctaccccctgcaatggcgtggagggctttaactgttatttccctctgcagtcttacggcttccagccaacaaacggcgtgggctatcagccctacagagtggtggtgctgtcctttgagctgctgcacgcaccagcaacagtgtgcggcccaaagaagtctaccaatctggtgaagaacaagtgcgtgaacttcaacttcaacggactgaccggcacaggcgtgctgaccgagagcaataagaagttcctgccttttcagcagttcggcagggacatcgcagataccacagacgccgtgcgcgaccctcagaccctggagatcctggacatcacaccatgcagcttcggcggcgtgtccgtgatcacaccaggcaccaatacatccaaccaggtggccgtgctgtatcaggacgtgaattgtaccgaggtgcccgtggcaatccacgcagatcagctgacccctacatggcgggtgtactctaccggcagcaacgtgttccagacaagagccggatgcctgatcggagcagagcacgtgaacaatagctatgagtgcgacatccctatcggcgccggcatctgtgccagctaccagacccagacaaactccccatctggagcaggctcccaccatcaccatcaccatcaccatcaccactga

SEQ ID NO: 4028 - DNA, 2148 bp, Artificial Sequence
  Description of Artificial Sequence: Synthetic polynucleotide
atgggcatcctgccaagcccaggaatgcccgccctgctgtctctggtgagcctgctgtccgtgctgctgatgggatgcgtggcagagacaggcacacagtgcgtgaacctgaccacaaggacccagctgccccctgcctataccaattctttcacacggggcgtgtactatcccgacaaggtgtttagaagctccgtgctgcactccacacaggatctgtttctgcctttcttttctaacgtgacctggttccacgccatccacgtgtccggcaccaatggcacaaagcggttcgacaatcccgtgctgccttttaacgatggcgtgtacttcgccagcaccgagaaggataacatcatcagaggctggatctttggcaccacactggactctaagacacagagcctgctgatcgtgaacaatgccaccaacgtggtgatcaaggtgtgcgagttccagttttgtaatgatccattcctgggcgtgtactatcacaagaacaataagtcctggatggagtctgagtttcgcgtgtattctagcgccaacaattgcacatttgagtacgtgagccagcccttcctgatggacctggagggcaagcagggcaatttcaagaacctgagggagttcgtgtttaagaatatcgatggctacttcaagatctacagcaagcacaccccaatcaacctggtgcgcgacctgccacagggattctccgccctggagccactggtggatctgcccatcggcatcaacatcacccggtttcagacactgctggccctgcacagatcctacctgacaccaggcgactcctctagcggatggaccgcaggagctgccgcctactatgtgggctatctgcagccccggaccttcctgctgaagtacaacgagaatggcaccatcacagacgcagtggattgcgccctggaccccctgtctgagacaaagtgtacactgaagagctttaccgtggagaagggcatctatcagacaagcaatttcagggtgcagcctaccgagtccatcgtgcgctttcccaatatcacaaacctgtgcccttttggcgaggtgttcaacgccaccagattcgccagcgtgtacgcctggaatcggaagagaatctccaactgcgtggccgactattctgtgctgtacaactccgcctctttcagcacctttaagtgctatggcgtgtctcccacaaagctgaatgatctgtgctttaccaacgtgtacgccgatagcttcgtgatcaggggagacgaagtgagacagatcgcaccaggacagacaggaaagatcgcagactacaattataagctgcctgacgatttcaccggctgcgtgatcgcctggaactccaacaatctggattctaaagtgggcggcaactacaattatctgtacaggctgtttcgcaagtccaatctgaagccattcgagcgggacatctccacagagatctaccaggccggctctaccccctgcaatggcgtggagggctttaactgttatttccctctgcagtcttacggcttccagccaacaaacggcgtgggctatcagccctacagagtggtggtgctgtcctttgagctgctgcacgcaccagcaacagtgtgcggcccaaagaagtctaccaatctggtgaagaacaagtgcgtgaacttcaacttcaacggactgaccggcacaggcgtgctgaccgagagcaataagaagttcctgccttttcagcagttcggcagggacatcgcagataccacagacgccgtgcgcgaccctcagaccctggagatcctggacatcacaccatgcagcttcggcggcgtgtccgtgatcacaccaggcaccaatacatccaaccaggtggccgtgctgtatcaggacgtgaattgtaccgaggtgcccgtggcaatccacgcagatcagctgacccctacatggcgggtgtactctaccggcagcaacgtgttccagacaagagccggatgcctgatcggagcagagcacgtgaacaatagctatgagtgcgacatccctatcggcgccggcatctgtgccagctaccagacccagacaaactccccatctggagcaggctcccaccatcaccatcaccatcaccatcaccactga

SEQ ID NO: 4029 - DNA, 2148 bp, Artificial Sequence
  Description of Artificial Sequence: Synthetic polynucleotide
atgggcatcctgccaagcccaggaatgcccgccctgctgtctctggtgagcctgctgtccgtgctgctgatgggatgcgtggcagagacaggcacacagtgcgtgaacctgaccacaaggacccagctgccccctgcctataccaattctttcacacggggcgtgtactatcccgacaaggtgtttagaagctccgtgctgcactccacacaggatctgtttctgcctttcttttctaacgtgacctggttccacgccatccacgtgtccggcaccaatggcacaaagcggttcgacaatcccgtgctgccttttaacgatggcgtgtacttcgccagcaccgagaagtccaacatcatcagaggctggatctttggcaccacactggactctaagacacagagcctgctgatcgtgaacaatgccaccaacgtggtgatcaaggtgtgcgagttccagttttgtaatgatccattcctgggcgtgtactatcacaagaacaataagtcctggatggagtctgagtttcgcgtgtattctagcgccaacaattgcacatttgagtacgtgagccagcccttcctgatggacctggagggcaagcagggcaatttcaagaacctgagggagttcgtgtttaagaatatcgatggctacttcaagatctacagcaagcacaccccaatcaacctggtgcgcgacctgccacagggattctccgccctggagccactggtggatctgcccatcggcatcaacatcacccggtttcagacactgctggccctgcacagatcctacctgacaccaggcgactcctctagcggatggaccgcaggagctgccgcctactatgtgggctatctgcagccccggaccttcctgctgaagtacaacgagaatggcaccatcacagacgcagtggattgcgccctggaccccctgtctgagacaaagtgtacactgaagagctttaccgtggagaagggcatctatcagacaagcaatttcagggtgcagcctaccgagtccatcgtgcgctttcccaatatcacaaacctgtgcccttttggcgaggtgttcaacgccaccagattcgccagcgtgtacgcctggaatcggaagagaatctccaactgcgtggccgactattctgtgctgtacaactccgcctctttcagcacctttaagtgctatggcgtgtctcccacaaagctgaatgatctgtgctttaccaacgtgtacgccgatagcttcgtgatcaggggagacgaagtgagacagatcgcaccaggacagacaggaaagatcgcagactacaattataagctgcctgacgatttcaccggctgcgtgatcgcctggaactccaacaatctggattctaaagtgggcggcaactacaattatctgtacaggctgtttcgcaagtccaatctgaagccattcgagcgggacatctccacagagatctaccaggccggctctaccccctgcaatggcgtggagggctttaactgttatttccctctgcagtcttacggcttccagccaacaaacggcgtgggctatcagccctacagagtggtggtgctgtcctttgagctgctgcacgcaccagcaacagtgtgcggcccaaagaagtctaccaatctggtgaagaacaagtgcgtgaacttcaacttcaacggactgaccggcacaggcgtgctgaccgagagcaataagaagttcctgccttttcagcagttcggcagggacatcgcagataccacagacgccgtgcgcgaccctcagaccctggagatcctggacatcacaccatgcagcttcggcggcgtgtccgtgatcacaccacaaaccaatacatccaaccaggtggccgtgctgtatcaggacgtgaattgtaccgaggtgcccgtggcaatccacgcagatcagctgacccctacatggcgggtgtacaataccggcagcaacgtgttccagacaagagccggatgcctggtcggattcgagcacgtgaacaatagctatgagtgcgacatccctgttggcgccggcatctgtgccagctaccagacccagcgtaactccccatctggagcaggctcccaccatcaccatcaccatcaccatcaccactga

SEQ ID NO: 4030 - DNA, 2148 bp, Artificial Sequence
  Description of Artificial Sequence: Synthetic polynucleotide
atgggcatcctgccaagcccaggaatgcccgccctgctgtctctggtgagcctgctgtccgtgctgctgatgggatgcgtggcagagacaggcacacagtgcgtgaacctgaccacaaggacccagctgccccctgcctataccaattctttcacacggggcgtgtactatcccgacaaggtgtttagaagctccgtgctgcactccacacaggatctgtttctgcctttcttttctaacgtgacctggttccacgccatccacgtgtccggcaccaatggcacaaagcggttcgacaatcccgtgctgccttttaacgatggcgtgtacttcgccagcaccgagaagtccaacatcatcagaggctggatctttggcaccacactggactctaagacacagagcctgctgatcgtgaacaatgccaccaacgtggtgatcaaggtgtgcgagttccagttttgtaatgatccattcctgggcgtgtactatcacaagaacaataagtcctggatggagtctgagtttcgcgtgtattctagcgccaacaattgcacatttgagtacgtgagccagcccttcctgatggacctggagggcaagcagggcaatttcaagaacctgagggagttcgtgtttaagaatatcgatggctacttcaagatctacagcaagcacaccccaatcaacctggtgcgcgacctgccacagggattctccgccctggagccactggtggatctgcccatcggcatcaacatcacccggtttcagacactgctggccctgcacagatcctacctgacaccaggcgactcctctagcggatggaccgcaggagctgccgcctactatgtgggctatctgcagccccggaccttcctgctgaagtacaacgagaatggcaccatcacagacgcagtggattgcgccctggaccccctgtctgagacaaagtgtacactgaagagctttaccgtggagaagggcatctatcagacaagcaatttcagggtgcagcctaccgagtccatcgtgcgctttcccaatatcacaaacctgtgcccttttggcgaggtgttcaacgccaccagattcgccagcgtgtacgcctggaatcggaagagaatctccaactgcgtggccgactattctgtgctgtacaactccgcctctttcgcaacctttaagtgctatggcgtgtctcccacaaagctgaatgatctgtgctttaccaacgtgtacgccgatagcttcgtgatcaggggagacgaagtgagacagatcgcaccaggacagacaggaaagatcgcagactacaattataagctgcctgacgatttcaccggctgcgtgatcgcctggaactccaacaatctggattctaaagtgggcggcaactacaattatctgtacaggctgtttcgcaagtccaatctgaagccattcgagcgggacatctccacagagatctaccaggccggctctaccccctgcaatggcgtggagggctttaactgttatttccctctgcagtcttacggcttccagccaacaaacggcgtgggctatcagccctacagagtggtggtgctgtcctttgagctgctgcacgcaccagcaacagtgtgcggcccaaagaagtctaccaatctggtgaagaacaagtgcgtgaacttcaacttcaacggactgaccggcacaggcgtgctgaccgagagcaataagaagttcctgccttttcagcagttcggcagggacatcgcagataccacagacgccgtgcgcgaccctcagaccctggagatcctggacatcacaccatgcagcttcggcggcgtgtccgtgatcacaccaggcaccaatacatccaaccaggtggccgtgctgtatcaggacgtgaattgtaccgaggtgcccgtggcaatccacgcagatcagctgacccctacatggcgggtgtactctaccggcagcaacgtgttccagacaagagccggatgcctgatcggagcagagcacgtgaacaatagctatgagtgcgacatccctatcggcgccggcatctgtgccagctaccagacccagacaaactccccatctggagcaggctcccaccatcaccatcaccatcaccatcaccactga

SEQ ID NO: 4031 - DNA, 2148 bp, Artificial Sequence
  Description of Artificial Sequence: Synthetic polynucleotide
atgggcatcctgccaagcccaggaatgcccgccctgctgtctctggtgagcctgctgtccgtgctgctgatgggatgcgtggcagagacaggcacacagtgcgtgaacctgaccacaaggacccagctgccccctgcctataccaattctttcacacggggcgtgtactatcccgacaaggtgtttagaagctccgtgctgcactccacacaggatctgtttctgcctttcttttctaacgtgacctggttccacgccatccacgtgtccggcaccaatggcacaaagcggttcgacaatcccgtgctgccttttaacgatggcgtgtacttcgccagcaccgagaagtccaacatcatcagaggctggatctttggcaccacactggactctaagacacagagcctgctgatcgtgaacaatgccaccaacgtggtgatcaaggtgtgcgagttccagttttgtaatgatccattcctgggcgtgtactatcacaagaacaataagtcctggatggagtctgagtttcgcgtgtattctagcgccaacaattgcacatttgagtacgtgagccagcccttcctgactgacctggagggcaagcagggcaatttcaagaacctgagggagttcgtgtttaagaatatcgatggctacttcaagatctacagcaagcacaccccaatcaacctggtgcgcgacctgccacagggattctccgccctggagccactggtggatctgcccatcggcatcaacatcacccggtttcagacactgctggccctgcacagatcctacctgacaccaggcgactcctctagcggatggaccgcaggagctgccgcctactatgtgggctatctgcagccccggaccttcctgctgaagtacaacgagaatggcaccatcacagacgcagtggattgcgccctggaccccctgtctgagacaaagtgtacactgaagagctttaccgtggagaagggcatctatcagacaagcaatttcagggtgcagcctaccgagtccatcgtgcgctttcccaatatcacaaacctgtgcccttttggcgaggtgttcaacgccaccagattcgccagcgtgtacgcctggaatcggaagagaatctccaactgcgtggccgactattctgtgctgtacaactccgcctctttcagcacctttaagtgctatggcgtgtctcccacaaagctgaatgatctgtgctttaccaacgtgtacgccgatagcttcgtgatcaggggagacgaagtgagacagatcgcaccaggacagacaggaaagatcgcagactacaattataagctgcctgacgatttcaccggctgcgtgatcgcctggaactccaacaatctggattctaaagtgggcggcaactacaattatctgtacaggctgtttcgcaagtccaatctgaagccattcgagcgggacatctccacagagatctaccaggccggctctaccccctgcaatggcgtggagggctttaactgttatttccctctgcagtcttacggcttccagccaacaaacggcgtgggctatcagccctacagagtggtggtgctgtcctttgagctgctgcacgcaccagcaacagtgtgcggcccaaagaagtctaccaatctggtgaagaacaagtgcgtgaacttcaacttcaacggactgaccggcacaggcgtgctgaccgagagcaataagaagttcctgccttttcagcagttcggcagggacatcgcagataccacagacgccgtgcgcgaccctcagaccctggagatcctggacatcacaccatgcagcttcggcggcgtgtccgtgatcacaccaggcaccaatacatccaaccaggtggccgtgctgtatcaggacgtgaattgtaccgaggtgcccgtggcaatccacgcagatcagctgacccctacatggcgggtgtactctaccggcagcaacgtgttccagacaagagccggatgcctgatcggagcagagcacgtgaacaatagctatgagtgcgacatccctatcggcgccggcatctgtgccagctaccagacccagacaaactccccatctggagcaggctcccaccatcaccatcaccatcaccatcaccactga

SEQ ID NO: 4032 - DNA, 2148 bp, Artificial Sequence
  Description of Artificial Sequence: Synthetic polynucleotide
atgggcatcctgccaagcccaggaatgcccgccctgctgtctctggtgagcctgctgtccgtgctgctgatgggatgcgtggcagagacaggcacacagtgcgtgaacctgaccacaaggacccagctgccccctgcctataccaattctttcacacggggcgtgtactatcccgacaaggtgtttagaagctccgtgctgcactccacacaggatctgtttctgcctttcttttctaacgtgacctggttccacgccatccacgtgtccggcaccaatggcacaaagcggttcgacaatcccgtgctgccttttaacgatggcgtgtacttcgccagcaccgagaagtccaacatcatcagaggctggatctttggcaccacactggactctaagacacagagcctgctgatcgtgaacaatgccaccaacgtggtgatcaaggtgtgcgagttccagttttgtaatgatccattcctgggcgtgtactatcacaagaacaataagtcctggatggagtctgagtttcgcgtgtattctagcgccaacaattgcacatttgagtacgtgagccagcccttcctgatggacctggagggcaagcagggcaatttcaagaacctgagggagttcgtgtttaagaatatcgatggctacttcaagatctacagcaagcacaccccaatcaacctggtgcgcgacctgccacagggattctccgccctggagccactggtggatctgcccatcggcatcaacatcacccggtttcagacactgctggccctgcacagatcctacctgacaccaggcgactcctctagcggatggaccgcaggagctgccgcctactatgtgggctatctgcagccccggaccttcctgctgaagtacaacgagaatggcaccatcacagacgcagtggattgcgccctggaccccctgtctgagacaaagtgtacactgaagagctttaccgtggagaagggcatctatcagacaagcaatttcagggtgcagcctaccgagtccatcgtgcgctttcccaatatcacaaacctgtgcccttttggcgaggtgttcaacgccaccagattcgccagcgtgtacgcctggaatcggaagagaatctccaactgcgtggccgactattctgtgctgtacaactccgcctctttcagcacctttaagtgctatggcgtgtctcccacaaagctgaatgatctgtgctttaccaacgtgtacgccgatagcttcgtgatcaggggagacgaagtgagacagatcgcaccaggacagacaggaaagatcgcagactacaattataagctgcctgacgatttcaccggctgcgtgatcgcctggaactccaacaatctggattctaaagtgggcggcaactacaattatctgtacaggctgtttcgcaagtccaatctgaagccattcgagcgggacatctccacagagatctaccaggccggctctaccccctgcaatggcgtggagggctttaactgttatttccctctgcagtcttacggcttccagccaacaaacggcgtgggctatcagccctacagagtggtggtgctgtcctttgagctgctgcacgcaccagcaacagtgtgcggcccaaagaagtctaccaatctggtgaagaacaagtgcgtgaacttcaacttcaacggagaaaccggcacaggcgtgctgaccgagagcaataagaagttcctgccttttcagcagttcggcagggacatcgcagataccacagacgccgtgcgcgaccctcagaccctggagatcctggacatcacaccatgcagcttcggcggcgtgtccgtgatcacaccaggcaccaatacatccaaccaggtggccgtgctgtatcaggacgtgaattgtaccgaggtgcccgtggcaatccacgcagatcagctgacccctacatggcgggtgtactctaccggcagcaacgtgttccagacaagagccggatgcctgatcggagcagagcacgtgaacaatagctatgagtgcgacatccctatcggcgccggcatctgtgccagctaccagacccagacaaactccccatctggagcaggctcccaccatcaccatcaccatcaccatcaccactga

SEQ ID NO: 4033 - DNA, 2148 bp, Artificial Sequence
  Description of Artificial Sequence: Synthetic polynucleotide
atgggcatcctgccaagcccaggaatgcccgccctgctgtctctggtgagcctgctgtccgtgctgctgatgggatgcgtggcagagacaggcacacagtgcgtgaacctgaccacaaggacccagctgccccctgcctataccaattctttcacacggggcgtgtactatcccgacaaggtgtttagaagctccgtgctgcactccacacaggatctgtttctgcctttcttttctaacgtgacctggttccacgccatccacgtgtccggcaccaatggcacaaagcggttcgacaatcccgtgctgccttttaacgatggcgtgtacttcgccagcaccgagaagtccaacatcatcagaggctggatctttggcaccacactggactctaagacacagagcctgctgatcgtgaacaatgccaccaacgtggtgatcaaggtgtgcgagttccagttttgtaatgatccattcctgggcgtgtactatcacaagaacaataagtcctggatggagtctgagtttcgcgtgtattctagcgccaacaattgcacatttgagtacgtgagccagcccttcctgatggacctggagggcaagcagggcaatttcaagaacctgagggagttcgtgtttaagaatatcgatggctacttcaagatctacagcaagcacaccccaatcaacctggtgcgcgacctgccacagggattctccgccctggagccactggtggatctgcccatcggcatcaacatcacccggtttcagacactgctggccctgcacagatcctacctgacaccaggcgactcctctagcggatggaccgcaggagctgccgcctactatgtgggctatctgcagccccggaccttcctgctgaagtacaacgagaatggcaccatcacagacgcagtggattgcgccctggaccccctgtctgagacaaagtgtacactgaagagctttaccgtggagaagggcatctatcagacaagcaatttcagggtgcagcctaccgagtccatcgtgcgctttcccaatatcacaaacctgtgcccttttggcgaggtgttcaacgccaccagattcgccagcgtgtacgcctggaatcggaagagaatctccaactgcgtggccgactattctgtgctgtacaactccgcctctttcagcacctttaagtgctatggcgtgtctcccacaaagctgaatgatctgtgctttaccaacgtgtacgccgatagcttcgtgatcaggggagacgaagtgagacagatcgcaccaggacagacaggaaagatcgcagactacaattataagctgcctgacgatttcaccggctgcgtgatcgcctggaactccaacaatctggattctaaagtgggcggcaactacaattatctgtacaggctgtttcgcaagtccaatctgaagccattcgagcgggacatctccacagagatctaccaggccggctctaccccctgcaatggcgtggagggctttaactgttatttccctctgcagtcttacggcttccagccaacaaacggcgtgggctatcagccctacagagtggtggtgctgtcctttgagctgctgcacgcaccagcaacagtgtgcggcccaaagaagtctaccaatctggtgaagaacaagtgcgtgaacttcaacttcaacggactgaccggcacaggcgtgctgaccgagagcaataagaagttcctgccttttcagcagttcggcagggacatcgcagataccacagacgccgtgcgcgaccctcagaccctggagatcctggacatcacaccatgcagcttcggcggcgtgtccgtgatcacaccaggcaccaatacatccaaccaggtggccgtgctgtatcaggacgtgaattgtaccgaggtgcccgtggcaatccacgcagatcagctgacccctacatggcgggtgtactctaccggcagcaacgtgttccagacaagagccggatgcctgatcggatttgagcacgtgaacaatagctatgagtgcgacatccctatcggcgccggcatctgtgccagctaccagacccagacaaactccccatctggagcaggctcccaccatcaccatcaccatcaccatcaccactga

SEQ ID NO: 4034 - DNA, 2148 bp, Artificial Sequence
  Description of Artificial Sequence: Synthetic polynucleotide
atgggcatcctgccaagcccaggaatgcccgccctgctgtctctggtgagcctgctgtccgtgctgctgatgggatgcgtggcagagacaggcacacagtgcgtgaacctgaccacaaggacccagctgccccctgcctataccaattctttcacacggggcgtgtactatcccgacaaggtgtttagaagctccgtgctgcactccacacaggatctgtttctgcctttcttttctaacgtgacctggttccacgccatccacgtgtccggcaccaatggcacaaagcggttcgacaatcccgtgctgccttttaacgatggcgtgtacttcgccagcaccgagaagtccaacatcatcagaggctggatctttggcaccacactggactctaagacacagagcctgctgatcgtgaacaatgccaccaacgtggtgatcaaggtgtgcgagttccagttttgtaatgatccattcctgggcgtgtactatcacaagaacaataagtcctggatggaggaagagtttcgcgtgtattctagcgccaacaattgcacatttgagtacgtgagccagcccttcctgatggacctggagggcaagcagggcaatttcaagaacctgagggagttcgtgtttaagaatatcgatggctacttcaagatctacagcaagcacaccccaatcaacctggtgcgcgacctgccacagggattctccgccctggagccactggtggatctgcccatcggcatcaacatcacccggtttcagacactgctggccctgcacagatcctacctgacaccaggcgactcctctagcggatggaccgcaggagctgccgcctactatgtgggctatctgcagccccggaccttcctgctgaagtacaacgagaatggcaccatcacagacgcagtggattgcgccctggaccccctgtctgagacaaagtgtacactgaagagctttaccgtggagaagggcatctatcagacaagcaatttcagggtgcagcctaccgagtccatcgtgcgctttcccaatatcacaaacctgtgcccttttggcgaggtgttcaacgccaccagattcgccagcgtgtacgcctggaatcggaagagaatctccaactgcgtggccgactattctgtgctgtacaactccgcctctttcagcacctttaagtgctatggcgtgtctcccacaaagctgaatgatctgtgctttaccaacgtgtacgccgatagcttcgtgatcaggggagacgaagtgagacagatcgcaccaggacagacaggaaagatcgcagactacaattataagctgcctgacgatttcaccggctgcgtgatcgcctggaactccaacaatctggattctaaagtgggcggcaactacaattatctgtacaggctgtttcgcaagtccaatctgaagccattcgagcgggacatctccacagagatctaccaggccggctctaccccctgcaatggcgtggagggctttaactgttatttccctctgcagtcttacggcttccagccaacaaacggcgtgggctatcagccctacagagtggtggtgctgtcctttgagctgctgcacgcaccagcaacagtgtgcggcccaaagaagtctaccaatctggtgaagaacaagtgcgtgaacttcaacttcaacggactgaccggcacaggcgtgctgaccgagagcaataagaagttcctgccttttcagcagttcggcagggacatcgcagataccacagacgccgtgcgcgaccctcagaccctggagatcctggacatcacaccatgcagcttcggcggcgtgtccgtgatcacaccaggcaccaatacatccaaccaggtggccgtgctgtatcaggacgtgaattgtaccgaggtgcccgtggcaatccacgcagatcagctgacccctacatggcgggtgtactctaccggcagcaacgtgttccagacaagagccggatgcctgatcggagcagagcacgtgaacaatagctatgagtgcgacatccctatcggcgccggcatctgtgccagctaccagacccagacaaactccccatctggagcaggctcccaccatcaccatcaccatcaccatcaccactga

SEQ ID NO: 4035 - DNA, 2148 bp, Artificial Sequence
  Description of Artificial Sequence: Synthetic polynucleotide
atgggcatcctgccaagcccaggaatgcccgccctgctgtctctggtgagcctgctgtccgtgctgctgatgggatgcgtggcagagacaggcacacagtgcgtgaacctgaccacaaggacccagctgccccctgcctataccaattctttcacacggggcgtgtactatcccgacaaggtgtttagaagctccgtgctgcactccacacaggatctgtttctgcctttcttttctaacgtgacctggttccacgccatccacgtgtccggcaccaatggcacaaagcggttcgacaatcccgtgctgccttttaacgatggcgtgtacttcgccagcaccgagaagtccaacatcatcagaggctggatctttggcaccacactggactctaagacacagagcctgctgatcgtgaacaatgccaccaacgtggtgatcaaggtgtgcgagttccagttttgtaatgatccattcctgggcgtgtactatcacaagaacaataagtcctggatggagtctgagtttcgcgtgtattctagcgccaacaattgcacatttgagtacgtgtggcagcccttcctgatggacctggagggcaagcagggcaatttcaagaacctgagggagttcgtgtttaagaatatcgatggctacttcaagatctacagcaagcacaccccaatcaacctggtgcgcgacctgccacagggattctccgccctggagccactggtggatctgcccatcggcatcaacatcacccggtttcagacactgctggccctgcacagatcctacctgacaccaggcgactcctctagcggatggaccgcaggagctgccgcctactatgtgggctatctgcagccccggaccttcctgctgaagtacaacgagaatggcaccatcacagacgcagtggattgcgccctggaccccctgtctgagacaaagtgtacactgaagagctttaccgtggagaagggcatctatcagacaagcaatttcagggtgcagcctaccgagtccatcgtgcgctttcccaatatcacaaacctgtgcccttttggcgaggtgttcaacgccaccagattcgccagcgtgtacgcctggaatcggaagagaatctccaactgcgtggccgactattctgtgctgtacaactccgcctctttcagcacctttaagtgctatggcgtgtctcccacaaagctgaatgatctgtgctttaccaacgtgtacgccgatagcttcgtgatcaggggagacgaagtgagacagatcgcaccaggacagacaggaaagatcgcagactacaattataagctgcctgacgatttcaccggctgcgtgatcgcctggaactccaacaatctggattctaaagtgggcggcaactacaattatctgtacaggctgtttcgcaagtccaatctgaagccattcgagcgggacatctccacagagatctaccaggccggctctaccccctgcaatggcgtggagggctttaactgttatttccctctgcagtcttacggcttccagccaacaaacggcgtgggctatcagccctacagagtggtggtgctgtcctttgagctgctgcacgcaccagcaacagtgtgcggcccaaagaagtctaccaatctggtgaagaacaagtgcgtgaacttcaacttcaacggactgaccggcacaggcgtgctgaccgagagcaataagaagttcctgccttttcagcagttcggcagggacatcgcagataccacagacgccgtgcgcgaccctcagaccctggagatcctggacatcacaccatgcagcttcggcggcgtgtccgtgatcacaccaggcaccaatacatccaaccaggtggccgtgctgtatcaggacgtgaattgtaccgaggtgcccgtggcaatccacgcagatcagctgacccctacatggcgggtgtactctaccggcagcaacgtgttccagacaagagccggatgcctgatcggagcagagcacgtgaacaatagctatgagtgcgacatccctatcggcgccggcatctgtgccagctaccagacccagacaaactccccatctggagcaggctcccaccatcaccatcaccatcaccatcaccactga

SEQ ID NO: 4036 - DNA, 2148 bp, Artificial Sequence
  Description of Artificial Sequence: Synthetic polynucleotide
atgggcatcctgccaagcccaggaatgcccgccctgctgtctctggtgagcctgctgtccgtgctgctgatgggatgcgtggcagagacaggcacacagtgcgtgaacctgaccacaaggacccagctgccccctgcctataccaattctttcacacggggcgtgtactatcccgacaaggtgtttagaagctccgtgctgcactccacacaggatctgtttctgcctttcttttctaacgtgacctggttccacgccatccacgtgtccggcaccaatggcacaaagcggttcgacaatcccgtgctgccttttaacgatggcgtgtacttcgccagcaccgagaagtccaacatcatcagaggctggatctttggcaccacactggactctaagacacagagcctgctgatcgtgaacaatgccaccaacgtggtgatcaaggtgtgcgagttccagttttgtaatgatccattcctgggcgtgtactatcacaagaacaataagtcctggatggagtctgagtttcgcgtgtattctagcgccaacaattgcacatttgagtacgtgagccagcccttcctgatggacctggagggcaagcagggcaatttcaagaacctgagggagttcgtgtttaagaatatcgatggctacttcaagatctacagcaagcacaccccaatcaacctggtgcgcgacctgccacagggattctccccgctggagccactggtggatctgcccatcggcatcaacatcacccggtttcagacactgctggccctgcacagatcctacctgacaccaggcgactcctctagcggatggaccgcaggagctgccgcctactatgtgggctatctgcagccccggaccttcctgctgaagtacaacgagaatggcaccatcacagacgcagtggattgcgccctggaccccctgtctgagacaaagtgtacactgaagagctttaccgtggagaagggcatctatcagacaagcaatttcagggtgcagcctaccgagtccatcgtgcgctttcccaatatcacaaacctgtgcccttttggcgaggtgttcaacgccaccagattcgccagcgtgtacgcctggaatcggaagagaatctccaactgcgtggccgactattctgtgctgtacaactccgcctctttcagcacctttaagtgctatggcgtgtctcccacaaagctgaatgatctgtgctttaccaacgtgtacgccgatagcttcgtgatcaggggagacgaagtgagacagatcgcaccaggacagacaggaaagatcgcagactacaattataagctgcctgacgatttcaccggctgcgtgatcgcctggaactccaacaatctggattctaaagtgggcggcaactacaattatctgtacaggctgtttcgcaagtccaatctgaagccattcgagcgggacatctccacagagatctaccaggccggctctaccccctgcaatggcgtggagggctttaactgttatttccctctgcagtcttacggcttccagccaacaaacggcgtgggctatcagccctacagagtggtggtgctgtcctttgagctgctgcacgcaccagcaacagtgtgcggcccaaagaagtctaccaatctggtgaagaacaagtgcgtgaacttcaacttcaacggactgaccggcacaggcgtgctgaccgagagcaataagaagttcctgccttttcagcagttcggcagggacatcgcagataccacagacgccgtgcgcgaccctcagaccctggagatcctggacatcacaccatgcagcttcggcggcgtgtccgtgatcacaccaggcaccaatacatccaaccaggtggccgtgctgtatcaggacgtgaattgtaccgaggtgcccgtggcaatccacgcagatcagctgacccctacatggcgggtgtactctaccggcagcaacgtgttccagacaagagccggatgcctgatcggagcagagcacgtgaacaatagctatgagtgcgacatccctatcggcgccggcatctgtgccagctaccagacccagacaaactccccatctggagcaggctcccaccatcaccatcaccatcaccatcaccactga

SEQ ID NO: 4037 - DNA, 2148 bp, Artificial Sequence
  Description of Artificial Sequence: Synthetic polynucleotide
atgggcatcctgccaagcccaggaatgcccgccctgctgtctctggtgagcctgctgtccgtgctgctgatgggatgcgtggcagagacaggcacacagtgcgtgaacctgaccacaaggacccagctgccccctgcctataccaattctttcacacggggcgtgtactatcccgacaaggtgtttagaagctccgtgctgcactccacacaggatctgtttctgcctttcttttctaacgtgacctggttccacgccatccacgtgtccggcaccaatggcacaaagcggttcgacaatcccgtgctgccttttaacgatggcgtgtacttcgccagcaccgagaagtccaacatcatcagaggctggatctttggcaccacactggactctaagacacagagcctgctgatcgtgaacaatgccaccaacgtggtgatcaaggtgtgcgagttccagttttgtaatgatccattcctgggcgtgtactatcacaagaacaataagtcctggatggagtctgagtttcgcgtgtattctagcgccaacaattgcacatttgagtacgtgagccagcccttcctgatggacctggagggcaagcagggcaatttcaagaacctgagggagttcgtgtttaagaatatcgatggctacttcaagatctacagcaagcacaccccaatcaacctggtgcgcgacctgccacagggattctccgccctggagccactggtggatctgcccatcggcatcaacatcacccggtttcagacactgctggccctgcacagatcctacctgacaccaggcgactcctctagcggagaaaccgcaggagctgccgcctactatgtgggctatctgcagccccggaccttcctgctgaagtacaacgagaatggcaccatcacagacgcagtggattgcgccctggaccccctgtctgagacaaagtgtacactgaagagctttaccgtggagaagggcatctatcagacaagcaatttcagggtgcagcctaccgagtccatcgtgcgctttcccaatatcacaaacctgtgcccttttggcgaggtgttcaacgccaccagattcgccagcgtgtacgcctggaatcggaagagaatctccaactgcgtggccgactattctgtgctgtacaactccgcctctttcagcacctttaagtgctatggcgtgtctcccacaaagctgaatgatctgtgctttaccaacgtgtacgccgatagcttcgtgatcaggggagacgaagtgagacagatcgcaccaggacagacaggaaagatcgcagactacaattataagctgcctgacgatttcaccggctgcgtgatcgcctggaactccaacaatctggattctaaagtgggcggcaactacaattatctgtacaggctgtttcgcaagtccaatctgaagccattcgagcgggacatctccacagagatctaccaggccggctctaccccctgcaatggcgtggagggctttaactgttatttccctctgcagtcttacggcttccagccaacaaacggcgtgggctatcagccctacagagtggtggtgctgtcctttgagctgctgcacgcaccagcaacagtgtgcggcccaaagaagtctaccaatctggtgaagaacaagtgcgtgaacttcaacttcaacggactgaccggcacaggcgtgctgaccgagagcaataagaagttcctgccttttcagcagttcggcagggacatcgcagataccacagacgccgtgcgcgaccctcagaccctggagatcctggacatcacaccatgcagcttcggcggcgtgtccgtgatcacaccaggcaccaatacatccaaccaggtggccgtgctgtatcaggacgtgaattgtaccgaggtgcccgtggcaatccacgcagatcagctgacccctacatggcgggtgtactctaccggcagcaacgtgttccagacaagagccggatgcctgatcggagcagagcacgtgaacaatagctatgagtgcgacatccctatcggcgccggcatctgtgccagctaccagacccagacaaactccccatctggagcaggctcccaccatcaccatcaccatcaccatcaccactga

SEQ ID NO: 4038 - DNA, 2148 bp, Artificial Sequence
  Description of Artificial Sequence: Synthetic polynucleotide
atgggcatcctgccaagcccaggaatgcccgccctgctgtctctggtgagcctgctgtccgtgctgctgatgggatgcgtggcagagacaggcacacagtgcgtgaacctgaccacaaggacccagctgccccctgcctataccaattctttcacacggggcgtgtactatcccgacaaggtgtttagaagctccgtgctgcactccacacaggatctgtttctgcctttcttttctaacgtgacctggttccacgccatccacgtgtccggcaccaatggcacaaagcggttcgacaatcccgtgctgccttttaacgatggcgtgtacttcgccagcaccgagaagtccaacatcatcagaggctggatctttggcaccacactggactctaagacacagagcctgctgatcgtgaacaatgccaccaacgtggtgatcaaggtgtgcgagttccagttttgtaatgatccattcctgggcgtgtactatcacaagaacaataagtcctggatggagtctgagtttcgcgtgtattctagcgccaacaattgcacatttgagtacgtgagccagcccttcctgatggacctggagggcaagcagggcaatttcaagaacctgagggagttcgtgtttaagaatatcgatggctacttcaagatctacagcaagcacaccccaatcaacctggtgcgcgacctgccacagggattctccgccctggagccactggtggatctgcccatcggcatcaacatcacccggtttcagacactgctggccctgcacagatcctacctgacaccaggcgactcctctagcggatggaccgcaggagctgccgcctactatgtgggctatctgcagccccggaccttcctgctgaagtacaacgagaatggcaccatcacagacgcagtggattgcgccctggaccccctgtctgagacaaagtgtacactgaagagctttaccgtggagaagggcatctatcagacaagcaatttcagggtgcagcctaccgagtccatcgtgcgctttcccaatatcacaaacctgtgcccttttggcgaggtgttcaacgccaccagattcgccagcgtgtacgcctggaatcggaagagaatctccaactgcgtggccgactattctgtgctgtacaactccgcctctttcagcacctttaagtgctatggcgtgtctcccacaaagctgaatgatctgtgctttaccaacgtgtacgccgatagcttcgtgatcaggggagacgaagtgagacagatcgcaccaggacagacaggaaagatcgcagactacaattataagctgcctgacgatttcaccggctgcgtgatcgcctggaactccaacaatctggattctaaagtgggcggcaactacaattatctgtacaggctgtttcgcaagtccaatctgaagccattcgagcgggacatctccacagagatctaccaggccggctctaccccctgcaatggcgtggagggctttaactgttatttccctctgcagtcttacggcttccagccaacaaacggcgtgggctatcagccctacagagtggtggtgctgtcctttgagctgctgcacgcaccagcaacagtgtgcggcccaaagaagtctaccaatctggtgaagaacaagtgcgtgaacttcaacttcaacggactgaccggcacaggcgtgctgaccgagagcaataagaagttcctgccttttcagcagttcggcagggacatcgcagataccctagacgccgtgcgcgaccctcagaccctggagatcctggacatcacaccatgcagcttcggcggcgtgtccgtgatcacaccaggcaccaatacatccaaccaggtggccgtgctgtatcaggacgtgaattgtaccgaggtgcccgtggcaatccacgcagatcagctgacccctacatggcgggtgtactctaccggcagcaacgtgttccagacaagagccggatgcctgatcggagcagagcacgtgaacaatagctatgagtgcgacatccctatcggcgccggcatctgtgccagctaccagacccagacaaactccccatctggagcaggctcccaccatcaccatcaccatcaccatcaccactga

SEQ ID NO: 4039 - DNA, 2148 bp, Artificial Sequence
  Description of Artificial Sequence: Synthetic polynucleotide
atgggcatcctgccaagcccaggaatgcccgccctgctgtctctggtgagcctgctgtccgtgctgctgatgggatgcgtggcagagacaggcacacagtgcgtgaacctgaccacaaggacccagctgccccctgcctataccaattctttcacacggggcgtgtactatcccgacaaggtgtttagaagctccgtgctgcactccacacaggatctgtttctgcctttcttttctaacgtgacctggttccacgccatccacgtgtccggcaccaatggcacaaagcggttcgacaatcccgtgctgccttttaacgatggcgtgtacttcgccagcaccgagaagtccaacatcatcagaggctggatctttggcaccacactggactctaagacacagagcctgctgatcgtgaacaatgccaccaacgtggtgatcaaggtgtgcgagttccagttttgtaatgatccattcctgggcgtgtactatcacaagaacaataagtcctggatggagtctgagtttcgcgtgtattctagcgccaacaattgcacatttgagtacgtgagccagcccttcctgatggacctggagggcaagcagggcaatttcaagaacctgagggagttcgtgtttaagaatatcgatggctacttcaagatctacagcaagcacaccccaatcaacctggtgcgcgacctgccacagggattctccgccctggagccactggtggatctgcccatcggcatcaacatcacccggtttcagacactgctggccctgcacagatcctacctgacaccaggcgactcctctagcggatggaccgcaggagctgccgcctactatgtgggctatctgcagccccggaccttcctgctgaagtacaacgagaatggcaccatcacagacgcagtggattgcgccctggaccccctgtctgagacaaagtgtacactgaagagctttaccgtggagaagggcatctatcagacaagcaatttcagggtgcagcctaccgagtccatcgtgcgctttcccaatatcacaaacctgtgcccttttggcgaggtgttcaacgccaccagattcgccagcgtgtacgcctggaatcggaagagaatctccaactgcgtggccgactattctgtgctgtacaactccgcctctttcagcacctttaagtgctatggcgtgtctcccacaaagctgaatgatctgtgctttaccaacgtgtacgccgatagcttcgtgatcaggggagacgaagtgagacagatcgcaccaggacagacaggaaagatcgcagactacaattataagctgcctgacgatttcaccggctgcgtgatcgcctggaactccaacaatctggattctaaagtgggcggcaactacaattatctgtacaggctgtttcgcaagtccaatctgaagccattcgagcgggacatctccacagagatctaccaggccggctctaccccctgcaatggcgtggagggctttaactgttatttccctctgcagtcttacggcttccagccaacaaacggcgtgggctatcagccctacagagtggtggtgctgtcctttgagctgctgcacgcaccagcaacagtgtgcggcccaaagaagtctaccaatctggtgaagaacaagtgcgtgaacttcaacttcaacggactgaccggcacaggcgtgctgaccgagagcaataagaagttcctgccttttcagcagttcggcagggacatcgcagataccacagacgccgtgcgcgaccctcagaccctggagatcatagacatcacaccatgcagcttcggcggcgtgtccgtgatcacaccaggcaccaatacatccaaccaggtggccgtgctgtatcaggacgtgaattgtaccgaggtgcccgtggcaatccacgcagatcagctgacccctacatggcgggtgtactctaccggcagcaacgtgttccagacaagagccggatgcctgatcggagcagagcacgtgaacaatagctatgagtgcgacatccctatcggcgccggcatctgtgccagctaccagacccagacaaactccccatctggagcaggctcccaccatcaccatcaccatcaccatcaccactga

SEQ ID NO: 4040 - DNA, 2148 bp, Artificial Sequence
  Description of Artificial Sequence: Synthetic polynucleotide
atgggcatcctgccaagcccaggaatgcccgccctgctgtctctggtgagcctgctgtccgtgctgctgatgggatgcgtggcagagacaggcacacagtgcgtgaacctgaccacaaggacccagctgccccctgcctataccaattctttcacacggggcgtgtactatcccgacaaggtgtttagaagctccgtgctgcactccacacaggatctgtttctgcctttcttttctaacgtgacctggttccacgcctaccacgtgtccggcaccaatggcacaaagcggttcgacaatcccgtgctgccttttaacgatggcgtgtacttcgccagcaccgagaagtccaacatcatcagaggctggatctttggcaccacactggactctaagacacagagcctgctgatcgtgaacaatgccaccaacgtggtgatcaaggtgtgcgagttccagttttgtaatgatccattcctgggcgtgtactatcacaagaacaataagtcctggatggagtctgagtttcgcgtgtattctagcgccaacaattgcacatttgagtacgtgagccagcccttcctgatggacctggagggcaagcagggcaatttcaagaacctgagggagttcgtgtttaagaatatcgatggctacttcaagatctacagcaagcacaccccaatcaacctggtgcgcgacctgccacagggattctccgccctggagccactggtggatctgcccatcggcatcaacatcacccggtttcagacactgctggccctgcacagatcctacctgacaccaggcgactcctctagcggagaaaccgcaggagctgccgcctactatgtgggctatctgcagccccggaccttcctgctgaagtacaacgagaatggcaccatcacagacgcagtggattgcgccctggaccccctgtctgagacaaagtgtacactgaagagctttaccgtggagaagggcatctatcagacaagcaatttcagggtgcagcctaccgagtccatcgtgcgctttcccaatatcacaaacaaatgcccttttggcgaggtgttcaacgccaccagattcgccagcgtgtacgcctggaatcggaagagaatctccaactgcgtggccgactattctgtgctgtacaactccgcctctttcagcacctttaagtgctatggcgtgtctcccacaaagctgaatgatctgtgctttaccaacgtgtacgccgatagcttcgtgatcaggggagacgaagtgagacagatcgcaccaggacagacaggaaagatcgcagactacaattataagctgcctgacgatttcaccggctgcgtgatcgcctggaactccaacaatctggattctaaagtgggcggcaactacaattatctgtacaggctgtttcgcaagtccaatctgaagccattcgagcgggacatctccacagagatctaccaggccggctctaccccctgcaatggcgtggagggctttaactgttatttccctctgcagtcttacggcttccagccaacaaacggcccgggccaacagccctacagagtggtggtgctgtcctttgagctgctgcacgcaccagcaacagtgtgcggcccaaagaagtctaccaatctggtgaagaacaagtgcgtgaacttcaacttcaacggactgaccggcacaggcgtgctgaccgagagcaataagaagttcctgccttttcagcagttcggcagggacatcgcagataccacagacgccgtgcgcgaccctcagaccctggagatcctggacatcacaccatgcagcttcggcggcgtgtccgtgatcacaccaggcaccaatacatccaaccaggtggccgtgctgtatcaggacgtgaattgtaccgaggtgcccgatgcaatccacgcagatcagctgacccctacatggcgggtgtactctaccggcagcaacgtgttccagacaagagccggatgcctgatcggagcagagcacgtgaacaatagctatgagtgcgacatccctatcggcgccggcatctgtgccagctaccagacccagacaaactccccatctggagcaggctcccaccatcaccatcaccatcaccatcaccactga

SEQ ID NO: 4041 - DNA, 2148 bp, Artificial Sequence
  Description of Artificial Sequence: Synthetic polynucleotide
atgggcatcctgccaagcccaggaatgcccgccctgctgtctctggtgagcctgctgtccgtgctgctgatgggatgcgtggcagagacaggcacacagtgcgtgaacctgaccacaaggacccagctgccccctgcctataccaattctttcacacggggcgtgtactatcccgacaaggtgtttagaagctccgtgctgcactccacacaggatctgtttctgcctttcttttctaacgtgacctggttccacgccgaacacgtgtccggcaccaatggcacaaagcggttcgacaatcccgtgctgccttttaacgatggcgtgtacttcgccagcaccgagaagtccaacatcatcagaggctggatctttggcaccacactggactctaagacacagagcctgctgatcgtgaacaatgccaccaacgtggtgatcaaggtgtgcgagttccagttttgtaatgatccattcctgggcgtgtactatcacaagaacaataagtcctggatggagtctgagtttcgcgtgtattctagcgccaacaattgcacatttgagtaccatagccagcccttcctgatggacctggagggcaagcagggcaatttcaagaacctgagggagttcgtgtttaagaatatcgatggctacttcaagatctacagcaagcacaccccaatcaacctggtgcgcgacctgccacagggattctccgccctggagccactggtggatctgcccatcggcatcaacatcacccggtttcagacactgctggccctgcacagatcctacctgacaccaggcgactcctctagcggagaaaccgcaggagctgccgcctactatgtgggctatctgcagccccggaccttcctgctgaagtacaacgagaatggcaccatcacagacgcagtggattgcgccctggaccccctgtctgagacaaagtgtacactgaagagctttaccgtggagaagggcatctatcagacaagcaatttcagggtgcagcctaccgagtccatcgtgcgctttcccaatatcacaaacaaatgcccttttggcgaggtgttcaacgccaccagattcgccagcgtgtacgcctggaatcggaagagaatctccaactgcgtggccgactattctgtgctgtacaactccgcctctttcagcacctttaagtgctatggcgtgtctcccacaaagctgaatgatctgtgctttaccaacgtgtacgccgatagcttcgtgatcaggggagacgaagtgagacagatcgcaccaggacagacaggaaagatcgcagactacaattataagctgcctgacgatttcaccggctgcgtgatcgcctggaactccaacaatctggattctaaagtgggcggcaactacaattatctgtacaggctgtttcgcaagtccaatctgaagccattcgagcgggacatctccacagagatctaccaggccggctctaccccctgcaatggcgtggagggctttaactgttatttccctctgcagtcttacggcttccagccaacaaacggcgtgggccaacagccctacagagtggtggtgctgtcctttgagctgctgcacgcaccagcaacagtgtgcggcccaaagaagtctaccaatctggtgaagaacaagtgcgtgaacttcaacttcaacggactgaccggcacaggcgtgctgaccgagagcaataagaagttcctgccttttcagcagttcggcagggacatcgcagataccacagacgccgtgcgcgaccctcagaccctggagatcctggacatcacaccatgcagcttcggcggcgtgtccgtgatcacaccaggcaccaatacatccaaccaggtggccgtgctgtatcaggacgtgaattgtaccgaggtgcccgatgcaatccacgcagatcagctgacccctacatggcgggtgtactctaccggcagcaacgtgttccagacaagagccggatgcctgatcggagcagagcacgtgaacaatagctatgagtgcgacatccctatcggcgccggcatctgtgccagctaccagacccagacaaactccccatctggagcaggctcccaccatcaccatcaccatcaccatcaccactga

SEQ ID NO: 4042 - DNA, 2148 bp, Artificial Sequence
  Description of Artificial Sequence: Synthetic polynucleotide
atgggcatcctgccaagcccaggaatgcccgccctgctgtctctggtgagcctgctgtccgtgctgctgatgggatgcgtggcagagacaggcacacagtgcgtgaacctgaccacaaggacccagctgccccctgcctataccaattctttcacacggggcgtgtactatcccgacaaggtgtttagaagctccgtgctgcactccacacaggatctgtttctgcctttcttttctaacgtgacctggttccacgccatccacgtgtccggcaccaatggcacaaagcggttcgacaatcccgtgctgccttttaacgatggcgtgtacttcgccagcaccgagaagtccaacatcatcagaggctggatctttggcaccacactggactctaagacacagagcctgctgatcgtgaacaatgccaccaacgtggtgatcaaggtgtgcgagttccagttttgtaatgatccattcctgggcgtgtactatcacaagaacaataagtcctggatggagtctgagtttcgcgtgtattctagcgccaacaattgcacatttgagtacgtgagccagcccttcctgatggacctggagggcaagcagggcaatttcaagaacctgagggagttcgtgtttaagaatatcgatggctacttcaagatctacagcaagcacaccccaatcaacctggtgcgcgacctgccacagggattctccgccctggagccactggtggatctgcccatcggcatcaacatcacccggtttcagacactgctggccctgcacagatcctacctgacaccaggcgactcctctagcggatggaccgcaggagctgccgcctactatgtgggctatctgcagccccggaccttcctgctgaagtacaacgagaatggcaccatcacagacgcagtggattgcgccctggaccccctgtctgagacaaagtgtacactgaagagctttaccgtggagaagggcatctatcagacaagcaatttcagggtgcagcctaccttttccatcgtgcgctttcccaatatcacaaacctgtgcccttttggcgaggtgttcaacgccaccagattcgccagcgtgtacgcctggaatcggaagagaatctccaactgcgtggccgactattctgtgctgtacaactccgcctctttcagcacctttaagtgctatggcgtgtctcccacaaagctgaatgatctgtgctttaccaacgtgtacgccgatagcttcgtgatcaggggagacgaagtgagacagatcgcaccaggacagacaggaaagatcgcagactacaattataagctgcctgacgatttcaccggctgcgtgatcgcctggaactccaacaatctggattctaaagtgggcggcaactacaattatctgtacaggctgtttcgcaagtccaatctgaagccattcgagcgggacatctccacagagatctaccaggccggctctaccccctgcaatggcgtggagggctttaactgttatttccctctgcagtcttacggcttccagccaacaaacggcgtgggctatcagccctacagagtggtggtgctgtcctttgagctgctgcacgcaccagcaacagtgtgcggcccaaagaagtctaccaatctggtgaagaacaagtgcgtgaacttcaacttcaacggactgaccggcacaggcgtgctgaccgagagcaataagaagttcctgccttttcagcagttcggcagggacatcgcagataccacagacgccgtgcgcgaccctcagaccctggagatcctggacatcacaccatgcagcttcggcggcgtgtccgtgatcacaccaggcaccaatacatccaaccaggtggccgtgctgtatcaggacgtgaattgtaccgaggtgcccgtggcaatccacgcagatcagctgacccctacatggcgggtgtactctaccggcagcaacgtgttccagacaagagccggatgcctgatcggagcagagcacgtgaacaatagctatgagtgcgacatccctatcggcgccggcatctgtgccagctaccagacccagacaaactccccatctggagcaggctcccaccatcaccatcaccatcaccatcaccactga

SEQ ID NO: 4043 - DNA, 2148 bp, Artificial Sequence
  Description of Artificial Sequence: Synthetic polynucleotide
atgggcatcctgccaagcccaggaatgcccgccctgctgtctctggtgagcctgctgtccgtgctgctgatgggatgcgtggcagagacaggcacacagtgcgtgaacctgaccacaaggacccagctgccccctgcctataccaattctttcacacggggcgtgtactatcccgacaaggtgtttagaagctccgtgctgcactccacacaggatctgtttctgcctttcttttctaacgtgacctggttccacgccaaacacgtgtccggcaccaatggcacaaagcggttcgacaatcccgtgctgccttttaacgatggcgtgtacttcgccagcaccgagaagtccaacatcatcagaggctggatctttggcaccacactggactctaagacacagagcctgctgatcgtgaacaatgccaccaacgtggtgatcaaggtgtgcgagttccagttttgtaatgatccattcctgggcgtgtactatcacaagaacaataagtcctggatggagtctgagtttcgcgtgtattctagcgccaacaattgcacatttgagtaccatagccagcccttcctgatggacctggagggcaagcagggcaatttcaagaacctgagggagttcgtgtttaagaatatcgatggctacttcaagatctacagcaagcacaccccaatcaacctggtgcgcgacctgccacagggattctccgccctggagccactggtggatctgcccatcggcatcaacatcacccggtttcagacactgctggccctgcacagatcctacctgacaccaggcgactcctctagcggagaaaccgcaggagctgccgcctactatgtgggctatctgcagccccggaccttcctgctgaagtacaacgagaatggcaccatcacagacgcagtggattgcgccctggaccccctgtctgagacaaagtgtacactgaagagctttaccgtggagaagggcatctatcagacaagcaatttcagggtgcagcctaccgagtccatcgtgcgctttcccaatatcacaaacaaatgcccttttggcgaggtgttcaacgccaccagattcgccagcgtgtacgcctggaatcggaagagaatctccaactgcgtggccgactattctgtgctgtacaactccgcctctttcagcacctttaagtgctatggcgtgtctcccacaaagctgaatgatctgtgctttaccaacgtgtacgccgatagcttcgtgatcaggggagacgaagtgagacagatcgcaccaggacagacaggaaagatcgcagactacaattataagctgcctgacgatttcaccggctgcgtgatcgcctggaactccaacaatctggattctaaagtgggcggcaactacaattatctgtacaggctgtttcgcaagtccaatctgaagccattcgagcgggacatctccacagagatctaccaggccggctctaccccctgcaatggcgtggagggctttaactgttatttccctctgcagtcttacggcttccagccaacaaacggcccaggctatcagccctacagagtggtggtgctgtcctttgagctgctgcacgcaccagcaacagtgtgcggcccaaagaagtctaccaatctggtgaagaacaagtgcgtgaacttcaacttcaacggactgaccggcacaggcgtgctgaccgagagcaataagaagttcctgccttttcagcagttcggcagggacatcgcagataccacagacgccgtgcgcgaccctcagaccctggagatcctggacatcacaccatgcagcttcggcggcgtgtccgtgatcacaccaggcaccaatacatccaaccaggtggccgtgctgtatcaggacgtgaattgtaccgaggtgcccgatgcaatccacgcagatcagctgacccctacatggcgggtgtactctaccggcagcaacgtgttccagacaagagccggatgcctgatcggagcagagcacgtgaacaatagctatgagtgcgacatccctatcggcgccggcatctgtgccagctaccagacccagacaaactccccatctggagcaggctcccaccatcaccatcaccatcaccatcaccactga

SEQ ID NO: 4044 - DNA, 2148 bp, Artificial Sequence
  Description of Artificial Sequence: Synthetic polynucleotide
atgggcatcctgccaagcccaggaatgcccgccctgctgtctctggtgagcctgctgtccgtgctgctgatgggatgcgtggcagagacaggcacacagtgcgtgaacctgaccacaaggacccagctgccccctgcctataccaattctttcacacggggcgtgtactatcccgacaaggtgtttagaagctccgtgctgcactccacacaggatctgtttctgcctttcttttctaacgtgacctggttccacgccatccacgtgtccggcaccaatggcacaaagcggttcgacaatcccgtgctgccttttaacgatggcgtgtacttcgccagcaccgagaagtccaacatcatcagaggctggatctttggcaccacactggactctaagacacagagcctgctgatcgtgaacaatgccaccaacgtggtgatcaaggtgtgcgagttccagttttgtaatgatccattcctgggcgtgtactatcacaagaacaataagtcctggatggagtctgagtttcgcgtgtattctagcgccaacaattgcacatttgagtacgtgagccagcccttcctgatggacctggagggcaagcagggcaatttcaagaacctgagggagttcgtgtttaagaatatcgatggctacttcaagatctacagcaagcacaccccaatcaacctggtgcgcgacctgccacagggattctccgccctggagccactggtggatctgcccatcggcatcaacatcacccggtttcagacactgctggccctgcacagatcctacctgacaccaggcgactcctctagcggatggaccgcaggagctgccgcctactatgtgggctatctgcagccccggaccttcctgctgaagtacaacgagaatggcaccatcacagacgcagtggattgcgccctggaccccctgtctgagacaaagtgtacactgaagagctttaccgtggagaagggcatctatcagacaagcaatttcagggtgcagcctaccgagtccatcgtgcgctttcccaatatcacaaacctgtgcccttttggcgaggtgttcaacgccaccagattcgccagcgtgtacgcctggaatcggaagagaatctccaactgcgtggccgactattctgtgctgtacaactccgcctctttcagcacctttaagtgctatggcgtgtctcccacaaagctgaatgatctgtgctttaccaacgtgtacgccgatagcttcgtgatcaggggagacgaagtgagacagatcgcaccaggacagacaggaaagatcgcagactacaattataagctgcctgacgatttcaccggctgcgtgatcgcctggaactccaacaatctggattctaaagtgggcggcaactacaattatctgtacaggctgtttcgcaagtccaatctgaagccattcgagcgggacatctccacagagatctaccaggccggctctaccccctgcaatggcgtggagggctttaactgttatttccctctgcagtcttacggcttccagccaacaaacggcgtgggctatcagccctacagagtggtggtgctggaatttgagctgctgcacgcaccagcaacagtgtgcggcccaaagaagtctaccaatctggtgaagaacaagtgcgtgaacttcaacttcaacggactgaccggcacaggcgtgctgaccgagagcaataagaagttcctgccttttcagcagttcggcagggacatcgcagataccacagacgccgtgcgcgaccctcagaccctggagatcctggacatcacaccatgcagcttcggcggcgtgtccgtgatcacaccaggcaccaatacatccaaccaggtggccgtgctgtatcaggacgtgaattgtaccgaggtgcccgtggcaatccacgcagatcagctgacccctacatggcgggtgtactctaccggcagcaacgtgttccagacaagagccggatgcctgatcggagcagagcacgtgaacaatagctatgagtgcgacatccctatcggcgccggcatctgtgccagctaccagacccagacaaactccccatctggagcaggctcccaccatcaccatcaccatcaccatcaccactga

SEQ ID NO: 4045 - DNA, 2148 bp, Artificial Sequence
  Description of Artificial Sequence: Synthetic polynucleotide
atgggcatcctgccaagcccaggaatgcccgccctgctgtctctggtgagcctgctgtccgtgctgctgatgggatgcgtggcagagacaggcacacagtgcgtgaacctgaccacaaggacccagctgccccctgcctataccaattctttcacacggggcgtgtactatcccgacaaggtgtttagaagctccgtgctgcactccacacaggatctgtttctgcctttcttttctaacgtgacctggttccacgccgaacacgtgtccggcaccaatggcacaaagcggttcgacaatcccgtgctgccttttaacgatggcgtgtacttcgccagcaccgagaagtccaacatcatcagaggctggatctttggcaccacactggactctaagacacagagcctgctgatcgtgaacaatgccaccaacgtggtgatcaaggtgtgcgagttccagttttgtaatgatccattcctgggcgtgtactatcacaagaacaataagtcctggatggagtctgagtttcgcgtgtattctagcgccaacaattgcacatttgagtaccatagccagcccttcctgatggacctggagggcaagcagggcaatttcaagaacctgagggagttcgtgtttaagaatatcgatggctacttcaagatctacagcaagcacaccccaatcaacctggtgcgcgacctgccacagggattctccgccctggagccactggtggatctgcccatcggcatcaacatcacccggtttcagacactgctggccctgcacagatcctacctgacaccaggcgactcctctagcggagaaaccgcaggagctgccgcctactatgtgggctatctgcagccccggaccttcctgctgaagtacaacgagaatggcaccatcacagacgcagtggattgcgccctggaccccctgtctgagacaaagtgtacactgaagagctttaccgtggagaagggcatctatcagacaagcaatttcagggtgcagcctaccgagtccatcgtgcgctttcccaatatcacaaacccttgcccttttggcgaggtgttcaacgccaccagattcgccagcgtgtacgcctggaatcggaagagaatctccaactgcgtggccgactattctgtgctgtacaactccgcctctttcagcacctttaagtgctatggcgtgtctcccacaaagctgaatgatctgtgctttaccaacgtgtacgccgatagcttcgtgatcaggggagacgaagtgagacagatcgcaccaggacagacaggaaagatcgcagactacaattataagctgcctgacgatttcaccggctgcgtgatcgcctggaactccaacaatctggattctaaagtgggcggcaactacaattatctgtacaggctgtttcgcaagtccaatctgaagccattcgagcgggacatctccacagagatctaccaggccggctctaccccctgcaatggcgtggagggctttaactgttatttccctctgcagtcttacggcttccagccaacaaacggcgtgggccaacagccctacagagtggtggtgctgtcctttgagctgctgcacgcaccagcaacagtgtgcggcccaaagaagtctaccaatctggtgaagaacaagtgcgtgaacttcaacttcaacggactgaccggcacaggcgtgctgaccgagagcaataagaagttcctgccttttcagcagttcggcagggacatcgcagataccacagacgccgtgcgcgaccctcagaccctggagatcctggacatcacaccatgcagcttcggcggcgtgtccgtgatcacaccaggcaccaatacatccaaccaggtggccgtgctgtatcaggacgtgaattgtaccgaggtgcccgatgcaatccacgcagatcagctgacccctacatggcgggtgtactctaccggcagcaacgtgttccagacaagagccggatgcctgatcggagcagagcacgtgaacaatagctatgagtgcgacatccctatcggcgccggcatctgtgccagctaccagacccagacaaactccccatctggagcaggctcccaccatcaccatcaccatcaccatcaccactga

SEQ ID NO: 4046 - DNA, 2148 bp, Artificial Sequence
  Description of Artificial Sequence: Synthetic polynucleotide
atgggcatcctgccaagcccaggaatgcccgccctgctgtctctggtgagcctgctgtccgtgctgctgatgggatgcgtggcagagacaggcacacagtgcgtgaacctgaccacaaggacccagctgccccctgcctataccaattctttcacacggggcgtgtactatcccgacaaggtgtttagaagctccgtgctgcactccacacaggatctgtttctgcctttcttttctaacgtgacctggttccacgccatccacgtgtccggcaccaatggcacaaagcggttcgacaatcccgtgctgccttttaacgatggcgtgtacttcgccagcaccgagaagtccaacatcatcagaggctggatctttggcaccacactggactctaagacacagagcctgctgatcgtgaacaatgccaccaacgtggtgatcaaggtgtgcgagttccagttttgtaatgatccattcctgggcgtgtactatcacaagaacaataagtcctggatggagtctgagtttcgcgtgtattctagcgccaacaattgcacatttgagtacgtgagccagcccttcctgatggacctggagggcaagcagggcaatttcaagaacctgagggagttcgtgtttaagaatatcgatggctacttcaagatctacagcaagcacaccccaatcaacctggtgcgcgacctgccacagggattctccgccctggagccactggtggatctgcccatcggcatcaacatcacccggtttcagacactgctggccctgcacagatcctacctgacaccaggcgactcctctagcggatggaccgcaggagctgccgcctactatgtgggctatctgcagccccggaccttcctgctgaagtacaacgagaatggcaccatcacagacgcagtggattgcgccctggaccccctgtctgagacaaagtgtacactgaagagctttaccgtggagaagggcatctatcagacaagcaatttcagggtgcagcctaccgagtccatcgtgcgctttcccaatatcacaaacctgtgcccttttggcgaggtgttcaacgccaccagattcgccagcgtgtacgcctggcgacggaagagaatctccaactgcgtggccgactattctgtgctgtacaactccgcctctttcagcacctttaagtgctatggcgtgtctcccacaaagctgaatgatctgtgctttaccaacgtgtacgccgatagcttcgtgatcaggggagacgaagtgagacagatcgcaccaggacagacaggaaagatcgcagactacaattataagctgcctgacgatttcaccggctgcgtgatcgcctggaactccaacaatctggattctaaagtgggcggcaactacaattatctgtacaggctgtttcgcaagtccaatctgaagccattcgagcgggacatctccacagagatctaccaggccggctctaccccctgcaatggcgtggagggctttaactgttatttccctctgcagtcttacggcttccagccaacaaacggcgtgggctatcagccctacagagtggtggtgctgtcctttgagctgctgcacgcaccagcaacagtgtgcggcccaaagaagtctaccaatctggtgaagaacaagtgcgtgaacttcaacttcaacggactgaccggcacaggcgtgctgaccgagagcaataagaagttcctgccttttcagcagttcggcagggacatcgcagataccacagacgccgtgcgcgaccctcagaccctggagatcctggacatcacaccatgcagcttcggcggcgtgtccgtgatcacaccaggcaccaatacatccaaccaggtggccgtgctgtatcaggacgtgaattgtaccgaggtgcccgtggcaatccacgcagatcagctgacccctacatggcgggtgtactctaccggcagcaacgtgttccagacaagagccggatgcctgatcggagcagagcacgtgaacaatagctatgagtgcgacatccctatcggcgccggcatctgtgccagctaccagacccagacaaactccccatctggagcaggctcccaccatcaccatcaccatcaccatcaccactga

SEQ ID NO: 4047 - DNA, 2148 bp, Artificial Sequence
  Description of Artificial Sequence: Synthetic polynucleotide
atgggcatcctgccaagcccaggaatgcccgccctgctgtctctggtgagcctgctgtccgtgctgctgatgggatgcgtggcagagacaggcacacagtgcgtgaacctgaccacaaggacccagctgccccctgcctataccaattctttcacacggggcgtgtactatcccgacaaggtgtttagaagctccgtgctgcactccacacaggatctgtttctgcctttcttttctaacgtgacctggttccacgcctaccacgtgtccggcaccaatggcacaaagcggttcgacaatcccgtgctgccttttaacgatggcgtgtacttcgccagcaccgagaagtccaacatcatcagaggctggatctttggcaccacactggactctaagacacagagcctgctgatcgtgaacaatgccaccaacgtggtgatcaaggtgtgcgagttccagttttgtaatgatccattcctgggcgtgtactatcacaagaacaataagtcctggatggagtctgagtttcgcgtgtattctagcgccaacaattgcacatttgagtacgtgagccagcccttcctgatggacctggagggcaagcagggcaatttcaagaacctgagggagttcgtgtttaagaatatcgatggctacttcaagatctacagcaagcacaccccaatcaacctggtgcgcgacctgccacagggattctccgccctggagccactggtggatctgcccatcggcatcaacatcacccggtttcagacactgctggccctgcacagatcctacctgacaccaggcgactcctctagcggagaaaccgcaggagctgccgcctactatgtgggctatctgcagccccggaccttcctgctgaagtacaacgagaatggcaccatcacagacgcagtggattgcgccctggaccccctgtctgagacaaagtgtacactgaagagctttaccgtggagaagggcatctatcagacaagcaatttcagggtgcagcctaccgagtccatcgtgcgctttcccaatatcacaaaccattgcccttttggcgaggtgttcaacgccaccagattcgccagcgtgtacgcctggaatcggaagagaatctccaactgcgtggccgactattctgtgctgtacaactccgcctctttcagcacctttaagtgctatggcgtgtctcccacaaagctgaatgatctgtgctttaccaacgtgtacgccgatagcttcgtgatcaggggagacgaagtgagacagatcgcaccaggacagacaggaaagatcgcagactacaattataagctgcctgacgatttcaccggctgcgtgatcgcctggaactccaacaatctggattctaaagtgggcggcaactacaattatctgtacaggctgtttcgcaagtccaatctgaagccattcgagcgggacatctccacagagatctaccaggccggctctaccccctgcaatggcgtggagggctttaactgttatttccctctgcagtcttacggcttccagccaacaaacggcccgggccaacagccctacagagtggtggtgctgtcctttgagctgctgcacgcaccagcaacagtgtgcggcccaaagaagtctaccaatctggtgaagaacaagtgcgtgaacttcaacttcaacggactgaccggcacaggcgtgctgaccgagagcaataagaagttcctgccttttcagcagttcggcagggacatcgcagataccacagacgccgtgcgcgaccctcagaccctggagatcctggacatcacaccatgcagcttcggcggcgtgtccgtgatcacaccaggcaccaatacatccaaccaggtggccgtgctgtatcaggacgtgaattgtaccgaggtgcccgatgcaatccacgcagatcagctgacccctacatggcgggtgtactctaccggcagcaacgtgttccagacaagagccggatgcctgatcggagcagagcacgtgaacaatagctatgagtgcgacatccctatcggcgccggcatctgtgccagctaccagacccagacaaactccccatctggagcaggctcccaccatcaccatcaccatcaccatcaccactga

SEQ ID NO: 4048 - DNA, 2148 bp, Artificial Sequence
  Description of Artificial Sequence: Synthetic polynucleotide
atgggcatcctgccaagcccaggaatgcccgccctgctgtctctggtgagcctgctgtccgtgctgctgatgggatgcgtggcagagacaggcacacagtgcgtgaacctgaccacaaggacccagctgccccctgcctataccaattctttcacacggggcgtgtactatcccgacaaggtgtttagaagctccgtgctgcactccacacaggatctgtttctgcctttcttttctaacgtgacctggttccacgcccttcacgtgtccggcaccaatggcacaaagcggttcgacaatcccgtgctgccttttaacgatggcgtgtacttcgccagcaccgagaagtccaacatcatcagaggctggatctttggcaccacactggactctaagacacagagcctgctgatcgtgaacaatgccaccaacgtggtgatcaaggtgtgcgagttccagttttgtaatgatccattcctgggcgtgtactatcacaagaacaataagtcctggatggagtctgagtttcgcgtgtattctagcgccaacaattgcacatttgagtacgtgagccagcccttcctgatggacctggagggcaagcagggcaatttcaagaacctgagggagttcgtgtttaagaatatcgatggctacttcaagatctacagcaagcacaccccaatcaacctggtgcgcgacctgccacagggattctccgccctggagccactggtggatctgcccatcggcatcaacatcacccggtttcagacactgctggccctgcacagatcctacctgacaccaggcgactcctctagcggatggaccgcaggagctgccgcctactatgtgggctatctgcagccccggaccttcctgctgaagtacaacgagaatggcaccatcacagacgcagtggattgcgccctggaccccctgtctgagacaaagtgtacactgaagagctttaccgtggagaagggcatctatcagacaagcaatttcagggtgcagcctaccgagtccatcgtgcgctttcccaatatcacaaacctgtgcccttttggcgaggtgttcaacgccaccagattcgccagcgtgtacgcctggaatcggaagagaatctccaactgcgtggccgactattctgtgctgtacaactccgcctctttcagcacctttaagtgctatggcgtgtctcccacaaagctgaatgatctgtgctttaccaacgtgtacgccgatagcttcgtgatcaggggagacgaagtgagacagatcgcaccaggacagacaggaaagatcgcagactacaattataagctgcctgacgatttcaccggctgcgtgatcgcctggaactccaacaatctggattctaaagtgggcggcaactacaattatctgtacaggctgtttcgcaagtccaatctgaagccattcgagcgggacatctccacagagatctaccaggccggctctaccccctgcaatggcgtggagggctttaactgttatttccctctgcagtcttacggcttccagccaacaaacggcgtgggctatcagccctacagagtggtggtgctgtcctttgagctgctgcacgcaccagcaacagtgtgcggcccaaagaagtctaccaatctggtgaagaacaagtgcgtgaacttcaacttcaacggactgaccggcacaggcgtgctgaccgagagcaataagaagttcctgccttttcagcagttcggcagggacatcgcagataccacagacgccgtgcgcgaccctcagaccctggagatcctggacatcacaccatgcagcttcggcggcgtgtccgtgatcacaccaggcaccaatacatccaaccaggtggccgtgctgtatcaggacgtgaattgtaccgaggtgcccgtggcaatccacgcagatcagctgacccctacatggcgggtgtactctaccggcagcaacgtgttccagacaagagccggatgcctgatcggagcagagcacgtgaacaatagctatgagtgcgacatccctatcggcgccggcatctgtgccagctaccagacccagacaaactccccatctggagcaggctcccaccatcaccatcaccatcaccatcaccactga

SEQ ID NO: 4049 - DNA, 2148 bp, Artificial Sequence
  Description of Artificial Sequence: Synthetic polynucleotide
atgggcatcctgccaagcccaggaatgcccgccctgctgtctctggtgagcctgctgtccgtgctgctgatgggatgcgtggcagagacaggcacacagtgcgtgaacctgaccacaaggacccagctgccccctgcctataccaattctttcacacggggcgtgtactatcccgacaaggtgtttagaagctccgtgctgcactccacacaggatctgtttctgcctttcttttctaacgtgacctggttccacgccatccacgtgtccggcaccaatggcacaaagcggttcgacaatcccgtgctgccttttaacgatggcgtgtacttcgccagcaccgagaagtccaacatcatcagaggctggatctttggcataacactggactctaagacacagagcctgctgatcgtgaacaatgccaccaacgtggtgatcaaggtgtgcgagttccagttttgtaatgatccattcctgggcgtgtactatcacaagaacaataagtcctggatggagtctgagtttcgcgtgtattctagcgccaacaattgcacatttgagtacgtgagccagcccttcctgatggacctggagggcaagcagggcaatttcaagaacctgagggagttcgtgtttaagaatatcgatggctacttcaagatctacagcaagcacaccccaatcaacctggtgcgcgacctgccacagggattctccgccctggagccactggtggatctgcccatcggcatcaacatcacccggtttcagacactgctggccctgcacagatcctacctgacaccaggcgactcctctagcggatggaccgcaggagctgccgcctactatgtgggctatctgcagccccggaccttcctgctgaagtacaacgagaatggcaccatcacagacgcagtggattgcgccctggaccccctgtctgagacaaagtgtacactgaagagctttaccgtggagaagggcatctatcagacaagcaatttcagggtgcagcctaccgagtccatcgtgcgctttcccaatatcacaaacctgtgcccttttggcgaggtgttcaacgccaccagattcgccagcgtgtacgcctggaatcggaagagaatctccaactgcgtggccgactattctgtgctgtacaactccgcctctttcagcacctttaagtgctatggcgtgtctcccacaaagctgaatgatctgtgctttaccaacgtgtacgccgatagcttcgtgatcaggggagacgaagtgagacagatcgcaccaggacagacaggaaagatcgcagactacaattataagctgcctgacgatttcaccggctgcgtgatcgcctggaactccaacaatctggattctaaagtgggcggcaactacaattatctgtacaggctgtttcgcaagtccaatctgaagccattcgagcgggacatctccacagagatctaccaggccggctctaccccctgcaatggcgtggagggctttaactgttatttccctctgcagtcttacggcttccagccaacaaacggcgtgggctatcagccctacagagtggtggtgctgtcctttgagctgctgcacgcaccagcaacagtgtgcggcccaaagaagtctaccaatctggtgaagaacaagtgcgtgaacttcaacttcaacggactgaccggcacaggcgtgctgaccgagagcaataagaagttcctgccttttcagcagttcggcagggacatcgcagataccacagacgccgtgcgcgaccctcagaccctggagatcctggacatcacaccatgcagcttcggcggcgtgtccgtgatcacaccaggcaccaatacatccaaccaggtggccgtgctgtatcaggacgtgaattgtaccgaggtgcccgtggcaatccacgcagatcagctgacccctacatggcgggtgtactctaccggcagcaacgtgttccagacaagagccggatgcctgatcggagcagagcacgtgaacaatagctatgagtgcgacatccctatcggcgccggcatctgtgccagctaccagacccagacaaactccccatctggagcaggctcccaccatcaccatcaccatcaccatcaccactga

SEQ ID NO: 4050 - DNA, 2148 bp, Artificial Sequence
  Description of Artificial Sequence: Synthetic polynucleotide
atgggcatcctgccaagcccaggaatgcccgccctgctgtctctggtgagcctgctgtccgtgctgctgatgggatgcgtggcagagacaggcacacagtgcgtgaacctgaccacaaggacccagctgccccctgcctataccaattctttcacacggggcgtgtactatcccgacaaggtgtttagaagctccgtgctgcactccacacaggatctgtttctgcctttcttttctaacgtgacctggttccacgccatccacgtgtccggcaccaatggcacaaagcggttcgacaatcccgtgctgccttttaacgatggcgtgtacttcgccagcaccgagaagtccaacatcatcagaggctggatctttggcaccacactggactctaagacacagagcctgctgatcgtgaacaatgccaccaacgtggtgatcaaggtgtgcgagttccagttttgtaatgatccattcctgggcgtgtactatcacaagaacaataagtcctggatggagtctgagtttcgcgtgtattctagcgccaacaattgcacatttgagtacgtgagccagcccttcctgatggacctggagggcaagcagggcaatttcaagaacctgagggagttcgtgtttaagaatatcgatggctacttcaagatctacagcaagcacaccccaatcaacctggtgcgcgacctgccacagggattctccgccctggagccactggtggatctgcccatcggcatcaacatcacccggtttcagacactgctggccctgcacagatcctacctgacaccaggcgactcctctagcggatggaccgcaggagctgccgcctactatgtgggctatctgcagccccggaccttcctgctgaagtacaacgagaatggcaccatcacagacgcagtggattgcgccctggaccccctgtctgagacaaagtgtacactgaagagctttaccgtggagaagggcatctatcagacaagcaatttcagggtgcagcctaccgagtccatcgtgcgctttcccaatatcacaaacctgtgccctctaggcgaggtgttcaacgccaccagattcgccagctcatacgcctggaatcggaagagaatctccaactgcgtggccgactattctgtgctgtacaactccgcctctttcagcacctttaagtgctatggcgtgtctcccacaaagctgaatgatctgtgctttaccaacgtgtacgccgatcgattcgtgatcaggggagacgaagtgagacagatcgcaccaggacagacaggaaagatcgcagactacaattataagctgcctgacgatttcaccggctgcgtgatcgcctggaactccaacaatctggatgcgaaagtgggcggcaactacaattatctgtacaggctgtttcgcaagtccaatctgaagccattcgagcggttcatctccacagagatctaccaggccggctctaccccctcaaatggcgtggagggctttaactgttatttccctctgcagtcttacggcttccagccaacaaacggcgtgacgtatcagccctacagagtggtggtgctgtcctttgagctgctgcacgcaccacatacagtgtgcggcccaaagaagtctaccaatctggtgaagaacaagtgcgtgaacttcaacttcaacggactgaccggcacaggcgtgctgaccgagagcaataagaagttcctgccttttcagcagttcggcagggacatcgcagataccacagacgccgtgcgcgaccctcagaccctggagatcctggacatcacaccatgcagcttcggcggcgtgtccgtgatcacaccaggcaccaatacatccaaccaggtggccgtgctgtatcaggacgtgaattgtaccgaggtgcccgtggcaatccacgcagatcagctgacccctacatggcgggtgtactctaccggcagcaacgtgttccagacaagagccggatgcctgatcggagcagagcacgtgaacaatagctatgagtgcgacatccctatcggcgccggcatctgtgccagctaccagacccagacaaactccccatctggagcaggctcccaccatcaccatcaccatcaccatcaccactga

SEQ ID NO: 4051 - DNA, 2148 bp, Artificial Sequence
  Description of Artificial Sequence: Synthetic polynucleotide
atgggcatcctgccaagcccaggaatgcccgccctgctgtctctggtgagcctgctgtccgtgctgctgatgggatgcgtggcagagacaggcacacagtgcgtgaacctgaccacaaggacccagctgccccctgcctataccaattctttcacacggggcgtgtactatcccgacaaggtgtttagaagctccgtgctgcactccacacaggatctgtttctgcctttcttttctaacgtgacctggttccacgccatccacgtgtccggcaccaatggcacaaagcggttcgacaatcccgtgctgccttttaacgatggcgtgtacttcgccagcaccgagaagtccaacatcatcagaggctggatctttggcaccacactggactctaagacacagagcctgctgatcgtgaacaatgccaccaacgtggtgatcaaggtgtgcgagttccagttttgtaatgatccattcctgggcgtgtactatcacaagaacaataagtcctggatggagtctgagtttcgcgtgtattctagcgccaacaattgcacatttgagtacgtgagccagcccttcctgatggacctggagggcaagcagggcaatttcaagaacctgagggagttcgtgtttaagaatatcgatggctacttcaagatctacagcaagcacaccccaatcaacctggtgcgcgacctgccacagggattctccgccctggagccactggtggatctgcccatcggcatcaacatcacccggtttcagacactgctggccctgcacagatcctacctgacaccaggcgactcctctagcggatggaccgcaggagctgccgcctactatgtgggctatctgcagccccggaccttcctgctgaagtacaacgagaatggcaccatcacagacgcagtggattgcgccctggaccccctgtctgagacaaagtgtacactgaagagctttaccgtggagaagggcatctatcagacaagcaatttcagggtgcagcctaccgagtccatcgtgcgctttcccaatatcacaaacctgtgcccttttggcgaggtgttcaacgccaccagattcgccagcgtgtacgcctggaatcggaagagaatctccaactgcgtggccgactattctgtgctgtacaactccgcctctttcactacctttaagtgctatggcgtgtctcccacaaagctgaatgatctgtgctttaccaacgtgtacgccgatagcttcgtgatcaggggagacgaagtgagacagatcgcaccaggacagacaggaaagatcgcagactacaattataagctgcctgacgatttcaccggctgcgtgatcgcctggaactccaacaatctggattctaaagtgggcggcaactacaattatctgtacaggctgtttcgcaagtccaatctgaagccattcgagcgggacatctccacagagatctaccaggccggctctaccccctgcaatggcgtggagggctttaactgttatttccctctgcagtcttacggcttccagccaacaaacggcgtgggctatcagccctacagagtggtggtgctgtcctttgagctgctgcacgcaccagcaacagtgtgcggcccaaagaagtctaccaatctggtgaagaacaagtgcgtgaacttcaacttcaacggactgaccggcacaggcgtgctgaccgagagcaataagaagttcctgccttttcagcagttcggcagggacatcgcagataccacagacgccgtgcgcgaccctcagaccctggagatcctggacatcacaccatgcagcttcggcggcgtgtccgtgatcacaccaggcaccaatacatccaaccaggtggccgtgctgtatcaggacgtgaattgtaccgaggtgcccgtggcaatccacgcagatcagctgacccctacatggcgggtgtactctaccggcagcaacgtgttccagacaagagccggatgcctgatcggagcagagcacgtgaacaatagctatgagtgcgacatccctatcggcgccggcatctgtgccagctaccagacccagacaaactccccatctggagcaggctcccaccatcaccatcaccatcaccatcaccactga

SEQ ID NO: 4052 - DNA, 2148 bp, Artificial Sequence
  Description of Artificial Sequence: Synthetic polynucleotide
atgggcatcctgccaagcccaggaatgcccgccctgctgtctctggtgagcctgctgtccgtgctgctgatgggatgcgtggcagagacaggcacacagtgcgtgaacctgaccacaaggacccagctgccccctgcctataccaattctttcacacggggcgtgtactatcccgacaaggtgtttagaagctccgtgctgcactccacacaggatctgtttctgcctttcttttctaacgtgacctggttccacgccatccacgtgtccggcaccaatggcacaaagcggttcgacaatcccgtgctgccttttaacgatggcgtgtacttcgccagcaccgagaagtccaacatcatcagaggctggatctttggcaccacactggactctaagacacagagcctgctgatcgtgaacaatgccaccaacgtggtgatcaaggtgtgcgagttccagttttgtaatgatccattcctgggcgtgtactatcacaagaacaataagtcctggatggagtctgagtttcgcgtgtattctagcgccaacaattgcacatttgagtacgtgagccagcccttcctgatggacctggagggcaagcagggcaatttcaagaacctgagggagttcgtgtttaagaatatcgatggctacttcaagatctacagcaagcacaccccaatcaacctggtgcgcgacctgccacagggattctccgccctggagccacgtgtggatctgcccatcggcatcaacatcacccggtttcagacactgctggccctgcacagatcctacctgacaccaggcgactcctctagcggatggaccgcaggagctgccgcctactatgtgggctatctgcagccccggaccttcctgctgaagtacaacgagaatggcaccatcacagacgcagtggattgcgccctggaccccctgtctgagacaaagtgtacactgaagagctttaccgtggagaagggcatctatcagacaagcaatttcagggtgcagcctaccgagtccatcgtgcgctttcccaatatcacaaacctgtgcccttttggcgaggtgttcaacgccaccagattcgccagcgtgtacgcctggaatcggaagagaatctccaactgcgtggccgactattctgtgctgtacaactccgcctctttcagcacctttaagtgctatggcgtgtctcccacaaagctgaatgatctgtgctttaccaacgtgtacgccgatagcttcgtgatcaggggagacgaagtgagacagatcgcaccaggacagacaggaaagatcgcagactacaattataagctgcctgacgatttcaccggctgcgtgatcgcctggaactccaacaatctggattctaaagtgggcggcaactacaattatctgtacaggctgtttcgcaagtccaatctgaagccattcgagcgggacatctccacagagatctaccaggccggctctaccccctgcaatggcgtggagggctttaactgttatttccctctgcagtcttacggcttccagccaacaaacggcgtgggctatcagccctacagagtggtggtgctgtcctttgagctgctgcacgcaccagcaacagtgtgcggcccaaagaagtctaccaatctggtgaagaacaagtgcgtgaacttcaacttcaacggactgaccggcacaggcgtgctgaccgagagcaataagaagttcctgccttttcagcagttcggcagggacatcgcagataccacagacgccgtgcgcgaccctcagaccctggagatcctggacatcacaccatgcagcttcggcggcgtgtccgtgatcacaccaggcaccaatacatccaaccaggtggccgtgctgtatcaggacgtgaattgtaccgaggtgcccgtggcaatccacgcagatcagctgacccctacatggcgggtgtactctaccggcagcaacgtgttccagacaagagccggatgcctgatcggagcagagcacgtgaacaatagctatgagtgcgacatccctatcggcgccggcatctgtgccagctaccagacccagacaaactccccatctggagcaggctcccaccatcaccatcaccatcaccatcaccactga

SEQ ID NO: 4053 - DNA, 2148 bp, Artificial Sequence
  Description of Artificial Sequence: Synthetic polynucleotide
atgggcatcctgccaagcccaggaatgcccgccctgctgtctctggtgagcctgctgtccgtgctgctgatgggatgcgtggcagagacaggcacacagtgcgtgaacctgaccacaaggacccagctgccccctgcctataccaattctttcacacggggcgtgtactatcccgacaaggtgtttagaagctccgtgctgcactccacacaggatctgtttctgcctttcttttctaacgtgacctggttccacgccatccacgtgtccggcaccaatggcacaaagcggttcgacaatcccgtgctgccttttaacgatggcgtgtacttcgccagcaccgagaagtccaacatcatcagaggctggatctttggcaccacactggactctaagacacagagcctgctgatcgtgaacaatgccaccaacgtggtgatcaaggtgtgcgagttccagttttgtaatgatccattcctgggcgtgtactatcacaagaacaataagtcctggatggagtctgagtttcgcgtgtattctagcgccaacaattgcacatttgagtacgtgagccagcccttcctgatggacctggagggcaagcagggcaatttcaagaacctgagggagttcgtgtttaagaatatcgatggctacttcaagatctacagcaagcacaccccaatcaacctggtgcgcgacctgccacagggattctccgccctggagccactggtggatctgcccatcggcatcaacatcacccggtttcagacactgctggccctgcacagatcctacctgacaccaggcgactcctctagcggatggaccgcaggagctgccgcctactatgtgggctatctgcagccccggaccttcctgctgaagtacaacgagaatggcaccatcacagacgcagtggattgcgccctggaccccctgtctgagacaaagtgtacactgaagagctttaccgtggagaagggcatctatcagacaagcaatttcagggtgcagcctaccgagtccatcgtgcgctttcccaatatcacaaacctgtgcccttttggcgaggtgttcaacgccaccagattcgccagcgtgtacgcctggaatcggaagagaatctccaactgcgtggccgactattctgtgctgtacaactccgcctctttcagcacctttaagtgctatggcgtgtctcccacaaagctgaatgatctgtgctttaccaacgtgtacgccgatagcttcgtgatcaggggagacgaagtgagacagatcgcaccaggacagacaggaaagatcgcagactacaattataagctgcctgacgatttcaccggctgcgtgatcgcctggaactccaacaatctggattctaaagtgggcggcaactacaattatctgtacaggctgtttcgcaagtccaatctgaagccattcgagcgggacatctccacagagatctaccaggccggcaaaaccccctgcaatggcgtggagggctttaactgttatttccctctgcagtcttacggcttccagccaacaaacggcgtgggctatcagccctacagagtggtggtgctgtcctttgagctgctgcacgcaccagcaacagtgtgcggcccaaagaagtctaccaatctggtgaagaacaagtgcgtgaacttcaacttcaacggactgaccggcacaggcgtgctgaccgagagcaataagaagttcctgccttttcagcagttcggcagggacatcgcagataccacagacgccgtgcgcgaccctcagaccctggagatcctggacatcacaccatgcagcttcggcggcgtgtccgtgatcacaccaggcaccaatacatccaaccaggtggccgtgctgtatcaggacgtgaattgtaccgaggtgcccgtggcaatccacgcagatcagctgacccctacatggcgggtgtactctaccggcagcaacgtgttccagacaagagccggatgcctgatcggagcagagcacgtgaacaatagctatgagtgcgacatccctatcggcgccggcatctgtgccagctaccagacccagacaaactccccatctggagcaggctcccaccatcaccatcaccatcaccatcaccactga

SEQ ID NO: 4054 - DNA, 2148 bp, Artificial Sequence
  Description of Artificial Sequence: Synthetic polynucleotide
atgggcatcctgccaagcccaggaatgcccgccctgctgtctctggtgagcctgctgtccgtgctgctgatgggatgcgtggcagagacaggcacacagtgcgtgaacctgaccacaaggacccagctgccccctgcctataccaattctttcacacggggcgtgtactatcccgacaaggtgtttagaagctccgtgctgcactccacacaggatctgtttctgcctttcttttctaacgtgacctggttccacgccatccacgtgtccggcaccaatggcacaaagcggttcgacaatcccgtgctgccttttaacgatggcgtgtacttcgccagcaccgagaagtccaacatcatcagaggctggatctttggcaccacactggactctaagacacagagcctgctgatcgtgaacaatgccaccaacgtggtgatcaaggtgtgcgagttccagttttgtaatgatccattcctgggcgtgtactatctaaagaacaataagtcctggatggagtctgagtttcgcgtgtattctagcgccaacaattgcacatttgagtacgtgagccagcccttcctgatggacctggagggcaagcagggcaatttcaagaacctgagggagttcgtgtttaagaatatcgatggctacttcaagatctacagcaagcacaccccaatcaacctggtgcgcgacctgccacagggattctccgccctggagccactggtggatctgcccatcggcatcaacatcacccggtttcagacactgctggccctgcacagatcctacctgacaccaggcgactcctctagcggatggaccgcaggagctgccgcctactatgtgggctatctgcagccccggaccttcctgctgaagtacaacgagaatggcaccatcacagacgcagtggattgcgccctggaccccctgtctgagacaaagtgtacactgaagagctttaccgtggagaagggcatctatcagacaagcaatttcagggtgcagcctaccgagtccatcgtgcgctttcccaatatcacaaacctgtgcccttttggcgaggtgttcaacgccaccagattcgccagcgtgtacgcctggaatcggaagagaatctccaactgcgtggccgactattctgtgctgtacaactccgcctctttcagcacctttaagtgctatggcgtgtctcccacaaagctgaatgatctgtgctttaccaacgtgtacgccgatagcttcgtgatcaggggagacgaagtgagacagatcgcaccaggacagacaggaaagatcgcagactacaattataagctgcctgacgatttcaccggctgcgtgatcgcctggaactccaacaatctggattctaaagtgggcggcaactacaattatctgtacaggctgtttcgcaagtccaatctgaagccattcgagcgggacatctccacagagatctaccaggccggctctaccccctgcaatggcgtggagggctttaactgttatttccctctgcagtcttacggcttccagccaacaaacggcgtgggctatcagccctacagagtggtggtgctgtcctttgagctgctgcacgcaccagcaacagtgtgcggcccaaagaagtctaccaatctggtgaagaacaagtgcgtgaacttcaacttcaacggactgaccggcacaggcgtgctgaccgagagcaataagaagttcctgccttttcagcagttcggcagggacatcgcagataccacagacgccgtgcgcgaccctcagaccctggagatcctggacatcacaccatgcagcttcggcggcgtgtccgtgatcacaccaggcaccaatacatccaaccaggtggccgtgctgtatcaggacgtgaattgtaccgaggtgcccgtggcaatccacgcagatcagctgacccctacatggcgggtgtactctaccggcagcaacgtgttccagacaagagccggatgcctgatcggagcagagcacgtgaacaatagctatgagtgcgacatccctatcggcgccggcatctgtgccagctaccagacccagacaaactccccatctggagcaggctcccaccatcaccatcaccatcaccatcaccactga

SEQ ID NO: 4055 - DNA, 2148 bp, Artificial Sequence
  Description of Artificial Sequence: Synthetic polynucleotide
atgggcatcctgccaagcccaggaatgcccgccctgctgtctctggtgagcctgctgtccgtgctgctgatgggatgcgtggcagagacaggcacacagtgcgtgaacctgaccacaaggacccagctgccccctgcctataccaattctttcacacggggcgtgtactatcccgacaaggtgtttagaagctccgtgctgcactccacacaggatctgtttctgcctttcttttctaacgtgacctggttccacgccgagcacgtgtccggcaccaatggcacaaagcggttcgacaatcccgtgctgccttttaacgatggcgtgtacttcgccagcaccgagaagtccaacatcatcagaggctggatctttggcaccacactggactctaagacacagagcctgctgatcgtgaacaatgccaccaacgtggtgatcaaggtgtgcgagttccagttttgtaatgatccattcctgggcgtgtactatcacaagaacaataagtcctggatggagtctgagtttcgcgtgtattctagcgccaacaattgcacatttgagtaccatagccagcccttcctgatggacctggagggcaagcagggcaatttcaagaacctgagggagttcgtgtttaagaatatcgatggctacttcaagatctacagcaagcacaccccaatcaacctggtgcgcgacctgccacagggattctccgccctggagccactggtggatctgcccatcggcatcaacatcacccggtttcagacactgctggccctgcacagatcctacctgacaccaggcgactcctctagcggagaaaccgcaggagctgccgcctactatgtgggctatctgcagccccggaccttcctgctgaagtacaacgagaatggcaccatcacagacgcagtggattgcgccctggaccccctgtctgagacaaagtgtacactgaagagctttaccgtggagaagggcatctatcagacaagcaatttcagggtgcagcctaccgagtccatcgtgcgctttcccaatatcacaaacctgtgcccttttggcgaggtgttcaacgccaccagattcgccagcgtgtacgcctggaatcggaagagaatctccaactgcgtggccgactattctgtgctgtacaactccgcctctttcagcacctttaagtgctatggcgtgtctcccacaaagctgaatgatctgtgctttaccaacgtgtacgccgatagcttcgtgatcaggggagacgaagtgagacagatcgcaccaggacagacaggaaagatcgcagactacaattataagctgcctgacgatttcaccggctgcgtgatcgcctggaactccaacaatctggattctaaagtgggcggcaactacaattatctgtacaggctgtttcgcaagtccaatctgaagccattcgagcgggacatctccacagagatctaccaggccggctctaccccctgcaatggcgtggagggctttaactgttatttccctctgcagtcttacggcttccagccaacaaacggcccgggccaacagccctacagagtggtggtgctgtcctttgagctgctgcacgcaccagcaacagtgtgcggcccaaagaagtctaccaatctggtgaagaacaagtgcgtgaacttcaacttcaacggactgaccggcacaggcgtgctgaccgagagcaataagaagttcctgccttttcagcagttcggcagggacatcgcagataccacagacgccgtgcgcgaccctcagaccctggagatcctggacatcacaccatgcagcttcggcggcgtgtccgtgatcacaccaggcaccaatacatccaaccaggtggccgtgctgtatcaggacgtgaattgtaccgaggtgcccgatgcaatccacgcagatcagctgacccctacatggcgggtgtactctaccggcagcaacgtgttccagacaagagccggatgcctgatcggagcagagcacgtgaacaatagctatgagtgcgacatccctatcggcgccggcatctgtgccagctaccagacccagacaaactccccatctggagcaggctcccaccatcaccatcaccatcaccatcaccactga

SEQ ID NO: 4056 - DNA, 2148 bp, Artificial Sequence
  Description of Artificial Sequence: Synthetic polynucleotide
atgggcatcctgccaagcccaggaatgcccgccctgctgtctctggtgagcctgctgtccgtgctgctgatgggatgcgtggcagagacaggcacacagtgcgtgaacctgaccacaaggacccagctgccccctgcctataccaattctttcacacggggcgtgtactatcccgacaaggtgtttagaagctccgtgctgcactccacacaggatctgtttctgcctttcttttctaacgtgacctggttccacgccatccacgtgtccggcaccaatggcacaaagcggttcgacaatcccgtgctgccttttaacgatggcgtgtacttcgccagcaccgagaagtccaacatcatcagaggctggatctttggcaccacactggactctaagacacagagcctgctgatcgtgaacaatgccaccaacgtggtgatcaaggtgtgcgagttccagttttgtaatgatccattcctgggcgtgtactatcacaagaacaataagtcctggatggagtctgagtttcgcgtgtattctagcgccaacaattgcacatttgagtacgtgagccagcccttcctgatggacctggagggcaagcagggcaatttcaagaacctgagggagttcgtgtttaagaatatcgatggctacttcaagatctacagcaagcacaccccaatcaacctggtgcgcgacctgccacagggattctccgccctggagccactggtggatctgcccatcggcatcaacatcacccggtttcagacactgctggccctgcacagatcctacctgacaccaggcgactcctctagcggatggaccgcaggagctgccgcctactatgtgggctatctgcagccccggaccttcctgctgaagtacaacgagaatggcaccatcacagacgcagtggattgcgccctggaccccctgtctgagacaaagtgtacactgaagagctttaccgtggagaagggcatctatcagacaagcaatttcagggtgcagcctaccgagtccatcgtgcgctttcccaatatcacaaacctgtgcccttttggcgaggtgttcaacgccaccagattcgccagcagttacgcctggaatcggaagagaatctccaactgcgtggccgactattctgtgctgtacaactccgcctctttcagcacctttaagtgctatggcgtgtctcccacaaagctgaatgatctgtgctttaccaacgtgtacgccgatcgtttcgtgatcaggggagacgaagtgagacagatcgcaccaggacagacaggaaagatcgcagactacaattataagctgcctgacgatttcaccggctgcgtgatcgcctggaactccaacaatctggatgctaaagtgggcggcaactacaattatctgtacaggctgtttcgcaagtccaatctgaagccattcgagcggtttatctccacagagatctaccaggccggctctacccccgctaatggcgtggagggctttaactgttatttccctctgcagtcttacggcttccagccaacaaacggcgtgacttatcagccctacagagtggtggtgctgtcctttgagctgctgcacgcaccacatacagtgtgcggcccaaagaagtctaccaatctggtgaagaacaagtgcgtgaacttcaacttcaacggactgaccggcacaggcgtgctgaccgagagcaataagaagttcctgccttttcagcagttcggcagggacatcgcagataccacagacgccgtgcgcgaccctcagaccctggagatcctggacatcacaccatgcagcttcggcggcgtgtccgtgatcacaccaggcaccaatacatccaaccaggtggccgtgctgtatcaggacgtgaattgtaccgaggtgcccgtggcaatccacgcagatcagctgacccctacatggcgggtgtactctaccggcagcaacgtgttccagacaagagccggatgcctgatcggagcagagcacgtgaacaatagctatgagtgcgacatccctatcggcgccggcatctgtgccagctaccagacccagacaaactccccatctggagcaggctcccaccatcaccatcaccatcaccatcaccactga

SEQ ID NO: 4057 - DNA, 2148 bp, Artificial Sequence
  Description of Artificial Sequence: Synthetic polynucleotide
atgggcatcctgccaagcccaggaatgcccgccctgctgtctctggtgagcctgctgtccgtgctgctgatgggatgcgtggcagagacaggcacacagtgcgtgaacctgaccacaaggacccagctgccccctgcctataccaattctttcacacggggcgtgtactatcccgacaaggtgtttagaagctccgtgctgcactccacacaggatctgtttctgcctttcttttctaacgtgacctggttccacgccatccacgtgtccggcaccaatggcacaaagcggttcgacaatcccgtgctgccttttaacgatggcgtgtacttcgccagcaccgagaagtccaacatcatcagaggctggatctttggcaccacactggactctaagacacagagcctgctgatcgtgaacaatgccaccaacgtggtgatcaaggtgtgcgagttccagttttgtaatgatccattcctgggcgtgtactatcacaagaacaataagtcctggatggagtctgagtttcgcgtgtattctagcgccaacaattgcacatttgagtacgtgagccagcccttcctgatggacctggagggcaagcagggcaatttcaagaacctgagggagttcgtgtttaagaatatcgatggctacttcaagatctacagcaagcacaccccaatcaacctggtgcgcgacctgccacagggattctccgccctggagccactggtggatctgcccatcggcatcaacatcacccggtttcagacactgctggccctgcacagatcctacctgacaccaggcgactcctctagcggatggaccgcaggagctgccgcctactatgtgggctatctgcagccccggaccttcctgctgaagtacaacgagaatggcaccatcacagacgcagtggattgcgccctggaccccctgtctgagacaaagtgtacactgaagagctttaccgtggagaagggcatctatcagacaagcaatttcagggtgcagcctaccgagtccatcgtgcgctttcccaatatcacaaacctgtgcccttttggcgaggtgttcaacgccaccagattcgccagctcatacgcctggaatcggaagagaatctccaactgcgtggccgactattctgtgctgtacaactccgcctctttcagcacctttaagtgctatggcgtgtctcccacaaagctgaatgatctgtgctttaccaacgtgtacgccgatcgtttcgtgatcaggggagacgaagtgagacagatcgcaccaggacagacaggaaagatcgcagactacaattataagctgcctgacgatttcaccggctgcgtgatcgcctggaactccaacaatctggatgcaaaagtgggcggcaactacaattatctgtacaggctgtttcgcaagtccaatctgaagccattcgagcggtttatctccacagagatctaccaggccggctctacccccactaatggcgtggagggctttaactgttatttccctctgcagtcttacggcttccagccaacaaacggcgtgacttatcagccctacagagtggtggtgctgtcctttgagctgctgcacgcaccacatacagtgtgcggcccaaagaagtctaccaatctggtgaagaacaagtgcgtgaacttcaacttcaacggactgaccggcacaggcgtgctgaccgagagcaataagaagttcctgccttttcagcagttcggcagggacatcgcagataccacagacgccgtgcgcgaccctcagaccctggagatcctggacatcacaccatgcagcttcggcggcgtgtccgtgatcacaccaggcaccaatacatccaaccaggtggccgtgctgtatcaggacgtgaattgtaccgaggtgcccgtggcaatccacgcagatcagctgacccctacatggcgggtgtactctaccggcagcaacgtgttccagacaagagccggatgcctgatcggagcagagcacgtgaacaatagctatgagtgcgacatccctatcggcgccggcatctgtgccagctaccagacccagacaaactccccatctggagcaggctcccaccatcaccatcaccatcaccatcaccactga

SEQ ID NO: 4058 - DNA, 2148 bp, Artificial Sequence
  Description of Artificial Sequence: Synthetic polynucleotide
atgggcatcctgccaagcccaggaatgcccgccctgctgtctctggtgagcctgctgtccgtgctgctgatgggatgcgtggcagagacaggcacacagtgcgtgaacctgaccacaaggacccagctgccccctgcctataccaattctttcacacggggcgtgtactatcccgacaaggtgtttagaagctccgtgctgcactccacacaggatctgtttctgcctttcttttctaacgtgacctggttccacgccatccacgtgtccggcaccaatggcacaaagcggttcgacaatcccgtgctgccttttaacgatggcgtgtacttcgccagcaccgagaagtccaacatcatcagaggctggatctttggcaccacactggactctaagacacagagcctgctgatcgtgaacaatgccaccaacgtggtgatcaaggtgtgcgagttccagttttgtaatgatccattcctgggcgtgtactatcacaagaacaataagtcctggatggagtctgagtttcgcgtgtattctagcgccaacaattgcacatttgagtacgtgagccagcccttcctgatggacctggagggcaagcagggcaatttcaagaacctgagggagttcgtgtttaagaatatcgatggctacttcaagatctacagcaagcacaccccaatcaacctggtgcgcgacctgccacagggattctccgccctggagccactggtggatctgcccatcggcatcaacatcacccggtttcagacactgctggccctgcacagatcctacctgacaccaggcgactcctctagcggagataccgcaggagctgccgcctactatgtgggctatctgcagccccggaccttcctgctgaagtacaacgagaatggcaccatcacagacgcagtggattgcgccctggaccccctgtctgagacaaagtgtacactgaagagctttaccgtggagaagggcatctatcagacaagcaatttcagggtgcagcctaccgagtccatcgtgcgctttcccaatatcacaaacctgtgcccttttggcgaggtgttcaacgccaccagattcgccagcgtgtacgcctggaatcggaagagaatctccaactgcgtggccgactattctgtgctgtacaactccgcctctttcagcacctttaagtgctatggcgtgtctcccacaaagctgaatgatctgtgctttaccaacgtgtacgccgatagcttcgtgatcaggggagacgaagtgagacagatcgcaccaggacagacaggaaagatcgcagactacaattataagctgcctgacgatttcaccggctgcgtgatcgcctggaactccaacaatctggattctaaagtgggcggcaactacaattatctgtacaggctgtttcgcaagtccaatctgaagccattcgagcgggacatctccacagagatctaccaggccggctctaccccctgcaatggcgtggagggctttaactgttatttccctctgcagtcttacggcttccagccaacaaacggcgtgggctatcagccctacagagtggtggtgctgtcctttgagctgctgcacgcaccagcaacagtgtgcggcccaaagaagtctaccaatctggtgaagaacaagtgcgtgaacttcaacttcaacggactgaccggcacaggcgtgctgaccgagagcaataagaagttcctgccttttcagcagttcggcagggacatcgcagataccacagacgccgtgcgcgaccctcagaccctggagatcctggacatcacaccatgcagcttcggcggcgtgtccgtgatcacaccaggcaccaatacatccaaccaggtggccgtgctgtatcaggacgtgaattgtaccgaggtgcccgtggcaatccacgcagatcagctgacccctacatggcgggtgtactctaccggcagcaacgtgttccagacaagagccggatgcctgatcggagcagagcacgtgaacaatagctatgagtgcgacatccctatcggcgccggcatctgtgccagctaccagacccagacaaactccccatctggagcaggctcccaccatcaccatcaccatcaccatcaccactga

SEQ ID NO: 4059 - DNA, 2148 bp, Artificial Sequence
  Description of Artificial Sequence: Synthetic polynucleotide
atgggcatcctgccaagcccaggaatgcccgccctgctgtctctggtgagcctgctgtccgtgctgctgatgggatgcgtggcagagacaggcacacagtgcgtgaacctgaccacaaggacccagctgccccctgcctataccaattctttcacacggggcgtgtactatcccgacaaggtgtttagaagctccgtgctgcactccacacaggatctgtttctgcctttcttttctaacgtgacctggttccacgccatccacgtgtccggcaccaatggcacaaagcggttcgacaatcccgtgctgccttttaacgatggcgtgtacttcgccagcaccgagaagtccaacatcatcagaggctggatctttggcaccacactggactctaagacacagagcctgctgatcgtgaacaatgccaccaacgtggtgatcaaggtgtgcgagttccagtttactaatgatccattcctgggcgtgtactatcacaagaacaataagtcctggatggagtctgagtttcgcgtgtattctagcgccaacaattgcacatttgagtacgtgagccagcccttcctgatggacctggagggcaagcagggcaatttcaagaacctgagggagttcgtgtttaagaatatcgatggctacttcaagatctacagcaagcacaccccaatcaacctggtgcgcgacctgccacagggattctccgccctggagccactggtggatctgcccatcggcatcaacatcacccggtttcagacactgctggccctgcacagatcctacctgacaccaggcgactcctctagcggatggaccgcaggagctgccgcctactatgtgggctatctgcagccccggaccttcctgctgaagtacaacgagaatggcaccatcacagacgcagtggattgcgccctggaccccctgtctgagacaaagtgtacactgaagagctttaccgtggagaagggcatctatcagacaagcaatttcagggtgcagcctaccgagtccatcgtgcgctttcccaatatcacaaacctgtgcccttttggcgaggtgttcaacgccaccagattcgccagcgtgtacgcctggaatcggaagagaatctccaactgcgtggccgactattctgtgctgtacaactccgcctctttcagcacctttaagtgctatggcgtgtctcccacaaagctgaatgatctgtgctttaccaacgtgtacgccgatagcttcgtgatcaggggagacgaagtgagacagatcgcaccaggacagacaggaaagatcgcagactacaattataagctgcctgacgatttcaccggctgcgtgatcgcctggaactccaacaatctggattctaaagtgggcggcaactacaattatctgtacaggctgtttcgcaagtccaatctgaagccattcgagcgggacatctccacagagatctaccaggccggctctaccccctgcaatggcgtggagggctttaactgttatttccctctgcagtcttacggcttccagccaacaaacggcgtgggctatcagccctacagagtggtggtgctgtcctttgagctgctgcacgcaccagcaacagtgtgcggcccaaagaagtctaccaatctggtgaagaacaagtgcgtgaacttcaacttcaacggactgaccggcacaggcgtgctgaccgagagcaataagaagttcctgccttttcagcagttcggcagggacatcgcagataccacagacgccgtgcgcgaccctcagaccctggagatcctggacatcacaccatgcagcttcggcggcgtgtccgtgatcacaccaggcaccaatacatccaaccaggtggccgtgctgtatcaggacgtgaattgtaccgaggtgcccgtggcaatccacgcagatcagctgacccctacatggcgggtgtactctaccggcagcaacgtgttccagacaagagccggatgcctgatcggagcagagcacgtgaacaatagctatgagtgcgacatccctatcggcgccggcatctgtgccagctaccagacccagacaaactccccatctggagcaggctcccaccatcaccatcaccatcaccatcaccactga

SEQ ID NO: 4060 - DNA, 2148 bp, Artificial Sequence
  Description of Artificial Sequence: Synthetic polynucleotide
atgggcatcctgccaagcccaggaatgcccgccctgctgtctctggtgagcctgctgtccgtgctgctgatgggatgcgtggcagagacaggcacacagtgcgtgaacctgaccacaaggacccagctgccccctgcctataccaattctttcacacggggcgtgtactatcccgacaaggtgtttagaagctccgtgctgcactccacacaggatctgtttctgcctttcttttctaacgtgacctggttccacgccatccacgtgtccggcaccaatggcacaaagcggttcgacaatcccgtgctgccttttaacgatggcgtgtacttcgccagcaccgagaagtccaacatcatcagaggctggatctttggcaccacactggactctaagacacagagcctgctgatcgtgaacaatgccaccaacgtggtgatcaaggtgtgcgagttccagttttgtaatgatccattcctgggcgtgtactatcacaagaacaataagtcctggatggagtctgagtttcgcgtgtattctagcgccaacaattgcacatttgagtacgtgagccagcccttcctgatggacctggagggcaagcagggcaatttcaagaacctgagggagttcgtgtttaagaatatcgatggctacttcaagatctacagcaagcacaccccaatcaacctggtgcgcgacctgccacagggattctccgccctggagccactggtggatctgcccatcggcatcaacatcacccggtttcagacactgctggccctgcacagatcctacctgacaccaggcgactcctctagcggatggaccgcaggagctgccgcctactatgtgggctatctgcagccccggaccttcctgctgaagtacaacgagaatggcaccatcacagacgcagtggattgcgccctggaccccctgtctgagacaaagtgtacactgaagagctttaccgtggagaagggcatctatcagacaagcaatttcagggtgcagcctaccgagtccatcgtgcgctttcccaatatcacaaacctgtgcccttttggcgaggtgttcaacgccaccagattcgccagcgtgtacgcctggaatcggaagagaatctccaactgcgtggccgactattctgtgctgtacaactccgcctctttcagcacctttaagtgctatggcgtgtctcccacaaagctgaatgatctgtgctttaccaacgtgtacgccgatagcttcgtgatcaggggagacgaagtgagacagatcgcaccaggacagacaggaaagatcgcagactacaattataagctgcctgacgatttcaccggctgcgtgatcgcctggaactccaacaatctggattctaaagtgggcggcaactacaattatctgtacaggctgtttcgcaagtccaatctgaagccattcgagcgggacatctccacagagatctaccaggccggctctaccccctgcaatggcgtggagggctttaactgttatttccctctgcagtcttacggcttccagccaacaaacggcgtgggctatcagccctacagagtggtggtgctgtcctttgagctgctgcacgcaccagcaacagtgtgcggcccaaagaagtctaccaatctggtgaagaacaagtgcgtgaacttcaacttcaacggactgaccggcacaggcgtgctgaccgagagcaataagaagttcctgccttttcagcagttcggcagggacatcgcagataccacagacgccgtgcgcgaccctcagaccctggagatcctggacatcacaccatgcagcttcggcggcgtgtccgtgatcacaccaggcaccaatacatccaaccaggtggccgtgctgtatcaggacgtgaattgtaccgaggtgcccgtggcaatccacgcagatcagctgacccctacatggcgggtgtactctaccggcagcaacgtgttccagacaagagccggatgcctgatcggagcagagcacgtgaacaatagctatgagtgcgacatccctatcggcaatggcatctgtgccagctaccagacccagacaaactccccatctggagcaggctcccaccatcaccatcaccatcaccatcaccactga

SEQ ID NO: 4061 - DNA, 2148 bp, Artificial Sequence
  Description of Artificial Sequence: Synthetic polynucleotide
atgggcatcctgccaagcccaggaatgcccgccctgctgtctctggtgagcctgctgtccgtgctgctgatgggatgcgtggcagagacaggcacacagtgcgtgaacctgaccacaaggacccagctgccccctgcctataccaattctttcacacggggcgtgtactatcccgacaaggtgtttagaagctccgtgctgcactccacacaggatctgtttctgcctttcttttctaacgtgacctggttccacgccatccacgtgtccggcaccaatggcacaaagcggttcgacaatcccgtgctgccttttaacgatggcgtgtacttcgccagcaccgagaagtccaacatcatcagaggctggatctttggcaccacactggactctaagacacagagcctgctgatcgtgaacaatgccaccaacgtggtgatcaaggtgtgcgagttccagttttgtaatgatccattcctgggcgtgtactatcacaagaacaataagtcctggatggagtctgagtttcgcgtgtattctagcgccaacaattgcacatttgagtacgtgagccagcccttcctgatggacctggagggcaagcagggcaatttcaagaacctgagggagttcgtgtttaagaatatcgatggctacttcaagatctacagcaagcacaccccaatcaacctggtgcgcgacctgccacagggattctccgccctggagccactggtggatctgcccatcggcatcaacatcacccggtttcagacactgctggccctgcacagatcctacctgacaccaggcgactcctctagcggatggaccgcaggagctgccgcctactatgtgggctatctgcagccccggaccttcctgctgaagtacaacgagaatggcaccatcacagacgcagtggattgcgccctggaccccctgtctgagacaaagtgtacactgaagagctttaccgtggagaagggcatctatcagacaagcaatttcagggtgcagcctaccgagtccatcgtgcgctttcccaatatcacaaacctgtgcccttttggcgaggtgttcaacgccaccagattcgccagcgtgtacgcctggaatcggaagagaatctccaactgcgtggccgactattctgtgctgtacaactccgcctctttcagcacctttaagtgctatggcgtgtctcccacaaagctgaatgatctgtgctttaccaacgtgtacgccgatagcttcgtgatcaggggagacgaagtgagacagatcgcaccaggacagacaggaaagatcgcagactacaattataagctgcctgacgatttcaccggctgcgtgatcgcctggaactccaacaatctggattctaaagtgggcggcaactacaattatctgtacaggctgtttcgcaagtccaatctgaagccattcgagcgggacatctccacagagatctaccaggccggctctaccccctgcaatggcgtggagggctttaactgttatttccctctgcagtcttacggcttccagccaacaaacggcgtgggctatcagccctacagagtggtggtgctgtcctttgagctgctgcacgcaccagcaacagtgtgcggcccaaagaagtctaccaatctggtgaagaacaagtgcgtgaacttcaacttcaacggactgaccggcacaggcgtgctgaccgagagcaataagaagttcctgccttttcagcagttcggcagggacatcgcagataccacagacgccgtgcgcgaccctcagaccctggagatcctggacatcacaccatgcagcttcggcggcgtgtccgtgatcacaccaggcaccaatacatccaaccaggtggccgtgctgtatcaggacgtgaattgtaccgaggtgcccgtggcaatccacgcagatcagctgacccctacatggcggacgtactctaccggcagcaacgtgttccagacaagagccggatgcctgatcggagcagagcacgtgaacaatagctatgagtgcgacatccctatcggcgccggcatctgtgccagctaccagacccagacaaactccccatctggagcaggctcccaccatcaccatcaccatcaccatcaccactga

SEQ ID NO: 4062 - DNA, 2148 bp, Artificial Sequence
  Description of Artificial Sequence: Synthetic polynucleotide
atgggcatcctgccaagcccaggaatgcccgccctgctgtctctggtgagcctgctgtccgtgctgctgatgggatgcgtggcagagacaggcacacagtgcgtgaacctgaccacaaggacccagctgccccctgcctataccaattctttcacacggggcgtgtactatcccgacaaggtgtttagaagctccgtgctgcactccacacaggatctgtttctgcctttcttttctaacgtgacctggttccacgccatccacgtgtccggcaccaatggcacaaagcggttcgacaatcccgtgctgccttttaacgatggcgtgtacttcgccagcaccgagaagtccaacatcatcagaggctggatctttggcaccacactggactctaagacacagagcctgctgatcgtgaacaatgccaccaacgtggtgatcaaggtgtgcgagttccagttttgtaatgatccattcctgggcgtgtactatcacaagaacaataagtcctggatggagtctgagtttcgcgtgtattctagcgccaacaattgcacatttgagtacgtgagccagcccttcctgatggacctggagggcaagcagggcaatttcaagaacctgagggagttcgtgtttaagaatatcgatggctacttcaagatctacagcaagcacaccccaatcaacctggtgcgcgacctgccacagggattctccgccctggagccactggtggatctgcccatcggcatcaacatcacccggtttcagacactgctggccctgcacagatcctacctgacaccaggcgactcctctagcggatggaccgcaggagctgccgcctactatgtgggctatctgcagccccggaccttcctgctgaagtacaacgagaatggcaccatcacagacgcagtggattgcgccctggaccccctgtctgagacaaagtgtacactgaagagctttaccgtggagaagggcatctatcagacaagcaatttcagggtgcagcctaccgagtccatcgtgcgctttcccaatatcacaaacctgtgcccttttggcgaggtgttcaacgccaccagattcgccagcgtgtacgcctggaatcggaagagaatctccaactgcgtggccgactattctgtgctgtacaactccgcctctttcagcacctttaagtgctatggcgtgtctcccacaaagctgaatgatctgtgctttaccaacgtgtacgccgatagcttcgtgatcaggggagacgaagtgagacagatcgcaccaggacagacaggaaagatcgcagactacaattataagctgcctgacgatttcaccggctgcgtgatcgcctggaactccaacaatctggattctaaagtgggcggcaactacaattatctgtacaggctgtttcgcaagtccaatctgaagccattcgagcgggacatctccacagagatctaccaggccggctctaccccctgcaatggcgtggagggctttaactgttatttccctctgcagtcttacggcttccagccaacaaacggcgtgggctatcagccctacagagtggtggtgctgtcctttgagctgctgcacgcaccagcaacagtgtgcggcccaaagaagtctaccaatctggtgaagaacaagtgcgtgaacttcaacttcaacggactgaccggcacaggcgtgctgaccgagagcaataagaagttcctgccttttcagcagttcggcagggacatcgcagataccacagacgccgtgcgcgaccctcagaccctggagatcctggacatcacaccatgcagcttcggcggcgtgtttgtgatcacaccaggcaccaatacatccaaccaggtggccgtgctgtatcaggacgtgaattgtaccgaggtgcccgtggcaatccacgcagatcagctgacccctacatggcgggtgtactctaccggcagcaacgtgttccagacaagagccggatgcctgatcggagcagagcacgtgaacaatagctatgagtgcgacatccctatcggcgccggcatctgtgccagctaccagacccagacaaactccccatctggagcaggctcccaccatcaccatcaccatcaccatcaccactga

SEQ ID NO: 4063 - DNA, 2148 bp, Artificial Sequence
  Description of Artificial Sequence: Synthetic polynucleotide
atgggcatcctgccaagcccaggaatgcccgccctgctgtctctggtgagcctgctgtccgtgctgctgatgggatgcgtggcagagacaggcacacagtgcgtgaacctgaccacaaggacccagctgccccctgcctataccaattctttcacacggggcgtgtactatcccgacaaggtgtttagaagctccgtgctgcactccacacaggatctgtttctgcctttcttttctaacgtgacctggttccacgccatccacgtgtccggcaccaatggcacaaagcggttcgacaatcccgtgctgccttttaacgatggcgtgtacttcgccagcaccgagaagtccaacatcatcagaggctggatctttggcaccacactggactctaagacacagagcctgctgatcgtgaacaatgccaccaacgtggtgatcaaggtgtgcgagttccagttttgtaatgatccattcctgggcgtgtactatcacaagaacaataagtcctggatggagtctgagtttcgcgtgtattctagcgccaacaattgcacatttgagtacgtgagccagcccttcctgatggacctggagggcaagcagggcaatttcaagaacctgagggagttcgtgtttaagaatatcgatggctacttcaagatctacagcaagcacaccccaatcaacctggtgcgcgacctgccacagggattctccgccctggagccactggtggatctgcccatcggcatcaacatcacccggtttcagacactgctggccctgcacagatcctacctgacaccaggcgactcctctagcggatggaccgcaggagctgccgcctactatgtgggctatctgcagccccggaccttcctgctgaagtacaacgagaatggcaccatcacagacgcagtggattgcgccctggaccccctgtctgagacaaagtgtacactgaagagctttaccgtggagaagggcatctatcagacaagcaatttcagggtgcagcctaccgagtccatcgtgcgctttcccaatatcacaaacctgtgcccttttggcgaggtgttcaacgccaccagattcgccagcgtgtacgcctggaatcggaagagaatctccaactgcgtggccgactattctgtgctgtacaactccgcctctttcagcacctttaagtgctatggcgtgtctcccacaaagctgaatgatctgtgctttaccaacgtgtacgccgatagcttcgtgatcaggggagacgaagtgagacagatcgcaccaggacagacaggaaagatcgcagactacaattataagctgcctgacgatttcaccggctgcgtgatcgcctggaactccaacaatctggattctaaagtgggcggcaactacaattatctgtacaggctgtttcgcaagtccaatctgaagccattcgagcgggacatctccatagagatctaccaggccggctctaccccctgcaatggcgtggagggctttaactgttatttccctctgcagtcttacggcttccagccaacaaacggcgtgggctatcagccctacagagtggtggtgctgtcctttgagctgctgcacgcaccagcaacagtgtgcggcccaaagaagtctaccaatctggtgaagaacaagtgcgtgaacttcaacttcaacggactgaccggcacaggcgtgctgaccgagagcaataagaagttcctgccttttcagcagttcggcagggacatcgcagataccacagacgccgtgcgcgaccctcagaccctggagatcctggacatcacaccatgcagcttcggcggcgtgtccgtgatcacaccaggcaccaatacatccaaccaggtggccgtgctgtatcaggacgtgaattgtaccgaggtgcccgtggcaatccacgcagatcagctgacccctacatggcgggtgtactctaccggcagcaacgtgttccagacaagagccggatgcctgatcggagcagagcacgtgaacaatagctatgagtgcgacatccctatcggcgccggcatctgtgccagctaccagacccagacaaactccccatctggagcaggctcccaccatcaccatcaccatcaccatcaccactga

SEQ ID NO: 4064 - DNA, 2148 bp, Artificial Sequence
  Description of Artificial Sequence: Synthetic polynucleotide
atgggcatcctgccaagcccaggaatgcccgccctgctgtctctggtgagcctgctgtccgtgctgctgatgggatgcgtggcagagacaggcacacagtgcgtgaacctgaccacaaggacccagctgccccctgcctataccaattctttcacacggggcgtgtactatcccgacaaggtgtttagaagctccgtgctgcactccacacaggatctgtttctgcctttcttttctaacgtgacctggttccacgccatccacgtgtccggcaccaatggcacaaagcggttcgacaatcccgtgctgccttttaacgatggcgtgtacttcgccagcaccgagaagtccaacatcatcagaggctggatctttggcaccacactggactctaagacacagagcctgctgatcgtgaacaatgccaccatggtggtgatcaaggtgtgcgagttccagttttgtaatgatccattcctgggcgtgtactatcacaagaacaataagtcctggatggagtctgagtttcgcgtgtattctagcgccaacaattgcacatttgagtacgtgagccagcccttcctgatggacctggagggcaagcagggcaatttcaagaacctgagggagttcgtgtttaagaatatcgatggctacttcaagatctacagcaagcacaccccaatcaacctggtgcgcgacctgccacagggattctccgccctggagccactggtggatctgcccatcggcatcaacatcacccggtttcagacactgctggccctgcacagatcctacctgacaccaggcgactcctctagcggatggaccgcaggagctgccgcctactatgtgggctatctgcagccccggaccttcctgctgaagtacaacgagaatggcaccatcacagacgcagtggattgcgccctggaccccctgtctgagacaaagtgtacactgaagagctttaccgtggagaagggcatctatcagacaagcaatttcagggtgcagcctaccgagtccatcgtgcgctttcccaatatcacaaacctgtgcccttttggcgaggtgttcaacgccaccagattcgccagcgtgtacgcctggaatcggaagagaatctccaactgcgtggccgactattctgtgctgtacaactccgcctctttcagcacctttaagtgctatggcgtgtctcccacaaagctgaatgatctgtgctttaccaacgtgtacgccgatagcttcgtgatcaggggagacgaagtgagacagatcgcaccaggacagacaggaaagatcgcagactacaattataagctgcctgacgatttcaccggctgcgtgatcgcctggaactccaacaatctggattctaaagtgggcggcaactacaattatctgtacaggctgtttcgcaagtccaatctgaagccattcgagcgggacatctccacagagatctaccaggccggctctaccccctgcaatggcgtggagggctttaactgttatttccctctgcagtcttacggcttccagccaacaaacggcgtgggctatcagccctacagagtggtggtgctgtcctttgagctgctgcacgcaccagcaacagtgtgcggcccaaagaagtctaccaatctggtgaagaacaagtgcgtgaacttcaacttcaacggactgaccggcacaggcgtgctgaccgagagcaataagaagttcctgccttttcagcagttcggcagggacatcgcagataccacagacgccgtgcgcgaccctcagaccctggagatcctggacatcacaccatgcagcttcggcggcgtgtccgtgatcacaccaggcaccaatacatccaaccaggtggccgtgctgtatcaggacgtgaattgtaccgaggtgcccgtggcaatccacgcagatcagctgacccctacatggcgggtgtactctaccggcagcaacgtgttccagacaagagccggatgcctgatcggagcagagcacgtgaacaatagctatgagtgcgacatccctatcggcgccggcatctgtgccagctaccagacccagacaaactccccatctggagcaggctcccaccatcaccatcaccatcaccatcaccactga

SEQ ID NO: 4065 - DNA, 2148 bp, Artificial Sequence
  Description of Artificial Sequence: Synthetic polynucleotide
atgggcatcctgccaagcccaggaatgcccgccctgctgtctctggtgagcctgctgtccgtgctgctgatgggatgcgtggcagagacaggcacacagtgcgtgaacctgaccacaaggacccagctgccccctgcctataccaattctttcacacggggcgtgtactatcccgacaaggtgtttagaagctccgtgctgcactccacacaggatctgtttctgcctttcttttctaacgtgacctggttccacgccatccacgtgtccggcaccaatggcacaaagcggttcgacaatcccgtgctgccttttaacgatggcgtgtacttcgccagcaccgagaagtccaacatcatcagaggctggatctttggcaccacactggactctaagacacagagcctgctgatcgtgaacaatgccaccaacgtggtgatcaaggtgtgcgagttccagttttgtaatgatccattcctgggcgtgtactatcacaagaacaataagtcctggatggagtctgagtttcgcgtgtattctagcgccaacaattgcacatttgagtacgtgagccagcccttcctgatggacctggagggcaagcagggcaatttcaagaacctgagggagttcgtgtttaagaatatcgatggctacttcaagatctacagcaagcacaccccaatcaacctggtgcgcgacctgccacagggattctccgccctggagccactggtggatctgcccatcggcatcaacatcacccggtttcagacactgctggccctgcacagatcctacctgacaccaggcgactcctctagcggatggaccgcaggagctgccgcctactatgtgggctatctgcagccccggaccttcctgctgaagtacaacgagaatggcaccatcacagacgcagtggattgcgccctggaccccctgtctgagacaaagtgtacactgaagagctttaccgtggagaagggcatctatcagacaagcaatttcagggtgcagcctaccgagtccatcgtgcgctttcccaatatcacaaacctgtgcccttttggcgaggtgttcaacgccaccagattcgccagcgtgtacgcctggaatcggaagagaatctccaactgcgtggccgactattctgtgctgtacaactccgcctctttcagcacctttaagtgctatggcgtgtctcccacaaagctgaatgatctgtgctttaccaacgtgtacgccgatagcttcgtgatcaggggagacgaagtgagacagatcgcaccaggacagacaggaaagatcgcagactacaattataagctgcctgacgatttcaccggctgcgtgatcgcctggaactccaacaatctggattctaaagtgggcggcaactacaattatctgtacaggctgtttcgcaagtccaatctgaagccattcgagcgggacatctccacagagatctaccaggccggctctaccccctgcaatggcgtggagggctttaactgttatttccctctgcagtcttacggcttccagccaacaaacggcgtgggctatcagccctacagagtggtggtgctgtcctttgagctgctgcacgcaccagcaacagtgtgcggcccaaagaagtctaccaatctggtgaagaacaagtgcgtgaacttcaacttcaacggactgaccggcacaggcgtgctgaccgagagcaataagaagttcctgccttttcagcagttcggcagggacatcgcagataccacagacgccgtgcgcgaccctcagaccctggagatcctggacatcacaccatgcagcttcggcggcgtgtccgtgatcacaccaggcaccaatacatccaaccaggtggccgtgctgtatcaggacgtgaattgtaccgaggtgcccgtggcacaacacgcagatcagctgacccctacatggcgggtgtactctaccggcagcaacgtgttccagacaagagccggatgcctgatcggagcagagcacgtgaacaatagctatgagtgcgacatccctatcggcgccggcatctgtgccagctaccagacccagacaaactccccatctggagcaggctcccaccatcaccatcaccatcaccatcaccactga

SEQ ID NO: 4066 - DNA, 2148 bp, Artificial Sequence
  Description of Artificial Sequence: Synthetic polynucleotide
atgggcatcctgccaagcccaggaatgcccgccctgctgtctctggtgagcctgctgtccgtgctgctgatgggatgcgtggcagagacaggcacacagtgcgtgaacctgaccacaaggacccagctgccccctgcctataccaattctttcacacggggcgtgtactatcccgacaaggtgtttagaagctccgtgctgcactccacacaggatctgtttctgcctttcttttctaacgtgacctggttccacgccaaacacgtgtccggcaccaatggcacaaagcggttcgacaatcccgtgctgccttttaacgatggcgtgtacttcgccagcaccgagaagtccaacatcatcagaggctggatctttggcaccacactggactctaagacacagagcctgctgatcgtgaacaatgccaccaacgtggtgatcaaggtgtgcgagttccagttttgtaatgatccattcctgggcgtgtactatcacaagaacaataagtcctggatggagtctgagtttcgcgtgtattctagcgccaacaattgcacatttgagtaccatagccagcccttcctgatggacctggagggcaagcagggcaatttcaagaacctgagggagttcgtgtttaagaatatcgatggctacttcaagatctacagcaagcacaccccaatcaacctggtgcgcgacctgccacagggattctccgccctggagccactggtggatctgcccatcggcatcaacatcacccggtttcagacactgctggccctgcacagatcctacctgacaccaggcgactcctctagcggatggaccgcaggagctgccgcctactatgtgggctatctgcagccccggaccttcctgctgaagtacaacgagaatggcaccatcacagacgcagtggattgcgccctggaccccctgtctgagacaaagtgtacactgaagagctttaccgtggagaagggcatctatcagacaagcaatttcagggtgcagcctaccgagtccatcgtgcgctttcccaatatcacaaacccttgcccttttggcgaggtgttcaacgccaccagattcgccagcgtgtacgcctggaatcggaagagaatctccaactgcgtggccgactattctgtgctgtacaactccgcctctttcagcacctttaagtgctatggcgtgtctcccacaaagctgaatgatctgtgctttaccaacgtgtacgccgatagcttcgtgatcaggggagacgaagtgagacagatcgcaccaggacagacaggaaagatcgcagactacaattataagctgcctgacgatttcaccggctgcgtgatcgcctggaactccaacaatctggattctaaagtgggcggcaactacaattatctgtacaggctgtttcgcaagtccaatctgaagccattcgagcgggacatctccacagagatctaccaggccggctctaccccctgcaatggcgtggagggctttaactgttatttccctctgcagtcttacggcttccagccaacaaacggcccgggccaacagccctacagagtggtggtgctgtcctttgagctgctgcacgcaccagcaacagtgtgcggcccaaagaagtctaccaatctggtgaagaacaagtgcgtgaacttcaacttcaacggactgaccggcacaggcgtgctgaccgagagcaataagaagttcctgccttttcagcagttcggcagggacatcgcagataccacagacgccgtgcgcgaccctcagaccctggagatcctggacatcacaccatgcagcttcggcggcgtgtccgtgatcacaccaggcaccaatacatccaaccaggtggccgtgctgtatcaggacgtgaattgtaccgaggtgcccgatgcaatccacgcagatcagctgacccctacatggcgggtgtactctaccggcagcaacgtgttccagacaagagccggatgcctgatcggagcagagcacgtgaacaatagctatgagtgcgacatccctatcggcgccggcatctgtgccagctaccagacccagacaaactccccatctggagcaggctcccaccatcaccatcaccatcaccatcaccactga

SEQ ID NO: 4067 - DNA, 2148 bp, Artificial Sequence
  Description of Artificial Sequence: Synthetic polynucleotide
atgggcatcctgccaagcccaggaatgcccgccctgctgtctctggtgagcctgctgtccgtgctgctgatgggatgcgtggcagagacaggcacacagtgcgtgaacctgaccacaaggacccagctgccccctgcctataccaattctttcacacggggcgtgtactatcccgacaaggtgtttagaagctccgtgctgcactccacacaggatctgtttctgcctttcttttctaacgtgacctggttccacgccatccacgtgtccggcaccaatggcacaaagcggttcgacaatcccgtgctgccttttaacgatggcgtgtacttcgccagcaccgagaagtccaacatcatcagaggctggatctttggcaccacactggactctaagacacagagcctgctgatcgtgaacaatgccaccaacgtggtgatcaaggtgtgcgagttccagttttgtaatgatccattcctgggcgtgtactatcacaagaacaataagtcctggatggagtctgagtttcgcgtgtattctagcgccaacaattgcacatttgagtacgtgagccagcccttcctgatggacctggagggcaagcagggcaatttcaagaacctgagggagttcgtgtttaagaatatcgatggctacttcaagatctacagcaagcacaccccaatcaacctggtgcgcgacctgccacagggattctccgccctggagccactggtggatctgcccatcggcatcaacatcacccggtttcagacactgctggccctgcacagatcctacctgacaccaggcgactcctctagcggatggaccgcaggagctgccgcctactatgtgggctatctgcagccccggaccttcctgctgaagtacaacgagaatggcaccatcacagacgcagtggattgcgccctggaccccctgtctgagacaaagtgtacactgaagagctttaccgtggagaagggcatctatcagacaagcaatttcagggtgcagcctaccgagtccatcgtgcgctttcccaatatcacaaacctgtgcccttttggcgaggtgttcaacgccaccagattcgccagcgtgtacgcctggaatcggaagagaatctccaactgcgtggccgactattctgtgctgtacaactccgcctctttcagcacctttaagtgctatggcgtgtctcccacaaagctgaatgatctgtgctttaccaacgtgtacgccgatagcttcgtgatcaggggagacgaagtgagacagatcgcaccaggacagacaggaaagatcgcagactacaattataagctgcctgacgatttcaccggctgcgtgatcgcctggaactccaacaatctggattctaaagtgggcggcaactacaattatctgtacaggctgtttcgcaagtccaatctgaagccattcgagcgggacatctccacagagatctaccaggccggctctaccccctgcaatggcgtggagggctttaactgttatttccctctgcagtcttacggcttccagccaacaaacggcgtgggctatcagccctacagagtggtggtgctgtcctttgagctgctgcacgcaccagcaacagtgtgcggcccaaagaagtctaccaatctggtgaagaacaagtgcgtgaacttcaacttcaacggactgaccggcacaggcgtgctgaccgagagcaataagaagttcctgccttttcagcagttcacgagggacatcgcagataccacagacgccgtgcgcgaccctcagaccctggagatcctggacatcacaccatgcagcttcggcggcgtgtccgtgatcacaccaggcaccaatacatccaaccaggtggccgtgctgtatcaggacgtgaattgtaccgaggtgcccgtggcaatccacgcagatcagctgacccctacatggcgggtgtactctaccggcagcaacgtgttccagacaagagccggatgcctgatcggagcagagcacgtgaacaatagctatgagtgcgacatccctatcggcgccggcatctgtgccagctaccagacccagacaaactccccatctggagcaggctcccaccatcaccatcaccatcaccatcaccactga

SEQ ID NO: 4068 - DNA, 2148 bp, Artificial Sequence
  Description of Artificial Sequence: Synthetic polynucleotide
atgggcatcctgccaagcccaggaatgcccgccctgctgtctctggtgagcctgctgtccgtgctgctgatgggatgcgtggcagagacaggcacacagtgcgtgaacctgaccacaaggacccagctgccccctgcctataccaattctttcacacggggcgtgtactatcccgacaaggtgtttagaagctccgtgctgcactccacacaggatctgtttctgcctttcttttctaacgtgacctggttccacgccatccacgtgtccggcaccaatggcacaaagcggttcgacaatcccgtgctgccttttaacgatggcgtgtacttcgccagcaccgagaagtccaacatcatcagaggctggatctttggcaccacactggactctaagacacagagcctgctgatcgtgaacaatgccaccaacgtggtgatcaaggtgtgcgagttccagttttgtaatgatccattcctgggcgtgtactatcacaagaacaataagtcctggatggagtctgagtttcgcgtgtattctagcgccaacaattgcacatttgagtacgtgagccagcccttcctgatggacctggagggcaagcagggcaatttcaagaacctgagggagttcgtgtttaagaatatcgatggctacttcaagatctacagcaagcacaccccaatcaacctggtgcgcgacctgccacagggattctccgccctggagccactggtggatctgcccatcggcatcaacatcacccggtttcagacactgctggccctgcacagatcctacctgacaccaggcgactcctctagcggatggaccgcaggagctgccgcctactatgtgggctatctgcagccccggaccttcctgctgaagtacaacgagaatggcaccatcacagacgcagtggattgcgccctggaccccctgtctgagacaaagtgtacactgaagagctttaccgtggagaagggcatctatcagacaagcaatttcagggtgcagcctaccgagtccatcgtgcgctttcccaatatcacaaacctgtgcccttttggcgaggtgttcaacgccaccagattcgccagcgtgtacgcctggaatcggaagagaatctccaactgcgtggccgactattctgtgctgtacaactccgcctctttcagcacctttaagtgctatggcgtgtctcccacaaagctgaatgatctgtgctttaccaacgtgtacgccgatagcttcgtgatcaggggagacgaagtgagacagatcgcaccaggacagacaggaaagatcgcagactacaattataagctgcctgacgatttcaccggctgcgtgatcgcctggaactccaacaatctggattctaaagtgggcggcaactacaattatctgtacaggctgtttcgcaagtccaatctgaagccattcgagcgggacatctccacagagatctaccaggccggctctaccccctgcaatggcgtggagggctttaactgttatttccctctgcagtcttacggcttccagccaacaaacggcgtgcgttatcagccctacagagtggtggtgctgtcctttgagctgctgcacgcaccagcaacagtgtgcggcccaaagaagtctaccaatctggtgaagaacaagtgcgtgaacttcaacttcaacggactgaccggcacaggcgtgctgaccgagagcaataagaagttcctgccttttcagcagttcggcagggacatcgcagataccacagacgccgtgcgcgaccctcagaccctggagatcctggacatcacaccatgcagcttcggcggcgtgtccgtgatcacaccaggcaccaatacatccaaccaggtggccgtgctgtatcaggacgtgaattgtaccgaggtgcccgtggcaatccacgcagatcagctgacccctacatggcgggtgtactctaccggcagcaacgtgttccagacaagagccggatgcctgatcggagcagagcacgtgaacaatagctatgagtgcgacatccctatcggcgccggcatctgtgccagctaccagacccagacaaactccccatctggagcaggctcccaccatcaccatcaccatcaccatcaccactga

SEQ ID NO: 4069 - DNA, 2148 bp, Artificial Sequence
  Description of Artificial Sequence: Synthetic polynucleotide
atgggcatcctgccaagcccaggaatgcccgccctgctgtctctggtgagcctgctgtccgtgctgctgatgggatgcgtggcagagacaggcacacagtgcgtgaacctgaccacaaggacccagctgccccctgcctataccaattctttcacacggggcgtgtactatcccgacaaggtgtttagaagctccgtgctgcactccacacaggatctgtttctgcctttcttttctaacgtgacctggttccacgccatccacgtgtccggcaccaatggcacaaagcggttcgacaatcccgtgctgccttttaacgatggcgtgtacttcgccagcaccgagaagtccaacatcatcagaggctggatctttggcaccacactggactctaagacacagagcctgctgatcgtgaacaatgccaccaacgtggtgatcaaggtgtgcgagttccagttttgtaatgatccattcctgggcgtgtactatcacaagaacaataagtcctggatggagtctgagtttcgcgtgtattctagcgccaacaattgcacatttgagtacgtgagccagcccttcctgatggacctggagggcaagcagggcaatttcaagaacctgagggagttcgtgtttaagaatatcgatggctacttcaagatctacagcaagcacaccccaatcaacctggtgcgcgacctgccacagggattctccgccctggagccactggtggatctgcccatcggcatcaacatcacccggtttcagacactgctggccctgcacagatcctacctgacaccaggcgactcctctagcggatggaccgcaggagctgccgcctactatgtgggctatctgcagccccggaccttcctgctgaagtacaacgagaatggcaccatcacagacgcagtggattgcgccctggaccccctgtctgagacaaagtgtacactgaagagctttaccgtggagaagggcatctatcagacaagcaatttcagggtgcagcctaccgagtccatcgtgcgctttcccaatatcacaaactgttgcccttttggcgaggtgttcaacgccaccagattcgccagcgtgtacgcctggaatcggaagagaatctccaactgcgtggccgactattctgtgctgtacaactccgcctctttcagcacctttaagtgctatggcgtgtctcccacaaagctgaatgatctgtgctttaccaacgtgtacgccgatagcttcgtgatcaggggagacgaagtgagacagatcgcaccaggacagacaggaaagatcgcagactacaattataagctgcctgacgatttcaccggctgcgtgatcgcctggaactccaacaatctggattctaaagtgggcggcaactacaattatctgtacaggctgtttcgcaagtccaatctgaagccattcgagcgggacatctccacagagatctaccaggccggctctaccccctgcaatggcgtggagggctttaactgttatttccctctgcagtcttacggcttccagccaacaaacggcgtgggctatcagccctacagagtggtggtgctgtcctttgagctgctgcacgcaccagcaacagtgtgcggcccaaagaagtctaccaatctggtgaagaacaagtgcgtgaacttcaacttcaacggactgaccggcacaggcgtgctgaccgagagcaataagaagttcctgccttttcagcagttcggcagggacatcgcagataccacagacgccgtgcgcgaccctcagaccctggagatcctggacatcacaccatgcagcttcggcggcgtgtccgtgatcacaccaggcaccaatacatccaaccaggtggccgtgctgtatcaggacgtgaattgtaccgaggtgcccgtggcaatccacgcagatcagctgacccctacatggcgggtgtactctaccggcagcaacgtgttccagacaagagccggatgcctgatcggagcagagcacgtgaacaatagctatgagtgcgacatccctatcggcgccggcatctgtgccagctaccagacccagacaaactccccatctggagcaggctcccaccatcaccatcaccatcaccatcaccactga

SEQ ID NO: 4070 - DNA, 2148 bp, Artificial Sequence
  Description of Artificial Sequence: Synthetic polynucleotide
atgggcatcctgccaagcccaggaatgcccgccctgctgtctctggtgagcctgctgtccgtgctgctgatgggatgcgtggcagagacaggcacacagtgcgtgaacctgaccacaaggacccagctgccccctgcctataccaattctttcacacggggcgtgtactatcccgacaaggtgtttagaagctccgtgctgcactccacacaggatctgtttctgcctttcttttctaacgtgacctggttccacgccatccacgtgtccggcaccaatggcacaaagcggttcgacaatcccgtgctgccttttaacgatggcgtgtacttcgccagcaccgagaagtccaacatcatcagaggctggatctttggcaccacactggactctaagacacagagcctgctgatcgtgaacaatgccaccaacgtggtgatcaaggtgtgcgagttccagttttgtaatgatccattcctgggcgtgtactatcacaagaacaataagtcctggatggagtctgagtttcgcgtgtattctagcgccaacaattgcacatttgagtacgtgagccagcccttcctgatggacctggagggcaagcagggcaatttcaagaacctgagggagttcgtgtttaagaatatcgatggctacttcaagatctacagcaagcacaccccaatcaacctggtgcgcgacctgccacagggattctccgccctggagccactggtggatctgcccatcggcatcaacatcacccggtttcagacactgctggccctgcacagatcctacctgacaccaggcgactcctctagcggatggaccgcaggagctgccgcctactatgtgggctatctgcagccccggaccttcctgctgaagtacaacgagaatggcaccatcacagacgcagtggattgcgccctggaccccctgtctgagacaaagtgtacactgaagagctttaccgtggagaagggcatctatcagacaagcaatttcagggtgcagcctaccgagtccatcgtgcgctttcccaatatcacaaacctgtgcccttttggcgaggtgttcaacgccaccagattcgccagcgtgtacgcctggaatcggaagagaatctccaactgcgtggccgactattctgtgctgtacaactccgcctctttcagcacctttaagtgctatggcgtgtctcccacaaagctgaatgatctgtgctttaccaacgtgtacgccgatagcttcgtgatcaggggagacgaagtgagacagatcgcaccaggacagacaggaaagatcgcagactacaattataagctgcctgacgatttcaccggctgcgtgatcgcctggaactccaacaatctggattctaaagtgggcggcaactacaattatctgtacaggctgtttcgcaagtccaatctgaagccattcgagcggtatatctccacagagatctaccaggccggctctaccccctgcaatggcgtggagggctttaactgttatttccctctgcagtcttacggcttccagccaacaaacggcgtgggctatcagccctacagagtggtggtgctgtcctttgagctgctgcacgcaccagcaacagtgtgcggcccaaagaagtctaccaatctggtgaagaacaagtgcgtgaacttcaacttcaacggactgaccggcacaggcgtgctgaccgagagcaataagaagttcctgccttttcagcagttcggcagggacatcgcagataccacagacgccgtgcgcgaccctcagaccctggagatcctggacatcacaccatgcagcttcggcggcgtgtccgtgatcacaccaggcaccaatacatccaaccaggtggccgtgctgtatcaggacgtgaattgtaccgaggtgcccgtggcaatccacgcagatcagctgacccctacatggcgggtgtactctaccggcagcaacgtgttccagacaagagccggatgcctgatcggagcagagcacgtgaacaatagctatgagtgcgacatccctatcggcgccggcatctgtgccagctaccagacccagacaaactccccatctggagcaggctcccaccatcaccatcaccatcaccatcaccactga

SEQ ID NO: 4071 - DNA, 2148 bp, Artificial Sequence
  Description of Artificial Sequence: Synthetic polynucleotide
atgggcatcctgccaagcccaggaatgcccgccctgctgtctctggtgagcctgctgtccgtgctgctgatgggatgcgtggcagagacaggcacacagtgcgtgaacctgaccacaaggacccagctgccccctgcctataccaattctttcacacggggcgtgtactatcccgacaaggtgtttagaagctccgtgctgcactccacacaggatctgtttctgcctttcttttctaacgtgacctggttccacgccatccacgtgtccggcaccaatggcacaaagcggttcgacaatcccgtgctgccttttaacgatggcgtgtacttcgccagcaccgagaagtccaacatcatcagaggctggatctttggcaccacactggactctaagacacagagcctgctgatcgtgaacaatgccaccaacgtggtgatcaaggtgtgcgagttccagttttgtaatgatccattcctgggcgtgtactatcacaagaacaataagtcctggatggagtctgagtttcgcgtgtattctagcgccaacaattgcacatttgagtacgtgagccagcccttcctgatggacctggagggcaagcagggcaatttcaagaacctgagggagttcgtgtttaagaatatcgatggctacttcaagatctacagcaagcacaccccaatcaacctggtgcgcgacctgccacagggattctccgccctggagccactggtggatctgcccatcggcatcaacatcacccggtttcagacactgctggccctgcacagatcctacctgacaccaggcgactcctctagcggatggaccgcaggagctgccgcctactatgtgggctatctgcagccccggaccttcctgctgaagtacaacgagaatggcaccatcacagacgcagtggattgcgccctggaccccctgtctgagacaaagtgtacactgaagagctttaccgtggagaagggcatctatcagacaagcaatttcagggtgcagcctaccgagtccatcgtgcgctttcccaatatcacaaacctgtgcccttttggcgaggtgttcaacgccaccagattcgccagcgtgtacgcctggaatcggaagagaatctccaactgcgtggccgactattctgtgctgtacaactccgcctctttcagcacctttaagtgctatggcgtgtctcccacaaagctgaatgatctgtgctttaccaacgtgtacgccgatagcttcgtgatcaggggagacgaagtgagacagatcgcaccaggacagacaggaaagatcgcagactacaattataagctgcctgacgatttcaccggctgcgtgatcgcctggaactccaacaatctggattctaaagtgggcggcaactacaattatctgtacaggctgtttcgcaagtccaatctgaagccattcgagcgggacatctccacagagatctaccaggccggctctaccccctgcaatggcgtggagggctttaactgttatttccctctgcagtcttacggcttccagccaacaaacggcgtgggctatcagccctacagagtggtggtgctgtcctttgagctgctgcacgcaccagcaacagtgtgcggcccaaagaagtctaccaatctggtgaagaacaagtgcgtgaacttcaacttcaacggactgaccggcacaggcgtgctgaccgagagcaataagaagttcctgccttttcagcagttcggcagggacatcgcagataccacagacgccgtgcgcgaccctcagaccctggagatcctggacatcacaccatgcagcttcggcggcgtgtccgtgatcacaccagctaccaatacatccaaccaggtggccgtgctgtatcaggacgtgaattgtaccgaggtgcccgtggcaatccacgcagatcagctgacccctacatggcgggtgtactctaccggcagcaacgtgttccagacaagagccggatgcctgatcggagcagagcacgtgaacaatagctatgagtgcgacatccctatcggcgccggcatctgtgccagctaccagacccagacaaactccccatctggagcaggctcccaccatcaccatcaccatcaccatcaccactga

SEQ ID NO: 4072 - DNA, 2148 bp, Artificial Sequence
  Description of Artificial Sequence: Synthetic polynucleotide
atgggcatcctgccaagcccaggaatgcccgccctgctgtctctggtgagcctgctgtccgtgctgctgatgggatgcgtggcagagacaggcacacagtgcgtgaacctgaccacaaggacccagctgccccctgcctataccaattctttcacacggggcgtgtactatcccgacaaggtgtttagaagctccgtgctgcactccacacaggatctgtttctgcctttcttttctaacgtgacctggttccacgccatccacgtgtccggcaccaatggcacaaagcggttcgacaatcccgtgctgccttttaacgatggcgtgtacttcgccagcaccgagaagtccaacatcatcagaggctggatctttggcaccacactggactctaagacacagagcctgctgatcgtgaacaatgccaccaacgtggtgatcaaggtgtgcgagttccagttttgtaatgatccattcctgggcgtgtactatcacaagaacaataagtcctggatggagtctgagtttcgcgtgtattctagcgccaacaattgcacatttgagtacgtgagccagcccttcctgatggacctggagggcaagcagggcaatttcaagaacctgagggagttcgtgtttaagaatatcgatggctacttcaagatctacagcaagcacaccccaatcaacctggtgcgcgacctgccacagggattctccgccctggagccactggtggatctgcccatcggcatcaacatcacccggtttcagacactgctggccctgcacagatcctacctgacaccaggcgactcctctagcggatggaccgcaggagctgccgcctactatgtgggctatctgcagccccggaccttcctgctgaagtacaacgagaatggcaccatcacagacgcagtggattgcgccctggaccccctgtctgagacaaagtgtacactgaagagctttaccgtggagaagggcatctatcagacaagcaatttcagggtgcagcctaccgagtccatcgtgcgctttcccaatatcacaaacctgtgcccttttggcgaggtgttcaacgccaccagattcgccagcgtgtacgcctggaatcggaagagaatctccaactgcgtggccgactattctgtgctgtacaactccgcctctttcagcacctttaagtgctatggcgtgtctcccacaaagctgaatgatctgtgctttaccaacgtgtacgccgatagcttcgtgatcaggggagacgaagtgagacagatcgcaccaggacagacaggaaagatcgcagactacaattataagctgcctgacgatttcaccggctgcgtgatcgcctggaactccaacaatctggattctaaagtgggcggcaactacaattatctgtacaggctgtttcgcaagtccaatctgaagccattcgagcgggacatctccacagagatctaccaggccggctctaccccctgcaatggcgtggagggctttaactgttatttccctctgcagtcttacggcttccagccaacaaacggcgtgggctatcagccctacagagtggtggtgctgtcctttgagctgctgcacgcaccagcaacagtgtgcggcccaaagaagtctaccaatctggtgaagaacaagtgcgtgaacttcaacttcaacggactgaccggcacaggcgtgctgaccgagagcaataagaagttcctgccttttcagcagttcggcagggacatcgcagataccacagacgccgtgcgcgaccctcagaccctggagatcctggacatcacaccatgcagccaaggcggcgtgtccgtgatcacaccaggcaccaatacatccaaccaggtggccgtgctgtatcaggacgtgaattgtaccgaggtgcccgtggcaatccacgcagatcagctgacccctacatggcgggtgtactctaccggcagcaacgtgttccagacaagagccggatgcctgatcggagcagagcacgtgaacaatagctatgagtgcgacatccctatcggcgccggcatctgtgccagctaccagacccagacaaactccccatctggagcaggctcccaccatcaccatcaccatcaccatcaccactga

SEQ ID NO: 4073 - DNA, 2148 bp, Artificial Sequence
  Description of Artificial Sequence: Synthetic polynucleotide
atgggcatcctgccaagcccaggaatgcccgccctgctgtctctggtgagcctgctgtccgtgctgctgatgggatgcgtggcagagacaggcacacagtgcgtgaacctgaccacaaggacccagctgccccctgcctataccaattctttcacacggggcgtgtactatcccgacaaggtgtttagaagctccgtgctgcactccacacaggatctgtttctgcctttcttttctaacgtgacctggttccacgccatccacgtgtccggcaccaatggcacaaagcggttcgacaatcccgtgctgccttttaacgatggcgtgtacttcgccagcaccgagaagtccaacatcatcagaggctggatctttggcaccacactggactctaagacacagagcctgctgatcgtgaacaatgccaccaacgtggtgatcaaggtgtgcgagttccagttttgtaatgatccattcctgggcgtgtactatcacaagaacaataagtcctggatggagtctgagtttcgcgtgtattctagcgccaacaattgcacatttgagtacgtgagccagcccttcctgatggacctggagggcaagcagggcaattggaagaacctgagggagttcgtgtttaagaatatcgatggctacttcaagatctacagcaagcacaccccaatcaacctggtgcgcgacctgccacagggattctccgccctggagccactggtggatctgcccatcggcatcaacatcacccggtttcagacactgctggccctgcacagatcctacctgacaccaggcgactcctctagcggatggaccgcaggagctgccgcctactatgtgggctatctgcagccccggaccttcctgctgaagtacaacgagaatggcaccatcacagacgcagtggattgcgccctggaccccctgtctgagacaaagtgtacactgaagagctttaccgtggagaagggcatctatcagacaagcaatttcagggtgcagcctaccgagtccatcgtgcgctttcccaatatcacaaacctgtgcccttttggcgaggtgttcaacgccaccagattcgccagcgtgtacgcctggaatcggaagagaatctccaactgcgtggccgactattctgtgctgtacaactccgcctctttcagcacctttaagtgctatggcgtgtctcccacaaagctgaatgatctgtgctttaccaacgtgtacgccgatagcttcgtgatcaggggagacgaagtgagacagatcgcaccaggacagacaggaaagatcgcagactacaattataagctgcctgacgatttcaccggctgcgtgatcgcctggaactccaacaatctggattctaaagtgggcggcaactacaattatctgtacaggctgtttcgcaagtccaatctgaagccattcgagcgggacatctccacagagatctaccaggccggctctaccccctgcaatggcgtggagggctttaactgttatttccctctgcagtcttacggcttccagccaacaaacggcgtgggctatcagccctacagagtggtggtgctgtcctttgagctgctgcacgcaccagcaacagtgtgcggcccaaagaagtctaccaatctggtgaagaacaagtgcgtgaacttcaacttcaacggactgaccggcacaggcgtgctgaccgagagcaataagaagttcctgccttttcagcagttcggcagggacatcgcagataccacagacgccgtgcgcgaccctcagaccctggagatcctggacatcacaccatgcagcttcggcggcgtgtccgtgatcacaccaggcaccaatacatccaaccaggtggccgtgctgtatcaggacgtgaattgtaccgaggtgcccgtggcaatccacgcagatcagctgacccctacatggcgggtgtactctaccggcagcaacgtgttccagacaagagccggatgcctgatcggagcagagcacgtgaacaatagctatgagtgcgacatccctatcggcgccggcatctgtgccagctaccagacccagacaaactccccatctggagcaggctcccaccatcaccatcaccatcaccatcaccactga

SEQ ID NO: 4074 - DNA, 2148 bp, Artificial Sequence
  Description of Artificial Sequence: Synthetic polynucleotide
atgggcatcctgccaagcccaggaatgcccgccctgctgtctctggtgagcctgctgtccgtgctgctgatgggatgcgtggcagagacaggcacacagtgcgtgaacctgaccacaaggacccagctgccccctgcctataccaattctttcacacggggcgtgtactatcccgacaaggtgtttagaagctccgtgctgcactccacacaggatctgtttctgcctttcttttctaacgtgacctggttccacgccatccacgtgtccggcaccaatggcacaaagcggttcgacaatcccgtgctgccttttaacgatggcgtgtacttcgccagcaccgagaagtccaacatcatcagaggctggatctttggcaccacactggactctaagacacagagcctgctgatcgtgaacaatgccaccaacgtggtgatcaaggtgtgcgagttccagttttgtaatgatccattcctgggcgtgtactatcacaagaacaataagtcctggatggagtctgagtttcgcgtgtattctagcgccaacaattgcacatttgagtacgtgagccagcccttcctgatggacctggagggcaagcagggcaatttcaagaacctgagggagttcgtgtttaagaatatcgatggctacttcaagatctacagcaagcacaccccaatcaacctggtgcgcgacctgccacagggattctccgccctggagccactggtggatctgcccatcggcatcaacatcacccggtttcagacactgctggccctgcacagatcctacctgacaccaggcgactcctctagcggatggaccgcaggagctgccgcctactatgtgggctatctgcagccccggaccttcctgctgaagtacaacgagaatggcaccatcacagacgcagtggattgcgccctggaccccctgtctgagacaaagtgtacactgaagagctttaccgtggagaagggcatctatcagacaagcaatttcagggtgcagcctaccgagtccatcgtgcgctttcccaatatcacaaacctgtgcccttttggcgaggtgttcaacgccaccagattcgccagcgtgtacgcctggaatcggaagagaatctccaactgcgtggccgactattctgtgctgtacaactccgcctctttcagcacctttaagtgctatggcgtgtctcccacaaagctgaatgatctgtgctttaccaacgtgtacgccgatagcttcgtgatcaggggagacgaagtgagacagatcgcaccaggacagacaggaaagatcgcagactacaattataagctgcctgacgatttcaccggctgcgtgatcgcctggaactccaacaatctggattctaaagtgggcggcaactacaattatctgtacaggctgtttcgcaagtccaatctgaagccattcgagcgggacatctccacagagatctaccaggccggctctaccccctgcaatggcgtggagggctttaactgttatttccctctgcagtcttacggcttccagccaacaaacggcgtgggctatcagccctacagagtggtggtgctgtcctttgagctgctgcacgcaccagcaacagtgtgcggcccaaagaagtctaccaatctgcgaaagaacaagtgcgtgaacttcaacttcaacggactgaccggcacaggcgtgctgaccgagagcaataagaagttcctgccttttcagcagttcggcagggacatcgcagataccacagacgccgtgcgcgaccctcagaccctggagatcctggacatcacaccatgcagcttcggcggcgtgtccgtgatcacaccaggcaccaatacatccaaccaggtggccgtgctgtatcaggacgtgaattgtaccgaggtgcccgtggcaatccacgcagatcagctgacccctacatggcgggtgtactctaccggcagcaacgtgttccagacaagagccggatgcctgatcggagcagagcacgtgaacaatagctatgagtgcgacatccctatcggcgccggcatctgtgccagctaccagacccagacaaactccccatctggagcaggctcccaccatcaccatcaccatcaccatcaccactga

SEQ ID NO: 4075 - DNA, 2148 bp, Artificial Sequence
  Description of Artificial Sequence: Synthetic polynucleotide
atgggcatcctgccaagcccaggaatgcccgccctgctgtctctggtgagcctgctgtccgtgctgctgatgggatgcgtggcagagacaggcacacagtgcgtgaacctgaccacaaggacccagctgccccctgcctataccaattctttcacacggggcgtgtactatcccgacaaggtgtttagaagctccgtgctgcactccacacaggatctgtttctgcctttcttttctaacgtgacctggttccacgcctaccacgtgtccggcaccaatggcacaaagcggttcgacaatcccgtgctgccttttaacgatggcgtgtacttcgccagcaccgagaagtccaacatcatcagaggctggatctttggcaccacactggactctaagacacagagcctgctgatcgtgaacaatgccaccaacgtggtgatcaaggtgtgcgagttccagttttgtaatgatccattcctgggcgtgtactatcacaagaacaataagtcctggatggagtctgagtttcgcgtgtattctagcgccaacaattgcacatttgagtacgtgagccagcccttcctgatggacctggagggcaagcagggcaatttcaagaacctgagggagttcgtgtttaagaatatcgatggctacttcaagatctacagcaagcacaccccaatcaacctggtgcgcgacctgccacagggattctccgccctggagccactggtggatctgcccatcggcatcaacatcacccggtttcagacactgctggccctgcacagatcctacctgacaccaggcgactcctctagcggatggaccgcaggagctgccgcctactatgtgggctatctgcagccccggaccttcctgctgaagtacaacgagaatggcaccatcacagacgcagtggattgcgccctggaccccctgtctgagacaaagtgtacactgaagagctttaccgtggagaagggcatctatcagacaagcaatttcagggtgcagcctaccgagtccatcgtgcgctttcccaatatcacaaacctgtgcccttttggcgaggtgttcaacgccaccagattcgccagcgtgtacgcctggaatcggaagagaatctccaactgcgtggccgactattctgtgctgtacaactccgcctctttcagcacctttaagtgctatggcgtgtctcccacaaagctgaatgatctgtgctttaccaacgtgtacgccgatagcttcgtgatcaggggagacgaagtgagacagatcgcaccaggacagacaggaaagatcgcagactacaattataagctgcctgacgatttcaccggctgcgtgatcgcctggaactccaacaatctggattctaaagtgggcggcaactacaattatctgtacaggctgtttcgcaagtccaatctgaagccattcgagcgggacatctccacagagatctaccaggccggctctaccccctgcaatggcgtggagggctttaactgttatttccctctgcagtcttacggcttccagccaacaaacggcgtgggctatcagccctacagagtggtggtgctgtcctttgagctgctgcacgcaccagcaacagtgtgcggcccaaagaagtctaccaatctggtgaagaacaagtgcgtgaacttcaacttcaacggactgaccggcacaggcgtgctgaccgagagcaataagaagttcctgccttttcagcagttcggcagggacatcgcagataccacagacgccgtgcgcgaccctcagaccctggagatcctggacatcacaccatgcagcttcggcggcgtgtccgtgatcacaccaggcaccaatacatccaaccaggtggccgtgctgtatcaggacgtgaattgtaccgaggtgcccgtggcaatccacgcagatcagctgacccctacatggcgggtgtactctaccggcagcaacgtgttccagacaagagccggatgcctgatcggagcagagcacgtgaacaatagctatgagtgcgacatccctatcggcgccggcatctgtgccagctaccagacccagacaaactccccatctggagcaggctcccaccatcaccatcaccatcaccatcaccactga

SEQ ID NO: 4076 - DNA, 2148 bp, Artificial Sequence
  Description of Artificial Sequence: Synthetic polynucleotide
atgggcatcctgccaagcccaggaatgcccgccctgctgtctctggtgagcctgctgtccgtgctgctgatgggatgcgtggcagagacaggcacacagtgcgtgaacctgaccacaaggacccagctgccccctgcctataccaattctttcacacggggcgtgtactatcccgacaaggtgtttagaagctccgtgctgcactccacacaggatctgtttctgcctttcttttctaacgtgacctggttccacgccatccacgtgtccggcaccaatggcacaaagcggttcgacaatcccgtgctgccttttaacgatggcgtgtacttcgccagcaccgagaagtccaacatcatcagaggctggatctttggcaccacactggactctaagacacagagcctgctgatcgtgaacaatgccaccaacgtggtgatcaaggtgtgcgagttccagttttgtaatgatccattcctgggcgtgtactatcacaagaacaataagtcctggatggagtctgagtttcgcgtgtattctagcgccaacaattgcacatttgagtacgtgagccagcccttcctgatggacctggagggcaagcagggcaatttcaagaacctgagggagttcgtgtttaagaatatcgatggctacttcaagatctacagcaagcacaccccaatcaacctggtgcgcgacctgccacagggattctccgccctggagccactggtggatctgcccatcggcatcaacatcacccggtttcagacactgctggccctgcacagatcctacctgacaccaggcgactcctctagcggatggaccgcaggagctgccgcctactatgtgggctatctgcagccccggaccttcctgctgaagtacaacgagaatggcaccatcacagacgcagtggattgcgccctggaccccctgtctgagacaaagtgtacactgaagagctttaccgtggagaagggcatctatcagacaagcaatttcagggtgcagcctaccgagtccatcgtgcgctttcccaatatcacaaacctgtgcccttttggcgaggtgttcaacgccaccagattcgccagcgtgtacgcctggaatcggaagagaatctccaactgcgtggccgactattctgtgctgtacaactccgcctctttcagcacctttaagtgctatggcgtgtctcccacaaagctgaatgatctgtgctttaccaacgtgtacgccgatagcttcgtgatcaggggagacgaagtgagacagatcgcaccaggacagacaggaaagatcgcagactacaattataagctgcctgacgatttcaccggctgcgtgatcgcctggaactccaacaatctggattctaaagtgggcggcaactacaattatctgtacaggctgtttcgcaagtccaatctgaagccattcgagcgggacatctccacagagaaataccaggccggctctaccccctgcaatggcgtggagggctttaactgttatttccctctgcagtcttacggcttccagccaacaaacggcgtgggctatcagccctacagagtggtggtgctgtcctttgagctgctgcacgcaccagcaacagtgtgcggcccaaagaagtctaccaatctggtgaagaacaagtgcgtgaacttcaacttcaacggactgaccggcacaggcgtgctgaccgagagcaataagaagttcctgccttttcagcagttcggcagggacatcgcagataccacagacgccgtgcgcgaccctcagaccctggagatcctggacatcacaccatgcagcttcggcggcgtgtccgtgatcacaccaggcaccaatacatccaaccaggtggccgtgctgtatcaggacgtgaattgtaccgaggtgcccgtggcaatccacgcagatcagctgacccctacatggcgggtgtactctaccggcagcaacgtgttccagacaagagccggatgcctgatcggagcagagcacgtgaacaatagctatgagtgcgacatccctatcggcgccggcatctgtgccagctaccagacccagacaaactccccatctggagcaggctcccaccatcaccatcaccatcaccatcaccactga

SEQ ID NO: 4077 - DNA, 2148 bp, Artificial Sequence
  Description of Artificial Sequence: Synthetic polynucleotide
atgggcatcctgccaagcccaggaatgcccgccctgctgtctctggtgagcctgctgtccgtgctgctgatgggatgcgtggcagagacaggcacacagtgcgtgaacctgaccacaaggacccagctgccccctgcctataccaattctttcacacggggcatatactatcccgacaaggtgtttagaagctccgtgctgcactccacacaggatctgtttctgcctttcttttctaacgtgacctggttccacgccatccacgggtccggcaccaatggcacaaagcggttcgacaatcccgtgctgccttttaacgatggcgtgtacagtgccgcaattgagaagtccaacatcatcagaggctggatctttggcaccacactggactctaagacacagagcctgctgatcgtgaacaatgccaccaacgtggtgatcaaggtgtgcgagttccagttttgtaatgatccattcctgggcgtgtactatcacaagaacaataagtcctggatggagtctgagtttcgcgtgtattctagcgccaacaattgcacatttgagtacgtgagccagcccttcctgatggacctggagggcaagcagggcaatttcaagtggctgagggagttcgtgtttaagaatatcgatggctacttcaagatctacagcaagcacaccccaatcaacctggtgcgcgacctgccacagggattctccccgctggagccactggtggatctgcccatcggcatcaacatcacccggtttttgacagttctggccctgcacagatcctacctgacaccaggcgactcctctagcggatggaccgcaggagctgccgcctactatgtgggctatctgcagccccggaccttcctgctgaagtacaacgagaatggcaccatcacagacgcagtggattgcgccctggaccccctgtctgagacaaagtgtacactgaagagctttaccgtggagaagggcatctatcagacaagcaatttcagggtgcagcctaccgagtccatcgtgcgctttcccaatatcacaaacctgtgcccttttggcgaggtgttcaacgccaccagattcgccagcgtgtacgcctggaatcggaagagaatctccaactgcgtggccgactattctgtgctgtacaactccgcctctttcagcacctttaagtgctatggcgtgtctcccacaaagctgaatgatctgtgctttaccaacgtgtacgccgatagcttcgtgatcaggggagacgaagtgagacagatcgcaccaggacagacaggaaagatcgcagactacaattataagctgcctgacgatttcaccggctgcgtgatcgcctggaactccaacaatctggattctaaagtgggcggcaactacaattatctgtacaggctgtttcgcaagtccaatctgaagccattcgagcgggacatctccacagagatctaccaggccggctctaccccctgcaatggcgtggagggctttaactgttatttccctctgcagtcttacggcttccagccaacaaacggcgtgggctatcagccctacagagtggtggtgctgtcctttgagctgctgcacgcaccagcaacagtgtgcggcccaaagaagtctaccaatctggtgaagaacaagtgcgtgaacttcaacttcaacggactgaccggcacaggcgtgctgaccgagagcaataagaagttcctgccttttcagcagttcggcagggacatcgcagataccacagacgccgtgcgcgaccctcagaccctggagatcctggacatcacaccatgcagcttcggcggcgtgtccgtgatcacaccaggcaccaatacatccaaccaggtggccgtgctgtatcaggacgtgaattgtaccgaggtgcccgtggcaatccacgcagatcagctgacccctacatggcgggtgtactctaccggcagcaacgtgttccagacaagagccggatgcctgatcggagcagagcacgtgaacaatagctatgagtgcgacatccctatcggcgccggcatctgtgccagctaccagacccagacaaactccccatctggagcaggctcccaccatcaccatcaccatcaccatcaccactga

SEQ ID NO: 4078 - DNA, 2148 bp, Artificial Sequence
  Description of Artificial Sequence: Synthetic polynucleotide
atgggcatcctgccaagcccaggaatgcccgccctgctgtctctggtgagcctgctgtccgtgctgctgatgggatgcgtggcagagacaggcacacagtgcgtgaacctgaccacaaggacccagctgccccctgcctataccaattctttcacacggggcgtgtactatcccgacaaggtgtttagaagctccgtgctgcactccacacaggatctgtttctgcctttcttttctaacgtgacctggttccacgccatccacgtgtccggcaccaatggcacaaagcggttcgacaatcccgtgctgccttttaacgatggcgtgtacttcgccagcaccgagaagtccaacatcatcagaggctggatctttggcaccacactggactctaagacacagagcctgctgatcgtgaacaatgccaccaacgtggtgatcaaggtgtgcgagttccagttttgtaatgatccattcctgggcgtgtactatcacaagaacaataagtcctggatggagtctgagtttcgcgtgtattctagcgccaacaattgcacatttgagtacgtgagccagcccttcctgatggacctggagggcaagcagggcaatttcaagaacctgagggagttcgtgtttaagaatatcgatggctacttcaagatctacagcaagcacaccccaatcaacctggtgcgcgacctgccacagggattctccgccctggagccactggtggatctgcccatcggcatcaacatcacccggtttcagacactgctggccctgcacagatcctacctgacaccaggcgactcctctagcggatggaccgcaggagctgccgcctactatgtgggctatctgcagccccggaccttcctgctgaagtacaacgagaatggcaccatcacagacgcagtggattgcgccctggaccccctgtctgagacaaagtgtacactgaagagctttaccgtggagaagggcatctatcagacaagcaatttcagggtgcagcctaccgagtccatcgtgcgctttcccaatatcacaaacctgtgcccttttggcgaggtgttcaacgccaccagattcgccagcgtgtacgcctggaatcggaagagaatctccaactgcgtggccgactattctgtgctgtacaactccgcctctttcagcacctttaagtgctatggcgtgtctcccacaaagctgaatgatctgtgctttaccaacgtgtacgccgatagcttcgtgatcaggggagacgaagtgagacagatcgcaccaggacagacaggaaagatcgcagactacaattataagctgcctgacgatttcaccggctgcgtgatcgcctggaactccaacaatctggattctaaagtgggcggcaactacaattatctgtacaggctgtttcgcaagtccaatctgaagccattcgagcgggacatctccacagagatctaccaggccggctctaccccctgcaatggcgtggagggctttaactgttatttccctctgcagtcttacggcttccagccaacaaacggcgtgggctatcagccctacagagtggtggtgctgtcctttgagctgctgcacgcaccagcaacagtgtgcggcccaaagaagtctaccaatctggtgaagaacaagtgcgtgaacttcaacttcaacggactgaccggcacaggcgtgctgaccgagagcaataagaagttcctgccttttcagcagttcggcagggacatcgcagataccacagacgccgtgcgcgaccctcagaccctggagatcctggacatcacaccatgcagcttcggcggcgtgtccgtgatcacaccaggcaccaatacatccaaccagtttgccgtgctgtatcaggacgtgaattgtaccgaggtgcccgtggcaatccacgcagatcagctgacccctacatggcgggtgtactctaccggcagcaacgtgttccagacaagagccggatgcctgatcggagcagagcacgtgaacaatagctatgagtgcgacatccctatcggcgccggcatctgtgccagctaccagacccagacaaactccccatctggagcaggctcccaccatcaccatcaccatcaccatcaccactga

SEQ ID NO: 4079 - DNA, 2148 bp, Artificial Sequence
  Description of Artificial Sequence: Synthetic polynucleotide
atgggcatcctgccaagcccaggaatgcccgccctgctgtctctggtgagcctgctgtccgtgctgctgatgggatgcgtggcagagacaggcacacagtgcgtgaacctgaccacaaggacccagctgccccctgcctataccaattctttcacacggggcgtgtactatcccgacaaggtgtttagaagctccgtgctgcactccacacaggatctgtttctgcctttcttttctaacgtgacctggttccacgccaaacacgtgtccggcaccaatggcacaaagcggttcgacaatcccgtgctgccttttaacgatggcgtgtacttcgccagcaccgagaagtccaacatcatcagaggctggatctttggcaccacactggactctaagacacagagcctgctgatcgtgaacaatgccaccaacgtggtgatcaaggtgtgcgagttccagttttgtaatgatccattcctgggcgtgtactatcacaagaacaataagtcctggatggagtctgagtttcgcgtgtattctagcgccaacaattgcacatttgagtaccatagccagcccttcctgatggacctggagggcaagcagggcaatttcaagaacctgagggagttcgtgtttaagaatatcgatggctacttcaagatctacagcaagcacaccccaatcaacctggtgcgcgacctgccacagggattctccgccctggagccactggtggatctgcccatcggcatcaacatcacccggtttcagacactgctggccctgcacagatcctacctgacaccaggcgactcctctagcggatggaccgcaggagctgccgcctactatgtgggctatctgcagccccggaccttcctgctgaagtacaacgagaatggcaccatcacagacgcagtggattgcgccctggaccccctgtctgagacaaagtgtacactgaagagctttaccgtggagaagggcatctatcagacaagcaatttcagggtgcagcctaccgagtccatcgtgcgctttcccaatatcacaaacaaatgcccttttggcgaggtgttcaacgccaccagattcgccagcgtgtacgcctggaatcggaagagaatctccaactgcgtggccgactattctgtgctgtacaactccgcctctttcagcacctttaagtgctatggcgtgtctcccacaaagctgaatgatctgtgctttaccaacgtgtacgccgatagcttcgtgatcaggggagacgaagtgagacagatcgcaccaggacagacaggaaagatcgcagactacaattataagctgcctgacgatttcaccggctgcgtgatcgcctggaactccaacaatctggattctaaagtgggcggcaactacaattatctgtacaggctgtttcgcaagtccaatctgaagccattcgagcgggacatctccacagagatctaccaggccggctctaccccctgcaatggcgtggagggctttaactgttatttccctctgcagtcttacggcttccagccaacaaacggcccgggccaacagccctacagagtggtggtgctgtcctttgagctgctgcacgcaccagcaacagtgtgcggcccaaagaagtctaccaatctggtgaagaacaagtgcgtgaacttcaacttcaacggactgaccggcacaggcgtgctgaccgagagcaataagaagttcctgccttttcagcagttcggcagggacatcgcagataccacagacgccgtgcgcgaccctcagaccctggagatcctggacatcacaccatgcagcttcggcggcgtgtccgtgatcacaccaggcaccaatacatccaaccaggtggccgtgctgtatcaggacgtgaattgtaccgaggtgcccgatgcaatccacgcagatcagctgacccctacatggcgggtgtactctaccggcagcaacgtgttccagacaagagccggatgcctgatcggagcagagcacgtgaacaatagctatgagtgcgacatccctatcggcgccggcatctgtgccagctaccagacccagacaaactccccatctggagcaggctcccaccatcaccatcaccatcaccatcaccactga

SEQ ID NO: 4080 - DNA, 2148 bp, Artificial Sequence
  Description of Artificial Sequence: Synthetic polynucleotide
atgggcatcctgccaagcccaggaatgcccgccctgctgtctctggtgagcctgctgtccgtgctgctgatgggatgcgtggcagagacaggcacacagtgcgtgaacctgaccacaaggacccagctgccccctgcctataccaattctttcacacggggcgtgtactatcccgacaaggtgtttagaagctccgtgctgcactccacacaggatctgtttctgcctttcttttctaacgtgacctggttccacgccatccacgtgtccggcaccaatggcacaaagcggttcgacaatcccgtgctgccttttaacgatggcgtgtacttcgccagcaccgagaagtccaacatcatcagaggctggatctttggcaccacactggactctaagacacagagcctgctgatcgtgaacaatgccaccaacgtggtgatcaaggtgtgcgagttccagttttgtaatgatccattcctgggcgtgtactatcacaagaacaataagtcctggatggagtctgagtttcgcgtgtattctagcgccaacaattgcacatttgagtacgtgagccagcccttcctgatggacctggagggcaagcagggcaatttcaagaacctgagggagttcgtgtttaagaatatcgatggctacttcaagatctacagcaagcacaccccaatcaacctggtgcgcgacctgccacagggattctccgccctggagccactggtggatctgcccatcggcatcaacatcacccggtttcagacactgctggccctgcacagatcctacctgacaccaggcgactcctctagcggatggaccgcaggagctgccgcctactatgtgggctatctgcagccccggaccttcctgctgaagtacaacgagaatggcaccatcacagacgcagtggattgcgccctggaccccctgtctgagacaaagtgtacactgaagagctttaccgtggagaagggcatctatcagacaagcaatttcagggtgcagcctaccgagtccatcgtgcgctttcccaatatcacaaaccaatgcccttttggcgaggtgttcaacgccaccagattcgccagcgtgtacgcctggaatcggaagagaatctccaactgcgtggccgactattctgtgctgtacaactccgcctctttcagcacctttaagtgctatggcgtgtctcccacaaagctgaatgatctgtgctttaccaacgtgtacgccgatagcttcgtgatcaggggagacgaagtgagacagatcgcaccaggacagacaggaaagatcgcagactacaattataagctgcctgacgatttcaccggctgcgtgatcgcctggaactccaacaatctggattctaaagtgggcggcaactacaattatctgtacaggctgtttcgcaagtccaatctgaagccattcgagcgggacatctccacagagatctaccaggccggctctaccccctgcaatggcgtggagggctttaactgttatttccctctgcagtcttacggcttccagccaacaaacggcgtgggctatcagccctacagagtggtggtgctgtcctttgagctgctgcacgcaccagcaacagtgtgcggcccaaagaagtctaccaatctggtgaagaacaagtgcgtgaacttcaacttcaacggactgaccggcacaggcgtgctgaccgagagcaataagaagttcctgccttttcagcagttcggcagggacatcgcagataccacagacgccgtgcgcgaccctcagaccctggagatcctggacatcacaccatgcagcttcggcggcgtgtccgtgatcacaccaggcaccaatacatccaaccaggtggccgtgctgtatcaggacgtgaattgtaccgaggtgcccgtggcaatccacgcagatcagctgacccctacatggcgggtgtactctaccggcagcaacgtgttccagacaagagccggatgcctgatcggagcagagcacgtgaacaatagctatgagtgcgacatccctatcggcgccggcatctgtgccagctaccagacccagacaaactccccatctggagcaggctcccaccatcaccatcaccatcaccatcaccactga

SEQ ID NO: 4081 - DNA, 2148 bp, Artificial Sequence
  Description of Artificial Sequence: Synthetic polynucleotide
atgggcatcctgccaagcccaggaatgcccgccctgctgtctctggtgagcctgctgtccgtgctgctgatgggatgcgtggcagagacaggcacacagtgcgtgaacctgaccacaaggacccagctgccccctgcctataccaattctttcacacggggcgtgtactatcccgacaaggtgtttagaagctccgtgctgcactccacacaggatctgtttctgcctttcttttctaacgtgacctggttccacgccatccacgtgtccggcaccaatggcacaaagcggttcgacaatcccgtgctgccttttaacgatggcgtgtacttcgccagcaccgagaagtccaacatcatcagaggctggatctttggcaccacactggactctaagacacagagcctgctgatcgtgaacaatgccaccaacgtggtgatcaaggtgtgcgagttccagttttgtaatgatccattcctgggcgtgtactatcacaagaacaataagtcctggatggagtctgagtttcgcgtgtattctagcgccaacaattgcacatttgagtacgtgagccagcccttcctgatggacctggagggcaagcagggcaatttcaagaacctgagggagttcgtgtttaagaatatcgatggctacttcaagatctacagcaagcacaccccaatcaacctggtgcgcgacctgccacagggattctccgccctggagccactggtggatctgcccatcggcatcaacatcacccggtttcagacactgctggccctgcacagatcctacctgacaccaggcgactcctctagcggatggaccgcaggagctgccgcctactatgtgggctatctgcagccccggaccttcctgctgaagtacaacgagaatggcaccatcacagacgcagtggattgcgccctggaccccctgtctgagacaaagtgtacactgaagagctttaccgtggagaagggcatctatcagacaagcaatttcagggtgcagcctaccgagtccatcgtgcgctttcccaatatcacaaacctgtgcccttttggcgaggtgttcaacgccaccagattcgccagcgtgtacgcctggaatcggaagagaatctccaactgcgtggccgactattctgtgctgtacaactccgcctctttcagcacctttaagtgctatggcgtgtctcccacaaagctgaatgatctgtgctttaccaacgtgtacgccgatagcttcgtgatcaggggagacgaagtgagacagatcgcaccaggacagacaggaaagatcgcagactacaattataagctgcctgacgatttcaccggctgcgtgatcgcctggaactccaacaatctggattctaaagtgggcggcaactacaattatctgtacaggctgtttcgcaagtccaatctgaagccattcgagcgggacatctccacagagatctaccaggccggctctaccccctgcaatggcgtggagggctttaactgttatttccctctgcagtcttacggcttccagccaacaaacggcgtgggctatcagccctacagagtggtggtgctgtcctttgagctgctgcacgcaccagcaacagtgtgcggcccaaagaagtctaccaatctggtgaagaacaagtgcgtgaacttcaacttcaacggactgaccggcacaggcgtgctgaccgagagcaataagaagttcctgccttttcagcagttcggcagggacatcgcagataccacagacgccgtgcgcgaccctcagaccctggagatcctggacatcacaccatgcagcttcggcggcgtgtccgtgatcacaccaggcaccaatacatccaaccaggtggccgtgctgtatcaggacgtgaattgtaccgaggtgcccgtggcaatccacgcagatcagctgacccctacatggcgggtgtactctaccggcagcaacgtgttccagacaagagccggatgcctgatcggaatagagcacgtgaacaatagctatgagtgcgacatccctatcggcgccggcatctgtgccagctaccagacccagacaaactccccatctggagcaggctcccaccatcaccatcaccatcaccatcaccactga

SEQ ID NO: 4082 - DNA, 2148 bp, Artificial Sequence
  Description of Artificial Sequence: Synthetic polynucleotide
atgggcatcctgccaagcccaggaatgcccgccctgctgtctctggtgagcctgctgtccgtgctgctgatgggatgcgtggcagagacaggcacacagtgcgtgaacctgaccacaaggacccagctgccccctgcctataccaattctttcacacggggcgtgtactatcccgacaaggtgtttagaagctccgtgctgcactccacacaggatctgtttctgcctttcttttctaacgtgacctggttccacgccatccacgtgtccggcaccaatggcacaaagcggttcgacaatcccgtgctgccttttaacgatggcgtgtacttcgccagcaccgagaagtccaacatcatcagaggctggatctttggcaccacactggactctaagacacagagcctgctgatcgtgaacaatgccaccaacgtggtgatcaaggtgtgcgagttccagttttgtaatgatccattcctgggcgtgtactatcacaagaacaataagtcctggatggagtctgagtttcgcgtgtattctagcgccaacaattgcacatttgagtacgtgagccagcccttcctgatggacctggagggcaagcagggcaatttcaagaacctgagggagttcgtgtttaagaatatcgatggctacttcaagatctacagcaagcacaccccaatcaacctggtgcgcgacctgccacagggattctccgccctggagccactggtggatctgcccatcggcatcaacatcacccggtttcagacactgctggccctgcacagatcctacctgacaccaggcgactcctctagcggatggaccgcaggagctgccgcctactatgtgggctatctgcagccccggaccttcctgctgaagtacaacgagaatggcaccatcacagacgcagtggattgcgccctggaccccctgtctgagacaaagtgtacactgaagagctttaccgtggagaagggcatctatcagacaagcaatttcagggtgcagcctaccgagtccatcgtgcgctttcccaatatcacaaacctgtgcccttttggcgaggtgttcaacgccaccagattcgccagcgtgtacgcctggaatcggaagagaatctccaactgcgtggccgactattctgtgctgtacaactccgcctctttcagcacctttaagtgctatggcgtgtctcccacaaagctgaatgatctgtgctttaccaacgtgtacgccgatagcttcgtgatcaggggagacgaagtgagacagatcgcaccaggacagacaggaaagatcgcagactacaattataagctgcctgacgatttcaccggctgcgtgatcgcctggaactccaacaatctggattctaaagtgggcggcaactacaattatctgtacaggctgtttcgcaagtccaatctgaagccattcgagcgggacatctccacagagatctaccaggccggctctaccccctgcaatggcgtggagggctttaactgttatttccctctgcagtcttacggcttccagccaacaaacggcgtgggctatcagccctacagagtggtggtgctgtcctttgagctgctgcacgcaccagcaacagtgtgcggcccaaagaagtctaccaatctggtgaagaacaagtgcgtgaacttcaacttcaacggactgaccggcacaggcgtgctgaccgagagcaataagaagttcctgccttttcagcagttcggcagggacatcgcagataccacagacgccgtgcgcgaccctcagaccctggagatcctggacatcacaccatgcagcttcggcggcgtgtccgtgatcacaccaggcaccaatacatccaaccaggtggccgtgctgtatcaggacgtgaattgtaccgaggtgcccgtggcaatccacgcagatcagctgacccctacatggcgggtgtactctaccggcagcaactacttccagacaagagccggatgcctgatcggagcagagcacgtgaacaatagctatgagtgcgacatccctatcggcgccggcatctgtgccagctaccagacccagacaaactccccatctggagcaggctcccaccatcaccatcaccatcaccatcaccactga

SEQ ID NO: 4083 - DNA, 2148 bp, Artificial Sequence
  Description of Artificial Sequence: Synthetic polynucleotide
atgggcatcctgccaagcccaggaatgcccgccctgctgtctctggtgagcctgctgtccgtgctgctgatgggatgcgtggcagagacaggcacacagtgcgtgaacctgaccacaaggacccagctgccccctgcctataccaattctttcacacggggcgtgtactatcccgacaaggtgtttagaagctccgtgctgcactccacacaggatctgtttctgcctttcttttctaacgtgacctggttccacgccatccacgtgtccggcaccaatggcacaaagcggttcgacaatcccgtgctgccttttaacgatggcgtgtacttcgccagcaccgagaagtccaacatcatcagaggctggatctttggcaccacactggactctaagacacagagcctgctgatcgtgaacaatgccaccaacgtggtgatcaaggtgtgcgagttccagttttgtaatgatccattcctgggcgtgtactatcacaagaacaataagtcctggatggagtctgagtttcgcgtgtattctagcgccaacaattgcacatttgagtacgtgagccagcccttcctgatggacctggagggcaagcagggcaatttcaagaacctgagggagttcgtgtttaagaatatcgatggctacttcaagatctacagcaagcacaccccaatcaacctggtgcgcgacctgccacagggattctccgccctggagccactggtggatctgcccatcggcatcaacatcacccggtttcagacactgctggccctgcacagatcctacctgacaccaggcgactcctctagcggatggaccgcaggagctgccgcctactatgtgggctatctgcagccccggaccttcctgctgaagtacaacgagaatggcaccatcacagacgcagtggattgcgccctggaccccctgtctgagacaaagtgtacactgaagagctttaccgtggagaagggcatctatcagacaagcaatttcagggtgcagcctaccgagtccatcgtgcgctttcccaatatcacaaacctgtgccctttaggcgaggtgttcaacgccaccagattcgccagctcatacgcctggaatcggaagagaatctccaactgcgtggccgactattctgtgctgtacaactccgcctctttcagcacctttaagtgctatggcgtgtctcccacaaagctgaatgatctgtgctttaccaacgtgtacgccgatcgattcgtgatcaggggagacgaagtgagacagatcgcaccaggacagacaggaaagatcgcagactacaattataagctgcctgacgatttcaccggctgcgtgatcgcctggaactccaacaatctggatgcgaaagtgggcggcaactacaattatctgtacaggctgtttcgcaagtccaatctgaagccattcgagcggttcatctccacagagatctaccaggccggctctaccccctcgaatggcgtggagggctttaactgttatttccctctgcagtcttacgtattccagccaacaaacggcgtgacttatcagccctacagagtggtggtgctgtcctttgagctgctgcacgcaccacatacagtgtgcggcccaaagaagtctaccaatctggtgaagaacaagtgcgtgaacttcaacttcaacggactgaccggcacaggcgtgctgaccgagagcaataagaagttcctgccttttcagcagttcggcagggacatcgcagataccacagacgccgtgcgcgaccctcagaccctggagatcctggacatcacaccatgcagcttcggcggcgtgtccgtgatcacaccaggcaccaatacatccaaccaggtggccgtgctgtatcaggacgtgaattgtaccgaggtgcccgtggcaatccacgcagatcagctgacccctacatggcgggtgtactctaccggcagcaacgtgttccagacaagagccggatgcctgatcggagcagagcacgtgaacaatagctatgagtgcgacatccctatcggcgccggcatctgtgccagctaccagacccagacaaactccccatctggagcaggctcccaccatcaccatcaccatcaccatcaccactga

SEQ ID NO: 4084 - DNA, 2148 bp, Artificial Sequence
  Description of Artificial Sequence: Synthetic polynucleotide
atgggcatcctgccaagcccaggaatgcccgccctgctgtctctggtgagcctgctgtccgtgctgctgatgggatgcgtggcagagacaggcacacagtgcgtgaacctgaccacaaggacccagctgccccctgcctataccaattctttcacacggggcgtgtactatcccgacaaggtgtttagaagctccgtgctgcactccacacaggatctgtttctgcctttcttttctaacgtgacctggttccacgccatccacgtgtccggcaccaatggcacaaagcggttcgacaatcccgtgctgccttttaacgatggcgtgtacttcgccagcaccgagaagtccaacatcatcagaggctggatctttggcaccacactggactctaagacacagagcctgctgatcgtgaacaatgccaccaacgtggtgatcaaggtgtgcgagttccagttttgtaatgatccattcctgggcgtgtactatcacaagaacaataagtcctggatggagtctgagtttcgcgtgtattctagcgccaacaattgcacatttgagtacgtgagccagcccttcctgatggacctggagggcaagcagggcaatttcaagaacctgagggagttcgtgtttaagaatatcgatggctacttcaagatctacagcaagcacaccccaatcaacctggtgcgcgacctgccacagggattctccgccctggagccactggtggatctgcccatcggcatcaacatcacccggtttcagacactgctggccctgcacagatcctacctgacaccaactgactcctctagcggatggaccgcaggagctgccgcctactatgtgggctatctgcagccccggaccttcctgctgaagtacaacgagaatggcaccatcacagacgcagtggattgcgccctggaccccctgtctgagacaaagtgtacactgaagagctttaccgtggagaagggcatctatcagacaagcaatttcagggtgcagcctaccgagtccatcgtgcgctttcccaatatcacaaacctgtgcccttttggcgaggtgttcaacgccaccagattcgccagcgtgtacgcctggaatcggaagagaatctccaactgcgtggccgactattctgtgctgtacaactccgcctctttcagcacctttaagtgctatggcgtgtctcccacaaagctgaatgatctgtgctttaccaacgtgtacgccgatagcttcgtgatcaggggagacgaagtgagacagatcgcaccaggacagacaggaaagatcgcagactacaattataagctgcctgacgatttcaccggctgcgtgatcgcctggaactccaacaatctggattctaaagtgggcggcaactacaattatctgtacaggctgtttcgcaagtccaatctgaagccattcgagcgggacatctccacagagatctaccaggccggctctaccccctgcaatggcgtggagggctttaactgttatttccctctgcagtcttacggcttccagccaacaaacggcgtgggctatcagccctacagagtggtggtgctgtcctttgagctgctgcacgcaccagcaacagtgtgcggcccaaagaagtctaccaatctggtgaagaacaagtgcgtgaacttcaacttcaacggactgaccggcacaggcgtgctgaccgagagcaataagaagttcctgccttttcagcagttcggcagggacatcgcagataccacagacgccgtgcgcgaccctcagaccctggagatcctggacatcacaccatgcagcttcggcggcgtgtccgtgatcacaccaggcaccaatacatccaaccaggtggccgtgctgtatcaggacgtgaattgtaccgaggtgcccgtggcaatccacgcagatcagctgacccctacatggcgggtgtactctaccggcagcaacgtgttccagacaagagccggatgcctgatcggagcagagcacgtgaacaatagctatgagtgcgacatccctatcggcgccggcatctgtgccagctaccagacccagacaaactccccatctggagcaggctcccaccatcaccatcaccatcaccatcaccactga

SEQ ID NO: 4085 - DNA, 2148 bp, Artificial Sequence
  Description of Artificial Sequence: Synthetic polynucleotide
atgggcatcctgccaagcccaggaatgcccgccctgctgtctctggtgagcctgctgtccgtgctgctgatgggatgcgtggcagagacaggcacacagtgcgtgaacctgaccacaaggacccagctgccccctgcctataccaattctttcacacggggcgtgtactatcccgacaaggtgtttagaagctccgtgctgcactccacacaggatctgtttctgcctttcttttctaacgtgacctggttccacgccatccacgtgtccggcaccaatggcacaaagcggttcgacaatcccgtgctgccttttaacgatggcgtgtacgttgccagcaccgagaagtccaacatcatcagaggctggatctttggcaccacactggactctaagacacagagcctgctgatcgtgaacaatgccaccaacgtggtgatcaaggtgtgcgagttccagttttgtaatgatccattcctgggcgtgtactatcacaagaacaataagtcctggatggagtctgagtttcgcgtgtattctagcgccaacaattgcacatttgagtacgtgagccagcccttcctgatggacctggagggcaagcagggcaatttcaagaacctgagggagttcgtgtttaagaatatcgatggctacttcaagatctacagcaagcacaccccaatcaacctggtgcgcgacctgccacagggattctccgccctggagccactggtggatctgcccatcggcatcaacatcacccggtttcagacactgctggccctgcacagatcctacctgacaccaggcgactcctctagcggatggaccgcaggagctgccgcctactatgtgggctatctgcagccccggaccttcctgctgaagtacaacgagaatggcaccatcacagacgcagtggattgcgccctggaccccctgtctgagacaaagtgtacactgaagagctttaccgtggagaagggcatctatcagacaagcaatttcagggtgcagcctaccgagtccatcgtgcgctttcccaatatcacaaacctgtgcccttttggcgaggtgttcaacgccaccagattcgccagcgtgtacgcctggaatcggaagagaatctccaactgcgtggccgactattctgtgctgtacaactccgcctctttcagcacctttaagtgctatggcgtgtctcccacaaagctgaatgatctgtgctttaccaacgtgtacgccgatagcttcgtgatcaggggagacgaagtgagacagatcgcaccaggacagacaggaaagatcgcagactacaattataagctgcctgacgatttcaccggctgcgtgatcgcctggaactccaacaatctggattctaaagtgggcggcaactacaattatctgtacaggctgtttcgcaagtccaatctgaagccattcgagcgggacatctccacagagatctaccaggccggctctaccccctgcaatggcgtggagggctttaactgttatttccctctgcagtcttacggcttccagccaacaaacggcgtgggctatcagccctacagagtggtggtgctgtcctttgagctgctgcacgcaccagcaacagtgtgcggcccaaagaagtctaccaatctggtgaagaacaagtgcgtgaacttcaacttcaacggactgaccggcacaggcgtgctgaccgagagcaataagaagttcctgccttttcagcagttcggcagggacatcgcagataccacagacgccgtgcgcgaccctcagaccctggagatcctggacatcacaccatgcagcttcggcggcgtgtccgtgatcacaccaggcaccaatacatccaaccaggtggccgtgctgtatcaggacgtgaattgtaccgaggtgcccgtggcaatccacgcagatcagctgacccctacatggcgggtgtactctaccggcagcaacgtgttccagacaagagccggatgcctgatcggagcagagcacgtgaacaatagctatgagtgcgacatccctatcggcgccggcatctgtgccagctaccagacccagacaaactccccatctggagcaggctcccaccatcaccatcaccatcaccatcaccactga

SEQ ID NO: 4086 - DNA, 2148 bp, Artificial Sequence
  Description of Artificial Sequence: Synthetic polynucleotide
atgggcatcctgccaagcccaggaatgcccgccctgctgtctctggtgagcctgctgtccgtgctgctgatgggatgcgtggcagagacaggcacacagtgcgtgaacctgaccacaaggacccagctgccccctgcctataccaattctttcacacggggcgtgtactatcccgacaaggtgtttagaagctccgtgctgcactccacacaggatctgtttctgcctttcttttctaacgtgacctggttccacgccatccacgtgtccggcaccaatggcacaaagcggttcgacaatcccgtgctgccttttaacgatggcgtgtacttcgccagcaccgagaagtccaacatcatcagaggctggatctttggcaccacactggactctaagacacagagcctgctgatcgtgaacaatgccaccaacgtggtgatcaaggtgtgcgagttccagttttgtaatgatccattcctgggcgtgtactatcacaagaacaataagtcctggatggagtctgagtttcgcgtgtattctagcgccaacaattgcacatttgagtacgtgagccagcccttcctgatggacctggagggcaagcagggcaatttcaagaacctgagggagttcgtgtttaagaatatcgatggctacttcaagatctacagcaagcacaccccaatcaacctggtgcgcgacctgccacagggattctccgccctggagccactggtggatctgcccatcggcatcaacatcacccggtttcagacactgctggccctgcacagatcctacctgacaccaggcgactcctctagcggatggaccgcaggagctgccgcctactatgtgggctatctgcagccccggaccttcctgctgaagtacaacgagaatggcaccatcacagacgcagtggattgcgccctggaccccctgtctgagacaaagtgtacactgaagagctttaccgtggagaagggcatctatcagacaagcaatttcagggtgcagcctaccgagtccatcgtgcgctttcccaatatcacaaacctgtgcccttttggcgaggtgttcaacgccaccagattcgccagcgtgtacgcctggaatcggaagagaatctccaactgcgtggccgactattctgtgctgtacaactccgcctctttcagcacctttaagtgctatggcgtgtctcccacaaagctgaatgatctgtgctttaccaacgtgtacgccgatagcttcgtgatcaggggagacgaagtgagacagatcgcaccaggacagacaggaaagatcgcagactacaattataagctgcctgacgatttcaccggctgcgtgatcgcctggaactccaacaatctggattctaaagtgggcggcaactacaattatctgtacaggctgtttcgcaagtccaatctgaagccattcgagcgggacatctccacagaggactaccaggccggctctaccccctgcaatggcgtggagggctttaactgttatttccctctgcagtcttacggcttccagccaacaaacggcgtgggctatcagccctacagagtggtggtgctgtcctttgagctgctgcacgcaccagcaacagtgtgcggcccaaagaagtctaccaatctggtgaagaacaagtgcgtgaacttcaacttcaacggactgaccggcacaggcgtgctgaccgagagcaataagaagttcctgccttttcagcagttcggcagggacatcgcagataccacagacgccgtgcgcgaccctcagaccctggagatcctggacatcacaccatgcagcttcggcggcgtgtccgtgatcacaccaggcaccaatacatccaaccaggtggccgtgctgtatcaggacgtgaattgtaccgaggtgcccgtggcaatccacgcagatcagctgacccctacatggcgggtgtactctaccggcagcaacgtgttccagacaagagccggatgcctgatcggagcagagcacgtgaacaatagctatgagtgcgacatccctatcggcgccggcatctgtgccagctaccagacccagacaaactccccatctggagcaggctcccaccatcaccatcaccatcaccatcaccactga

SEQ ID NO: 4087 - DNA, 2148 bp, Artificial Sequence
  Description of Artificial Sequence: Synthetic polynucleotide
atgggcatcctgccaagcccaggaatgcccgccctgctgtctctggtgagcctgctgtccgtgctgctgatgggatgcgtggcagagacaggcacacagtgcgtgaacctgaccacaaggacccagctgccccctgcctataccaattctttcacacggggcgtgtactatcccgacaaggtgtttagaagctccgtgctgcactccacacaggatctgtttctgcctttcttttctaacgtgacctggttccacgcctaccacgtgtccggcaccaatggcacaaagcggttcgacaatcccgtgctgccttttaacgatggcgtgtacttcgccagcaccgagaagtccaacatcatcagaggctggatctttggcaccacactggactctaagacacagagcctgctgatcgtgaacaatgccaccaacgtggtgatcaaggtgtgcgagttccagttttgtaatgatccattcctgggcgtgtactatcacaagaacaataagtcctggatggagtctgagtttcgcgtgtattctagcgccaacaattgcacatttgagtaccatagccagcccttcctgatggacctggagggcaagcagggcaatttcaagaacctgagggagttcgtgtttaagaatatcgatggctacttcaagatctacagcaagcacaccccaatcaacctggtgcgcgacctgccacagggattctccgccctggagccactggtggatctgcccatcggcatcaacatcacccggtttcagacactgctggccctgcacagatcctacctgacaccaggcgactcctctagcggagaaaccgcaggagctgccgcctactatgtgggctatctgcagccccggaccttcctgctgaagtacaacgagaatggcaccatcacagacgcagtggattgcgccctggaccccctgtctgagacaaagtgtacactgaagagctttaccgtggagaagggcatctatcagacaagcaatttcagggtgcagcctaccgagtccatcgtgcgctttcccaatatcacaaacccgtgcccttttggcgaggtgttcaacgccaccagattcgccagcgtgtacgcctggaatcggaagagaatctccaactgcgtggccgactattctgtgctgtacaactccgcctctttcagcacctttaagtgctatggcgtgtctcccacaaagctgaatgatctgtgctttaccaacgtgtacgccgatagcttcgtgatcaggggagacgaagtgagacagatcgcaccaggacagacaggaaagatcgcagactacaattataagctgcctgacgatttcaccggctgcgtgatcgcctggaactccaacaatctggattctaaagtgggcggcaactacaattatctgtacaggctgtttcgcaagtccaatctgaagccattcgagcgggacatctccacagagatctaccaggccggctctaccccctgcaatggcgtggagggctttaactgttatttccctctgcagtcttacggcttccagccaacaaacggcccgggctatcagccctacagagtggtggtgctgtcctttgagctgctgcacgcaccagcaacagtgtgcggcccaaagaagtctaccaatctggtgaagaacaagtgcgtgaacttcaacttcaacggactgaccggcacaggcgtgctgaccgagagcaataagaagttcctgccttttcagcagttcggcagggacatcgcagataccacagacgccgtgcgcgaccctcagaccctggagatcctggacatcacaccatgcagcttcggcggcgtgtccgtgatcacaccaggcaccaatacatccaaccaggtggccgtgctgtatcaggacgtgaattgtaccgaggtgcccgatgcaatccacgcagatcagctgacccctacatggcgggtgtactctaccggcagcaacgtgttccagacaagagccggatgcctgatcggagcagagcacgtgaacaatagctatgagtgcgacatccctatcggcgccggcatctgtgccagctaccagacccagacaaactccccatctggagcaggctcccaccatcaccatcaccatcaccatcaccactga

SEQ ID NO: 4088 - DNA, 2148 bp, Artificial Sequence
  Description of Artificial Sequence: Synthetic polynucleotide
atgggcatcctgccaagcccaggaatgcccgccctgctgtctctggtgagcctgctgtccgtgctgctgatgggatgcgtggcagagacaggcacacagtgcgtgaacctgaccacaaggacccagctgccccctgcctataccaattctttcacacggggcgtgtactatcccgacaaggtgtttagaagctccgtgctgcactccacacaggatctgtttctgcctttcttttctaacgtgacctggttccacgccatccacgtgtccggcaccaatggcacaaagcggttcgacaatcccgtgctgccttttaacgatggcgtgtacttcgccagcaccgagaagtccaacatcatcagaggctggatctttggcaccacactggactctaagacacagagcctgctgatcgtgaacaatgccaccaacgtggtgatcaaggtgtgcgagttccagttttgtaatgatccattcctgggcgtgtactatcacaagaacaataagtcctggatggagtctgagtttcgcgtgtattctagcgccaacaattgcacatttgagtacgtgagccagcccttcctgatggacctggagggcaagcagggcaatttcaagaacctgagggagttcgtgtttaagaatatcgatggctacttcaagatctacagcaagcacaccccaatcaacctggtgcgcgacctgccacagggattctccgccctggagccactggtggatctgcccatcggcatcaacatcacccggtttcagacactgctggccctgcacagatcctacctgacaccaggcgactcctctagcggatggaccgcaggagctgccgcctactatgtgggctatctgcagccccggaccttcctgctgaagtacaacgagaatggcaccatcacagacgcagtggattgcgccctggaccccctgtctgagacaaagtgtacactgaagagctttaccgtggagaagggcatctatcagacaagcaatttcagggtgcagcctaccgagtccatcgtgcgctttcccaatatcacaaacctgtgcccttttggcgaggtgttcaacgccaccagattcgccagcgtgtacgcctggaatcggaagagaatctccaactgcgtggccgactattctgtgctgtacaactccgcctctttcagcacctttaagtgctatggcgtgtctcccacaaagctgaatgatctgtgctttaccaacgtgtacgccgatcgtttcgtgatcaggggagacgaagtgagacagatcgcaccaggacagacaggaaagatcgcagactacaattataagctgcctgacgatttcaccggctgcgtgatcgcctggaactccaacaatctggattctaaagtgggcggcaactacaattatctgtacaggctgtttcgcaagtccaatctgaagccattcgagcgggacatctccacagagatctaccaggccggctctaccccctgcaatggcgtggagggctttaactgttatttccctctgcagtcttacggcttccagccaacaaacggcgtgggctatcagccctacagagtggtggtgctgtcctttgagctgctgcacgcaccagcaacagtgtgcggcccaaagaagtctaccaatctggtgaagaacaagtgcgtgaacttcaacttcaacggactgaccggcacaggcgtgctgaccgagagcaataagaagttcctgccttttcagcagttcggcagggacatcgcagataccacagacgccgtgcgcgaccctcagaccctggagatcctggacatcacaccatgcagcttcggcggcgtgtccgtgatcacaccaggcaccaatacatccaaccaggtggccgtgctgtatcaggacgtgaattgtaccgaggtgcccgtggcaatccacgcagatcagctgacccctacatggcgggtgtactctaccggcagcaacgtgttccagacaagagccggatgcctgatcggagcagagcacgtgaacaatagctatgagtgcgacatccctatcggcgccggcatctgtgccagctaccagacccagacaaactccccatctggagcaggctcccaccatcaccatcaccatcaccatcaccactga

SEQ ID NO: 4089 - DNA, 2148 bp, Artificial Sequence
  Description of Artificial Sequence: Synthetic polynucleotide
atgggcatcctgccaagcccaggaatgcccgccctgctgtctctggtgagcctgctgtccgtgctgctgatgggatgcgtggcagagacaggcacacagtgcgtgaacctgaccacaaggacccagctgccccctgcctataccaattctttcacacggggcgtgtactatcccgacaaggtgtttagaagctccgtgctgcactccacacaggatctgtttctgcctttcttttctaacgtgacctggttccacgccatccacgtgtccggcaccaatggcacaaagcggttcgacaatcccgtgctgccttttaacgatggcgtgtacttcgccagcaccgagaagtccaacatcatcagaggctggatctttggcaccacactggactctaagacacagagcctgctgatcgtgaacaatgccaccaacgtggtgatcaaggtgtgcgagttccagttttgtaatgatccattcctgggcgtgtactatcacaagaacaataagtcctggatggagtctgagtttcgcgtgtattctagcgccaacaattgcacatttgagtacgtgagccagcccttcctgatggacctggagggcaagcagggcaatttcaagaacctgagggagttcgtgtttaagaatatcgatggctacttcaagatctacagcaagcacaccccaatcaacctggtgcgcgacctgccacagggattctccgccctggagccactggtggatctgcccatcggcatcaacatcacccggtttcagacactgctggccctgcacagatcctacctgacaccaggcgactcctctagcggatggaccgcaggagctgccgcctactatgtgggctatctgcagccccggaccttcctgctgaagtacaacgagaatggcaccatcacagacgcagtggattgcgccctggaccccctgtctgagacaaagtgtacactgaagagctttaccgtggagaagggcatctatcagacaagcaatttcagggtgcagcctaccgagtccatcgtgcgctttcccaatatcacaaacctgtgcccttttggcgaggtgttcaacgccaccagattcgccagcgtgtacgcctggaatcggaagagaatctccaactgcgtggccgactattctgtgctgtacaactccgcctctttcagcacctttaagtgctatggcgtgtctcccacaaagctgaatgatctgtgctttaccaacgtgtacgccgatagcttcgtgatcaggggagacgaagtgagacagatcgcaccaggacagacaggaaagatcgcagactacaattataagctgcctgacgatttcaccggctgcgtgatcgcctggaactccaacaatctggattctaaagtgggcggcaactacaattatctgtacaggctgtttcgcaagtccaatattaagccattcgagcgggacatctccacagagatctaccaggccggctctaccccctgcaatggcgtggagggctttaactgttatttccctctgcagtcttacggcttccagccaacaaacggcgtgggctatcagccctacagagtggtggtgctgtcctttgagctgctgcacgcaccagcaacagtgtgcggcccaaagaagtctaccaatctggtgaagaacaagtgcgtgaacttcaacttcaacggactgaccggcacaggcgtgctgaccgagagcaataagaagttcctgccttttcagcagttcggcagggacatcgcagataccacagacgccgtgcgcgaccctcagaccctggagatcctggacatcacaccatgcagcttcggcggcgtgtccgtgatcacaccaggcaccaatacatccaaccaggtggccgtgctgtatcaggacgtgaattgtaccgaggtgcccgtggcaatccacgcagatcagctgacccctacatggcgggtgtactctaccggcagcaacgtgttccagacaagagccggatgcctgatcggagcagagcacgtgaacaatagctatgagtgcgacatccctatcggcgccggcatctgtgccagctaccagacccagacaaactccccatctggagcaggctcccaccatcaccatcaccatcaccatcaccactga

SEQ ID NO: 4090 - DNA, 2148 bp, Artificial Sequence
  Description of Artificial Sequence: Synthetic polynucleotide
atgggcatcctgccaagcccaggaatgcccgccctgctgtctctggtgagcctgctgtccgtgctgctgatgggatgcgtggcagagacaggcacacagtgcgtgaacctgaccacaaggacccagctgccccctgcctataccaattctttcacacggggcgtgtactatcccgacaaggtgtttagaagctccgtgctgcactccacacaggatctgtttctgcctttcttttctaacgtgacctggttccacgccatccacgtgtccggcaccaatggcacaaagcggttcgacaatcccgtgctgccttttaacgatggcgtgtacttcgccagcaccgagaagtccaacatcatcagaggctggatctttggcaccacactggactctaagacacagagcctgctgatcgtgaacaatgccaccaacgtggtgatcaaggtgtgcgagttccagtttatgaatgatccattcctgggcgtgtactatcacaagaacaataagtcctggatggagtctgagtttcgcgtgtattctagcgccaacaattgcacatttgagtacgtgagccagcccttcctgatggacctggagggcaagcagggcaatttcaagaacctgagggagttcgtgtttaagaatatcgatggctacttcaagatctacagcaagcacaccccaatcaacctggtgcgcgacctgccacagggattctccgccctggagccactggtggatctgcccatcggcatcaacatcacccggtttcagacactgctggccctgcacagatcctacctgacaccaggcgactcctctagcggatggaccgcaggagctgccgcctactatgtgggctatctgcagccccggaccttcctgctgaagtacaacgagaatggcaccatcacagacgcagtggattgcgccctggaccccctgtctgagacaaagtgtacactgaagagctttaccgtggagaagggcatctatcagacaagcaatttcagggtgcagcctaccgagtccatcgtgcgctttcccaatatcacaaacctgtgcccttttggcgaggtgttcaacgccaccagattcgccagcgtgtacgcctggaatcggaagagaatctccaactgcgtggccgactattctgtgctgtacaactccgcctctttcagcacctttaagtgctatggcgtgtctcccacaaagctgaatgatctgtgctttaccaacgtgtacgccgatagcttcgtgatcaggggagacgaagtgagacagatcgcaccaggacagacaggaaagatcgcagactacaattataagctgcctgacgatttcaccggctgcgtgatcgcctggaactccaacaatctggattctaaagtgggcggcaactacaattatctgtacaggctgtttcgcaagtccaatctgaagccattcgagcgggacatctccacagagatctaccaggccggctctaccccctgcaatggcgtggagggctttaactgttatttccctctgcagtcttacggcttccagccaacaaacggcgtgggctatcagccctacagagtggtggtgctgtcctttgagctgctgcacgcaccagcaacagtgtgcggcccaaagaagtctaccaatctggtgaagaacaagtgcgtgaacttcaacttcaacggactgaccggcacaggcgtgctgaccgagagcaataagaagttcctgccttttcagcagttcggcagggacatcgcagataccacagacgccgtgcgcgaccctcagaccctggagatcctggacatcacaccatgcagcttcggcggcgtgtccgtgatcacaccaggcaccaatacatccaaccaggtggccgtgctgtatcaggacgtgaattgtaccgaggtgcccgtggcaatccacgcagatcagctgacccctacatggcgggtgtactctaccggcagcaacgtgttccagacaagagccggatgcctgatcggagcagagcacgtgaacaatagctatgagtgcgacatccctatcggcgccggcatctgtgccagctaccagacccagacaaactccccatctggagcaggctcccaccatcaccatcaccatcaccatcaccactga

SEQ ID NO: 4091 - DNA, 2148 bp, Artificial Sequence
  Description of Artificial Sequence: Synthetic polynucleotide
atgggcatcctgccaagcccaggaatgcccgccctgctgtctctggtgagcctgctgtccgtgctgctgatgggatgcgtggcagagacaggcacacagtgcgtgaacctgaccacaaggacccagctgccccctgcctataccaattctttcacacggggcgtgtactatcccgacaaggtgtttagaagctccgtgctgcactccacacaggatctgtttctgcctttcttttctaacgtgacctggttccacgccatccacgtgtccggcaccaatggcacaaagcggttcgacaatcccgtgctgccttttaacgatggcgtgtacttcgccagcaccgagaagtccaacatcatcagaggctggatctttggcaccacactggactctaagacacagagcctgctgatcgtgaacaatgccaccaacgtggtgatcaaggtgtgcgagttccagttttgtaatgatccattcctgggcgtgtactatcacaagaacaataagtcctggatggagtctgagtttcgcgtgtattctagcgccaacaattgcacatttgagtacgtgagccagcccttcctgatggacctggagggcaagcagggcaatttcaagaacctgagggagttcgtgtttaagaatatcgatggctacttcaagatctacagcaagcacaccccaatcaacctggtgcgcgacctgccacagggattctccgccctggagccactggtggatctgcccatcggcatcaacatcacccggtttcagacactgctggccctgcacagatcctacctgacaccaggcgactcctctagcggatggaccgcaggagctgccgcctactatgtgggctatctgcagccccggaccttcctgctgaagtacaacgagaatggcaccatcacagacgcagtggattgcgccctggaccccctgtctgagacaaagtgtacactgaagagctttaccgtggagaagggcatctatcagacaagcaatttcagggtgcagcctaccgagtccatcgtgcgctttcccaatatcacaaacctgtgcccttttggcgaggtgttcaacgccaccagattcgccagcgtgtacgcctggaatcggaagagaatctccaactgcgtggccgactattctgtgctgtacaactccgcctctttcagcacctttaagtgctatggcgtgtctcccacaaagctgaatgatctgtgctttaccaacgtgtacgccgatagcttcgtgatcaggggagacgaagtgagacagatcgcaccaggacagacaggaaagatcgcagactacaattataagctgcctgacgatttcaccggctgcgtgatcgcctggaactccaacaatctggattctaaagtgggcggcaactacaattatctgtacaggctgtttcgcaagtccaatctgaagccattcgagcgggacatctccacagagatctaccaggccggctctaccccctgcaatggcgtggagggctttaactgttatttccctctgcagtcttacggcttccagccaacaaacggcgtgggctatcagccctacagagtggtggtgctgtcctttgagctgctgcacgcaccagcaacagtgtgcggcccaaagaagtctaccaatctggtgaagaacaagtgcgtgaacttcaacttcaacggactgaccggcacaggcgtgctgaccgagagcaataagaagttcctgccttttcagcagttcggcagggacatcgcagataccacagacgccgtgcgcgaccctcagaccctggagatcctggacatcacaccatgcagcttcggcggcgtgtccgtgatcacaccaggcaccaatacatccaaccaggtggccgtgctgtatcaggacgtgaattgtaccgaggtgcccgtggcaatccacgcagatcagctgacccctacatggcggaaatactctaccggcagcaacgtgttccagacaagagccggatgcctgatcggagcagagcacgtgaacaatagctatgagtgcgacatccctatcggcgccggcatctgtgccagctaccagacccagacaaactccccatctggagcaggctcccaccatcaccatcaccatcaccatcaccactga

SEQ ID NO: 4092 - DNA, 2148 bp, Artificial Sequence
  Description of Artificial Sequence: Synthetic polynucleotide
atgggcatcctgccaagcccaggaatgcccgccctgctgtctctggtgagcctgctgtccgtgctgctgatgggatgcgtggcagagacaggcacacagtgcgtgaacctgaccacaaggacccagctgccccctgcctataccaattctttcacacggggcgtgtactatcccgacaaggtgtttagaagctccgtgctgcactccacacaggatctgtttctgcctttcttttctaacgtgacctggttccacgccatccacgtgtccggcaccaatggcacaaagcggttcgacaatcccgtgctgccttttaacgatggcgtgtacttcgccagcaccgagaagtccaacatcatcagaggctggatctttggcaccacactggactctaagacacagagcctgctgatcgtgaacaatgccaccaacgtggtgatcaaggtgtgcgagttccagttttgtaatgatccattcctgggcgtgtactatcacaagaacaataagtcctggatggagtctgagtttcgcgtgtattctagcgccaacaattgcacatttgagtacgtgagccagcccttcctgatggacctggagggcaagcagggcaatttcaagaacctgagggagttcgtgtttaagaatatcgatggctacttcaagatctacagcaagcacaccccaatcaacctggtgcgcgacctgccacagggattctccgccctggagccactggtggatctgcccatcggcatcaacatcacccggtttcagacactgctggccctgcacagatcctacctgacaccaggcgactcctctagcggatggaccgcaggagctgccgcctactatgtgggctatctgcagccccggaccttcctgctgaagtacaacgagaatggcaccatcacagacgcagtggattgcgccctggaccccctgtctgagacaaagtgtacactgaagagctttaccgtggagaagggcatctatcagacaagcaatttcagggtgcagcctaccgagtccatcgtgcgctttcccaatatcacaaacctgtgcccttttggcgaggtgttcaacgccaccagattcgccagcgtgtacgcctggaatcggaagagaatctccaactgcgtggccgactattctgtgctgtacaactccgcctctttcagcacctttaagtgctatggcgtgtctcccacaaagctgaatgatctgtgctttaccaacgtgtacgccgatagcttcgtgatcaggggagacgaagtgagacagatcgcaccaggacagacaggaaagatcgcagactacaattataagctgcctgacgatttcaccggctgcgtgatcgcctggaactccaacaatctggattctaaagtgggcggcaactacaattatctgtacaggctgtttcgcaagtccaatctgaagccattcgagcgggacatctccacagagatctaccaggccggctctaccccctgcaatggcgtggagggctttaactgttatttccctctgcagtcttacggcttccagccaacaaacggcgtgggctatcagccctacagagtggtggtgctgtcctttgagctgctgcacgcaccagcaacagtgtgcggcccaaagaagactaccaatctggtgaagaacaagtgcgtgaacttcaacttcaacggactgaccggcacaggcgtgctgaccgagagcaataagaagttcctgccttttcagcagttcggcagggacatcgcagataccacagacgccgtgcgcgaccctcagaccctggagatcctggacatcacaccatgcagcttcggcggcgtgtccgtgatcacaccaggcaccaatacatccaaccaggtggccgtgctgtatcaggacgtgaattgtaccgaggtgcccgtggcaatccacgcagatcagctgacccctacatggcgggtgtactctaccggcagcaacgtgttccagacaagagccggatgcctgatcggagcagagcacgtgaacaatagctatgagtgcgacatccctatcggcgccggcatctgtgccagctaccagacccagacaaactccccatctggagcaggctcccaccatcaccatcaccatcaccatcaccactga

SEQ ID NO: 4093 - DNA, 2148 bp, Artificial Sequence
  Description of Artificial Sequence: Synthetic polynucleotide
atgggcatcctgccaagcccaggaatgcccgccctgctgtctctggtgagcctgctgtccgtgctgctgatgggatgcgtggcagagacaggcacacagtgcgtgaacctgaccacaaggacccagctgccccctgcctataccaattctttcacacggggcgtgtactatcccgacaaggtgtttagaagctccgtgctgcactccacacaggatctgtttctgcctttcttttctaacgtgacctggttccacgccatccacgtgtccggcaccaatggcacaaagcggttcgacaatcccgtgctgccttttaacgatggcgtgtacttcgccagcaccgagaagtccaacatcatcagaggctggatctttggcaccacactggactctaagacacagagcctgctgatcgtgaacaatgccaccaacgtggtgatcaaggtgtgcgagttccagttttgtaatgatccattcctgggcgtgtactatcacaagaacaataagtcctggatggagtctgagtttcgcgtgtattctagcgccaacaattgcacatttgagtacgtgagccagcccttcctgatggacctggagggcaagcagggcaatttcaagaacctgagggagttcgtgtttaagaatatcgatggctacttcaagatctacagcaagcacaccccaatcaacctggtgcgcgacctgccacagggattctccgccctggagccagcggtggatctgcccatcggcatcaacatcacccggtttcagacactgctggccctgcacagatcctacctgacaccaggcgactcctctagcggatggaccgcaggagctgccgcctactatgtgggctatctgcagccccggaccttcctgctgaagtacaacgagaatggcaccatcacagacgcagtggattgcgccctggaccccctgtctgagacaaagtgtacactgaagagctttaccgtggagaagggcatctatcagacaagcaatttcagggtgcagcctaccgagtccatcgtgcgctttcccaatatcacaaacctgtgcccttttggcgaggtgttcaacgccaccagattcgccagcgtgtacgcctggaatcggaagagaatctccaactgcgtggccgactattctgtgctgtacaactccgcctctttcagcacctttaagtgctatggcgtgtctcccacaaagctgaatgatctgtgctttaccaacgtgtacgccgatagcttcgtgatcaggggagacgaagtgagacagatcgcaccaggacagacaggaaagatcgcagactacaattataagctgcctgacgatttcaccggctgcgtgatcgcctggaactccaacaatctggattctaaagtgggcggcaactacaattatctgtacaggctgtttcgcaagtccaatctgaagccattcgagcgggacatctccacagagatctaccaggccggctctaccccctgcaatggcgtggagggctttaactgttatttccctctgcagtcttacggcttccagccaacaaacggcgtgggctatcagccctacagagtggtggtgctgtcctttgagctgctgcacgcaccagcaacagtgtgcggcccaaagaagtctaccaatctggtgaagaacaagtgcgtgaacttcaacttcaacggactgaccggcacaggcgtgctgaccgagagcaataagaagttcctgccttttcagcagttcggcagggacatcgcagataccacagacgccgtgcgcgaccctcagaccctggagatcctggacatcacaccatgcagcttcggcggcgtgtccgtgatcacaccaggcaccaatacatccaaccaggtggccgtgctgtatcaggacgtgaattgtaccgaggtgcccgtggcaatccacgcagatcagctgacccctacatggcgggtgtactctaccggcagcaacgtgttccagacaagagccggatgcctgatcggagcagagcacgtgaacaatagctatgagtgcgacatccctatcggcgccggcatctgtgccagctaccagacccagacaaactccccatctggagcaggctcccaccatcaccatcaccatcaccatcaccactga

SEQ ID NO: 4094 - DNA, 2148 bp, Artificial Sequence
  Description of Artificial Sequence: Synthetic polynucleotide
atgggcatcctgccaagcccaggaatgcccgccctgctgtctctggtgagcctgctgtccgtgctgctgatgggatgcgtggcagagacaggcacacagtgcgtgaacctgaccacaaggacccagctgccccctgcctataccaattctttcacacggggcgtgtactatcccgacaaggtgtttagaagctccgtgctgcactccacacaggatctgtttctgcctttcttttctaacgtgacctggttccacgcctaccacgtgtccggcaccaatggcacaaagcggttcgacaatcccgtgctgccttttaacgatggcgtgtacttcgccagcaccgagaagtccaacatcatcagaggctggatctttggcaccacactggactctaagacacagagcctgctgatcgtgaacaatgccaccaacgtggtgatcaaggtgtgcgagttccagttttgtaatgatccattcctgggcgtgtactatcacaagaacaataagtcctggatggagtctgagtttcgcgtgtattctagcgccaacaattgcacatttgagtaccatagccagcccttcctgatggacctggagggcaagcagggcaatttcaagaacctgagggagttcgtgtttaagaatatcgatggctacttcaagatctacagcaagcacaccccaatcaacctggtgcgcgacctgccacagggattctccgccctggagccactggtggatctgcccatcggcatcaacatcacccggtttcagacactgctggccctgcacagatcctacctgacaccaggcgactcctctagcggagaaaccgcaggagctgccgcctactatgtgggctatctgcagccccggaccttcctgctgaagtacaacgagaatggcaccatcacagacgcagtggattgcgccctggaccccctgtctgagacaaagtgtacactgaagagctttaccgtggagaagggcatctatcagacaagcaatttcagggtgcagcctaccgagtccatcgtgcgctttcccaatatcacaaacaaatgcccttttggcgaggtgttcaacgccaccagattcgccagcgtgtacgcctggaatcggaagagaatctccaactgcgtggccgactattctgtgctgtacaactccgcctctttcagcacctttaagtgctatggcgtgtctcccacaaagctgaatgatctgtgctttaccaacgtgtacgccgatagcttcgtgatcaggggagacgaagtgagacagatcgcaccaggacagacaggaaagatcgcagactacaattataagctgcctgacgatttcaccggctgcgtgatcgcctggaactccaacaatctggattctaaagtgggcggcaactacaattatctgtacaggctgtttcgcaagtccaatctgaagccattcgagcgggacatctccacagagatctaccaggccggctctaccccctgcaatggcgtggagggctttaactgttatttccctctgcagtcttacggcttccagccaacaaacggcccgggctatcagccctacagagtggtggtgctgtcctttgagctgctgcacgcaccagcaacagtgtgcggcccaaagaagtctaccaatctggtgaagaacaagtgcgtgaacttcaacttcaacggactgaccggcacaggcgtgctgaccgagagcaataagaagttcctgccttttcagcagttcggcagggacatcgcagataccacagacgccgtgcgcgaccctcagaccctggagatcctggacatcacaccatgcagcttcggcggcgtgtccgtgatcacaccaggcaccaatacatccaaccaggtggccgtgctgtatcaggacgtgaattgtaccgaggtgcccgatgcaatccacgcagatcagctgacccctacatggcgggtgtactctaccggcagcaacgtgttccagacaagagccggatgcctgatcggagcagagcacgtgaacaatagctatgagtgcgacatccctatcggcgccggcatctgtgccagctaccagacccagacaaactccccatctggagcaggctcccaccatcaccatcaccatcaccatcaccactga

SEQ ID NO: 4095 - DNA, 2148 bp, Artificial Sequence
  Description of Artificial Sequence: Synthetic polynucleotide
atgggcatcctgccaagcccaggaatgcccgccctgctgtctctggtgagcctgctgtccgtgctgctgatgggatgcgtggcagagacaggcacacagtgcgtgaacctgaccacaaggacccagctgccccctgcctataccaattctttcacacggggcgtgtactatcccgacaaggtgtttagaagcaaagtgctgcactccacacaggatctgtttctgcctttcttttctaacgtgacctggttccacgccatccacgtgtccggcaccaatggcacaaagcggttcgacaatcccgtgctgccttttaacgatggcgtgtacttcgccagcaccgagaagtccaacatcatcagaggctggatctttggcaccacactggactctaagacacagagcctgctgatcgtgaacaatgccaccaacgtggtgatcaaggtgtgcgagttccagttttgtaatgatccattcctgggcgtgtactatcacaagaacaataagtcctggatggagtctgagtttcgcgtgtattctagcgccaacaattgcacatttgagtacgtgagccagcccttcctgatggacctggagggcaagcagggcaatttcaagaacctgagggagttcgtgtttaagaatatcgatggctacttcaagatctacagcaagcacaccccaatcaacctggtgcgcgacctgccacagggattctccgccctggagccactggtggatctgcccatcggcatcaacatcacccggtttcagacactgctggccctgcacagatcctacctgacaccaggcgactcctctagcggatggaccgcaggagctgccgcctactatgtgggctatctgcagccccggaccttcctgctgaagtacaacgagaatggcaccatcacagacgcagtggattgcgccctggaccccctgtctgagacaaagtgtacactgaagagctttaccgtggagaagggcatctatcagacaagcaatttcagggtgcagcctaccgagtccatcgtgcgctttcccaatatcacaaacctgtgcccttttggcgaggtgttcaacgccaccagattcgccagcgtgtacgcctggaatcggaagagaatctccaactgcgtggccgactattctgtgctgtacaactccgcctctttcagcacctttaagtgctatggcgtgtctcccacaaagctgaatgatctgtgctttaccaacgtgtacgccgatagcttcgtgatcaggggagacgaagtgagacagatcgcaccaggacagacaggaaagatcgcagactacaattataagctgcctgacgatttcaccggctgcgtgatcgcctggaactccaacaatctggattctaaagtgggcggcaactacaattatctgtacaggctgtttcgcaagtccaatctgaagccattcgagcgggacatctccacagagatctaccaggccggctctaccccctgcaatggcgtggagggctttaactgttatttccctctgcagtcttacggcttccagccaacaaacggcgtgggctatcagccctacagagtggtggtgctgtcctttgagctgctgcacgcaccagcaacagtgtgcggcccaaagaagtctaccaatctggtgaagaacaagtgcgtgaacttcaacttcaacggactgaccggcacaggcgtgctgaccgagagcaataagaagttcctgccttttcagcagttcggcagggacatcgcagataccacagacgccgtgcgcgaccctcagaccctggagatcctggacatcacaccatgcagcttcggcggcgtgtccgtgatcacaccaggcaccaatacatccaaccaggtggccgtgctgtatcaggacgtgaattgtaccgaggtgcccgtggcaatccacgcagatcagctgacccctacatggcgggtgtactctaccggcagcaacgtgttccagacaagagccggatgcctgatcggagcagagcacgtgaacaatagctatgagtgcgacatccctatcggcgccggcatctgtgccagctaccagacccagacaaactccccatctggagcaggctcccaccatcaccatcaccatcaccatcaccactga

SEQ ID NO: 4096 - DNA, 2148 bp, Artificial Sequence
  Description of Artificial Sequence: Synthetic polynucleotide
atgggcatcctgccaagcccaggaatgcccgccctgctgtctctggtgagcctgctgtccgtgctgctgatgggatgcgtggcagagacaggcacacagtgcgtgaacctgaccacaaggacccagctgccccctgcctataccaattctttcacacggggcgtgtactatcccgacaaggtgtttagaagctccgtgctgcactccacacaggatctgtttctgcctttcttttctaacgtgacctggttccacgccatccacgtgtccggcaccaatggcacaaagcggttcgacaatcccgtgctgccttttaacgatggcgtgtacttcgccagcaccgagaagtccaacatcatcagaggctggatctttggcaccacactggactctaagacacagagcctgctgatcgtgaacaatgccaccaacgtggtgatcaaggtgtgcgagttccagttttgtaatgatccattcctgggcgtgtactatcacaagaacaataagtcctggatggagtctgagtttcgcgtgtatgacagcgccaacaattgcacatttgagtacgtgagccagcccttcctgatggacctggagggcaagcagggcaatttcaagaacctgagggagttcgtgtttaagaatatcgatggctacttcaagatctacagcaagcacaccccaatcaacctggtgcgcgacctgccacagggattctccgccctggagccactggtggatctgcccatcggcatcaacatcacccggtttcagacactgctggccctgcacagatcctacctgacaccaggcgactcctctagcggatggaccgcaggagctgccgcctactatgtgggctatctgcagccccggaccttcctgctgaagtacaacgagaatggcaccatcacagacgcagtggattgcgccctggaccccctgtctgagacaaagtgtacactgaagagctttaccgtggagaagggcatctatcagacaagcaatttcagggtgcagcctaccgagtccatcgtgcgctttcccaatatcacaaacctgtgcccttttggcgaggtgttcaacgccaccagattcgccagcgtgtacgcctggaatcggaagagaatctccaactgcgtggccgactattctgtgctgtacaactccgcctctttcagcacctttaagtgctatggcgtgtctcccacaaagctgaatgatctgtgctttaccaacgtgtacgccgatagcttcgtgatcaggggagacgaagtgagacagatcgcaccaggacagacaggaaagatcgcagactacaattataagctgcctgacgatttcaccggctgcgtgatcgcctggaactccaacaatctggattctaaagtgggcggcaactacaattatctgtacaggctgtttcgcaagtccaatctgaagccattcgagcgggacatctccacagagatctaccaggccggctctaccccctgcaatggcgtggagggctttaactgttatttccctctgcagtcttacggcttccagccaacaaacggcgtgggctatcagccctacagagtggtggtgctgtcctttgagctgctgcacgcaccagcaacagtgtgcggcccaaagaagtctaccaatctggtgaagaacaagtgcgtgaacttcaacttcaacggactgaccggcacaggcgtgctgaccgagagcaataagaagttcctgccttttcagcagttcggcagggacatcgcagataccacagacgccgtgcgcgaccctcagaccctggagatcctggacatcacaccatgcagcttcggcggcgtgtccgtgatcacaccaggcaccaatacatccaaccaggtggccgtgctgtatcaggacgtgaattgtaccgaggtgcccgtggcaatccacgcagatcagctgacccctacatggcgggtgtactctaccggcagcaacgtgttccagacaagagccggatgcctgatcggagcagagcacgtgaacaatagctatgagtgcgacatccctatcggcgccggcatctgtgccagctaccagacccagacaaactccccatctggagcaggctcccaccatcaccatcaccatcaccatcaccactga

SEQ ID NO: 4097 - DNA, 2148 bp, Artificial Sequence
  Description of Artificial Sequence: Synthetic polynucleotide
atgggcatcctgccaagcccaggaatgcccgccctgctgtctctggtgagcctgctgtccgtgctgctgatgggatgcgtggcagagacaggcacacagtgcgtgaacctgaccacaaggacccagctgccccctgcctataccaattctttcacacggggcgtgtactatcccgacaaggtgtttagaagctccgtgctgcactccacacaggatctgtttctgcctttcttttctaacgtgacctggttccacgccatccacgtgtccggcaccaatggcacaaagcggttcgacaatcccgtgctgccttttaacgatggcgtgtacttcgccagcaccgagaagtccaacatcatcagaggctggatctttggcaccacactggactctaagacacagagcctgctgatcgtgaacaatgccaccaacgtggtgatcaaggtgtgcgagttccagttttgtaatgatccattcctgggcgtgtactatcacaagaacaataagtcctggatggagtctgagtttcgcgtgtattctagcgccaacaattgcacatttgagtacgtgagccagcccttcctgatggacctggagggcaagcagggcaatttcaagaacctgagggagttcgtgtttaagaatatcgatggctacttcaagatctacagcaagcacaccccaatcaacctggtgcgcgacctgccacagggattctccgccctggagccactggtggatctgcccatcggcatcaacatcacccggtttcagacactgctggccctgcacagatcctacctgacaccaggcgactcctctagcggatggaccgcaggagctgccgcctactatgtgggctatctgcagccccggaccttcctgctgaagtacaacgagaatggcaccatcacagacgcagtggattgcgccctggaccccctgtctgagacaaagtgtacactgaagagctttaccgtggagaagggcatctatcagacaagcaatttcagggtgcagcctaccgagtccatcgtgcgctttcccaatatcacaaacctgtgcccttttggcgaggtgttcaacgccaccagattcgccagcgtgtacgcctggaatcggaagagaatctccaactgcgtggccgactattctgtgctgtacaactccgcctctttcagcacctttaagtgctatggcgtgtctcccacaaagctgaatgatctgtgctttaccaacgtgtacgccgatagcttcgtgatcaggggagacgaagtgagacagatcgcaccaggacagacaggaaagatcgcagactacaattataagctgcctgacgatttcaccggctgcgtgatcgcctggaactccaacaatctggattctaaagtgggcggcaactacaattatctgtacaggctgtttcgcaagtccaatctgaagccattcgagcgggacatctccacagagatctaccaggccggctctaccccctgcaatggcgtggagggctttaactgttatttccctctgcagtcttacggcttccagccaacaaacggcgtgggctatcagccctacagagtggtggtgctgtcctttgagctgctgcacgcaccagcaacagtgtgcggcccaaagaagtctaccaatctggtgaagaacgaatgcgtgaacttcaacttcaacggactgaccggcacaggcgtgctgaccgagagcaataagaagttcctgccttttcagcagttcggcagggacatcgcagataccacagacgccgtgcgcgaccctcagaccctggagatcctggacatcacaccatgcagcttcggcggcgtgtccgtgatcacaccaggcaccaatacatccaaccaggtggccgtgctgtatcaggacgtgaattgtaccgaggtgcccgtggcaatccacgcagatcagctgacccctacatggcgggtgtactctaccggcagcaacgtgttccagacaagagccggatgcctgatcggagcagagcacgtgaacaatagctatgagtgcgacatccctatcggcgccggcatctgtgccagctaccagacccagacaaactccccatctggagcaggctcccaccatcaccatcaccatcaccatcaccactga

SEQ ID NO: 4098 - DNA, 2148 bp, Artificial Sequence
  Description of Artificial Sequence: Synthetic polynucleotide
atgggcatcctgccaagcccaggaatgcccgccctgctgtctctggtgagcctgctgtccgtgctgctgatgggatgcgtggcagagacaggcacacagtgcgtgaacctgaccacaaggacccagctgccccctgcctataccaattctttcacacggggcgtgtactatcccgacaaggtgtttagaagctccgtgctgcactccacacaggatctgtttctgcctttcttttctaacgtgacctggttccacgccatccacgtgtccggcaccaatggcacaaagcggttcgacaatcccgtgctgccttttaacgatggcgtgtacttcgccagcaccgagaagtccaacatcatcagaggctggatctttggcaccacactggactctaagacacagagcctgctgatcgtgaacaatgccaccaacgtggtgatcaaggtgtgcgagttccagttttgtaatgatccattcctgggcgtgtactatcacaagaacaataagtcctggatggagtctgagtttcgcgtgtattctagcgccaacaattgcacatttgagtacgtgagccagcccttcctgatggacctggagggcaagcagggcaatttcaagaacctgagggagttcgtgtttaagaatatcgatggctacttcaagatctacagcaagcacaccccaatcaacctggtgcgcgacctgccacagggattctccgccctggagccactggtggatctgcccatcggcatcaacatcacccggtttcagacactgctggccctgcacagatcctacctgacaccaggcgactcctctagcggatggaccgcaggagctgccgcctactatgtgggctatctgcagccccggaccttcctgctgaagtacaacgagaatggcaccatcacagacgcagtggattgcgccctggaccccctgtctgagacaaagtgtacactgaagagctttaccgtggagaagggcatctatcagacaagcaatttcagggtgcagcctaccgagtccatcgtgcgctttcccaatatcacaaacctgtgcccttttggcgaggtgttcaacgccaccagattcgccagcgtgtacgcctggaatcggaagagaatctccaactgcgtggccgactattctgtgctgtacaactccgcctctttcagcacctttaagtgctatggcgtgtctcccacaaagctgaatgatctgtgctttaccaacgtgtacgccgatagcttcgtgatcaggggagacgaagtgagacagatcgcaccaggacagacaggaaagatcgcagactacaattataagctgcctgacgatttcaccggctgcgtgatcgcctggaactccaacaatctggattctaaagtgggcggcaactacaattatctgtacaggctgtttcgcaagtccaatctgaagccattcgagcgggacatctccacagagatctaccaggccggctctaccccctgcaatggcgtggagggctttaactgttatttccctctgcagtcttacggcttccagccaacaaacggcgtgggctatcagccctacagagtggtggtgctgtcctttgagctgctgcacgcaccagcaacagtgtgcggcccaaagaagtctaccaatctggtgaagaacaagtgcgtgaacttcaacttcaacggactgaccggcacaggcgtgctgaccgagagcaataagaagttcctgccttttcagcagttcggcagggacatcgcagataccacagacgccgtgcgcgaccctcagaccctggagatcctggacatcacaccatgcagcacgggcggcgtgtccgtgatcacaccaggcaccaatacatccaaccaggtggccgtgctgtatcaggacgtgaattgtaccgaggtgcccgtggcaatccacgcagatcagctgacccctacatggcgggtgtactctaccggcagcaacgtgttccagacaagagccggatgcctgatcggagcagagcacgtgaacaatagctatgagtgcgacatccctatcggcgccggcatctgtgccagctaccagacccagacaaactccccatctggagcaggctcccaccatcaccatcaccatcaccatcaccactga

SEQ ID NO: 4099 - DNA, 2148 bp, Artificial Sequence
  Description of Artificial Sequence: Synthetic polynucleotide
atgggcatcctgccaagcccaggaatgcccgccctgctgtctctggtgagcctgctgtccgtgctgctgatgggatgcgtggcagagacaggcacacagtgcgtgaacctgaccacaaggacccagctgccccctgcctataccaattctttcacacggggcgtgtactatcccgacaaggtgtttagaagctccgtgctgcactccacacaggatctgtttctgcctttcttttctaacgtgacctggttccacgccaaacacgtgtccggcaccaatggcacaaagcggttcgacaatcccgtgctgccttttaacgatggcgtgtacttcgccagcaccgagaagtccaacatcatcagaggctggatctttggcaccacactggactctaagacacagagcctgctgatcgtgaacaatgccaccaacgtggtgatcaaggtgtgcgagttccagttttgtaatgatccattcctgggcgtgtactatcacaagaacaataagtcctggatggagtctgagtttcgcgtgtattctagcgccaacaattgcacatttgagtaccatagccagcccttcctgatggacctggagggcaagcagggcaatttcaagaacctgagggagttcgtgtttaagaatatcgatggctacttcaagatctacagcaagcacaccccaatcaacctggtgcgcgacctgccacagggattctccgccctggagccactggtggatctgcccatcggcatcaacatcacccggtttcagacactgctggccctgcacagatcctacctgacaccaggcgactcctctagcggagaaaccgcaggagctgccgcctactatgtgggctatctgcagccccggaccttcctgctgaagtacaacgagaatggcaccatcacagacgcagtggattgcgccctggaccccctgtctgagacaaagtgtacactgaagagctttaccgtggagaagggcatctatcagacaagcaatttcagggtgcagcctaccgagtccatcgtgcgctttcccaatatcacaaacaaatgcccttttggcgaggtgttcaacgccaccagattcgccagcgtgtacgcctggaatcggaagagaatctccaactgcgtggccgactattctgtgctgtacaactccgcctctttcagcacctttaagtgctatggcgtgtctcccacaaagctgaatgatctgtgctttaccaacgtgtacgccgatagcttcgtgatcaggggagacgaagtgagacagatcgcaccaggacagacaggaaagatcgcagactacaattataagctgcctgacgatttcaccggctgcgtgatcgcctggaactccaacaatctggattctaaagtgggcggcaactacaattatctgtacaggctgtttcgcaagtccaatctgaagccattcgagcgggacatctccacagagatctaccaggccggctctaccccctgcaatggcgtggagggctttaactgttatttccctctgcagtcttacggcttccagccaacaaacggcccgggccaacagccctacagagtggtggtgctgtcctttgagctgctgcacgcaccagcaacagtgtgcggcccaaagaagtctaccaatctggtgaagaacaagtgcgtgaacttcaacttcaacggactgaccggcacaggcgtgctgaccgagagcaataagaagttcctgccttttcagcagttcggcagggacatcgcagataccacagacgccgtgcgcgaccctcagaccctggagatcctggacatcacaccatgcagcttcggcggcgtgtccgtgatcacaccaggcaccaatacatccaaccaggtggccgtgctgtatcaggacgtgaattgtaccgaggtgcccgatgcaatccacgcagatcagctgacccctacatggcgggtgtactctaccggcagcaacgtgttccagacaagagccggatgcctgatcggagcagagcacgtgaacaatagctatgagtgcgacatccctatcggcgccggcatctgtgccagctaccagacccagacaaactccccatctggagcaggctcccaccatcaccatcaccatcaccatcaccactga

SEQ ID NO: 4100 - DNA, 2148 bp, Artificial Sequence
  Description of Artificial Sequence: Synthetic polynucleotide
atgggcatcctgccaagcccaggaatgcccgccctgctgtctctggtgagcctgctgtccgtgctgctgatgggatgcgtggcagagacaggcacacagtgcgtgaacctgaccacaaggacccagctgccccctgcctataccaattctttcacacggggcgtgtactatcccgacaaggtgtttagaagctccgtgctgcactccacacaggatctgtttctgcctttcttttctaacgtgacctggttccacgcctaccacgtgtccggcaccaatggcacaaagcggttcgacaatcccgtgctgccttttaacgatggcgtgtacttcgccagcaccgagaagtccaacatcatcagaggctggatctttggcaccacactggactctaagacacagagcctgctgatcgtgaacaatgccaccaacgtggtgatcaaggtgtgcgagttccagttttgtaatgatccattcctgggcgtgtactatcacaagaacaataagtcctggatggagtctgagtttcgcgtgtattctagcgccaacaattgcacatttgagtaccatagccagcccttcctgatggacctggagggcaagcagggcaatttcaagaacctgagggagttcgtgtttaagaatatcgatggctacttcaagatctacagcaagcacaccccaatcaacctggtgcgcgacctgccacagggattctccgccctggagccactggtggatctgcccatcggcatcaacatcacccggtttcagacactgctggccctgcacagatcctacctgacaccaggcgactcctctagcggagaaaccgcaggagctgccgcctactatgtgggctatctgcagccccggaccttcctgctgaagtacaacgagaatggcaccatcacagacgcagtggattgcgccctggaccccctgtctgagacaaagtgtacactgaagagctttaccgtggagaagggcatctatcagacaagcaatttcagggtgcagcctaccgagtccatcgtgcgctttcccaatatcacaaacaaatgcccttttggcgaggtgttcaacgccaccagattcgccagcgtgtacgcctggaatcggaagagaatctccaactgcgtggccgactattctgtgctgtacaactccgcctctttcagcacctttaagtgctatggcgtgtctcccacaaagctgaatgatctgtgctttaccaacgtgtacgccgatagcttcgtgatcaggggagacgaagtgagacagatcgcaccaggacagacaggaaagatcgcagactacaattataagctgcctgacgatttcaccggctgcgtgatcgcctggaactccaacaatctggattctaaagtgggcggcaactacaattatctgtacaggctgtttcgcaagtccaatctgaagccattcgagcgggacatctccacagagatctaccaggccggctctaccccctgcaatggcgtggagggctttaactgttatttccctctgcagtcttacggcttccagccaacaaacggcccgggccaacagccctacagagtggtggtgctgtcctttgagctgctgcacgcaccagcaacagtgtgcggcccaaagaagtctaccaatctggtgaagaacaagtgcgtgaacttcaacttcaacggactgaccggcacaggcgtgctgaccgagagcaataagaagttcctgccttttcagcagttcggcagggacatcgcagataccacagacgccgtgcgcgaccctcagaccctggagatcctggacatcacaccatgcagcttcggcggcgtgtccgtgatcacaccaggcaccaatacatccaaccaggtggccgtgctgtatcaggacgtgaattgtaccgaggtgcccgatgcaatccacgcagatcagctgacccctacatggcgggtgtactctaccggcagcaacgtgttccagacaagagccggatgcctgatcggagcagagcacgtgaacaatagctatgagtgcgacatccctatcggcgccggcatctgtgccagctaccagacccagacaaactccccatctggagcaggctcccaccatcaccatcaccatcaccatcaccactga

SEQ ID NO: 4101 - DNA, 2148 bp, Artificial Sequence
  Description of Artificial Sequence: Synthetic polynucleotide
atgggcatcctgccaagcccaggaatgcccgccctgctgtctctggtgagcctgctgtccgtgctgctgatgggatgcgtggcagagacaggcacacagtgcgtgaacctgaccacaaggacccagctgccccctgcctataccaattctttcacacggggcgtgtactatcccgacaaggtgtttagaagctccgtgctgcactccacacaggatctgtttctgcctttcttttctaacgtgacctggttccacgccatccacgtgtccggcaccaatggcacaaagcggttcgacaatcccgtggtcccttttaacgatggcgtgtacttcgccagcaccgagaagtccaacatcatcagaggctggatctttggcaccacactggactctaagacacagagcctgctgatcgtgaacaatgccaccaacgtggtgatcaaggtgtgcgagttccagttttgtaatgatccattcctgggcgtgtactatcacaagaacaataagtcctggatggagtctgagtttcgcgtgtattctagcgccaacaattgcacatttgagtacgtgagccagcccttcctgatggacctggagggcaagcagggcaatttcaagaacctgagggagttcgtgtttaagaatatcgatggctacttcaagatctacagcaagcacaccccaatcaacctggtgcgcgacctgccacagggattctccgccctggagccactggtggatctgcccatcggcatcaacatcacccggtttcagacactgctggccctgcacagatcctacctgacaccaggcgactcctctagcggatggaccgcaggagctgccgcctactatgtgggctatctgcagccccggaccttcctgctgaagtacaacgagaatggcaccatcacagacgcagtggattgcgccctggaccccctgtctgagacaaagtgtacactgaagagctttaccgtggagaagggcatctatcagacaagcaatttcagggtgcagcctaccgagtccatcgtgcgctttcccaatatcacaaacctgtgcccttttggcgaggtgttcaacgccaccagattcgccagcgtgtacgcctggaatcggaagagaatctccaactgcgtggccgactattctgtgctgtacaactccgcctctttcagcacctttaagtgctatggcgtgtctcccacaaagctgaatgatctgtgctttaccaacgtgtacgccgatagcttcgtgatcaggggagacgaagtgagacagatcgcaccaggacagacaggaaagatcgcagactacaattataagctgcctgacgatttcaccggctgcgtgatcgcctggaactccaacaatctggattctaaagtgggcggcaactacaattatctgtacaggctgtttcgcaagtccaatctgaagccattcgagcgggacatctccacagagatctaccaggccggctctaccccctgcaatggcgtggagggctttaactgttatttccctctgcagtcttacggcttccagccaacaaacggcgtgggctatcagccctacagagtggtggtgctgtcctttgagctgctgcacgcaccagcaacagtgtgcggcccaaagaagtctaccaatctggtgaagaacaagtgcgtgaacttcaacttcaacggactgaccggcacaggcgtgctgaccgagagcaataagaagttcctgccttttcagcagttcggcagggacatcgcagataccacagacgccgtgcgcgaccctcagaccctggagatcctggacatcacaccatgcagcttcggcggcgtgtccgtgatcacaccaggcaccaatacatccaaccaggtggccgtgctgtatcaggacgtgaattgtaccgaggtgcccgtggcaatccacgcagatcagctgacccctacatggcgggtgtactctaccggcagcaacgtgttccagacaagagccggatgcctgatcggagcagagcacgtgaacaatagctatgagtgcgacatccctatcggcgccggcatctgtgccagctaccagacccagacaaactccccatctggagcaggctcccaccatcaccatcaccatcaccatcaccactga

SEQ ID NO: 4102 - DNA, 2148 bp, Artificial Sequence
  Description of Artificial Sequence: Synthetic polynucleotide
atgggcatcctgccaagcccaggaatgcccgccctgctgtctctggtgagcctgctgtccgtgctgctgatgggatgcgtggcagagacaggcacacagtgcgtgaacctgaccacaaggacccagctgccccctgcctataccaattctttcacacggggcgtgtactatcccgacaaggtgtttagaagctccgtgctgcactccacacaggatctgtttctgcctttcttttctaacgtgacctggttccacgccatccacgtgtccggcaccaatggcacaaagcggttcgacaatcccgtgctgccttttaacgatggcgtgtacttcgccagcaccgagaagtccaacatcatcagaggctggatctttggcaccacactggactctaagacacagagcctgctgatcgtgaacaatgccaccaacgtggtgatcaaggtgtgcgagttccagttttgtaatgatccattcctgggcgtgtactatcacaagaacaataagtcctggatggagtctgagtttcgcgtgtattctagcgccaacaattgcacatttgagtacgtgagccagcccttcctgatggacctggagggcaagcagggcaatttcaagaacctgagggagttcgtgtttaagaatatcgatggctacttcaagatctacagcaagcacaccccaatcaacctggtgcgcgacctgccacagggattctccgccctggagccactggtggatctgcccatcggcatcaacatcacccggtttcagacactgctggccctgcacagatcctacctgacaccaggcgactcctctagcggatggaccgcaggagctgccgcctactatgtgggctatctgcagccccggaccttcctgctgaagtacaacgagaatggcaccatcacagacgcagtggattgctcactggaccccctgtctgagacaaagtgtacactgaagagctttaccgtggagaagggcatctatcagacaagcaatttcagggtgcagcctaccgagtccatcgtgcgctttcccaatatcacaaacctgtgcccttttggcgaggtgttcaacgccaccagattcgccagcgtgtacgcctggaatcggaagagaatctccaactgcgtggccgactattctgtgctgtacaactccgcctctttcagcacctttaagtgctatggcgtgtctcccacaaagctgaatgatctgtgctttaccaacgtgtacgccgatagcttcgtgatcaggggagacgaagtgagacagatcgcaccaggacagacaggaaagatcgcagactacaattataagctgcctgacgatttcaccggctgcgtgatcgcctggaactccaacaatctggattctaaagtgggcggcaactacaattatctgtacaggctgtttcgcaagtccaatctgaagccattcgagcgggacatctccacagagatctaccaggccggctctaccccctgcaatggcgtggagggctttaactgttatttccctctgcagtcttacggcttccagccaacaaacggcgtgggctatcagccctacagagtggtggtgctgtcctttgagctgctgcacgcaccagcaacagtgtgcggcccaaagaagtctaccaatctggtgaagaacaagtgcgtgaacttcaacttcaacggactgaccggcacaggcgtgctgaccgagagcaataagaagttcctgccttttcagcagttcggcagggacatcgcagataccacagacgccgtgcgcgaccctcagaccctggagatcctggacatcacaccatgcagcttcggcggcgtgtccgtgatcacaccaggcaccaatacatccaaccaggtggccgtgctgtatcaggacgtgaattgtaccgaggtgcccgtggcaatccacgcagatcagctgacccctacatggcgggtgtactctaccggcagcaacgtgttccagacaagagccggatgcctgatcggagcagagcacgtgaacaatagctatgagtgcgacatccctatcggcgccggcatctgtgccagctaccagacccagacaaactccccatctggagcaggctcccaccatcaccatcaccatcaccatcaccactga

SEQ ID NO: 4103 - DNA, 2148 bp, Artificial Sequence
  Description of Artificial Sequence: Synthetic polynucleotide
atgggcatcctgccaagcccaggaatgcccgccctgctgtctctggtgagcctgctgtccgtgctgctgatgggatgcgtggcagagacaggcacacagtgcgtgaacctgaccacaaggacccagctgccccctgcctataccaattctttcacacggggcgtgtactatcccgacaaggtgtttagaagctccgtgctgcactccacacaggatctgtttctgcctttcttttctaacgtgacctggttccacgccatccacgtgtccggcaccaatggcacaaagcggttcgacaatcccgtgctgccttttaacgatggcgtgtacttcgccagcaccgagaagtccaacatcatcagaggctggatctttggcaccacactggactctaagacacagagcctgctgatcgtgaacaatgccaccaacgtggtgatcaaggtgtgcgagttccagttttgtaatgatccattcctgggcgtgtactatcacaagaacaataagtcctggatggagtctgagtttcgcgtgtattctagcgccaacaattgcacatttgagtacgtgagccagcccttcctgatggacctggagggcaagcagggcaatttcaagaacctgagggagttcgtgtttaagaatatcgatggctacttcaagatctacagcaagcacaccccaatcaacctggtgcgcgacctgccacagggattctccgccctggagccactggtggatctgcccatcggcatcaacatcacccggtttcagacactgctggccctgcacagatcctacctgacaccaggcgactcctctagcggatggaccgcaggagctgccgcctactatgtgggctatctgcagccccggaccttcctgctgaagtacaacgagaatggcaccatcacagacgcagtggattgcgccctggaccccctgtctgagacaaagtgtacactgaagagctttaccgtggagaagggcatctatcagacaagcaatttcagggtgcagcctaccgagtccatcgtgcgctttcccaatatcacaaacctgtgcccttttggcgaggtgttcaacgccaccagattcgccagcgtgtacgcctggaatcggaagagaatctccaactgcgtggccgactattctgtgctgtacaactccgcctctttcagcacctttaagtgctatggcgtgtctcccacaaagctgaatgatctgtgctttaccaacgtgtacgccgatagcttcgtgatcaggggagacgaagtgagacagatcgcaccaggacagacaggaaagatcgcagactacaattataagctgcctgacgatttcaccggctgcgtgatcgcctggaactccaacaatctggattctaaagtgggcggcaactacaattatctgtacaggctgtttcgcaagtccaatctgaagccattcgagcgggacatctccacagagatctaccaggccggctctaccccctgcaatggcgtggagggctttaactgttatttccctctgcagtcttacggcttccagccaacattcggcgtgggctatcagccctacagagtggtggtgctgtcctttgagctgctgcacgcaccagcaacagtgtgcggcccaaagaagtctaccaatctggtgaagaacaagtgcgtgaacttcaacttcaacggactgaccggcacaggcgtgctgaccgagagcaataagaagttcctgccttttcagcagttcggcagggacatcgcagataccacagacgccgtgcgcgaccctcagaccctggagatcctggacatcacaccatgcagcttcggcggcgtgtccgtgatcacaccaggcaccaatacatccaaccaggtggccgtgctgtatcaggacgtgaattgtaccgaggtgcccgtggcaatccacgcagatcagctgacccctacatggcgggtgtactctaccggcagcaacgtgttccagacaagagccggatgcctgatcggagcagagcacgtgaacaatagctatgagtgcgacatccctatcggcgccggcatctgtgccagctaccagacccagacaaactccccatctggagcaggctcccaccatcaccatcaccatcaccatcaccactga

SEQ ID NO: 4104 - DNA, 2148 bp, Artificial Sequence
  Description of Artificial Sequence: Synthetic polynucleotide
atgggcatcctgccaagcccaggaatgcccgccctgctgtctctggtgagcctgctgtccgtgctgctgatgggatgcgtggcagagacaggcacacagtgcgtgaacctgaccacaaggacccagctgccccctgcctataccaattctttcacacggggcgtgtactatcccgacaaggtgtttagaagctccgtgctgcactccacacaggatctgtttctgcctttcttttctaacgtgacctggttccacgccatccacgtgtccggcaccaatggcacaaagcggttcgacaatcccgtgctgccttttaacgatggcgtgtacttcgccagcaccgagaagtccaacatcatcagaggctggatctttggcaccacactggactctaagacacagagcctgctgatcgtgaacaatgccaccaacgtggtgatcaaggtgtgcgagttccagttttacaatgatccattcctgggcgtgtactatcacaagaacaataagtcctggatggagtctgagtttcgcgtgtattctagcgccaacaattgcacatttgagtacgtgagccagcccttcctgatggacctggagggcaagcagggcaatttcaagaacctgagggagttcgtgtttaagaatatcgatggctacttcaagatctacagcaagcacaccccaatcaacctggtgcgcgacctgccacagggattctccgccctggagccactggtggatctgcccatcggcatcaacatcacccggtttcagacactgctggccctgcacagatcctacctgacaccaggcgactcctctagcggatggaccgcaggagctgccgcctactatgtgggctatctgcagccccggaccttcctgctgaagtacaacgagaatggcaccatcacagacgcagtggattgcgccctggaccccctgtctgagacaaagtgtacactgaagagctttaccgtggagaagggcatctatcagacaagcaatttcagggtgcagcctaccgagtccatcgtgcgctttcccaatatcacaaacctgtgcccttttggcgaggtgttcaacgccaccagattcgccagcgtgtacgcctggaatcggaagagaatctccaactgcgtggccgactattctgtgctgtacaactccgcctctttcagcacctttaagtgctatggcgtgtctcccacaaagctgaatgatctgtgctttaccaacgtgtacgccgatagcttcgtgatcaggggagacgaagtgagacagatcgcaccaggacagacaggaaagatcgcagactacaattataagctgcctgacgatttcaccggctgcgtgatcgcctggaactccaacaatctggattctaaagtgggcggcaactacaattatctgtacaggctgtttcgcaagtccaatctgaagccattcgagcgggacatctccacagagatctaccaggccggctctaccccctgcaatggcgtggagggctttaactgttatttccctctgcagtcttacggcttccagccaacaaacggcgtgggctatcagccctacagagtggtggtgctgtcctttgagctgctgcacgcaccagcaacagtgtgcggcccaaagaagtctaccaatctggtgaagaacaagtgcgtgaacttcaacttcaacggactgaccggcacaggcgtgctgaccgagagcaataagaagttcctgccttttcagcagttcggcagggacatcgcagataccacagacgccgtgcgcgaccctcagaccctggagatcctggacatcacaccatgcagcttcggcggcgtgtccgtgatcacaccaggcaccaatacatccaaccaggtggccgtgctgtatcaggacgtgaattgtaccgaggtgcccgtggcaatccacgcagatcagctgacccctacatggcgggtgtactctaccggcagcaacgtgttccagacaagagccggatgcctgatcggagcagagcacgtgaacaatagctatgagtgcgacatccctatcggcgccggcatctgtgccagctaccagacccagacaaactccccatctggagcaggctcccaccatcaccatcaccatcaccatcaccactga

SEQ ID NO: 4105 - DNA, 2148 bp, Artificial Sequence
  Description of Artificial Sequence: Synthetic polynucleotide
atgggcatcctgccaagcccaggaatgcccgccctgctgtctctggtgagcctgctgtccgtgctgctgatgggatgcgtggcagagacaggcacacagtgcgtgaacctgaccacaaggacccagctgccccctgcctataccaattctttcacacggggcgtgtactatcccgacaaggtgtttagaagctccgtgctgcactccacacaggatctgtttctgcctttcttttctaacgtgacctggttccacgccatccacgtgtccggcaccaatggcacaaagcggttcgacaatcccgtgctgccttttaacgatggcgtgtacttcgccagcaccgagaagtccaacatcatcagaggctggatctttggcaccacactggactctaagacacagagcctgctgatcgtgaacaatgccaccaacgtggtgatcaaggtgtgcgagttccagttttgtaatgatccattcctgggcgtgtactatcacaagaacaataagtcctggatggagtctgagtttcgcgtgtattctagcgccaacaattgcacatttgagtacgtgagccagcccttcctgatggacctggagggcaagcagggcaatttcaagaacctgagggagttcgtgtttaagaatatcgatggctacttcaagatctacagcaagcacaccccaatcaacctggtgcgcgacctgccacagggattctccgccctggagccactggtggatctgcccatcggcatcaacatcacccggtttcagacactgctggccctgcacagatcctacctgacaccaggcgactcctctagcggatggaccgcaggagctgccgcctactatgtgggctatctgcagccccggaccttcctgctgaagtacaacgagaatggcaccatcacagacgcagtggattgcgccctggaccccctgtctgagacaaagtgtacactgaagagctttaccgtggagaagggcatctatcagacaagcaatttcagggtgcagcctaccgagtccatcgtgcgctttcccaatatcacaaacctgtgcccttttggcgaggtgttcaacgccaccagattcgccagcgtgtacgcctggaatcggaagagaatctccaactgcgtggccgactattctgtgctgtacaactccgcctctttcagcacctttaagtgctatggcgtgtctcccacaaagctgaatgatctgtgctttaccaacgtgtacgccgatagcttcgtgatcaggggagacgaagtgagacagatcgcaccaggacagacaggaaagatcgcagactacaattataagctgcctgacgatttcaccggctgcgtgatcgcctggaactccaacaatctggattctaaagtgggcggcaactacaattatctgtacaggctgtttcgcaagtccaatctgaagccattcgagcgggacatctccacagagatctaccaggccggctctaccccctgcaatggcgtggagggctttaactgttatttccctctgcagtcttacggcttccagccaacaaacggcgtgggctatcagccctacagagtggtggtgctgtcctttgagctgctgcacgcaccagcaacagtgtgcggcccaaagaagtctaccaatctggtgaagaacaagtgcgtgaacttcaacttcaacggactgaccggcacaggcgtgctgaccgagagcaataagaagttcctgccttttcagcagttcggcagggacatcgcagataccacagacgccgtgcgcgaccctcagaccctggagatcctggacatcacaccatgcagcttcggcggcgtgtccgtgatcacaccaggcaccaatacatccaaccaggtggccgtgctgtatcaggacgtgaattgtaccgaggtgcccgtggcaatccacgcagatcagctgacccctacatggcgggtgtactctaccggcagcaacgtgttccagacaagagccggatgcctgatcggagcagagcacgtgaacaatagctatgagtgcgacatccctatcggcgccggcatctgtgccacgtaccagacccagacaaactccccatctggagcaggctcccaccatcaccatcaccatcaccatcaccactga

SEQ ID NO: 4106 - DNA, 2148 bp, Artificial Sequence
  Description of Artificial Sequence: Synthetic polynucleotide
atgggcatcctgccaagcccaggaatgcccgccctgctgtctctggtgagcctgctgtccgtgctgctgatgggatgcgtggcagagacaggcacacagtgcgtgaacctgaccacaaggacccagctgccccctgcctataccaattctttcacacggggcgtgtactatcccgacaaggtgtttagaagctccgtgctgcactccacacaggatctgtttctgcctttcttttctaacgtgacctggttccacgccatccacgtgtccggcaccaatggcacaaagcggttcgacaatcccgtgctgccttttaacgatggcgtgtacttcgccagcaccgagaagtccaacatcatcagaggctggatctttggcaccacactggactctaagacacagagcctgctgatcgtgaacaatgccaccaacgtggtgatcaaggtgtgcgagttccagttttgtaatgatccattcctgggcgtgtactatcacaagaacaataagtcctggatggagtctgagtttcgcgtgtattctagcgccaacaattgcacatttgagtacgtgagccagcccttcctgatggacctggagggcaagcagggcaatttcaagaacctgagggagttcgtgtttaagaatatcgatggctacttcaagatctacagcaagcacaccccaatcaacctggtgcgcgacctgccacagggattctccgccctggagccactggtggatctgcccatcggcatcaacatcacccggtttcagacactgctggccctgcacagatcctacctgacaccaggcgactcctctagcggatggaccgcaggagctgccgcctactatgtgggctatctgcagccccggaccttcctgctgaagtacaacgagaatggcaccatcacagacgcagtggattgcgccctggaccccctgtctgagacaaagtgtacactgaagagctttaccgtggagaagggcatctatcagacaagcaatttcagggtgcagcctaccgagtccatcgtgcgctttcccaatatcacaaacctgtgcccttttggcgaggtgttcaacgccaccagattcgccagcgtgtacgcctggaatcggaagagaatctccaactgcgtggccgactattctgtgctgtacaactccgcctctttcagcacctttaagtgctatggcgtgtctcccacaaagctgaatgatctgtgctttaccaacgtgtacgccgatagcttcgtgatcaggggagacgaagtgagacagatcgcaccaggacagacaggaaagatcgcagactacaattataagctgcctgacgatttcaccggctgcgtgatcgcctggaactccaacaatctggattctaaagtgggcggcaactacaattatctgtacaggctgtttcgcaagtccaatctgaagccattcgagcgggacatctccacagagatctaccaggccggctctaccccctgcaatggcgtggagggctttaactgttatttccctctgcagtcttacggcttccagccaacaaacggcgtgggctatcagccctacagagtggtggtgctgtcctttgagctgctgcacgcaccagcaacagtgtgcggcccaaagaagtctaccaatctggtgaagaacaagtgcgtgaacttcaacttcaacggactgaccggcacaggctttctgaccgagagcaataagaagttcctgccttttcagcagttcggcagggacatcgcagataccacagacgccgtgcgcgaccctcagaccctggagatcctggacatcacaccatgcagcttcggcggcgtgtccgtgatcacaccaggcaccaatacatccaaccaggtggccgtgctgtatcaggacgtgaattgtaccgaggtgcccgtggcaatccacgcagatcagctgacccctacatggcgggtgtactctaccggcagcaacgtgttccagacaagagccggatgcctgatcggagcagagcacgtgaacaatagctatgagtgcgacatccctatcggcgccggcatctgtgccagctaccagacccagacaaactccccatctggagcaggctcccaccatcaccatcaccatcaccatcaccactga

SEQ ID NO: 4107 - DNA, 2148 bp, Artificial Sequence
  Description of Artificial Sequence: Synthetic polynucleotide
atgggcatcctgccaagcccaggaatgcccgccctgctgtctctggtgagcctgctgtccgtgctgctgatgggatgcgtggcagagacaggcacacagtgcgtgaacctgaccacaaggacccagctgccccctgcctataccaattctttcacacggggcgtgtactatcccgacaaggtgtttagaagctccgtgctgcactccacacaggatctgtttctgcctttcttttctaacgtgacctggttccacgccatccacgtgtccggcaccaatggcacaaagcggttcgacaatcccgtgctgccttttaacgatggcgtgtacttcgccagcaccgagaagtccaacatcatcagaggctggatctttggcaccacactggactctaagacacagagcctgctgatcgtgaacaatgccaccaacgtggtgatcaaggtgtgcgagttccagttttgtaatgatccattcctgggcgtgtactatcacaagaacaataagtcctggatggagtctgagtttcgcgtgtattctagcgccaacaattgcacatttgagtacgtgagccagcccttcctgatggacctggagggcaagcagggcaatttcaagaacctgagggagttcgtgtttaagaatatcgatggctacttcaagatctacagccgacacaccccaatcaacctggtgcgcgacctgccacagggattctccgccctggagccactggtggatctgcccatcggcatcaacatcacccggtttcagacactgctggccctgcacagatcctacctgacaccaggcgactcctctagcggatggaccgcaggagctgccgcctactatgtgggctatctgcagccccggaccttcctgctgaagtacaacgagaatggcaccatcacagacgcagtggattgcgccctggaccccctgtctgagacaaagtgtacactgaagagctttaccgtggagaagggcatctatcagacaagcaatttcagggtgcagcctaccgagtccatcgtgcgctttcccaatatcacaaacctgtgcccttttggcgaggtgttcaacgccaccagattcgccagcgtgtacgcctggaatcggaagagaatctccaactgcgtggccgactattctgtgctgtacaactccgcctctttcagcacctttaagtgctatggcgtgtctcccacaaagctgaatgatctgtgctttaccaacgtgtacgccgatagcttcgtgatcaggggagacgaagtgagacagatcgcaccaggacagacaggaaagatcgcagactacaattataagctgcctgacgatttcaccggctgcgtgatcgcctggaactccaacaatctggattctaaagtgggcggcaactacaattatctgtacaggctgtttcgcaagtccaatctgaagccattcgagcgggacatctccacagagatctaccaggccggctctaccccctgcaatggcgtggagggctttaactgttatttccctctgcagtcttacggcttccagccaacaaacggcgtgggctatcagccctacagagtggtggtgctgtcctttgagctgctgcacgcaccagcaacagtgtgcggcccaaagaagtctaccaatctggtgaagaacaagtgcgtgaacttcaacttcaacggactgaccggcacaggcgtgctgaccgagagcaataagaagttcctgccttttcagcagttcggcagggacatcgcagataccacagacgccgtgcgcgaccctcagaccctggagatcctggacatcacaccatgcagcttcggcggcgtgtccgtgatcacaccaggcaccaatacatccaaccaggtggccgtgctgtatcaggacgtgaattgtaccgaggtgcccgtggcaatccacgcagatcagctgacccctacatggcgggtgtactctaccggcagcaacgtgttccagacaagagccggatgcctgatcggagcagagcacgtgaacaatagctatgagtgcgacatccctatcggcgccggcatctgtgccagctaccagacccagacaaactccccatctggagcaggctcccaccatcaccatcaccatcaccatcaccactga

SEQ ID NO: 4108 - DNA, 2148 bp, Artificial Sequence
  Description of Artificial Sequence: Synthetic polynucleotide
atgggcatcctgccaagcccaggaatgcccgccctgctgtctctggtgagcctgctgtccgtgctgctgatgggatgcgtggcagagacaggcacacagtgcgtgaacctgaccacaaggacccagctgccccctgcctataccaattctttcacacggggcgtgtactatcccgacaaggtgtttagaagctccgtgctgcactccacacaggatctgtttctgcctttcttttctaacgtgacctggttccacgccatccacgtgtccggcaccaatggcacaaagcggttcgacaatcccgtgctgccttttaacgatggcgtgtacttcgccagcaccgagaagtccaacatcatcagaggctggatctttggcaccacactggactctaagacacagagcctgctgatcgtgaacaatgccaccaacgtggtgatcaaggtgtgcgagttccagttttgtaatgatccattcctgggcgtgtactatcacaagaacaataagtcctggatggagtctgagtttcgcgtgtattctagcgccaacaattgcacatttgagtaccatagccagcccttcctgatggacctggagggcaagcagggcaatttcaagaacctgagggagttcgtgtttaagaatatcgatggctacttcaagatctacagcaagcacaccccaatcaacctggtgcgcgacctgccacagggattctccgccctggagccactggtggatctgcccatcggcatcaacatcacccggtttcagacactgctggccctgcacagatcctacctgacaccaggcgactcctctagcggatggaccgcaggagctgccgcctactatgtgggctatctgcagccccggaccttcctgctgaagtacaacgagaatggcaccatcacagacgcagtggattgcgccctggaccccctgtctgagacaaagtgtacactgaagagctttaccgtggagaagggcatctatcagacaagcaatttcagggtgcagcctaccgagtccatcgtgcgctttcccaatatcacaaacctgtgcccttttggcgaggtgttcaacgccaccagattcgccagcgtgtacgcctggaatcggaagagaatctccaactgcgtggccgactattctgtgctgtacaactccgcctctttcagcacctttaagtgctatggcgtgtctcccacaaagctgaatgatctgtgctttaccaacgtgtacgccgatagcttcgtgatcaggggagacgaagtgagacagatcgcaccaggacagacaggaaagatcgcagactacaattataagctgcctgacgatttcaccggctgcgtgatcgcctggaactccaacaatctggattctaaagtgggcggcaactacaattatctgtacaggctgtttcgcaagtccaatctgaagccattcgagcgggacatctccacagagatctaccaggccggctctaccccctgcaatggcgtggagggctttaactgttatttccctctgcagtcttacggcttccagccaacaaacggcgtgggctatcagccctacagagtggtggtgctgtcctttgagctgctgcacgcaccagcaacagtgtgcggcccaaagaagtctaccaatctggtgaagaacaagtgcgtgaacttcaacttcaacggactgaccggcacaggcgtgctgaccgagagcaataagaagttcctgccttttcagcagttcggcagggacatcgcagataccacagacgccgtgcgcgaccctcagaccctggagatcctggacatcacaccatgcagcttcggcggcgtgtccgtgatcacaccaggcaccaatacatccaaccaggtggccgtgctgtatcaggacgtgaattgtaccgaggtgcccgtggcaatccacgcagatcagctgacccctacatggcgggtgtactctaccggcagcaacgtgttccagacaagagccggatgcctgatcggagcagagcacgtgaacaatagctatgagtgcgacatccctatcggcgccggcatctgtgccagctaccagacccagacaaactccccatctggagcaggctcccaccatcaccatcaccatcaccatcaccactga

SEQ ID NO: 4109 - DNA, 2148 bp, Artificial Sequence
  Description of Artificial Sequence: Synthetic polynucleotide
atgggcatcctgccaagcccaggaatgcccgccctgctgtctctggtgagcctgctgtccgtgctgctgatgggatgcgtggcagagacaggcacacagtgcgtgaacctgaccacaaggacccagctgccccctgcctataccaattctttcacacggggcatctactatcccgacaaggtgtttagaagctccgtgctgcactccacacaggatctgtttctgcctttcttttctaacgtgacctggttccacgccatccacggttccggcaccaatggcacaaagcggttcgacaatcccgtgctgccttttaacgatggcgtgtactcggccgctatagagaagtccaacatcatcagaggctggatctttggcaccacactggactctaagacacagagcctgctgatcgtgaacaatgccaccaacgtggtgatcaaggtgtgcgagttccagttttgtaatgatccattcctgggcgtgtactatcacaagaacaataagtcctggatggagtctgagtttcgcgtgtattctagcgccaacaattgcacatttgagtacgtgagccagcccttcctgatggacctggagggcaagcagggcaatttcaagaacctgagggagttcgtgtttaagaatatcgatggctacttcaagatctacagcaagcacaccccaatcaacctggtgcgcgacctgccacagggattctccccgctggagccactggtggatctgcccatcggcatcaacatcacccggtttcttacagttctggccctgcacagatcctacctgacaccaggcgactcctctagcggatggaccgcaggagctgccgcctactatgtgggctatctgcagccccggaccttcctgctgaagtacaacgagaatggcaccatcacagacgcagtggattgcgccctggaccccctgtctgagacaaagtgtacactgaagagctttaccgtggagaagggcatctatcagacaagcaatttcagggtgcagcctaccgagtccatcgtgcgctttcccaatatcacaaacctgtgcccttttggcgaggtgttcaacgccaccagattcgccagcgtgtacgcctggaatcggaagagaatctccaactgcgtggccgactattctgtgctgtacaactccgcctctttcagcacctttaagtgctatggcgtgtctcccacaaagctgaatgatctgtgctttaccaacgtgtacgccgatagcttcgtgatcaggggagacgaagtgagacagatcgcaccaggacagacaggaaagatcgcagactacaattataagctgcctgacgatttcaccggctgcgtgatcgcctggaactccaacaatctggattctaaagtgggcggcaactacaattatctgtacaggctgtttcgcaagtccaatctgaagccattcgagcgggacatctccacagagatctaccaggccggctctaccccctgcaatggcgtggagggctttaactgttatttccctctgcagtcttacggcttccagccaacaaacggcgtgggctatcagccctacagagtggtggtgctgtcctttgagctgctgcacgcaccagcaacagtgtgcggcccaaagaagtctaccaatctggtgaagaacaagtgcgtgaacttcaacttcaacggactgaccggcacaggcgtgctgaccgagagcaataagaagttcctgccttttcagcagttcggcagggacatcgcagataccacagacgccgtgcgcgaccctcagaccctggagatcctggacatcacaccatgcagcttcggcggcgtgtccgtgatcacaccaggcaccaatacatccaaccaggtggccgtgctgtatcaggacgtgaattgtaccgaggtgcccgtggcaatccacgcagatcagctgacccctacatggcgggtgtactctaccggcagcaacgtgttccagacaagagccggatgcctgatcggagcagagcacgtgaacaatagctatgagtgcgacatccctatcggcgccggcatctgtgccagctaccagacccagacaaactccccatctggagcaggctcccaccatcaccatcaccatcaccatcaccactga

SEQ ID NO: 4110 - DNA, 2148 bp, Artificial Sequence
  Description of Artificial Sequence: Synthetic polynucleotide
atgggcatcctgccaagcccaggaatgcccgccctgctgtctctggtgagcctgctgtccgtgctgctgatgggatgcgtggcagagacaggcacacagtgcgtgaacctgaccacaaggacccagctgccccctgcctataccaattctttcacacggggcgtgtactatcccgacaaggtgtttagaagctccgtgctgcactccacacaggatctgtttctgcctttcttttctaacgtgacctggttccacgccatccacgtgtccggcaccaatggcacaaagcggttcgacaatcccgtgctgccttttaacgatggcgtgtacttcgccagcaccgagaagtccaacatcatcagaggctggatctttggcaccacactggactctaagacacagagcctgctgatcgtgaacaatgccaccaacgtggtgatcaaggtgtgcgagttccagttttgtaatgatccattcctgggcgtgtactatcacaagaacaataagtcctggatggagtctgagtttcgcgtgtattctagcgccaacaattgcacatttgagtacgtgagccagcccttcctgatggacctggagggcaagcagggcaatttcaagaacctgagggagttcgtgtttaagaatatcgatggctacttcaagatctacagcaagcacaccccaatcaacctggtgcgcgacctgccacagggattctccgccctggagccactggtggatctgcccatcggcatcaacatcacccggtttcagacactgctggccctgcacagatcctacctgacaccaggcgactcctctagcggatggaccgcaggagctgccgcctactatgtgggctatctgcagccccggaccttcctgctgaagtacaacgagaatggcaccatcacagacgcagtggattgcgccctggaccccctgtctgagacaaagtgtacactgaagagctttaccgtggagaagggcatctatcagacaagcaatttcagggtgcagcctaccgagtccatcgtgcgctttcccaatatcacaaacctgtgcccttttggcgaggtgttcaacgccaccagattcgccagcgtgtacgcctggaatcggaagagaatctccaactgcgtggccgactattctgtgctgtacaactccgcctctttcagcacctttaagtgctatggcgtgtctcccacaaagctgaatgatctgtgctttaccaacgtgtacgccgatagcttcgtgatcaggggagacgaagtgagacagatcgcaccaggacagacaggaaagatcgcagactacaattataagctgcctgacgatttcaccggctgcgtgatcgcctggaactccaacaatctggattctaaagtgggcggcaactacaattatctgtacaggctgtttcgcaagtccaatctgaagccattcgagcgggacatctccacagagatctaccaggccggctctaccccctgcaatggcgtggagggctttaactgttatttccctctgcagtcttacggcttccagccaacaaacggcgtgggctatcagccctacagagtggtggtgctgtcctttgagctgctgcacgcaccagcaacagtgtgcggcccaaagaagtctaccaatctggtgaagaacaagtgcgtgaacttcaacttcaacggactgaccggcacaggcgtgctgaccgagagcaataagaagttcctgccttttcagcagttcggcagggacatcgcagataccacagacgccgtgcgcgaccctcagacccctgagatcctggacatcacaccatgcagcttcggcggcgtgtccgtgatcacaccaggcaccaatacatccaaccaggtggccgtgctgtatcaggacgtgaattgtaccgaggtgcccgtggcaatccacgcagatcagctgacccctacatggcgggtgtactctaccggcagcaacgtgttccagacaagagccggatgcctgatcggagcagagcacgtgaacaatagctatgagtgcgacatccctatcggcgccggcatctgtgccagctaccagacccagacaaactccccatctggagcaggctcccaccatcaccatcaccatcaccatcaccactga

SEQ ID NO: 4111 - DNA, 2148 bp, Artificial Sequence
  Description of Artificial Sequence: Synthetic polynucleotide
atgggcatcctgccaagcccaggaatgcccgccctgctgtctctggtgagcctgctgtccgtgctgctgatgggatgcgtggcagagacaggcacacagtgcgtgaacctgaccacaaggacccagctgccccctgcctataccaattctttcacacggggcgtgtactatcccgacaaggtgtttagaagctccgtgctgcactccacacaggatctgtttctgcctttcttttctaacgtgacctggttccacgccatccacgtgtccggcaccaatggcacaaagcggttcgacaatcccgtgctgccttttaacgatggcgtgtacttcgccagcaccgagaagtccaacatcatcagaggctggatctttggcaccacactggactctaagacacagagcctgctgatcgtgaacaatgccaccaacgtggtgatcaaggtgtgcgagttccagttttgtaatgatccattcctgggcgtgtactatcacaagaacaataagtcctggatggagtctgagtttcgcgtgtattctagcgccaacaattgcacatttgagtacgtgagccagcccttcctgatggacctggagggcaagcagggcaatttcaagaacctgagggagttcgtgtttaagaatatcgatggctacttcaagatctacagcaagcacaccccaatcaacctggtgcgcgacctgccacagggattctccgccctggagccactggtggatctgcccatcggcatcaacatcacccggtttcagacactgctggccctgcacagatcctacctgacaccaggcgactcctctagcggatggaccgcaggagctgccgcctactatgtgggctatctgcagccccggaccttcctgctgaagtacaacgagaatggcaccatcacagacgcagtggattgcgccctggaccccctgtctgagacaaagtgtacactgaagagctttaccgtggagaagggcatctatcagacaagcaatttcagggtgcagcctaccgagtccatcgtgcgctttcccaatatcacaaacctgtgcccttttggcgaggtgttcaacgccaccagattcgccagcgtgtacgcctggaatcggaagagaatctccaactgcgtggccgactattctgtgctgtacaactccgcctctttcagcacctttaagtgctatggcgtgtctcccacaaagctgaatgatctgtgctttaccaacgtgtacgccgatagcttcgtgatcaggggagacgaagtgagacagatcgcaccaggacagacaggaaagatcgcagactacaattataagctgcctgacgatttcaccggctgcgtgatcgcctggaactccaacaatctggattctaaagtgggcggcaactacaattatctgtacaggctgtttcgcaagtccaatctgaagccattcgagcgggacatctccacagagatctaccaggccggctctaccccctgcaatggcgtggagggctttaactgttatttccctctgcagtcttacggcttccagccaacaaacggcgtgggctatcagccctacagagtggtggtgctgtcctttgaggacctgcacgcaccagcaacagtgtgcggcccaaagaagtctaccaatctggtgaagaacaagtgcgtgaacttcaacttcaacggactgaccggcacaggcgtgctgaccgagagcaataagaagttcctgccttttcagcagttcggcagggacatcgcagataccacagacgccgtgcgcgaccctcagaccctggagatcctggacatcacaccatgcagcttcggcggcgtgtccgtgatcacaccaggcaccaatacatccaaccaggtggccgtgctgtatcaggacgtgaattgtaccgaggtgcccgtggcaatccacgcagatcagctgacccctacatggcgggtgtactctaccggcagcaacgtgttccagacaagagccggatgcctgatcggagcagagcacgtgaacaatagctatgagtgcgacatccctatcggcgccggcatctgtgccagctaccagacccagacaaactccccatctggagcaggctcccaccatcaccatcaccatcaccatcaccactga

SEQ ID NO: 4112 - DNA, 2148 bp, Artificial Sequence
  Description of Artificial Sequence: Synthetic polynucleotide
atgggcatcctgccaagcccaggaatgcccgccctgctgtctctggtgagcctgctgtccgtgctgctgatgggatgcgtggcagagacaggcacacagtgcgtgaacctgaccacaaggacccagctgccccctgcctataccaattctttcacacggggcgtgtactatcccgacaaggtgtttagaagctccgtgctgcactccacacaggatctgtttctgcctttcttttctaacgtgacctggttccacgccatccacgtgtccggcaccaatggcacaaagcggttcgacaatcccgtgctgccttttaacgatggcgtgtacttcgccagcaccgagaagtccaacatcatcagaggctggatctttggcaccacactggactctaagacacagagcctgctgatcgtgaacaatgccaccaacgtggtgatcaaggtgtgcgagttccagttttgtaatgatccattcctgggcgtgtactatcacaagaacaataagtcctggatggagtctgagtttcgcgtgtattctagcgccaacaattgcacatttgagtacgtgagccagcccttcctgatggacctggagggcaagcagggcaatttcaagaacctgagggagttcgtgtttaagaatatcgatggctacttcaagatctacagcaagcacaccccaatcaacctggtgcgcgacctgccacagggattctccgccctggagccactggtggatctgcccatcggcatcaacatcacccggtttcagacactgctggccctgcacagatcctacctgacaccaggcgactcctctagcggatggaccgcaggagctgccgcctactatgtgggctatctgcagccccggaccttcctgctgaagtacaacgagaatggcaccatcacagacgcagtggattgcgccctggaccccctgtctgagacaaagtgtacactgaagagctttaccgtggagaagggcatctatcagacaagcaatttcagggtgcagcctaccgagtccatcgtgcgctttcccaatatcacaaacctgtgcccttttggcgaggtgttcaacgccaccagattcgccagcgtgtacgcctggaatcggaagagaatctccaactgcgtggccgactattctgtgctgtacaactccgcctctttcagcacctttaagtgctatggcgtgtctcccacaaagctgaatgatctgtgctttaccaacgtgtacgccgatagcttcgtgatcaggggagacgaagtgagacagatcgcaccaggacagacaggaaagatcgcagactacaattataagctgcctgacgatttcaccggctgcgtgatcgcctggaactccaacaatctggattctaaagtgggcggcaactacaattatctgtacaggctgtttcgcaagtccaatctgaagccattcgagcgggacatctccacagagatctaccaggccggctctaccccctgcaatggcgtggagggctttaactgttatttccctctgcagtcttacggcttccagccaacaaacggcgtgggctatcagccctacagagtggtggtgctgtcctttgagctgctgcacgcaccagcaacagtgtgcggcccaaagaagtctaccaatctggtgaagaacaagtgcgtgaacttcaacttcaacggactgaccggcacaggcgtgctgaccgagagcaataagaagttcctgccttttcagcagttcggcagggacatcgcagataccacagacgccgtgcgcgaccctcagaccctggagatcctggacatcacaccatgcagcttcggcggcgtgtccgtgatcacaccaggcaccaatacatccaaccaggtggccgtgctgtatcaggacgtgaattgtaccgaggtgcaagtggcaatccacgcagatcagctgacccctacatggcgggtgtactctaccggcagcaacgtgttccagacaagagccggatgcctgatcggagcagagcacgtgaacaatagctatgagtgcgacatccctatcggcgccggcatctgtgccagctaccagacccagacaaactccccatctggagcaggctcccaccatcaccatcaccatcaccatcaccactga

SEQ ID NO: 4113 - DNA, 2148 bp, Artificial Sequence
  Description of Artificial Sequence: Synthetic polynucleotide
atgggcatcctgccaagcccaggaatgcccgccctgctgtctctggtgagcctgctgtccgtgctgctgatgggatgcgtggcagagacaggcacacagtgcgtgaacctgaccacaaggacccagctgccccctgcctataccaattctttcacacggggcgtgtactatcccgacaaggtgtttagaagctccgtgctgcactccacacaggatctgtttctgcctttcttttctaacgtgacctggttccacgccatccacgtgtccggcaccaatggcacaaagcggttcgacaatcccgtgctgccttttaacgatggcgtgtacttcgccagcaccgagaagtccaacatcatcagaggctggatctttggcaccacactggactctaagacacagagcctgctgatcgtgaacaatgccaccaacgtggtgatcaaggtgtgcgagttccagttttgtaatgatccattcctgggcgtgtactatcacaagaacaataagtcctggatggagtctgagtttcgcgtgtattctagcgccaacaattgcacatttgagtacgtgagccagcccttcctgatggacctggagggcaagcagggcaatttcaagaacctgagggagttcgtgtttaagaatatcgatggctacttcaagatctacagcaagcacaccccaatcaacctggtgcgcgacctgccacagggattctccgccctggagccactggtggatctgcccatcggcatcaacatcacccggtttcagacactgctggccctgcacagatcctacctgacaccaggcgactcctctagcggatggaccgcaggagctgccgcctactatgtgggctatctgcagccccggaccttcctgctgaagtacaacgagaatggcaccatcacagacgcagtggattgcgccctggaccccctgtctgagacaaagtgtacactgaagagctttaccgtggagaagggcatctatcagacaactaatttcagggtgcagcctaccgagtccatcgtgcgctttcccaatatcacaaacctgtgcccttttggcgaggtgttcaacgccaccagattcgccagcgtgtacgcctggaatcggaagagaatctccaactgcgtggccgactattctgtgctgtacaactccgcctctttcagcacctttaagtgctatggcgtgtctcccacaaagctgaatgatctgtgctttaccaacgtgtacgccgatagcttcgtgatcaggggagacgaagtgagacagatcgcaccaggacagacaggaaagatcgcagactacaattataagctgcctgacgatttcaccggctgcgtgatcgcctggaactccaacaatctggattctaaagtgggcggcaactacaattatctgtacaggctgtttcgcaagtccaatctgaagccattcgagcgggacatctccacagagatctaccaggccggctctaccccctgcaatggcgtggagggctttaactgttatttccctctgcagtcttacggcttccagccaacaaacggcgtgggctatcagccctacagagtggtggtgctgtcctttgagctgctgcacgcaccagcaacagtgtgcggcccaaagaagtctaccaatctggtgaagaacaagtgcgtgaacttcaacttcaacggactgaccggcacaggcgtgctgaccgagagcaataagaagttcctgccttttcagcagttcggcagggacatcgcagataccacagacgccgtgcgcgaccctcagaccctggagatcctggacatcacaccatgcagcttcggcggcgtgtccgtgatcacaccaggcaccaatacatccaaccaggtggccgtgctgtatcaggacgtgaattgtaccgaggtgcccgtggcaatccacgcagatcagctgacccctacatggcgggtgtactctaccggcagcaacgtgttccagacaagagccggatgcctgatcggagcagagcacgtgaacaatagctatgagtgcgacatccctatcggcgccggcatctgtgccagctaccagacccagacaaactccccatctggagcaggctcccaccatcaccatcaccatcaccatcaccactga

SEQ ID NO: 4114 - DNA, 2148 bp, Artificial Sequence
  Description of Artificial Sequence: Synthetic polynucleotide
atgggcatcctgccaagcccaggaatgcccgccctgctgtctctggtgagcctgctgtccgtgctgctgatgggatgcgtggcagagacaggcacacagtgcgtgaacctgaccacaaggacccagctgccccctgcctataccaattctttcacacggggcgtgtactatcccgacaaggtgtttagaagctccgtgctgcactccacacaggatctgtttctgcctttcttttctaacgtgacctggttccacgcctaccacgtgtccggcaccaatggcacaaagcggttcgacaatcccgtgctgccttttaacgatggcgtgtacttcgccagcaccgagaagtccaacatcatcagaggctggatctttggcaccacactggactctaagacacagagcctgctgatcgtgaacaatgccaccaacgtggtgatcaaggtgtgcgagttccagttttgtaatgatccattcctgggcgtgtactatcacaagaacaataagtcctggatggagtctgagtttcgcgtgtattctagcgccaacaattgcacatttgagtaccatagccagcccttcctgatggacctggagggcaagcagggcaatttcaagaacctgagggagttcgtgtttaagaatatcgatggctacttcaagatctacagcaagcacaccccaatcaacctggtgcgcgacctgccacagggattctccgccctggagccactggtggatctgcccatcggcatcaacatcacccggtttcagacactgctggccctgcacagatcctacctgacaccaggcgactcctctagcggatggaccgcaggagctgccgcctactatgtgggctatctgcagccccggaccttcctgctgaagtacaacgagaatggcaccatcacagacgcagtggattgcgccctggaccccctgtctgagacaaagtgtacactgaagagctttaccgtggagaagggcatctatcagacaagcaatttcagggtgcagcctaccgagtccatcgtgcgctttcccaatatcacaaaccattgcccttttggcgaggtgttcaacgccaccagattcgccagcgtgtacgcctggaatcggaagagaatctccaactgcgtggccgactattctgtgctgtacaactccgcctctttcagcacctttaagtgctatggcgtgtctcccacaaagctgaatgatctgtgctttaccaacgtgtacgccgatagcttcgtgatcaggggagacgaagtgagacagatcgcaccaggacagacaggaaagatcgcagactacaattataagctgcctgacgatttcaccggctgcgtgatcgcctggaactccaacaatctggattctaaagtgggcggcaactacaattatctgtacaggctgtttcgcaagtccaatctgaagccattcgagcgggacatctccacagagatctaccaggccggctctaccccctgcaatggcgtggagggctttaactgttatttccctctgcagtcttacggcttccagccaacaaacggcccgggccaacagccctacagagtggtggtgctgtcctttgagctgctgcacgcaccagcaacagtgtgcggcccaaagaagtctaccaatctggtgaagaacaagtgcgtgaacttcaacttcaacggactgaccggcacaggcgtgctgaccgagagcaataagaagttcctgccttttcagcagttcggcagggacatcgcagataccacagacgccgtgcgcgaccctcagaccctggagatcctggacatcacaccatgcagcttcggcggcgtgtccgtgatcacaccaggcaccaatacatccaaccaggtggccgtgctgtatcaggacgtgaattgtaccgaggtgcccgatgcaatccacgcagatcagctgacccctacatggcgggtgtactctaccggcagcaacgtgttccagacaagagccggatgcctgatcggagcagagcacgtgaacaatagctatgagtgcgacatccctatcggcgccggcatctgtgccagctaccagacccagacaaactccccatctggagcaggctcccaccatcaccatcaccatcaccatcaccactga

SEQ ID NO: 4115 - DNA, 2148 bp, Artificial Sequence
  Description of Artificial Sequence: Synthetic polynucleotide
atgggcatcctgccaagcccaggaatgcccgccctgctgtctctggtgagcctgctgtccgtgctgctgatgggatgcgtggcagagacaggcacacagtgcgtgaacctgaccacaaggacccagctgccccctgcctataccaattctttcacacggggcgtgtactatcccgacaaggtgtttagaagctccgtgctgcactccacacaggatctgtttctgcctttcttttctaacgtgacctggttccacgccatccacgtgtccggcaccaatggcacaaagcggttcgacaatcccgtgctgccttttaacgatggcgtgtacttcgccagcaccgagaagtccaacatcatcagaggctggatctttggcaccacactggactctaagacacagagcctgctgatcgtgaacaatgccaccaacgtggtgatcaaggtgtgcgagttccagttttgtaatgatccattcctgggcgtgtactatcacaagaacaataagtcctggatggagtctgagtttcgcgtgtattctagcgccaacaattgcacatttgagtacgtgagccagcccttcctgatggacctggagggcaagcagggcaatttcaagaacctgagggagttcgtgtttaagaatatcgatggctacttcaagatctacagcaagcacaccccaatcaacctggtgcgcgacctgccacagggattctccgccctggagccactggtggatctgcccatcggcatcaacatcacccggtttcagcctctgctggccctgcacagatcctacctgacaccaggcgactcctctagcggatggaccgcaggagctgccgcctactatgtgggctatctgcagccccggaccttcctgctgaagtacaacgagaatggcaccatcacagacgcagtggattgcgccctggaccccctgtctgagacaaagtgtacactgaagagctttaccgtggagaagggcatctatcagacaagcaatttcagggtgcagcctaccgagtccatcgtgcgctttcccaatatcacaaacctgtgcccttttggcgaggtgttcaacgccaccagattcgccagcgtgtacgcctggaatcggaagagaatctccaactgcgtggccgactattctgtgctgtacaactccgcctctttcagcacctttaagtgctatggcgtgtctcccacaaagctgaatgatctgtgctttaccaacgtgtacgccgatagcttcgtgatcaggggagacgaagtgagacagatcgcaccaggacagacaggaaagatcgcagactacaattataagctgcctgacgatttcaccggctgcgtgatcgcctggaactccaacaatctggattctaaagtgggcggcaactacaattatctgtacaggctgtttcgcaagtccaatctgaagccattcgagcgggacatctccacagagatctaccaggccggctctaccccctgcaatggcgtggagggctttaactgttatttccctctgcagtcttacggcttccagccaacaaacggcgtgggctatcagccctacagagtggtggtgctgtcctttgagctgctgcacgcaccagcaacagtgtgcggcccaaagaagtctaccaatctggtgaagaacaagtgcgtgaacttcaacttcaacggactgaccggcacaggcgtgctgaccgagagcaataagaagttcctgccttttcagcagttcggcagggacatcgcagataccacagacgccgtgcgcgaccctcagaccctggagatcctggacatcacaccatgcagcttcggcggcgtgtccgtgatcacaccaggcaccaatacatccaaccaggtggccgtgctgtatcaggacgtgaattgtaccgaggtgcccgtggcaatccacgcagatcagctgacccctacatggcgggtgtactctaccggcagcaacgtgttccagacaagagccggatgcctgatcggagcagagcacgtgaacaatagctatgagtgcgacatccctatcggcgccggcatctgtgccagctaccagacccagacaaactccccatctggagcaggctcccaccatcaccatcaccatcaccatcaccactga

SEQ ID NO: 4116 - DNA, 2148 bp, Artificial Sequence
  Description of Artificial Sequence: Synthetic polynucleotide
atgggcatcctgccaagcccaggaatgcccgccctgctgtctctggtgagcctgctgtccgtgctgctgatgggatgcgtggcagagacaggcacacagtgcgtgaacctgaccacaaggacccagctgccccctgcctataccaattctttcacacggggcgtgtactatcccgacaaggtgtttagaagctccgtgctgcactccacacaggatctgtttctgcctttcttttctaacgtgacctggttccacgccatccacgtgtccggcaccaatggcacaaagcggttcgacaatcccgtgctgccttttaacgatggcgtgtacttcgccagcaccgagaagtccaacatcatcagaggctggatctttggcaccacactggactctaagacacagagcctgctgatcgtgaacaatgccaccaacgtggtgatcaaggtgtgcgagttccagttttgtaatgatccattcctgggcgtgtactatcacaagaacaataagtcctggatggagtctgagtttcgcgtgtattctagcgccaacaattgcacatttgagtacgtgagccagcccttcctgatggacctggagggcaagcagggcaatttcaagaacctgagggagttcgtgtttaagaatatcgatggctacttcaagatctacagcaagcacaccccaatcaacctggtgcgcgacctgccacagggattctccgccctggagccactggtggatctgcccatcggcatcaacatcacccggtttcagacactgctggccctgcacagatcctacctgacaccaggcgactcctctagcggatggaccgcaggagctgccgcctactatgtgggctatctgcagccccggaccttcctgctgaagtacaacgagaatggcaccatcacagacgcagtggattgcgccctggaccccctgtctgagacaaagtgtacactgaagagctttaccgtggagaagggcatctatcagacaagcaatttcagggtgcagcctaccgagtccatcgtgcgctttcccaatatcacaaacctgtgcccttttggcgaggtgttcaacgccaccagattcgccagcgtgtacgcctggaatcggaagagaatctccaactgcgtggccgactattctgtgctgtacaactccgcctctttcagcacctttaagtgctatggcgtgtctcccacaaagctgaatgatctgtgctttaccaacgtgtacgccgatagcttcgtgatcaggggagacgaagtgagacagatcgcaccaggacagacaggaaagatcgcagactacaattataagctgcctgacgatttcaccggctgcgtgatcgcctggaactccaacaatctggattctaaagtgggcggcaactacaattatctgtacaggctgtttcgcaagtccaatctgaagccattcgagcgggacatctccacagagatctaccaggccggctctaccccctgcaatggcgtggagggctttaactgttatttccctctgcagtcttacggcttccagccaacaaacggcgtgggctatcagccctacagagtggtggtgctgtcctttgagctgctgcacgcaccagcaacagtgtgcggcccaaagaagtctaccaatctggtgaagaacaagtgcgtgaacttcaacttcaacggactgaccggcacaggcgtgctgaccgagagcaataagaagttcctgccttttcagcagttcggcagggacatcgcagataccacagacgccgtgcgcgaccctcagaccctggagatcctggacatcacaccatgcagcttcggcggcgtgtccgtgatcacaccaggcaccaatacatccaaccaggtggccgtgctgtatcaggacgtgaattgtaccgaggtgcccaaagcaatccacgcagatcagctgacccctacatggcgggtgtactctaccggcagcaacgtgttccagacaagagccggatgcctgatcggagcagagcacgtgaacaatagctatgagtgcgacatccctatcggcgccggcatctgtgccagctaccagacccagacaaactccccatctggagcaggctcccaccatcaccatcaccatcaccatcaccactga

SEQ ID NO: 4117 - DNA, 2148 bp, Artificial Sequence
  Description of Artificial Sequence: Synthetic polynucleotide
atgggcatcctgccaagcccaggaatgcccgccctgctgtctctggtgagcctgctgtccgtgctgctgatgggatgcgtggcagagacaggcacacagtgcgtgaacctgaccacaaggacccagctgccccctgcctataccaattctttcacacggggcgtgtactatcccgacaaggtgtttagaagctccgtgctgcactccacacaggatctgtttctgcctttcttttctaacgtgacctggttccacgccatccacgtgtccggcaccaatggcacaaagcggttcgacaatcccgtgctgccttttaacgatggcgtgtacttcgccagcaccgagaagtccaacatcatcagaggctggatctttggcaccacactggactctaagacacagagcctgctgatcgtgaacaatgccaccaacgtggtgatcaaggtgtgcgagttccagttttgtaatgatccattcctgggcgtgtactatcacaagaacaataagtcctggatggagtctgagtttcgcgtgtattctagcgccaacaattgcacatttgagtacgtgagccagcccttcctgatggacctggagggcaagcagggcaatttcaagaacctgagggagttcgtgtttaagaatatcgatggctacttcaagatctacagcaagcacaccccaatcaacctggtgcgcgacctgccacagggattctccgccctggagccactggtggatctgcccatcggcatcaacatcacccggtttcagacactgctggccctgcacagatcctacctgacaccaggcgactcctctagcggatggaccgcaggagctgccgcctactatgtgggctatctgcagccccggaccttcctgctgaagtacaacgagaatggcaccatcacagacgcagtggattgcgccctggaccccctgtctgagacaaagtgtacactgaagagctttaccgtggagaagggcatctatcagacaagcaatttcagggtgcagcctaccgagtccatcgtgcgctttcccaatatcacaaacctgtgcccttttggcgaggtgttcaacgccaccagattcgccagcgtgtacgcctggaatcggaagagaatctccaactgcgtggccgactattctgtgctgtacaactccgcctctttcagcacctttaagtgctatggcgtgtctcccacaaagctgaatgatctgtgctttaccaacgtgtacgccgatagcttcgtgatcaggggagacgaagtgagacagatcgcaccaggacagacaggaaagatcgcagactacaattataagctgcctgacgatttcaccggctgcgtgatcgcctggaactccaacaatctggattctaaagtgggcggcaactacaattatctgtacaggctgtttcgcaagtccaatctgaagccattcgagcgggacatctccacagagatctaccaggccggctctaccccctgcaatggcgtggagggctttaactgttatttccctctgcagtcttacggcttccagccaacaaacggcgtgggctatcagccctacagagtggtggtgctgtcctttgagctgctgcacgcaccagcaacagtgtgcggcccaaagaagtctaccaatctggtgaagaacaagtgcgtgaacttcaacttcaacggactgaccggcacaggcgtgctgaccgagagcaataagaagttcctgccttttcagcagttcggcagggacatcgcagataccacagacgccgtgcgcgaccctcagaccctggagatcctggacatcacaccatgcagcgctggcggcgtgtccgtgatcacaccaggcaccaatacatccaaccaggtggccgtgctgtatcaggacgtgaattgtaccgaggtgcccgtggcaatccacgcagatcagctgacccctacatggcgggtgtactctaccggcagcaacgtgttccagacaagagccggatgcctgatcggagcagagcacgtgaacaatagctatgagtgcgacatccctatcggcgccggcatctgtgccagctaccagacccagacaaactccccatctggagcaggctcccaccatcaccatcaccatcaccatcaccactga

SEQ ID NO: 4118 - DNA, 2148 bp, Artificial Sequence
  Description of Artificial Sequence: Synthetic polynucleotide
atgggcatcctgccaagcccaggaatgcccgccctgctgtctctggtgagcctgctgtccgtgctgctgatgggatgcgtggcagagacaggcacacagtgcgtgaacctgaccacaaggacccagctgccccctgcctataccaattctttcacacggggcgtgtactatcccgacaaggtgtttagaagctccgtgctgcactccacacaggatctgtttctgcctttcttttctaacgtgacctggttccacgcccatcacgtgtccggcaccaatggcacaaagcggttcgacaatcccgtgctgccttttaacgatggcgtgtacttcgccagcaccgagaagtccaacatcatcagaggctggatctttggcaccacactggactctaagacacagagcctgctgatcgtgaacaatgccaccaacgtggtgatcaaggtgtgcgagttccagttttgtaatgatccattcctgggcgtgtactatcacaagaacaataagtcctggatggagtctgagtttcgcgtgtattctagcgccaacaattgcacatttgagtacgtgagccagcccttcctgatggacctggagggcaagcagggcaatttcaagaacctgagggagttcgtgtttaagaatatcgatggctacttcaagatctacagcaagcacaccccaatcaacctggtgcgcgacctgccacagggattctccgccctggagccactggtggatctgcccatcggcatcaacatcacccggtttcagacactgctggccctgcacagatcctacctgacaccaggcgactcctctagcggatggaccgcaggagctgccgcctactatgtgggctatctgcagccccggaccttcctgctgaagtacaacgagaatggcaccatcacagacgcagtggattgcgccctggaccccctgtctgagacaaagtgtacactgaagagctttaccgtggagaagggcatctatcagacaagcaatttcagggtgcagcctaccgagtccatcgtgcgctttcccaatatcacaaacctgtgcccttttggcgaggtgttcaacgccaccagattcgccagcgtgtacgcctggaatcggaagagaatctccaactgcgtggccgactattctgtgctgtacaactccgcctctttcagcacctttaagtgctatggcgtgtctcccacaaagctgaatgatctgtgctttaccaacgtgtacgccgatagcttcgtgatcaggggagacgaagtgagacagatcgcaccaggacagacaggaaagatcgcagactacaattataagctgcctgacgatttcaccggctgcgtgatcgcctggaactccaacaatctggattctaaagtgggcggcaactacaattatctgtacaggctgtttcgcaagtccaatctgaagccattcgagcgggacatctccacagagatctaccaggccggctctaccccctgcaatggcgtggagggctttaactgttatttccctctgcagtcttacggcttccagccaacaaacggcgtgggctatcagccctacagagtggtggtgctgtcctttgagctgctgcacgcaccagcaacagtgtgcggcccaaagaagtctaccaatctggtgaagaacaagtgcgtgaacttcaacttcaacggactgaccggcacaggcgtgctgaccgagagcaataagaagttcctgccttttcagcagttcggcagggacatcgcagataccacagacgccgtgcgcgaccctcagaccctggagatcctggacatcacaccatgcagcttcggcggcgtgtccgtgatcacaccaggcaccaatacatccaaccaggtggccgtgctgtatcaggacgtgaattgtaccgaggtgcccgtggcaatccacgcagatcagctgacccctacatggcgggtgtactctaccggcagcaacgtgttccagacaagagccggatgcctgatcggagcagagcacgtgaacaatagctatgagtgcgacatccctatcggcgccggcatctgtgccagctaccagacccagacaaactccccatctggagcaggctcccaccatcaccatcaccatcaccatcaccactga

SEQ ID NO: 4119 - DNA, 2148 bp, Artificial Sequence
  Description of Artificial Sequence: Synthetic polynucleotide
atgggcatcctgccaagcccaggaatgcccgccctgctgtctctggtgagcctgctgtccgtgctgctgatgggatgcgtggcagagacaggcacacagtgcgtgaacctgaccacaaggacccagctgccccctgcctataccaattctttcacacggggcatttactatcccgacaaggtgtttagaagctccgtgctgcactccacacaggatctgtttctgcctttcttttctaacgtgacctggttccacgccatccacggatccggcaccaatggcacaaagcggttcgacaatcccgtgctgccttttaacgatggcgtgtacagtgccgctatagagaagtccaacatcatcagaggctggatctttggcaccacactggactctaagacacagagcctgctgatcgtgaacaatgccaccaacgtggtgatcaaggtgtgcgagttccagttttgtaatgatccattcctgggcgtgtactatcacaagaacaataagtcctggatggagtctgagtttcgcgtgtattctagcgccaacaattgcacatttgagtacgtgagccagcccttcctgatggacctggagggcaagcagggcaatttcaagttgctgagggagttcgtgtttaagaatatcgatggctacttcaagatctacagcaagcacaccccaatcaacctggtgcgcgacctgccacagggattctccccgctggagccactggtggatctgcccatcggcatcaacatcacccggtttcttacagtactggccctgcacagatcctacctgacaccaggcgactcctctagcggatggaccgcaggagctgccgcctactatgtgggctatctgcagccccggaccttcctgctgaagtacaacgagaatggcaccatcacagacgcagtggattgcgccctggaccccctgtctgagacaaagtgtacactgaagagctttaccgtggagaagggcatctatcagacaagcaatttcagggtgcagcctaccgagtccatcgtgcgctttcccaatatcacaaacctgtgcccttttggcgaggtgttcaacgccaccagattcgccagcgtgtacgcctggaatcggaagagaatctccaactgcgtggccgactattctgtgctgtacaactccgcctctttcagcacctttaagtgctatggcgtgtctcccacaaagctgaatgatctgtgctttaccaacgtgtacgccgatagcttcgtgatcaggggagacgaagtgagacagatcgcaccaggacagacaggaaagatcgcagactacaattataagctgcctgacgatttcaccggctgcgtgatcgcctggaactccaacaatctggattctaaagtgggcggcaactacaattatctgtacaggctgtttcgcaagtccaatctgaagccattcgagcgggacatctccacagagatctaccaggccggctctaccccctgcaatggcgtggagggctttaactgttatttccctctgcagtcttacggcttccagccaacaaacggcgtgggctatcagccctacagagtggtggtgctgtcctttgagctgctgcacgcaccagcaacagtgtgcggcccaaagaagtctaccaatctggtgaagaacaagtgcgtgaacttcaacttcaacggactgaccggcacaggcgtgctgaccgagagcaataagaagttcctgccttttcagcagttcggcagggacatcgcagataccacagacgccgtgcgcgaccctcagaccctggagatcctggacatcacaccatgcagcttcggcggcgtgtccgtgatcacaccaggcaccaatacatccaaccaggtggccgtgctgtatcaggacgtgaattgtaccgaggtgcccgtggcaatccacgcagatcagctgacccctacatggcgggtgtactctaccggcagcaacgtgttccagacaagagccggatgcctgatcggagcagagcacgtgaacaatagctatgagtgcgacatccctatcggcgccggcatctgtgccagctaccagacccagacaaactccccatctggagcaggctcccaccatcaccatcaccatcaccatcaccactga

SEQ ID NO: 4120 - DNA, 2148 bp, Artificial Sequence
  Description of Artificial Sequence: Synthetic polynucleotide
atgggcatcctgccaagcccaggaatgcccgccctgctgtctctggtgagcctgctgtccgtgctgctgatgggatgcgtggcagagacaggcacacagtgcgtgaacctgaccacaaggacccagctgccccctgcctataccaattctttcacacggggcgtgtactatcccgacaaggtgtttagaagctccgtgctgcactccacacaggatctgtttctgcctttcttttctaacgtgacctggttccacgccatccacgtgtccggcaccaatggcacaaagcggttcgacaatcccgtgctgccttttaacgatggcgtgtacttcgccagcaccgagaagtccaacatcatcagaggctggatctttggcaccacactggactctaagacacagagcctgctgatcgtgaacaatgccaccaacgtggtgatcaaggtgtgcgagttccagttttgtaatgatccattcctgggcgtgtactatcacaagaacaataagtcctggatggagtctgagtttcgcgtgtattctagcgccaacaattgcacatttgagtacgtgagccagcccttcctgatggacctggagggcaagcagggcaatttcaagaacctgagggagttcgtgtttaagaatatcgatggctacttcaagatctacagcaagcacaccccaatcaacctggtgcgcgacctgccacagggattctccgccctggagccactggtggatctgcccatcggcatcaacatcacccggtttcagacactgctggccctgcacagatcctacctgacaccaggcgactcctctagcggatggaccgcaggagctgccgcctactatgtgggctatctgcagccccggaccttcctgctgaagtacaacgagaatggcaccatcacagacgcagtggattgcgccctggaccccctgtctgagacaaagtgtacactgaagagctttaccgtggagaagggcatctatcagacaagcaatttcagggtgcagcctaccgagtccatcgtgcgctttcccaatatcacaaacctgtgcccttttggcgaggtgttcaacgccaccagattcgccagcgtgtacgcctggaatcggaagagaatctccaactgcgtggccgactattctgtgctgtacaactccgcctctttcagcacctttaagtgctatggcgtgtctcccacaaagctgaatgatctgtgctttaccaacgtgtacgccgatagcttcgtgatcaggggagacgaagtgagacagatcgcaccaggacagacaggaaagatcgcagactacaattataagctgcctgacgatttcaccggctgcgtgatcgcctggaactccaacaatctggattctaaagtgggcggcaactacaattatctgtacaggctgtttcgcaagtccaatctgaagccattcgagcgggacatctccacagagatctaccaggccggctctaccccctgcaatggcgtggagggctttaactgttatttccctctgcagtcttacggcttccagccaacaaacggcgtgggctatcagccctacagagtggtggtgctgtcctttgagctgctgcacgcaccagcaacagtgtgcggcccaaagaagtctaccaatctggtgaagaacaagtgcgtgaacttcaacttcaacggactgaccggcacaggcgtgctgaccgagagcaataagaagttcctgccttttcagcagttcggcagggacatcgcagataccacagacgccgtgcgcgaccctcagaccctggagatcctggacatcacaccatgcagcttcggcggcgtgtccgtgatcacaccaggcaccaatacatccaaccaggtggccgtgctgtatcaggacgtgaattgtaccgaggtgcccgtggcaatccacgcagatcagctgacccctacatggcgggtgtactctaccggcagcaacgtgttccagacaagagccggatgcctgatcggagcagagtacgtgaacaatagctatgagtgcgacatccctatcggcgccggcatctgtgccagctaccagacccagacaaactccccatctggagcaggctcccaccatcaccatcaccatcaccatcaccactga

SEQ ID NO: 4121 - DNA, 2148 bp, Artificial Sequence
  Description of Artificial Sequence: Synthetic polynucleotide
atgggcatcctgccaagcccaggaatgcccgccctgctgtctctggtgagcctgctgtccgtgctgctgatgggatgcgtggcagagacaggcacacagtgcgtgaacctgaccacaaggacccagctgccccctgcctataccaattctttcacacggggcgtgtactatcccgacaaggtgtttagaagctccgtgctgcactccacacaggatctgtttctgcctttcttttctaacgtgacctggttccacgccatccacgtgtccggcaccaatggcacaaagcggttcgacaatcccgtgctgccttttaacgatggcgtgtacttcgccagcaccgagaagtccaacatcatcagaggctggatctttggcaccacactggactctaagacacagagcctgctgatcgtgaacaatgccaccaacgtggtgatcaaggtgtgcgagttccagttttgtaatgatccattcctgggcgtgtactatcacaagaacaataagtcctggatggagtctgagtttcgcgtgtattctagcgccaacaattgcacatttgagtacgtgagccagcccttcctgatggacctggagggcaagcagggcaatttcaagaacctgagggagttcgtgtttaagaatatcgatggctacttcaagatctacagcaagcacaccccaatcaacctggtgcgcgacctgccacagggattctccgccctggagccactggtggatctgcccatcggcatcaacatcacccggtttagtacactgctggccctgcacagatcctacctgacaccaggcgactcctctagcggatggaccgcaggagctgccgcctactatgtgggctatctgcagccccggaccttcctgctgaagtacaacgagaatggcaccatcacagacgcagtggattgcgccctggaccccctgtctgagacaaagtgtacactgaagagctttaccgtggagaagggcatctatcagacaagcaatttcagggtgcagcctaccgagtccatcgtgcgctttcccaatatcacaaacctgtgcccttttggcgaggtgttcaacgccaccagattcgccagcgtgtacgcctggaatcggaagagaatctccaactgcgtggccgactattctgtgctgtacaactccgcctctttcagcacctttaagtgctatggcgtgtctcccacaaagctgaatgatctgtgctttaccaacgtgtacgccgatagcttcgtgatcaggggagacgaagtgagacagatcgcaccaggacagacaggaaagatcgcagactacaattataagctgcctgacgatttcaccggctgcgtgatcgcctggaactccaacaatctggattctaaagtgggcggcaactacaattatctgtacaggctgtttcgcaagtccaatctgaagccattcgagcgggacatctccacagagatctaccaggccggctctaccccctgcaatggcgtggagggctttaactgttatttccctctgcagtcttacggcttccagccaacaaacggcgtgggctatcagccctacagagtggtggtgctgtcctttgagctgctgcacgcaccagcaacagtgtgcggcccaaagaagtctaccaatctggtgaagaacaagtgcgtgaacttcaacttcaacggactgaccggcacaggcgtgctgaccgagagcaataagaagttcctgccttttcagcagttcggcagggacatcgcagataccacagacgccgtgcgcgaccctcagaccctggagatcctggacatcacaccatgcagcttcggcggcgtgtccgtgatcacaccaggcaccaatacatccaaccaggtggccgtgctgtatcaggacgtgaattgtaccgaggtgcccgtggcaatccacgcagatcagctgacccctacatggcgggtgtactctaccggcagcaacgtgttccagacaagagccggatgcctgatcggagcagagcacgtgaacaatagctatgagtgcgacatccctatcggcgccggcatctgtgccagctaccagacccagacaaactccccatctggagcaggctcccaccatcaccatcaccatcaccatcaccactga

SEQ ID NO: 4122 - DNA, 2148 bp, Artificial Sequence
  Description of Artificial Sequence: Synthetic polynucleotide
atgggcatcctgccaagcccaggaatgcccgccctgctgtctctggtgagcctgctgtccgtgctgctgatgggatgcgtggcagagacaggcacacagtgcgtgaacctgaccacaaggacccagctgccccctgcctataccaattctttcacacggggcgtgtactatcccgacaaggtgtttagaagctccgtgctgcactccacacaggatctgtttctgcctttcttttctaacgtgacctggttccacgccatccacgtgtccggcaccaatggcacaaagcggttcgacaatcccgtgctgccttttaacgatggcgtgtacttcgccagcaccgagaagtccaacatcatcagaggctggatctttggcaccacactggactctaagacacagagcctgctgatcgtgaacaatgccaccaacgtggtgatcaaggtgtgcgagttccagttttgtaatgatccattcctgggcgtgtactatcacaagaacaataagtcctggatggagtctgagtttcgcgtgtattctagcgccaacaattgcacatttgagtacgtgagccagcccttcctgatggacctggagggcaagcagggcaatttcaagaacctgagggagttcgtgtttaagaatatcgatggctacttcaagatctacagcaagcacaccccaatcaacctggtgcgcgacctgccacagggattctccgccctggagccactggtggatctgcccatcggcatcaacatcacccggtttcagacactgctggccctgcacagatcctacctgacaccaggcgactcctctagcggatggaccgcaggagctgccgcctactatgtgggctatctgcagccccggaccttcctgctgaagtacaacgagaatggcaccatcacagacgcagtggattgcgccctggaccccctgtctgagacaaagtgtacactgaagagctttaccgtggagaagggcatctatcagacaagcaatttcagggtgcagcctaccgagtccatcgtgcgctttcccaatatcacaaacctgtgcccttttggcgaggtgttcaacgccaccagattcgccagcgtgtacgcctggaatcggaagagaatctccaactgcgtggccgactattctgtgctgtacaactccgcctctttcagcacctttaagtgctatggcgtgtctcccacaaagctgaatgatctgtgctttaccaacgtgtacgccgatagcttcgtgatcaggggagacgaagtgagacagatcgcaccaggacagacaggaaagatcgcagactacaattataagctgcctgacgatttcaccggctgcgtgatcgcctggaactccaacaatctggattctaaagtgggcggcaactacaattatctgtacaggctgtttcgcaagtccaatctgaagccattcgagcgggacatctccacagagatctaccaggccggctctaccccctgcaatggcgtggagggctttaactgttatttccctctgcagtcttacggcttccagccaacaaacggcgtgggctatcagccctacagagtggtggtgctgtcctttgagctgctgcacgcaccagcaacagtgtgcggcccaaagaagtctaccaatctggtgaagaacaagtgcgtgaacttcaacttcaacggactgaccggcacaggcgtgctgaccgagagcaataagaagttcctgccttttcagcagttcggcagggacatcgcagataccacagacgccgtgcgcgaccctcagaccctggagatcctggacatcacaccatgcagcttcggcggcgtgtccgtgatcacaccaggcaccaatacatccaaccaggtggccgtgctgtatcaggacgtgaattgtaccgaggtgcccgtggcaatctttgcagatcagctgacccctacatggcgggtgtactctaccggcagcaacgtgttccagacaagagccggatgcctgatcggagcagagcacgtgaacaatagctatgagtgcgacatccctatcggcgccggcatctgtgccagctaccagacccagacaaactccccatctggagcaggctcccaccatcaccatcaccatcaccatcaccactga

SEQ ID NO: 4123 - DNA, 2148 bp, Artificial Sequence
  Description of Artificial Sequence: Synthetic polynucleotide
atgggcatcctgccaagcccaggaatgcccgccctgctgtctctggtgagcctgctgtccgtgctgctgatgggatgcgtggcagagacaggcacacagtgcgtgaacctgaccacaaggacccagctgccccctgcctataccaattctttcacacggggcgtgtactatcccgacaaggtgtttagaagctccgtgctgcactccacacaggatctgtttctgcctttcttttctaacgtgacctggttccacgcctaccacgtgtccggcaccaatggcacaaagcggttcgacaatcccgtgctgccttttaacgatggcgtgtacttcgccagcaccgagaagtccaacatcatcagaggctggatctttggcaccacactggactctaagacacagagcctgctgatcgtgaacaatgccaccaacgtggtgatcaaggtgtgcgagttccagttttgtaatgatccattcctgggcgtgtactatcacaagaacaataagtcctggatggagtctgagtttcgcgtgtattctagcgccaacaattgcacatttgagtaccatagccagcccttcctgatggacctggagggcaagcagggcaatttcaagaacctgagggagttcgtgtttaagaatatcgatggctacttcaagatctacagcaagcacaccccaatcaacctggtgcgcgacctgccacagggattctccgccctggagccactggtggatctgcccatcggcatcaacatcacccggtttcagacactgctggccctgcacagatcctacctgacaccaggcgactcctctagcggagaaaccgcaggagctgccgcctactatgtgggctatctgcagccccggaccttcctgctgaagtacaacgagaatggcaccatcacagacgcagtggattgcgccctggaccccctgtctgagacaaagtgtacactgaagagctttaccgtggagaagggcatctatcagacaagcaatttcagggtgcagcctaccgagtccatcgtgcgctttcccaatatcacaaaccattgcccttttggcgaggtgttcaacgccaccagattcgccagcgtgtacgcctggaatcggaagagaatctccaactgcgtggccgactattctgtgctgtacaactccgcctctttcagcacctttaagtgctatggcgtgtctcccacaaagctgaatgatctgtgctttaccaacgtgtacgccgatagcttcgtgatcaggggagacgaagtgagacagatcgcaccaggacagacaggaaagatcgcagactacaattataagctgcctgacgatttcaccggctgcgtgatcgcctggaactccaacaatctggattctaaagtgggcggcaactacaattatctgtacaggctgtttcgcaagtccaatctgaagccattcgagcgggacatctccacagagatctaccaggccggctctaccccctgcaatggcgtggagggctttaactgttatttccctctgcagtcttacggcttccagccaacaaacggcccgggccaacagccctacagagtggtggtgctgtcctttgagctgctgcacgcaccagcaacagtgtgcggcccaaagaagtctaccaatctggtgaagaacaagtgcgtgaacttcaacttcaacggactgaccggcacaggcgtgctgaccgagagcaataagaagttcctgccttttcagcagttcggcagggacatcgcagataccacagacgccgtgcgcgaccctcagaccctggagatcctggacatcacaccatgcagcttcggcggcgtgtccgtgatcacaccaggcaccaatacatccaaccaggtggccgtgctgtatcaggacgtgaattgtaccgaggtgcccgtggcaatccacgcagatcagctgacccctacatggcgggtgtactctaccggcagcaacgtgttccagacaagagccggatgcctgatcggagcagagcacgtgaacaatagctatgagtgcgacatccctatcggcgccggcatctgtgccagctaccagacccagacaaactccccatctggagcaggctcccaccatcaccatcaccatcaccatcaccactga

SEQ ID NO: 4124 - DNA, 2148 bp, Artificial Sequence
  Description of Artificial Sequence: Synthetic polynucleotide
atgggcatcctgccaagcccaggaatgcccgccctgctgtctctggtgagcctgctgtccgtgctgctgatgggatgcgtggcagagacaggcacacagtgcgtgaacctgaccacaaggacccagctgccccctgcctataccaattctttcacacggggcgtgtactatcccgacaaggtgtttagaagctccgtgctgcactccacacaggatctgtttctgcctttcttttctaacgtgacctggttccacgccatccacgtgtccggcaccaatggcacaaagcggttcgacaatcccgtgctgccttttaacgatggcgtgtacttcgccagcaccgagaagtccaacatcatcagaggctggatctttggcaccacactggactctaagacacagagcctgctgatcgtgaacaatgccaccaacgtggtgatcaaggtgtgcgagttccagttttgtaatgatccattcctgggcgtgtactatcacaagaacaataagtcctggatggagtctgagtttcgcgtgtattctagcgccaacaattgcacatttgagtacgtgagccagcccttcctgatggacctggagggcaagcagggcaatttcaagaacctgagggagttcgtgtttaagaatatcgatggctacttcaagatctacagcaagcacaccccaatcaacctggtgcgcgacctgccacagggattctccgccctggagccactggtggatctgcccatcggcatcaacatcacccggtttcagacactgctggccctgcacagatcctacctgacaccaggcgactcctctagcggatggaccgcaggagctgccgcctactatgtgggctatctgcagccccggaccttcctgctgaagtacaacgagaatggcaccatcacagacgcagtggattgcgccctggaccccctgtctgagacaaagtgtacactgaagagctttaccgtggagaagggcatctatcagacaagcaatttcagggtgcagcctaccgagtccatcgtgcgctttcccaatatcacaaacctgtgcccttttggcgaggtgttcaacgccaccagattcgccagcgtgtacgcctggaatcggaagagaatctccaactgcgtggccgactattctgtgctgtacaactccgcctctttcagcacctttaagtgctatggcgtgtctcccacaaagctgaatgatctgtgctttaccaacgtgtacgccgatagcttcgtgatcaggggagacgaagtgagacagatcgcaccaggacagacaggaaagatcgcagactacaattataagctgcctgacgatttcaccggctgcgtgatcgcctggaactccaacaatctggattctaaagtgggcggcaactacaattatctgtacaggctgtttcgcaagtccaatctgaagccattcgagcgggacatctccacagagatctaccaggccggctctaccccctgcaatggcgtggagggctttaactgttatttccctctgcagtcttacggcttccagccaacaaacggcgtgggctatcagccctacagagtggtggtgctgtcctttgagctgctgcacgcaccagcaacagtgtgcggcccaaagaagtctaccaatctggtgaagaacaagtgcgtgaacttcaacttcaacggactgaccggcacaggcgtgctgaccgagagcaataagaagttcctgccttttcagcagttcggcagggacatcgcagataccacagacgccgtgcgcgaccctcagaccctggagatcctggacatcacaccatgcagctgtggcggcgtgtccgtgatcacaccaggcaccaatacatccaaccaggtggccgtgctgtatcaggacgtgaattgtaccgaggtgcccgtggcaatccacgcagatcagctgacccctacatggcgggtgtactctaccggcagcaacgtgttccagacaagagccggatgcctgatcggagcagagcacgtgaacaatagctatgagtgcgacatccctatcggcgccggcatctgtgccagctaccagacccagacaaactccccatctggagcaggctcccaccatcaccatcaccatcaccatcaccactga

SEQ ID NO: 4125 - DNA, 2148 bp, Artificial Sequence
  Description of Artificial Sequence: Synthetic polynucleotide
atgggcatcctgccaagcccaggaatgcccgccctgctgtctctggtgagcctgctgtccgtgctgctgatgggatgcgtggcagagacaggcacacagtgcgtgaacctgaccacaaggacccagctgccccctgcctataccaattctttcacacggggcgtgtactatcccgacaaggtgtttagaagctccgtgctgcactccacacaggatctgtttctgcctttcttttctaacgtgacctggttccacgccatccacgtgtccggcaccaatggcacaaagcggttcgacaatcccgtgctgccttttaacgatggcgtgtacttcgccagcaccgagaagtccaacatcatcagaggctggatctttggcaccacactggactctaagacacagagcctgctgatcgtgaacaatgccaccaacgtggtgatcaaggtgtgcgagttccagttttgtaatgatccattcctgggcgtgtactatcacaagaacaataagtcctggatggagtctgagtttcgcgtgtattctagcgccaacaattgcacatttgagtacgtgagccagcccttcctgatggacctggagggcaagcagggcaatttcaagaacctgagggagttcgtgtttaagaatatcgatggctacttcaagatctacagcaagcacaccccaatcaacctggtgcgcgacctgccacagggattctccgccctggagccactggtggatctgcccatcggcatcaacatcacccggtttcagacactgctggccctgcacagatcctacctgacaccaggcgactcctctagcggatggaccgcaggagctgccgcctactatgtgggctatctgcagccccggaccttcctgctgaagtacaacgagaatggcaccatcacagacgcagtggattgcgccctggaccccctgtctgagacaaagtgtacactgaagagctttaccgtggagaagggcatctatcagacaagcaatttcagggtgcagcctaccgagtccatcgtgcgctttcccaatatcacaaacctgtgcccttttggcgaggtgttcaacgccaccagattcgccagctcatacgcctggaatcggaagagaatctccaactgcgtggccgactattctgtgctgtacaactccgcctctttcagcacctttaagtgctatggcgtgtctcccacaaagctgaatgatctgtgctttaccaacgtgtacgccgatcgtttcgtgatcaggggagacgaagtgagacagatcgcaccaggacagacaggaaagatcgcagactacaattataagctgcctgacgatttcaccggctgcgtgatcgcctggaactccaacaatctggatgctaaagtgggcggcaactacaattatctgtacaggctgtttcgcaagtccaatctgaagccattcgagcggttcatctccacagagatctaccaggccggctctacccccacgaatggcgtggagggctttaactgttatttccctctgcagtcttacggcttccagccaacaaacggcgtgggctatcagccctacagagtggtggtgctgtcctttgagctgctgcacgcaccacatacagtgtgcggcccaaagaagtctaccaatctggtgaagaacaagtgcgtgaacttcaacttcaacggactgaccggcacaggcgtgctgaccgagagcaataagaagttcctgccttttcagcagttcggcagggacatcgcagataccacagacgccgtgcgcgaccctcagaccctggagatcctggacatcacaccatgcagcttcggcggcgtgtccgtgatcacaccaggcaccaatacatccaaccaggtggccgtgctgtatcaggacgtgaattgtaccgaggtgcccgtggcaatccacgcagatcagctgacccctacatggcgggtgtactctaccggcagcaacgtgttccagacaagagccggatgcctgatcggagcagagcacgtgaacaatagctatgagtgcgacatccctatcggcgccggcatctgtgccagctaccagacccagacaaactccccatctggagcaggctcccaccatcaccatcaccatcaccatcaccactga

SEQ ID NO: 4126 - DNA, 2148 bp, Artificial Sequence
  Description of Artificial Sequence: Synthetic polynucleotide
atgggcatcctgccaagcccaggaatgcccgccctgctgtctctggtgagcctgctgtccgtgctgctgatgggatgcgtggcagagacaggcacacagtgcgtgaacctgaccacaaggacccagctgccccctgcctataccaattctttcacacggggcgtgtactatcccgacaaggtgtttagaagctccgtgctgcactccacacaggatctgtttctgcctttcttttctaacgtgacctggttccacgccatccacgtgtccggcaccaatggcacaaagcggttcgacaatcccgtgctgccttttaacgatggcgtgtacttcgccagcaccgagaagtccaacatcatcagaggctggatctttggcaccacactggactctaagacacagagcctgctgatcgtgaacaatgccaccaacgtggtgatcaaggtgtgcgagttccagttttgtaatgatccattcctgggcgtgtactatcacaagaacaataagtcctggatggagtctgagtttcgcgtgtattctagcgccaacaattgcacatttgagtacgtgagccagcccttcctgatggacctggagggcaagcagggcaatttcaagaacctgagggagttcgtgtttaagaatatcgatggctacttcaagatctacagcaagcacaccccaatcaacctggtgcgcgacctgccacagggattctccgccctggagccactggtggatctgcccatcggcatcaacatcacccggtttcagacactgctggccctgcacagatcctacctgacaccaggcgactcctctagcggatggaccgcaggagctgccgcctactatgtgggctatctgcagccccggaccttcctgctgaagtacaacgagaatggcaccatcacagacgcagtggattgcgccctggaccccctgtctgagacaaagtgtacactgaagagctttaccgtggagaagggcatctatcagacaagcaatttcagggtgcagcctaccgagtccatcgtgcgctttcccaatatcacaaacctgtgcccttttggcgaggtgttcaacgccaccagattcgccagcgtgtacgcctggaatcggaagagaatctccaactgcgtggccgactattctgtgctgtacaactccgcctctttcagcacctttaagtgctatggcgtgtctcccacaaagctgaatgatctgtgctttaccaacgtgtacgccgatagcttcgtgatcaggggagacgaagtgagacagatcgcaccaggacagacaggaaagatcgcagactacaattataagctgcctgacgatttcaccggctgcgtgatcgcctggaactccaacaatctggattctaaagtgggcggcaactacaattatctgtacaggctgtttcgcaagtccaatctgaagccattcgagcgggacatctccacagagatctaccaggccggctctaccccctgcaatggcgtggagggctttaactgttatttccctctgcagtcttacggcttccagccaacaaacggcgtgggctatcagccctacagagtggtggtgctgtcctttgagctgctgcacgcaccagcaacagtgtgcggcccaaagaagtctaccaatctggtgaagaacaagtgcgtgaacttcaacttcaacggactgaccggcacaggcgtgctgaccgagagcaataagaagttcctgccttttcagcagttcggcagggacatcgcagataccacagacgccgtgcgcgaccctcagaccctggagatcctggacatcacaccatgcagcttcggcggcgtgtccgtgatcacaccaggcaccaatacatccaaccaggtggccgtgctgtatcaggacgtgaattgtaccgaggtgcccaatgcaatccacgcagatcagctgacccctacatggcgggtgtactctaccggcagcaacgtgttccagacaagagccggatgcctgatcggagcagagcacgtgaacaatagctatgagtgcgacatccctatcggcgccggcatctgtgccagctaccagacccagacaaactccccatctggagcaggctcccaccatcaccatcaccatcaccatcaccactga

SEQ ID NO: 4127 - DNA, 2148 bp, Artificial Sequence
  Description of Artificial Sequence: Synthetic polynucleotide
atgggcatcctgccaagcccaggaatgcccgccctgctgtctctggtgagcctgctgtccgtgctgctgatgggatgcgtggcagagacaggcacacagtgcgtgaacctgaccacaaggacccagctgccccctgcctataccaattctttcacacggggcgtgtactatcccgacaaggtgtttagaagctccgtgctgcactccacacaggatctgtttctgcctttcttttctaacgtgacctggttccacgccatccacgtgtccggcaccaatggcacaaagcggttcgacaatcccgtgctgccttttaacgatggcgtgtacttcgccagcaccgagaagtccaacatcatcagaggctggatctttggcaccacactggactctaagacacagagcctgctgatcgtgaacaatgccaccaacgtggtgatcaaggtgtgcgagttccagttttgtaatgatccattcctgggcgtgtactatcacaagaacaataagtcctggatggagtctgagtttcgcgtgtattctagcgccaacaattgcacatttgagtacgtgagccagcccttcctgatggacctggagggcaagcagggcaatttcaagaacctgagggagttcgtgtttaagaatatcgatggctacttcaagatctacagcaagcacaccccaatcaacctggtgcgcgacctgccacagggattctccgccctggagccactggtggatctgcccatcggcatcaacatcacccggtttcagacactgctggccctgcacagatcctacctgacaccaggcgactcctctagcggatggaccgcaggagctgccgcctactatgtgggctatctgcagccccggaccttcctgctgaagtacaacgagaatggcaccatcacagacgcagtggattgcgccctggaccccctgtctgagacaaagtgtacactgaagagctttaccgtggagaagggcatctatcagacaagcaatttcagggtgcagcctaccgagtccatcgtgcgctttcccaatatcacaaacctgtgcccttttggcgaggtgttcaacgccaccagattcgccagcgtgtacgcctggaatcggaagagaatctccaactgcgtggccgactattctgtgctgtacaactccgcctctttcagcacctttaagtgctatggcgtgtctcccacaaagctgaatgatctgtgctttaccaacgtgtacgccgatagcttcgtgatcaggggagacgaagtgagacagatcgcaccaggacagacaggaaagatcgcagactacaattataagctgcctgacgatttcaccggctgcgtgatcgcctggaactccaacaatctggattctaaagtgggcggcaactacaattatctgtacaggctgtttcgcaagtccaatctgaagccattcgagcgggacatctccacagagatctaccaggccggctctaccccctgcaatggcgtggagggctttaactgttatttccctctgcagtcttacggcttccagccaacaaacggcgtgggctatcagccctacagagtggtggtgctgtcctttgagctgctgcacgcaccagcaacagtgtgcggcccaaagaagtctaccaatctggtgaagaacaagtgcgtgaacttcaacttcaacggactgaccggcacaggcgtgctgaccgagagcaataagaagttcctgccttttcagcagttcggcagggacatcgcagataccacagacgccgtgcgcgaccctcagaccctggagatcctggacatcacaccatgcagcttcggcggcgtgtccgtgatcacaccaggcaccaatacatccaaccaggtggccgtgctgtatcaggacgtgaattgtaccgaggtgcccgtggcaatccacgcagatcagctgacccctacatggcgggtgtactctaccggcagcaacgtgttccagacaagagccggatgcctgatcggagttgagcacgtgaacaatagctatgagtgcgacatccctatcggcgccggcatctgtgccagctaccagacccagacaaactccccatctggagcaggctcccaccatcaccatcaccatcaccatcaccactga

SEQ ID NO: 4128 - DNA, 2148 bp, Artificial Sequence
  Description of Artificial Sequence: Synthetic polynucleotide
atgggcatcctgccaagcccaggaatgcccgccctgctgtctctggtgagcctgctgtccgtgctgctgatgggatgcgtggcagagacaggcacacagtgcgtgaacctgaccacaaggacccagctgccccctgcctataccaattctttcacacggggcgtgtactatcccgacaaggtgtttagaagctccgtgctgcactccacacaggatctgtttctgcctttcttttctaacgtgacctggttccacgccatccacgtgtccggcaccaatggcacaaagcggttcgacaatcccgtgctgccttttaacgatggcgtgtacttcgccagcaccgagaagtccaacatcatcagaggctggatctttggcaccacactggactctaagacacagagcctgctgatcgtgaacaatgccaccaacgtggtgatcaaggtgtgcgagttccagttttgtaatgatccattcctgggcgtgtactatcacaagaacaataagtcctggatggagtctgagtttcgcgtgtattctagcgccaacaattgcacatttgagtacgtgagccagcccttcctgatggacctggagggcaagcagggcaatttcaagaacctgagggagttcgtgtttaagaatatcgatggctacttcaagatctacagcaagcacaccccaatcaacctggtgcgcgacctgccacagggattctccgccctggagccactggtggatctgcccatcggcatcaacatcacccggtttgaaacactgctggccctgcacagatcctacctgacaccaggcgactcctctagcggatggaccgcaggagctgccgcctactatgtgggctatctgcagccccggaccttcctgctgaagtacaacgagaatggcaccatcacagacgcagtggattgcgccctggaccccctgtctgagacaaagtgtacactgaagagctttaccgtggagaagggcatctatcagacaagcaatttcagggtgcagcctaccgagtccatcgtgcgctttcccaatatcacaaacctgtgcccttttggcgaggtgttcaacgccaccagattcgccagcgtgtacgcctggaatcggaagagaatctccaactgcgtggccgactattctgtgctgtacaactccgcctctttcagcacctttaagtgctatggcgtgtctcccacaaagctgaatgatctgtgctttaccaacgtgtacgccgatagcttcgtgatcaggggagacgaagtgagacagatcgcaccaggacagacaggaaagatcgcagactacaattataagctgcctgacgatttcaccggctgcgtgatcgcctggaactccaacaatctggattctaaagtgggcggcaactacaattatctgtacaggctgtttcgcaagtccaatctgaagccattcgagcgggacatctccacagagatctaccaggccggctctaccccctgcaatggcgtggagggctttaactgttatttccctctgcagtcttacggcttccagccaacaaacggcgtgggctatcagccctacagagtggtggtgctgtcctttgagctgctgcacgcaccagcaacagtgtgcggcccaaagaagtctaccaatctggtgaagaacaagtgcgtgaacttcaacttcaacggactgaccggcacaggcgtgctgaccgagagcaataagaagttcctgccttttcagcagttcggcagggacatcgcagataccacagacgccgtgcgcgaccctcagaccctggagatcctggacatcacaccatgcagcttcggcggcgtgtccgtgatcacaccaggcaccaatacatccaaccaggtggccgtgctgtatcaggacgtgaattgtaccgaggtgcccgtggcaatccacgcagatcagctgacccctacatggcgggtgtactctaccggcagcaacgtgttccagacaagagccggatgcctgatcggagcagagcacgtgaacaatagctatgagtgcgacatccctatcggcgccggcatctgtgccagctaccagacccagacaaactccccatctggagcaggctcccaccatcaccatcaccatcaccatcaccactga

SEQ ID NO: 4129 - DNA, 2148 bp, Artificial Sequence
  Description of Artificial Sequence: Synthetic polynucleotide
atgggcatcctgccaagcccaggaatgcccgccctgctgtctctggtgagcctgctgtccgtgctgctgatgggatgcgtggcagagacaggcacacagtgcgtgaacctgaccacaaggacccagctgccccctgcctataccaattctttcacacggggcgtgtactatcccgacaaggtgtttagaagctccgtgctgcactccacacaggatctgtttctgcctttcttttctaacgtgacctggttccacgccatccacgtgtccggcaccaatggcacaaagcggttcgacaatcccgtgctgccttttaacgatggcgtgtacttcgccagcaccgagaagtccaacatcatcagaggctggatctttggcaccacactggactctaagacacagagcctgctgatcgtgaacaatgccaccaacgtggtgatcaaggtgtgcgagttccagttttgtaatgatccattcctgggcgtgtactatcacaagaacaataagtcctggatggagtctgagtttcgcgtgtattctagcgccaacaattgcacatttgagtacgtgagccagcccttcctgatggacctggagggcaagcagggcaatttcaagaacctgagggagttcgtgtttaagaatatcgatggctacttcaagatctacagcaagcacaccccaatcaacctggtgcgcgacctgccacagggattctccgccctggagccactggtggatctgcccatcggcatcaacatcacccggtttcagacactgctggccctgcacagatcctacctgacaccaggcgactcctctagcggatggaccgcaggagctgccgcctactatgtgggctatctgcagccccggaccttcctgctgaagtacaacgagaatggcaccatcacagacgcagtggattgcgccctggaccccctgtctgagacaaagtgtacactgaagagctttaccgtggagaagggcatctatcagacaagcaatttcagggtgcagcctaccgagtccatcgtgcgctttcccaatatcacaaacctgtgccctttttgggaggtgttcaacgccaccagattcgccagcgtgtacgcctggaatcggaagagaatctccaactgcgtggccgactattctgtgctgtacaactccgcctctttcagcacctttaagtgctatggcgtgtctcccacaaagctgaatgatctgtgctttaccaacgtgtacgccgatagcttcgtgatcaggggagacgaagtgagacagatcgcaccaggacagacaggaaagatcgcagactacaattataagctgcctgacgatttcaccggctgcgtgatcgcctggaactccaacaatctggattctaaagtgggcggcaactacaattatctgtacaggctgtttcgcaagtccaatctgaagccattcgagcgggacatctccacagagatctaccaggccggctctaccccctgcaatggcgtggagggctttaactgttatttccctctgcagtcttacggcttccagccaacaaacggcgtgggctatcagccctacagagtggtggtgctgtcctttgagctgctgcacgcaccagcaacagtgtgcggcccaaagaagtctaccaatctggtgaagaacaagtgcgtgaacttcaacttcaacggactgaccggcacaggcgtgctgaccgagagcaataagaagttcctgccttttcagcagttcggcagggacatcgcagataccacagacgccgtgcgcgaccctcagaccctggagatcctggacatcacaccatgcagcttcggcggcgtgtccgtgatcacaccaggcaccaatacatccaaccaggtggccgtgctgtatcaggacgtgaattgtaccgaggtgcccgtggcaatccacgcagatcagctgacccctacatggcgggtgtactctaccggcagcaacgtgttccagacaagagccggatgcctgatcggagcagagcacgtgaacaatagctatgagtgcgacatccctatcggcgccggcatctgtgccagctaccagacccagacaaactccccatctggagcaggctcccaccatcaccatcaccatcaccatcaccactga

SEQ ID NO: 4130 - DNA, 2148 bp, Artificial Sequence
  Description of Artificial Sequence: Synthetic polynucleotide
atgggcatcctgccaagcccaggaatgcccgccctgctgtctctggtgagcctgctgtccgtgctgctgatgggatgcgtggcagagacaggcacacagtgcgtgaacctgaccacaaggacccagctgccccctgcctataccaattctttcacacggggcgtgtactatcccgacaaggtgtttagaagctccgtgctgcactccacacaggatctgtttctgcctttcttttctaacgtgacctggttccacgccatccacgtgcgcggcaccaatggcacaaagcggttcgacaatcccgtgctgccttttaacgatggcgtgtacttcgccagcaccgagaagtccaacatcatcagaggctggatctttggcaccacactggactctaagacacagagcctgctgatcgtgaacaatgccaccaacgtggtgatcaaggtgtgcgagttccagttttgtaatgatccattcctgggcgtgtactatcacaagaacaataagtcctggatggagtctgagtttcgcgtgtattctagcgccaacaattgcacatttgagtacgtgagccagcccttcctgatggacctggagggcaagcagggcaatttcaagaacctgagggagttcgtgtttaagaatatcgatggctacttcaagatctacagcaagcacaccccaatcaacctggtgcgcgacctgccacagggattctccgccctggagccactggtggatctgcccatcggcatcaacatcacccggtttcagacactgctggccctgcacagatcctacctgacaccaggcgactcctctagcggatggaccgcaggagctgccgcctactatgtgggctatctgcagccccggaccttcctgctgaagtacaacgagaatggcaccatcacagacgcagtggattgcgccctggaccccctgtctgagacaaagtgtacactgaagagctttaccgtggagaagggcatctatcagacaagcaatttcagggtgcagcctaccgagtccatcgtgcgctttcccaatatcacaaacctgtgcccttttggcgaggtgttcaacgccaccagattcgccagcgtgtacgcctggaatcggaagagaatctccaactgcgtggccgactattctgtgctgtacaactccgcctctttcagcacctttaagtgctatggcgtgtctcccacaaagctgaatgatctgtgctttaccaacgtgtacgccgatagcttcgtgatcaggggagacgaagtgagacagatcgcaccaggacagacaggaaagatcgcagactacaattataagctgcctgacgatttcaccggctgcgtgatcgcctggaactccaacaatctggattctaaagtgggcggcaactacaattatctgtacaggctgtttcgcaagtccaatctgaagccattcgagcgggacatctccacagagatctaccaggccggctctaccccctgcaatggcgtggagggctttaactgttatttccctctgcagtcttacggcttccagccaacaaacggcgtgggctatcagccctacagagtggtggtgctgtcctttgagctgctgcacgcaccagcaacagtgtgcggcccaaagaagtctaccaatctggtgaagaacaagtgcgtgaacttcaacttcaacggactgaccggcacaggcgtgctgaccgagagcaataagaagttcctgccttttcagcagttcggcagggacatcgcagataccacagacgccgtgcgcgaccctcagaccctggagatcctggacatcacaccatgcagcttcggcggcgtgtccgtgatcacaccaggcaccaatacatccaaccaggtggccgtgctgtatcaggacgtgaattgtaccgaggtgcccgtggcaatccacgcagatcagctgacccctacatggcgggtgtactctaccggcagcaacgtgttccagacaagagccggatgcctgatcggagcagagcacgtgaacaatagctatgagtgcgacatccctatcggcgccggcatctgtgccagctaccagacccagacaaactccccatctggagcaggctcccaccatcaccatcaccatcaccatcaccactga

SEQ ID NO: 4131 - DNA, 2148 bp, Artificial Sequence
  Description of Artificial Sequence: Synthetic polynucleotide
atgggcatcctgccaagcccaggaatgcccgccctgctgtctctggtgagcctgctgtccgtgctgctgatgggatgcgtggcagagacaggcacacagtgcgtgaacctgaccacaaggacccagctgccccctgcctataccaattctttcacacggggcgtgtactatcccgacaaggtgtttagaagctccgtgctgcactccacacaggatctgtttctgcctttcttttctaacgtgacctggttccacgccatccacgtgtccggcaccaatggcacaaagcggttcgacaatcccgtgctgccttttaacgatggcgtgtacttcgccagcaccgagaagtccaacatcatcagaggctggatctttggcaccacactggactctaagacacagagcctgctgatcgtgaacaatgccaccaacgtggtgatcaaggtgtgcgagttccagttttgtaatgatccattcctgggcgtgtactatcacaagaacaataagtcctggatggagtctgagtttcgcgtgtattctagcgccaacaattgcacatttgagtactacagccagcccttcctgatggacctggagggcaagcagggcaatttcaagaacctgagggagttcgtgtttaagaatatcgatggctacttcaagatctacagcaagcacaccccaatcaacctggtgcgcgacctgccacagggattctccgccctggagccactggtggatctgcccatcggcatcaacatcacccggtttcagacactgctggccctgcacagatcctacctgacaccaggcgactcctctagcggatggaccgcaggagctgccgcctactatgtgggctatctgcagccccggaccttcctgctgaagtacaacgagaatggcaccatcacagacgcagtggattgcgccctggaccccctgtctgagacaaagtgtacactgaagagctttaccgtggagaagggcatctatcagacaagcaatttcagggtgcagcctaccgagtccatcgtgcgctttcccaatatcacaaacctgtgcccttttggcgaggtgttcaacgccaccagattcgccagcgtgtacgcctggaatcggaagagaatctccaactgcgtggccgactattctgtgctgtacaactccgcctctttcagcacctttaagtgctatggcgtgtctcccacaaagctgaatgatctgtgctttaccaacgtgtacgccgatagcttcgtgatcaggggagacgaagtgagacagatcgcaccaggacagacaggaaagatcgcagactacaattataagctgcctgacgatttcaccggctgcgtgatcgcctggaactccaacaatctggattctaaagtgggcggcaactacaattatctgtacaggctgtttcgcaagtccaatctgaagccattcgagcgggacatctccacagagatctaccaggccggctctaccccctgcaatggcgtggagggctttaactgttatttccctctgcagtcttacggcttccagccaacaaacggcgtgggctatcagccctacagagtggtggtgctgtcctttgagctgctgcacgcaccagcaacagtgtgcggcccaaagaagtctaccaatctggtgaagaacaagtgcgtgaacttcaacttcaacggactgaccggcacaggcgtgctgaccgagagcaataagaagttcctgccttttcagcagttcggcagggacatcgcagataccacagacgccgtgcgcgaccctcagaccctggagatcctggacatcacaccatgcagcttcggcggcgtgtccgtgatcacaccaggcaccaatacatccaaccaggtggccgtgctgtatcaggacgtgaattgtaccgaggtgcccgtggcaatccacgcagatcagctgacccctacatggcgggtgtactctaccggcagcaacgtgttccagacaagagccggatgcctgatcggagcagagcacgtgaacaatagctatgagtgcgacatccctatcggcgccggcatctgtgccagctaccagacccagacaaactccccatctggagcaggctcccaccatcaccatcaccatcaccatcaccactga

SEQ ID NO: 4132 - DNA, 2148 bp, Artificial Sequence
  Description of Artificial Sequence: Synthetic polynucleotide
atgggcatcctgccaagcccaggaatgcccgccctgctgtctctggtgagcctgctgtccgtgctgctgatgggatgcgtggcagagacaggcacacagtgcgtgaacctgaccacaaggacccagctgccccctgcctataccaattctttcacacggggcgtgtactatcccgacaaggtgtttagaagctccgtgctgcactccacacaggatctgtttctgcctttcttttctaacgtgacctggttccacgccatccacgtgtccggcaccaatggcacaaagcggttcgacaatcccgtgctgccttttaacgatggcgtgtacttcgccagcaccgagaagtccaacatcatcagaggctggatctttggcaccacactggactctaagacacagagcctgctgatcgtgaacaatgccaccaacgtggtgatcaaggtgtgcgagttccagttttgtaatgatccattcctgggcgtgtactatcacaagaacaataagtcctggatggagtctgagtttcgcgtgtattctagcgccaacaattgcacatttgagtacgtgagccagcccttcctgatggacctggagggcaagcagggcaatttcaagaacctgagggagttcgtgtttaagaatatcgatggctacttcaagatctacagcaagcacaccccaatcaacctggtgcgcgacctgccacagggattctccgccctggagccactggtggatctgcccatcggcatcaacatcacccggtttcagacactgctggccctgcacagatcctacctgacaccaggcgactcctctagcggatggaccgcaggagctgccgcctactatgtgggctatctgcagccccggaccttcctgctgaagtacaacgagaatggcaccatcacagacgcagtggattgcgccctggaccccctgtctgagacaaagtgtacactgaagagctttaccgtggagaagggcatctatcagacaagcaatttcagggtgcagcctaccgagtccatcgtgcgctttcccaatatcacaaacctgtgccctcttggcgaggtgttcaacgccaccagattcgccagcagttacgcctggaatcggaagagaatctccaactgcgtggccgactattctgtgctgtacaactccgcctctttcagcacctttaagtgctatggcgtgtctcccacaaagctgaatgatctgtgctttaccaacgtgtacgccgatcgattcgtgatcaggggagacgaagtgagacagatcgcaccaggacagacaggaaagatcgcagactacaattataagctgcctgacgatttcaccggctgcgtgatcgcctggaactccaacaatctggatgcgaaagtgggcggcaactacaattatctgtacaggctgtttcgcaagtccaatctgaagccattcgagcggtttatctccacagagatctaccaggccggctctacccccgcaaatggcgtggagggctttaactgttatttccctctgcagtcttacggcttccagccaacaaacggcgtgacgtatcagccctacagagtggtggtgctgtcctttgagctgctgcacgcaccacatacagtgtgcggcccaaagaagtctaccaatctggtgaagaacaagtgcgtgaacttcaacttcaacggactgaccggcacaggcgtgctgaccgagagcaataagaagttcctgccttttcagcagttcggcagggacatcgcagataccacagacgccgtgcgcgaccctcagaccctggagatcctggacatcacaccatgcagcttcggcggcgtgtccgtgatcacaccaggcaccaatacatccaaccaggtggccgtgctgtatcaggacgtgaattgtaccgaggtgcccgtggcaatccacgcagatcagctgacccctacatggcgggtgtactctaccggcagcaacgtgttccagacaagagccggatgcctgatcggagcagagcacgtgaacaatagctatgagtgcgacatccctatcggcgccggcatctgtgccagctaccagacccagacaaactccccatctggagcaggctcccaccatcaccatcaccatcaccatcaccactga

SEQ ID NO: 4133 - DNA, 2148 bp, Artificial Sequence
  Description of Artificial Sequence: Synthetic polynucleotide
atgggcatcctgccaagcccaggaatgcccgccctgctgtctctggtgagcctgctgtccgtgctgctgatgggatgcgtggcagagacaggcacacagtgcgtgaacctgaccacaaggacccagctgccccctgcctataccaattctttcacacggggcgtgtactatcccgacaaggtgtttagaagctccgtgctgcactccacacaggatctgtttctgcctttcttttctaacgtgacctggttccacgcctaccacgtgtccggcaccaatggcacaaagcggttcgacaatcccgtgctgccttttaacgatggcgtgtacttcgccagcaccgagaagtccaacatcatcagaggctggatctttggcaccacactggactctaagacacagagcctgctgatcgtgaacaatgccaccaacgtggtgatcaaggtgtgcgagttccagttttgtaatgatccattcctgggcgtgtactatcacaagaacaataagtcctggatggagtctgagtttcgcgtgtattctagcgccaacaattgcacatttgagtaccatagccagcccttcctgatggacctggagggcaagcagggcaatttcaagaacctgagggagttcgtgtttaagaatatcgatggctacttcaagatctacagcaagcacaccccaatcaacctggtgcgcgacctgccacagggattctccgccctggagccactggtggatctgcccatcggcatcaacatcacccggtttcagacactgctggccctgcacagatcctacctgacaccaggcgactcctctagcggagaaaccgcaggagctgccgcctactatgtgggctatctgcagccccggaccttcctgctgaagtacaacgagaatggcaccatcacagacgcagtggattgcgccctggaccccctgtctgagacaaagtgtacactgaagagctttaccgtggagaagggcatctatcagacaagcaatttcagggtgcagcctaccgagtccatcgtgcgctttcccaatatcacaaacccgtgcccttttggcgaggtgttcaacgccaccagattcgccagcgtgtacgcctggaatcggaagagaatctccaactgcgtggccgactattctgtgctgtacaactccgcctctttcagcacctttaagtgctatggcgtgtctcccacaaagctgaatgatctgtgctttaccaacgtgtacgccgatagcttcgtgatcaggggagacgaagtgagacagatcgcaccaggacagacaggaaagatcgcagactacaattataagctgcctgacgatttcaccggctgcgtgatcgcctggaactccaacaatctggattctaaagtgggcggcaactacaattatctgtacaggctgtttcgcaagtccaatctgaagccattcgagcgggacatctccacagagatctaccaggccggctctaccccctgcaatggcgtggagggctttaactgttatttccctctgcagtcttacggcttccagccaacaaacggcccgggccaacagccctacagagtggtggtgctgtcctttgagctgctgcacgcaccagcaacagtgtgcggcccaaagaagtctaccaatctggtgaagaacaagtgcgtgaacttcaacttcaacggactgaccggcacaggcgtgctgaccgagagcaataagaagttcctgccttttcagcagttcggcagggacatcgcagataccacagacgccgtgcgcgaccctcagaccctggagatcctggacatcacaccatgcagcttcggcggcgtgtccgtgatcacaccaggcaccaatacatccaaccaggtggccgtgctgtatcaggacgtgaattgtaccgaggtgcccgatgcaatccacgcagatcagctgacccctacatggcgggtgtactctaccggcagcaacgtgttccagacaagagccggatgcctgatcggagcagagcacgtgaacaatagctatgagtgcgacatccctatcggcgccggcatctgtgccagctaccagacccagacaaactccccatctggagcaggctcccaccatcaccatcaccatcaccatcaccactga

SEQ ID NO: 4134 - DNA, 2148 bp, Artificial Sequence
  Description of Artificial Sequence: Synthetic polynucleotide
atgggcatcctgccaagcccaggaatgcccgccctgctgtctctggtgagcctgctgtccgtgctgctgatgggatgcgtggcagagacaggcacacagtgcgtgaacctgaccacaaggacccagctgccccctgcctataccaattctttcacacggggcgtgtactatcccgacaaggtgtttagaagctccgtgctgcactccacacaggatctgtttctgcctttcttttctaacgtgacctggttccacgccatccacgtgtccggcaccaatggcacaaagcggttcgacaatcccgtgctgccttttaacgatggcgtgtacttcgccagcaccgagaagtccaacatcatcagaggctggatctttggcaccacactggactctaagacacagagcctgctgatcgtgaacaatgccaccaacgtggtgatcaaggtgtgcgagttccagttttgtaatgatccattcctgggcgtgtactatcacaagaacaataagtcctggatggagtctgagtttcgcgtgtattctagcgccaacaattgcacatttgagtacgtgagccagcccttcctgatggacctggagggcaagcagggcaatttcaagaacctgagggagttcgtgtttaagaatatcgatggctacttcaagatctacagcaagcacaccccaatcaacctggtgcgcgacctgccacagggattctccgccctggagccactggtgatactgcccatcggcatcaacatcacccggtttcagacactgctggccctgcacagatcctacctgacaccaggcgactcctctagcggatggaccgcaggagctgccgcctactatgtgggctatctgcagccccggaccttcctgctgaagtacaacgagaatggcaccatcacagacgcagtggattgcgccctggaccccctgtctgagacaaagtgtacactgaagagctttaccgtggagaagggcatctatcagacaagcaatttcagggtgcagcctaccgagtccatcgtgcgctttcccaatatcacaaacctgtgcccttttggcgaggtgttcaacgccaccagattcgccagcgtgtacgcctggaatcggaagagaatctccaactgcgtggccgactattctgtgctgtacaactccgcctctttcagcacctttaagtgctatggcgtgtctcccacaaagctgaatgatctgtgctttaccaacgtgtacgccgatagcttcgtgatcaggggagacgaagtgagacagatcgcaccaggacagacaggaaagatcgcagactacaattataagctgcctgacgatttcaccggctgcgtgatcgcctggaactccaacaatctggattctaaagtgggcggcaactacaattatctgtacaggctgtttcgcaagtccaatctgaagccattcgagcgggacatctccacagagatctaccaggccggctctaccccctgcaatggcgtggagggctttaactgttatttccctctgcagtcttacggcttccagccaacaaacggcgtgggctatcagccctacagagtggtggtgctgtcctttgagctgctgcacgcaccagcaacagtgtgcggcccaaagaagtctaccaatctggtgaagaacaagtgcgtgaacttcaacttcaacggactgaccggcacaggcgtgctgaccgagagcaataagaagttcctgccttttcagcagttcggcagggacatcgcagataccacagacgccgtgcgcgaccctcagaccctggagatcctggacatcacaccatgcagcttcggcggcgtgtccgtgatcacaccaggcaccaatacatccaaccaggtggccgtgctgtatcaggacgtgaattgtaccgaggtgcccgtggcaatccacgcagatcagctgacccctacatggcgggtgtactctaccggcagcaacgtgttccagacaagagccggatgcctgatcggagcagagcacgtgaacaatagctatgagtgcgacatccctatcggcgccggcatctgtgccagctaccagacccagacaaactccccatctggagcaggctcccaccatcaccatcaccatcaccatcaccactga

SEQ ID NO: 4135 - DNA, 2148 bp, Artificial Sequence
  Description of Artificial Sequence: Synthetic polynucleotide
atgggcatcctgccaagcccaggaatgcccgccctgctgtctctggtgagcctgctgtccgtgctgctgatgggatgcgtggcagagacaggcacacagtgcgtgaacctgaccacaaggacccagctgccccctgcctataccaattctttcacacggggcgtgtactatcccgacaaggtgtttagaagctccgtgctgcactccacacaggatctgtttctgcctttcttttctaacgtgacctggttccacgccaaacacgtgtccggcaccaatggcacaaagcggttcgacaatcccgtgctgccttttaacgatggcgtgtacttcgccagcaccgagaagtccaacatcatcagaggctggatctttggcaccacactggactctaagacacagagcctgctgatcgtgaacaatgccaccaacgtggtgatcaaggtgtgcgagttccagttttgtaatgatccattcctgggcgtgtactatcacaagaacaataagtcctggatggagtctgagtttcgcgtgtattctagcgccaacaattgcacatttgagtaccatagccagcccttcctgatggacctggagggcaagcagggcaatttcaagaacctgagggagttcgtgtttaagaatatcgatggctacttcaagatctacagcaagcacaccccaatcaacctggtgcgcgacctgccacagggattctccgccctggagccactggtggatctgcccatcggcatcaacatcacccggtttcagacactgctggccctgcacagatcctacctgacaccaggcgactcctctagcggagaaaccgcaggagctgccgcctactatgtgggctatctgcagccccggaccttcctgctgaagtacaacgagaatggcaccatcacagacgcagtggattgcgccctggaccccctgtctgagacaaagtgtacactgaagagctttaccgtggagaagggcatctatcagacaagcaatttcagggtgcagcctaccgagtccatcgtgcgctttcccaatatcacaaaccattgcccttttggcgaggtgttcaacgccaccagattcgccagcgtgtacgcctggaatcggaagagaatctccaactgcgtggccgactattctgtgctgtacaactccgcctctttcagcacctttaagtgctatggcgtgtctcccacaaagctgaatgatctgtgctttaccaacgtgtacgccgatagcttcgtgatcaggggagacgaagtgagacagatcgcaccaggacagacaggaaagatcgcagactacaattataagctgcctgacgatttcaccggctgcgtgatcgcctggaactccaacaatctggattctaaagtgggcggcaactacaattatctgtacaggctgtttcgcaagtccaatctgaagccattcgagcgggacatctccacagagatctaccaggccggctctaccccctgcaatggcgtggagggctttaactgttatttccctctgcagtcttacggcttccagccaacaaacggcccgggctatcagccctacagagtggtggtgctgtcctttgagctgctgcacgcaccagcaacagtgtgcggcccaaagaagtctaccaatctggtgaagaacaagtgcgtgaacttcaacttcaacggactgaccggcacaggcgtgctgaccgagagcaataagaagttcctgccttttcagcagttcggcagggacatcgcagataccacagacgccgtgcgcgaccctcagaccctggagatcctggacatcacaccatgcagcttcggcggcgtgtccgtgatcacaccaggcaccaatacatccaaccaggtggccgtgctgtatcaggacgtgaattgtaccgaggtgcccgatgcaatccacgcagatcagctgacccctacatggcgggtgtactctaccggcagcaacgtgttccagacaagagccggatgcctgatcggagcagagcacgtgaacaatagctatgagtgcgacatccctatcggcgccggcatctgtgccagctaccagacccagacaaactccccatctggagcaggctcccaccatcaccatcaccatcaccatcaccactga

SEQ ID NO: 4136 - DNA, 2148 bp, Artificial Sequence
  Description of Artificial Sequence: Synthetic polynucleotide
atgggcatcctgccaagcccaggaatgcccgccctgctgtctctggtgagcctgctgtccgtgctgctgatgggatgcgtggcagagacaggcacacagtgcgtgaacctgaccacaaggacccagctgccccctgcctataccaattctttcacacggggcgtgtactatcccgacaaggtgtttagaagctccgtgctgcactccacacaggatctgtttctgcctttcttttctaacgtgaaatggttccacgccatccacgtgtccggcaccaatggcacaaagcggttcgacaatcccgtgctgccttttaacgatggcgtgtacttcgccagcaccgagaagtccaacatcatcagaggctggatctttggcaccacactggactctaagacacagagcctgctgatcgtgaacaatgccaccaacgtggtgatcaaggtgtgcgagttccagttttgtaatgatccattcctgggcgtgtactatcacaagaacaataagtcctggatggagtctgagtttcgcgtgtattctagcgccaacaattgcacatttgagtacgtgagccagcccttcctgatggacctggagggcaagcagggcaatttcaagaacctgagggagttcgtgtttaagaatatcgatggctacttcaagatctacagcaagcacaccccaatcaacctggtgcgcgacctgccacagggattctccgccctggagccactggtggatctgcccatcggcatcaacatcacccggtttcagacactgctggccctgcacagatcctacctgacaccaggcgactcctctagcggatggaccgcaggagctgccgcctactatgtgggctatctgcagccccggaccttcctgctgaagtacaacgagaatggcaccatcacagacgcagtggattgcgccctggaccccctgtctgagacaaagtgtacactgaagagctttaccgtggagaagggcatctatcagacaagcaatttcagggtgcagcctaccgagtccatcgtgcgctttcccaatatcacaaacctgtgcccttttggcgaggtgttcaacgccaccagattcgccagcgtgtacgcctggaatcggaagagaatctccaactgcgtggccgactattctgtgctgtacaactccgcctctttcagcacctttaagtgctatggcgtgtctcccacaaagctgaatgatctgtgctttaccaacgtgtacgccgatagcttcgtgatcaggggagacgaagtgagacagatcgcaccaggacagacaggaaagatcgcagactacaattataagctgcctgacgatttcaccggctgcgtgatcgcctggaactccaacaatctggattctaaagtgggcggcaactacaattatctgtacaggctgtttcgcaagtccaatctgaagccattcgagcgggacatctccacagagatctaccaggccggctctaccccctgcaatggcgtggagggctttaactgttatttccctctgcagtcttacggcttccagccaacaaacggcgtgggctatcagccctacagagtggtggtgctgtcctttgagctgctgcacgcaccagcaacagtgtgcggcccaaagaagtctaccaatctggtgaagaacaagtgcgtgaacttcaacttcaacggactgaccggcacaggcgtgctgaccgagagcaataagaagttcctgccttttcagcagttcggcagggacatcgcagataccacagacgccgtgcgcgaccctcagaccctggagatcctggacatcacaccatgcagcttcggcggcgtgtccgtgatcacaccaggcaccaatacatccaaccaggtggccgtgctgtatcaggacgtgaattgtaccgaggtgcccgtggcaatccacgcagatcagctgacccctacatggcgggtgtactctaccggcagcaacgtgttccagacaagagccggatgcctgatcggagcagagcacgtgaacaatagctatgagtgcgacatccctatcggcgccggcatctgtgccagctaccagacccagacaaactccccatctggagcaggctcccaccatcaccatcaccatcaccatcaccactga

SEQ ID NO: 4137 - DNA, 2148 bp, Artificial Sequence
  Description of Artificial Sequence: Synthetic polynucleotide
atgggcatcctgccaagcccaggaatgcccgccctgctgtctctggtgagcctgctgtccgtgctgctgatgggatgcgtggcagagacaggcacacagtgcgtgaacctgaccacaaggacccagctgccccctgcctataccaattctttcacacggggcgtgtactatcccgacaaggtgtttagaagctccgtgctggtatccacacaggatctgtttctgcctttcttttctaacgtgacctggttccacgccatccacgtgtccggcaccaatggcacaaagcggttcgacaatcccgtgctgccttttaacgatggcgtgtacttcgccagcaccgagaagtccaacatcatcagaggctggatctttggcaccacactggactctaagacacagagcctgctgatcgtgaacaatgccaccaacgtggtgatcaaggtgtgcgagttccagttttgtaatgatccattcctgggcgtgtactatcacaagaacaataagtcctggatggagtctgagtttcgcgtgtattctagcgccaacaattgcacatttgagtacgtgagccagcccttcctgatggacctggagggcaagcagggcaatttcaagaacctgagggagttcgtgtttaagaatatcgatggctacttcaagatctacagcaagcacaccccaatcaacctggtgcgcgacctgccacagggattctccgccctggagccactggtggatctgcccatcggcatcaacatcacccggtttcagacactgctggccctgcacagatcctacctgacaccaggcgactcctctagcggatggaccgcaggagctgccgcctactatgtgggctatctgcagccccggaccttcctgctgaagtacaacgagaatggcaccatcacagacgcagtggattgcgccctggaccccctgtctgagacaaagtgtacactgaagagctttaccgtggagaagggcatctatcagacaagcaatttcagggtgcagcctaccgagtccatcgtgcgctttcccaatatcacaaacctgtgcccttttggcgaggtgttcaacgccaccagattcgccagcgtgtacgcctggaatcggaagagaatctccaactgcgtggccgactattctgtgctgtacaactccgcctctttcagcacctttaagtgctatggcgtgtctcccacaaagctgaatgatctgtgctttaccaacgtgtacgccgatagcttcgtgatcaggggagacgaagtgagacagatcgcaccaggacagacaggaaagatcgcagactacaattataagctgcctgacgatttcaccggctgcgtgatcgcctggaactccaacaatctggattctaaagtgggcggcaactacaattatctgtacaggctgtttcgcaagtccaatctgaagccattcgagcgggacatctccacagagatctaccaggccggctctaccccctgcaatggcgtggagggctttaactgttatttccctctgcagtcttacggcttccagccaacaaacggcgtgggctatcagccctacagagtggtggtgctgtcctttgagctgctgcacgcaccagcaacagtgtgcggcccaaagaagtctaccaatctggtgaagaacaagtgcgtgaacttcaacttcaacggactgaccggcacaggcgtgctgaccgagagcaataagaagttcctgccttttcagcagttcggcagggacatcgcagataccacagacgccgtgcgcgaccctcagaccctggagatcctggacatcacaccatgcagcttcggcggcgtgtccgtgatcacaccaggcaccaatacatccaaccaggtggccgtgctgtatcaggacgtgaattgtaccgaggtgcccgtggcaatccacgcagatcagctgacccctacatggcgggtgtactctaccggcagcaacgtgttccagacaagagccggatgcctgatcggagcagagcacgtgaacaatagctatgagtgcgacatccctatcggcgccggcatctgtgccagctaccagacccagacaaactccccatctggagcaggctcccaccatcaccatcaccatcaccatcaccactga

SEQ ID NO: 4138 - DNA, 2148 bp, Artificial Sequence
  Description of Artificial Sequence: Synthetic polynucleotide
atgggcatcctgccaagcccaggaatgcccgccctgctgtctctggtgagcctgctgtccgtgctgctgatgggatgcgtggcagagacaggcacacagtgcgtgaacctgaccacaaggacccagctgccccctgcctataccaattctttcacacggggcgtgtactatcccgacaaggtgtttagaagctccgtgctgcactccacacaggatctgtttctgcctttcttttctaacgtgacctggttccacgccatccacgtgtccggcaccaatggcacaaagcggttcgacaatcccgtgctgccttttaacgatggcgtgtacttcgccagcaccgagaagtccaacatcatcagaggctggatctttggcaccacactggactctaagacacagagcctgctgatcgtgaacaatgccaccaacgtggtgatcaaggtgtgcgagttccagttttgtaatgatccattcctgggcgtgtactatcacaagaacaataagtcctggatggagtctgagtttcgcgtgtattctagcgccaacaattgcacatttgagtacgtgcaacagcccttcctgatggacctggagggcaagcagggcaatttcaagaacctgagggagttcgtgtttaagaatatcgatggctacttcaagatctacagcaagcacaccccaatcaacctggtgcgcgacctgccacagggattctccgccctggagccactggtggatctgcccatcggcatcaacatcacccggtttcagacactgctggccctgcacagatcctacctgacaccaggcgactcctctagcggatggaccgcaggagctgccgcctactatgtgggctatctgcagccccggaccttcctgctgaagtacaacgagaatggcaccatcacagacgcagtggattgcgccctggaccccctgtctgagacaaagtgtacactgaagagctttaccgtggagaagggcatctatcagacaagcaatttcagggtgcagcctaccgagtccatcgtgcgctttcccaatatcacaaacctgtgcccttttggcgaggtgttcaacgccaccagattcgccagcgtgtacgcctggaatcggaagagaatctccaactgcgtggccgactattctgtgctgtacaactccgcctctttcagcacctttaagtgctatggcgtgtctcccacaaagctgaatgatctgtgctttaccaacgtgtacgccgatagcttcgtgatcaggggagacgaagtgagacagatcgcaccaggacagacaggaaagatcgcagactacaattataagctgcctgacgatttcaccggctgcgtgatcgcctggaactccaacaatctggattctaaagtgggcggcaactacaattatctgtacaggctgtttcgcaagtccaatctgaagccattcgagcgggacatctccacagagatctaccaggccggctctaccccctgcaatggcgtggagggctttaactgttatttccctctgcagtcttacggcttccagccaacaaacggcgtgggctatcagccctacagagtggtggtgctgtcctttgagctgctgcacgcaccagcaacagtgtgcggcccaaagaagtctaccaatctggtgaagaacaagtgcgtgaacttcaacttcaacggactgaccggcacaggcgtgctgaccgagagcaataagaagttcctgccttttcagcagttcggcagggacatcgcagataccacagacgccgtgcgcgaccctcagaccctggagatcctggacatcacaccatgcagcttcggcggcgtgtccgtgatcacaccaggcaccaatacatccaaccaggtggccgtgctgtatcaggacgtgaattgtaccgaggtgcccgtggcaatccacgcagatcagctgacccctacatggcgggtgtactctaccggcagcaacgtgttccagacaagagccggatgcctgatcggagcagagcacgtgaacaatagctatgagtgcgacatccctatcggcgccggcatctgtgccagctaccagacccagacaaactccccatctggagcaggctcccaccatcaccatcaccatcaccatcaccactga

SEQ ID NO: 4139 - DNA, 2148 bp, Artificial Sequence
  Description of Artificial Sequence: Synthetic polynucleotide
atgggcatcctgccaagcccaggaatgcccgccctgctgtctctggtgagcctgctgtccgtgctgctgatgggatgcgtggcagagacaggcacacagtgcgtgaacctgaccacaaggacccagctgccccctgcctataccaattctttcacacggggcgtgtactatcccgacaaggtgtttagaagctccgtgctgcactccacacaggatctgtttctgcctttcttttctaacgtgacctggttccacgccaaacacgtgtccggcaccaatggcacaaagcggttcgacaatcccgtgctgccttttaacgatggcgtgtacttcgccagcaccgagaagtccaacatcatcagaggctggatctttggcaccacactggactctaagacacagagcctgctgatcgtgaacaatgccaccaacgtggtgatcaaggtgtgcgagttccagttttgtaatgatccattcctgggcgtgtactatcacaagaacaataagtcctggatggagtctgagtttcgcgtgtattctagcgccaacaattgcacatttgagtaccatagccagcccttcctgatggacctggagggcaagcagggcaatttcaagaacctgagggagttcgtgtttaagaatatcgatggctacttcaagatctacagcaagcacaccccaatcaacctggtgcgcgacctgccacagggattctccgccctggagccactggtggatctgcccatcggcatcaacatcacccggtttcagacactgctggccctgcacagatcctacctgacaccaggcgactcctctagcggagaaaccgcaggagctgccgcctactatgtgggctatctgcagccccggaccttcctgctgaagtacaacgagaatggcaccatcacagacgcagtggattgcgccctggaccccctgtctgagacaaagtgtacactgaagagctttaccgtggagaagggcatctatcagacaagcaatttcagggtgcagcctaccgagtccatcgtgcgctttcccaatatcacaaacccgtgcccttttggcgaggtgttcaacgccaccagattcgccagcgtgtacgcctggaatcggaagagaatctccaactgcgtggccgactattctgtgctgtacaactccgcctctttcagcacctttaagtgctatggcgtgtctcccacaaagctgaatgatctgtgctttaccaacgtgtacgccgatagcttcgtgatcaggggagacgaagtgagacagatcgcaccaggacagacaggaaagatcgcagactacaattataagctgcctgacgatttcaccggctgcgtgatcgcctggaactccaacaatctggattctaaagtgggcggcaactacaattatctgtacaggctgtttcgcaagtccaatctgaagccattcgagcgggacatctccacagagatctaccaggccggctctaccccctgcaatggcgtggagggctttaactgttatttccctctgcagtcttacggcttccagccaacaaacggcccgggccaacagccctacagagtggtggtgctgtcctttgagctgctgcacgcaccagcaacagtgtgcggcccaaagaagtctaccaatctggtgaagaacaagtgcgtgaacttcaacttcaacggactgaccggcacaggcgtgctgaccgagagcaataagaagttcctgccttttcagcagttcggcagggacatcgcagataccacagacgccgtgcgcgaccctcagaccctggagatcctggacatcacaccatgcagcttcggcggcgtgtccgtgatcacaccaggcaccaatacatccaaccaggtggccgtgctgtatcaggacgtgaattgtaccgaggtgcccgtggcaatccacgcagatcagctgacccctacatggcgggtgtactctaccggcagcaacgtgttccagacaagagccggatgcctgatcggagcagagcacgtgaacaatagctatgagtgcgacatccctatcggcgccggcatctgtgccagctaccagacccagacaaactccccatctggagcaggctcccaccatcaccatcaccatcaccatcaccactga

SEQ ID NO: 4140 - DNA, 2148 bp, Artificial Sequence
  Description of Artificial Sequence: Synthetic polynucleotide
atgggcatcctgccaagcccaggaatgcccgccctgctgtctctggtgagcctgctgtccgtgctgctgatgggatgcgtggcagagacaggcacacagtgcgtgaacctgaccacaaggacccagctgccccctgcctataccaattctttcacacggggcgtgtactatcccgacaaggtgtttagaagctccgtgctgcactccacacaggatctgtttctgcctttcttttctaacgtgacctggttccacgccatccacgtgtccggcaccaatggcacaaagcggttcgacaatcccgtgctgccttttaacgatggcgtgtacttcgccagcaccgagaagtccaacatctttagaggctggatctttggcaccacactggactctaagacacagagcctgctgatcgtgaacaatgccaccaacgtggtgatcaaggtgtgcgagttccagttttgtaatgatccattcctgggcgtgtactatcacaagaacaataagtcctggatggagtctgagtttcgcgtgtattctagcgccaacaattgcacatttgagtacgtgagccagcccttcctgatggacctggagggcaagcagggcaatttcaagaacctgagggagttcgtgtttaagaatatcgatggctacttcaagatctacagcaagcacaccccaatcaacctggtgcgcgacctgccacagggattctccgccctggagccactggtggatctgcccatcggcatcaacatcacccggtttcagacactgctggccctgcacagatcctacctgacaccaggcgactcctctagcggatggaccgcaggagctgccgcctactatgtgggctatctgcagccccggaccttcctgctgaagtacaacgagaatggcaccatcacagacgcagtggattgcgccctggaccccctgtctgagacaaagtgtacactgaagagctttaccgtggagaagggcatctatcagacaagcaatttcagggtgcagcctaccgagtccatcgtgcgctttcccaatatcacaaacctgtgcccttttggcgaggtgttcaacgccaccagattcgccagcgtgtacgcctggaatcggaagagaatctccaactgcgtggccgactattctgtgctgtacaactccgcctctttcagcacctttaagtgctatggcgtgtctcccacaaagctgaatgatctgtgctttaccaacgtgtacgccgatagcttcgtgatcaggggagacgaagtgagacagatcgcaccaggacagacaggaaagatcgcagactacaattataagctgcctgacgatttcaccggctgcgtgatcgcctggaactccaacaatctggattctaaagtgggcggcaactacaattatctgtacaggctgtttcgcaagtccaatctgaagccattcgagcgggacatctccacagagatctaccaggccggctctaccccctgcaatggcgtggagggctttaactgttatttccctctgcagtcttacggcttccagccaacaaacggcgtgggctatcagccctacagagtggtggtgctgtcctttgagctgctgcacgcaccagcaacagtgtgcggcccaaagaagtctaccaatctggtgaagaacaagtgcgtgaacttcaacttcaacggactgaccggcacaggcgtgctgaccgagagcaataagaagttcctgccttttcagcagttcggcagggacatcgcagataccacagacgccgtgcgcgaccctcagaccctggagatcctggacatcacaccatgcagcttcggcggcgtgtccgtgatcacaccaggcaccaatacatccaaccaggtggccgtgctgtatcaggacgtgaattgtaccgaggtgcccgtggcaatccacgcagatcagctgacccctacatggcgggtgtactctaccggcagcaacgtgttccagacaagagccggatgcctgatcggagcagagcacgtgaacaatagctatgagtgcgacatccctatcggcgccggcatctgtgccagctaccagacccagacaaactccccatctggagcaggctcccaccatcaccatcaccatcaccatcaccactga

SEQ ID NO: 4141 - DNA, 2148 bp, Artificial Sequence
  Description of Artificial Sequence: Synthetic polynucleotide
atgggcatcctgccaagcccaggaatgcccgccctgctgtctctggtgagcctgctgtccgtgctgctgatgggatgcgtggcagagacaggcacacagtgcgtgaacctgaccacaaggacccagctgccccctgcctataccaattctttcacacggggcgtgtactatcccgacaaggtgtttagaagctccgtgctgcactccacacaggatctgtttctgcctttcttttctaacgtgacctggttccacgccatccacgtgtccggcaccaatggcacaaagcggttcgacaatcccgtgctgccttttaacgatggcgtgtacttcgccagcaccgagaagtccaacatcatcagaggctggatctttggcaccacactggactctaagacacagagcctgctgatcgtgaacaatgccaccaacgtggtgatcaaggtgtgcgagttccagttttgtaatgatccattcctgggcgtgtactatcacaagaacaataagtcctggatggagtctgagtttcgcgtgtattctagcgccaacaattgcacatttgagtacgtgagccagcccttcctgatggacctggagggcaagcagggcaatttcaagaacctgagggagttcgtgtttaagaatatcgatggctacttcaagatctacagcaagcacaccccaatcaacctggtgcgcgacctgccacagggattctccgccctggagccactggtggatctgcccatcggcatcaacatcacccggtttcagacactgctggccctgcacagatcctacctgacaccaggcgactcctctagcggatggaccgcaggagctgccgcctactatgtgggctatctgcagccccggaccttcctgctgaagtacaacgagaatggcaccatcacagacgcagtggattgcgccctggaccccctgtctgagacaaagtgtacactgaagagctttaccgtggagaagggcatctatcagacaagcaatttcagggtgcagcctaccgagtccatcgtgcgctttcccaatatcacaaacctgtgcccttttggcgaggtgttcaacgccaccagattcgccagcgtgtacgcctggaatcggaagagaatctccaactgcgtggccgactattctgtgctgtacaactccgcctctttcagcacctttaagtgctatggcgtgtctcccacaaagctgaatgatctgtgctttaccaacgtgtacgccgatagcttcgtgatcaggggagacgaagtgagacagatcgcaccaggacagacaggaaagatcgcagactacaattataagctgcctgacgatttcaccggctgcgtgatcgcctggaactccaacaatctggattctaaagtgggcggcaactacaattatctgtacaggctgtttcgcaagtccaatctgaagccattcgagcgggacatctccacagagatctaccaggccggctctaccccctgcaatggcgtggagggctttaactgttatttccctctgcagtcttacggcttccagccaacaaacggcgtgggctatcagccctacagagtggtggtgctgtcctttgagctgctgcacgcaccagcaacagtgtgcggcccaaagaagtctaccaatctggtgaagaacaagtgcgtgaacttcaacttcaacggactgaccggcacaggcgtgctgaccgagagcaataagaagttcctgccttttcagcagttcggcagggacatcgcagataccacagacgccgtgcgcgaccctcagaccctggagatcctggacatcacaccatgcagcatgggcggcgtgtccgtgatcacaccaggcaccaatacatccaaccaggtggccgtgctgtatcaggacgtgaattgtaccgaggtgcccgtggcaatccacgcagatcagctgacccctacatggcgggtgtactctaccggcagcaacgtgttccagacaagagccggatgcctgatcggagcagagcacgtgaacaatagctatgagtgcgacatccctatcggcgccggcatctgtgccagctaccagacccagacaaactccccatctggagcaggctcccaccatcaccatcaccatcaccatcaccactga

SEQ ID NO: 4142 - DNA, 2148 bp, Artificial Sequence
  Description of Artificial Sequence: Synthetic polynucleotide
atgggcatcctgccaagcccaggaatgcccgccctgctgtctctggtgagcctgctgtccgtgctgctgatgggatgcgtggcagagacaggcacacagtgcgtgaacctgaccacaaggacccagctgccccctgcctataccaattctttcacacggggcgtgtactatcccgacaaggtgtttagaagctccgtgctgcactccacacaggatctgtttctgcctttcttttctaacgtgacctggttccacgccatccacgtgtccggcaccaatggcacaaagcggttcgacaatcccgtgctgccttttaacgatggcgtgtacttcgccagcaccgagaagtccaacatcatcagaggctggatctttggcaccacactggactctaagacacagagcctgctgatcgtgaacaatgccaccaacgtggtgatcaaggtgtgcgagttccagttttgtaatgatccattcctgggcgtgtactatcacaagaacaataagtcctggatggagtctgagtttcgcgtgtattctagcgccaacaattgcacatttgagtacgtgagccagcccttcctgatggacctggagggcaagcagggcaatttcaagaacctgagggagttcgtgtttaagaatatcgatggctacttcaagatctacagcaagcacaccccaatcaacctggtgcgcgacctgccacagggattctccgccctggagccactggtggatctgcccatcggcatcaacatcacccggtttcagacactgctggccctgcacagatcctacctgacaccaggcgactcctctagcggatggaccgcaggagctgccgcctactatgtgggctatctgcagccccggaccttcctgctgaagtacaacgagaatggcaccatcacagacgcagtggattgcgccctggaccccctgtctgagacaaagtgtacactgaagagctttaccgtggagaagggcatctatcagacaagcaatttcagggtgcagcctaccgagtccatcgtgcgctttcccaatatcacaaacctgtgcccttttggcgaggtgttcaacgccaccagattcgccagcgtgtacgcctggaatcggaagagaatctccaactgcgtggccgactattctgtgctgtacaactccgcctctttcagcacctttaagtgctatggcgtgtctcccacaaagctgaatgatctgtgctttaccaacgtgtacgccgatagcttcgtgatcaggggagacgaagtgagacagatcgcaccaggacagacaggaaagatcgcagactacaattataagctgcctgacgatttcaccggctgcgtgatcgcctggaactccaacaatctggattctaaagtgggcggcaactacaattatctgtacaggctgtttcgcaagtccaatctgaagccattcgagcgggacatctccacagagatctaccaggccggctctaccccctgcaatggcgtggagggctttaactgttatttccctctgcagtcttacggcttccagccaacaaacggcgtgggctatcagccctacagagtggtggtgctgtcctttgagctgctgcacgcaccagcaacagtgtgcggcccaaagaagtctaccaatctggtgaagaacaagtgcgtgaacttcaacttcaacggactgaccggcacaggcgtgctgaccgagagcaataagaagttcctgccttttcagcagttcggcagggacatcgcagataccacagacgccgtgcgcgaccctcagaccctggagatcctggacatcacaccatgcagcttcggcggcgtgtccgtgatcacaccaggcaccaatacatccaaccaggtggccgtgctgtatcaggacgtgaattgtaccgaggtgccctgtgcaatccacgcagatcagctgacccctacatggcgggtgtactctaccggcagcaacgtgttccagacaagagccggatgcctgatcggagcagagcacgtgaacaatagctatgagtgcgacatccctatcggcgccggcatctgtgccagctaccagacccagacaaactccccatctggagcaggctcccaccatcaccatcaccatcaccatcaccactga

SEQ ID NO: 4143 - DNA, 2148 bp, Artificial Sequence
  Description of Artificial Sequence: Synthetic polynucleotide
atgggcatcctgccaagcccaggaatgcccgccctgctgtctctggtgagcctgctgtccgtgctgctgatgggatgcgtggcagagacaggcacacagtgcgtgaacctgaccacaaggacccagctgccccctgcctataccaattctttcacacggggcgtgtactatcccgacaaggtgtttagaagctccgtgctgcactccacacaggatctgtttctgcctttcttttctaacgtgacctggttccacgccatccacgtgtccggcaccaatggcacaaagcggttcgacaatcccgtgctgccttttaacgatggcgtgtacttcgccagcaccgagaagtccaacatcatcagaggctggatctttggcaccacactggactctaagacacagagcctgctgatcgtgaacaatgccaccaacgtggtgatcaaggtgtgcgagttccagttttgtaatgatccattcctgggcgtgtactatcacaagaacaataagtcctggatggagtctgagtttcgcgtgtattctagcgccaacaattgcacatttgagtacgtgagccagcccttcctgatggacctggagggcaagcagggcaatttcaagaacctgagggagttcgtgtttaagaatatcgatggctacttcaagatctacagcaagcacaccccaatcaacctggtgcgcgacctgccacagggattctccgccctggagccactggtggatctgcccatcggcatcaacatcacccggtttcagacactgctggccctgcacagatcctacctgacaccaggcgactcctctagcggatggaccgcaggagctgccgcctactatgtgggctatctgcagccccggaccttcctgctgaagtacaacgagaatggcaccatcacagacgcagtggattgcgccctggaccccctgtctgagacaaagtgtacactgaagagctttaccgtggagaagggcatctatcagacaagcaatttcagggtgcagcctaccgagtccatcgtgcgctttcccaatatcacaaacctgtgcccttttggcgaggtgttcaacgccaccagattcgccagcgtgtacgcctggaatcggaagagaatctccaactgcgtggccgactattctgtgctgtacaactccgcctctttcagcacctttaagtgctatggcgtgtctcccacaaagctgaatgatctgtgctttaccaacgtgtacgccgatagcttcgtgatcaggggagacgaagtgagacagatcgcaccaggacagacaggaaagatcgcagactacaattataagctgcctgacgatttcaccggctgcgtgatcgcctggaactccaacaatctggattctaaagtgggcggcaactacaattatctgtacaggctgtttcgcaagtccaatctgaagccattcgagcgggacatctccacagagatctaccaggccggctctaccccctgcaatggcgtggagggctttaactgttatttccctctgcagtcttacggcttccagccaacaaacggcgtgggctatcagccctacagagtggtggtgctgtcctttgagctgctgcacgcaccagcaacagtgtgcggcccaaagaagtctaccaatctggtgaagaacaagtgcgtgaacttcaacttcaacggactgaccggcacaggcgtgctgaccgagagcaataagaagttcctgccttttcagcagttcggcaggagtatcgcagataccacagacgccgtgcgcgaccctcagaccctggagatcctggacatcacaccatgcagcttcggcggcgtgtccgtgatcacaccaggcaccaatacatccaaccaggtggccgtgctgtatcaggacgtgaattgtaccgaggtgcccgtggcaatccacgcagatcagctgacccctacatggcgggtgtactctaccggcagcaacgtgttccagacaagagccggatgcctgatcggagcagagcacgtgaacaatagctatgagtgcgacatccctatcggcgccggcatctgtgccagctaccagacccagacaaactccccatctggagcaggctcccaccatcaccatcaccatcaccatcaccactga

SEQ ID NO: 4144 - DNA, 2148 bp, Artificial Sequence
  Description of Artificial Sequence: Synthetic polynucleotide
atgggcatcctgccaagcccaggaatgcccgccctgctgtctctggtgagcctgctgtccgtgctgctgatgggatgcgtggcagagacaggcacacagtgcgtgaacctgaccacaaggacccagctgccccctgcctataccaattctttcacacggggcgtgtactatcccgacaaggtgtttagaagctccgtgctgcactccacacaggatctgtttctgcctttcttttctaacgtgacctggttccacgccatccacgtgtccggcaccaatggcacaaagcggttcgacaatcccgtgctgccttttaacgatggcgtgtacttcgccagcaccgagaagtccaacatcatcagaggctggatctttggcaccacactggactctaagacacagagcctgctgatcgtgaacaatgccaccaacgtggtgatcaaggtgtgcgagttccagttttgtaatgatccattcctgggcgtgtactatcacaagaacaataagtcctggatggagtctgagtttcgcgtgtattctagcgccaacaattgcacatttgagtacgtgagccagcccttcctgatggacctggagggcaagcagggcaatttcaagaacctgagggagttcgtgtttaagaatatcgatggctacttcaagatctacagcaagcacaccccaatcaacctggtgcgcgacctgccacagggattctccgccctggagccactggtggatctgcccatcggcatcaacatcacccggtttcagacactgctggccctgcacagatcctacctgacaccaggcgactcctctagcggatggaccgcaggagctgccgcctactatgtgggctatctgcagccccggaccttcctgctgaagtacaacgagaatggcaccatcacagacgcagtggattgcgccctggaccccctgtctgagacaaagtgtacactgaagagctttaccgtggagaagggcatctatcagacaagcaatttcagggtgcagcctaccgagtccatcgtgcgctttcccaatatcacaaacctgtgcccttttggcgaggtgttcaacgccaccagattcgccagcagttacgcctggaatcggaagagaatctccaactgcgtggccgactattctgtgctgtacaactccgcctctttcagcacctttaagtgctatggcgtgtctcccacaaagctgaatgatctgtgctttaccaacgtgtacgccgatcttttcgtgatcaggggagacgaagtgagacagatcgcaccaggacagacaggaaagatcgcagactacaattataagctgcctgacgatttcaccggctgcgtgatcgcctggaactccaacaatctggatgcaaaagtgggcggcaactacaattatctgtacaggctgtttcgcaagtccaatctgaagccattcgagcggtttatctccacagagatctaccaggccggctctacccccgcgaatggcgtggagggctttaactgttatttccctctgcagtcttacgtattccagccaacaaacggcgtgacgtatcagccctacagagtggtggtgctgtcctttgagctgctgcacgcaccacatacagtgtgcggcccaaagaagtctaccaatctggtgaagaacaagtgcgtgaacttcaacttcaacggactgaccggcacaggcgtgctgaccgagagcaataagaagttcctgccttttcagcagttcggcagggacatcgcagataccacagacgccgtgcgcgaccctcagaccctggagatcctggacatcacaccatgcagcttcggcggcgtgtccgtgatcacaccaggcaccaatacatccaaccaggtggccgtgctgtatcaggacgtgaattgtaccgaggtgcccgtggcaatccacgcagatcagctgacccctacatggcgggtgtactctaccggcagcaacgtgttccagacaagagccggatgcctgatcggagcagagcacgtgaacaatagctatgagtgcgacatccctatcggcgccggcatctgtgccagctaccagacccagacaaactccccatctggagcaggctcccaccatcaccatcaccatcaccatcaccactga

SEQ ID NO: 4145 - DNA, 2148 bp, Artificial Sequence
  Description of Artificial Sequence: Synthetic polynucleotide
atgggcatcctgccaagcccaggaatgcccgccctgctgtctctggtgagcctgctgtccgtgctgctgatgggatgcgtggcagagacaggcacacagtgcgtgaacctgaccacaaggacccagctgccccctgcctataccaattctttcacacggggcgtgtactatcccgacaaggtgtttagaagctccgtgctgcactccacacaggatctgtttctgcctttcttttctaacgtgacctggttccacgccatccacgtgtccggcaccaatggcacaaagcggttcgacaatcccgtgctgccttttaacgatggcgtgtacttcgccagcaccgagaagtccaacatcatcagaggctggatctttggcaccacactggactctaagacacagagcctgctgatcgtgaacaatgccaccaacgtggtgatcaaggtgtgcgagttccagttttgtaatgatccattcctgggcgtgtactatcacaagaacaataagtcctggatggagtctgagtttcgcgtgtattctagcgccaacaattgcacatttgagtacgtgagccagcccttcctgatggacctggagggcaagcagggcaatttcaagaacctgagggagttcgtgtttaagaatatcgatggctacttcaagatctacagcaagcacaccccaatcaacctggtgcgcgacctgccacagggattctccgccctggagccactggtggatctgcccatcggcatcaacatcacccggtttcagacactgctggccctgcacagatcctacctgacaccaggcgactcctctagcggatggaccgcaggagctgccgcctactatgtgggctatctgcagccccggaccttcctgctgaagtacaacgagaatggcaccatcacagacgcagtggattgcgccctggaccccctgtctgagacaaagtgtacactgaagagctttaccgtggagaagggcatctatcagacaagcaatttcagggtgcagcctaccgaggttatcgtgcgctttcccaatatcacaaacctgtgcccttttggcgaggtgttcaacgccaccagattcgccagcgtgtacgcctggaatcggaagagaatctccaactgcgtggccgactattctgtgctgtacaactccgcctctttcagcacctttaagtgctatggcgtgtctcccacaaagctgaatgatctgtgctttaccaacgtgtacgccgatagcttcgtgatcaggggagacgaagtgagacagatcgcaccaggacagacaggaaagatcgcagactacaattataagctgcctgacgatttcaccggctgcgtgatcgcctggaactccaacaatctggattctaaagtgggcggcaactacaattatctgtacaggctgtttcgcaagtccaatctgaagccattcgagcgggacatctccacagagatctaccaggccggctctaccccctgcaatggcgtggagggctttaactgttatttccctctgcagtcttacggcttccagccaacaaacggcgtgggctatcagccctacagagtggtggtgctgtcctttgagctgctgcacgcaccagcaacagtgtgcggcccaaagaagtctaccaatctggtgaagaacaagtgcgtgaacttcaacttcaacggactgaccggcacaggcgtgctgaccgagagcaataagaagttcctgccttttcagcagttcggcagggacatcgcagataccacagacgccgtgcgcgaccctcagaccctggagatcctggacatcacaccatgcagcttcggcggcgtgtccgtgatcacaccaggcaccaatacatccaaccaggtggccgtgctgtatcaggacgtgaattgtaccgaggtgcccgtggcaatccacgcagatcagctgacccctacatggcgggtgtactctaccggcagcaacgtgttccagacaagagccggatgcctgatcggagcagagcacgtgaacaatagctatgagtgcgacatccctatcggcgccggcatctgtgccagctaccagacccagacaaactccccatctggagcaggctcccaccatcaccatcaccatcaccatcaccactga

SEQ ID NO: 4146 - DNA, 2148 bp, Artificial Sequence
  Description of Artificial Sequence: Synthetic polynucleotide
atgggcatcctgccaagcccaggaatgcccgccctgctgtctctggtgagcctgctgtccgtgctgctgatgggatgcgtggcagagacaggcacacagtgcgtgaacctgaccacaaggacccagctgccccctgcctataccaattctttcacacggggcgtgtactatcccgacaaggtgtttagaagctccgtgctgcactccacacaggatctgtttctgcctttcttttctaacgtgacctggttccacgccatccacgtgtccggcaccaatggcacaaagcggttcgacaatcccgtgctgccttttaacgatggcgtgtacttcgccagcaccgagaagtccaacatcatcagaggctggatctttggcaccacactggactctaagacacagagcctgctgatcgtgaacaatgccaccaacgtggtgatcaaggtgtgcgagttccagttttgtaatgatccattcctgggcgtgtactatcacaagaacaataagtcctggatggagtctgagtttcgcgtgtattctagcgccaacaattgcacatttgagtaccatagccagcccttcctgatggacctggagggcaagcagggcaatttcaagaacctgagggagttcgtgtttaagaatatcgatggctacttcaagatctacagcaagcacaccccaatcaacctggtgcgcgacctgccacagggattctccgccctggagccactggtggatctgcccatcggcatcaacatcacccggtttcagacactgctggccctgcacagatcctacctgacaccaggcgactcctctagcggagaaaccgcaggagctgccgcctactatgtgggctatctgcagccccggaccttcctgctgaagtacaacgagaatggcaccatcacagacgcagtggattgcgccctggaccccctgtctgagacaaagtgtacactgaagagctttaccgtggagaagggcatctatcagacaagcaatttcagggtgcagcctaccgagtccatcgtgcgctttcccaatatcacaaaccattgcccttttggcgaggtgttcaacgccaccagattcgccagcgtgtacgcctggaatcggaagagaatctccaactgcgtggccgactattctgtgctgtacaactccgcctctttcagcacctttaagtgctatggcgtgtctcccacaaagctgaatgatctgtgctttaccaacgtgtacgccgatagcttcgtgatcaggggagacgaagtgagacagatcgcaccaggacagacaggaaagatcgcagactacaattataagctgcctgacgatttcaccggctgcgtgatcgcctggaactccaacaatctggattctaaagtgggcggcaactacaattatctgtacaggctgtttcgcaagtccaatctgaagccattcgagcgggacatctccacagagatctaccaggccggctctaccccctgcaatggcgtggagggctttaactgttatttccctctgcagtcttacggcttccagccaacaaacggcccgggccaacagccctacagagtggtggtgctgtcctttgagctgctgcacgcaccagcaacagtgtgcggcccaaagaagtctaccaatctggtgaagaacaagtgcgtgaacttcaacttcaacggactgaccggcacaggcgtgctgaccgagagcaataagaagttcctgccttttcagcagttcggcagggacatcgcagataccacagacgccgtgcgcgaccctcagaccctggagatcctggacatcacaccatgcagcttcggcggcgtgtccgtgatcacaccaggcaccaatacatccaaccaggtggccgtgctgtatcaggacgtgaattgtaccgaggtgcccgatgcaatccacgcagatcagctgacccctacatggcgggtgtactctaccggcagcaacgtgttccagacaagagccggatgcctgatcggagcagagcacgtgaacaatagctatgagtgcgacatccctatcggcgccggcatctgtgccagctaccagacccagacaaactccccatctggagcaggctcccaccatcaccatcaccatcaccatcaccactga

SEQ ID NO: 4147 - DNA, 2148 bp, Artificial Sequence
  Description of Artificial Sequence: Synthetic polynucleotide
atgggcatcctgccaagcccaggaatgcccgccctgctgtctctggtgagcctgctgtccgtgctgctgatgggatgcgtggcagagacaggcacacagtgcgtgaacctgaccacaaggacccagctgccccctgcctataccaattctttcacacggggcgtgtactatcccgacaaggtgtttagaagctccgtgctgcactccacacaggatctgtttctgcctttcttttctaacgtgacctggttccacgccatccacgtgtccggcaccaatggcacaaagcggttcgacaatcccgtgctgccttttaacgatggcgtgtacttcgccagcaccgagaagtccaacatcatcagaggctggatctttggcaccacactggactctaagacacagagcctgctgatcgtgaacaatgccaccaacgtggtgatcaaggtgtgcgagttccagttttgtaatgatccattcctgggcgtgtactatcacaagaacaataagtcctggatggagtctgagtttcgcgtgtattctagcgccaacaattgcacatttgagtacgtgagccagcccttcctgatggacctggagggcaagcagggcaatttcaagaacctgagggagttcgtgtttaagaatatcgatggctacttcaagatctacagcaagcacaccccaatcaacctggtgcgcgacctgccacagggattctccgccctggagccactggtggatctgcccatcggcatcaacatcacccggtttcagacactgctggccctgcacagatcctacctgacaccaggcgactcctctagcggatggaccgcaggagctgccgcctactatgtgggctatctgcagccccggaccttcctgctgaagtacaacgagaatggcaccatcacagacgcagtggattgcgccctggaccccctgtctgagacaaagtgtacactgaagagctttaccgtggagaagggcatctatcagacaagcaatttcagggtgcagcctaccgagtccatcgtgcgctttcccaatatcacaaacctgtgcccttttggcgaggtgttcaacgccaccagattcgccagcgtgtacgcctggaatcggaagagaatctccaactgcgtggccgactattctgtgctgtacaactccgcctctttcagcacctttaagtgctatggcgtgtctcccacaaagctgaatgatctgtgctttaccaacgtgtacgccgatagcttcgtgatcaggggagacgaagtgagacagatcgcaccaggacagacaggaaagatcgcagactacaattataagctgcctgacgatttcaccggctgcgtgatcgcctggaactccaacaatctggattctaaagtgggcggcaactacaattatctgtacaggctgtttcgcaagtccaatctgaagccattcgagcgggacatctccacagagatctaccaggccggctctaccccctgcaatggcgtggagggctttaactgttatttccctctgcagtcttacggcttccagccaacaaacggcgtgggctatcagccctacagagtggtggtgctgtcctttgagctgctgcacgcaccagcaacagtgtgcggcccaaagaagtctaccaatctggtgaagaacaagtgcgtgaacttcaacttcaacggactgaccggcacaggcgtgctgaccgagagcaataagaagttcctgccttttcagcagttcggcagggacatcgcagataccacagacgccgtgcgcgaccctcagaccctggagatcctggacatcacaccatgcagcttcggcggcgtgtccgtgatcacaccaggcaccaatacatccaaccaggtggccgtgctgtatcaggacgtgaattgtaccgaggtgcccgtggcaatccacgcagatcagctgacccctacatggcgggaatactctaccggcagcaacgtgttccagacaagagccggatgcctgatcggagcagagcacgtgaacaatagctatgagtgcgacatccctatcggcgccggcatctgtgccagctaccagacccagacaaactccccatctggagcaggctcccaccatcaccatcaccatcaccatcaccactga

SEQ ID NO: 4148 - DNA, 2148 bp, Artificial Sequence
  Description of Artificial Sequence: Synthetic polynucleotide
atgggcatcctgccaagcccaggaatgcccgccctgctgtctctggtgagcctgctgtccgtgctgctgatgggatgcgtggcagagacaggcacacagtgcgtgaacctgaccacaaggacccagctgccccctgcctataccaattctttcacacggggcgtgtactatcccgacaaggtgtttagaagctccgtgctgcactccacacaggatctgtttctgcctttcttttctaacgtgacctggttccacgccatccacgtgtccggcaccaatggcacaaagcggttcgacaatcccgtgctgccttttaacgatggcgtgtacttcgccagcaccgagaagtccaacatcatcagaggctggatctttggcaccacactggactctaagacacagagcctgctgatcgtgaacaatgccaccaacgtggtgatcaaggtgtgcgagttccagttttgtaatgatccattcctgggcgtgtactatcacaagaacaataagtcctggatggagtctgagtttcgcgtgtattctagcgccaacaattgcacatttgagtacgtgagccagcccttcctgatggacctggagggcaagcagggcaatttcaagaacctgagggagttcgtgtttaagaatatcgatggctacttcaagatctacagcaagcacaccccaatcaacctggtgcgcgacctgccacagggattctccgccctggagccactggtggatctgcccatcggcatcaacatcacccggtttcagacactgctggccctgcacagatcctacctgacaccaggcgactcctctagcggatggaccgcaggagctgccgcctactatgtgggctatctgcagccccggaccttcctgctgaagtacaacgagaatggcaccatcacagacgcagtggattgcgccctggaccccctgtctgagacaaagtgtacactgaagagctttaccgtggagaagggcatctatcagacaagcaatttcagggtgcagcctaccgagtccatcgtgcgctttcccaatatcacaaacctgtgcccttttggcgaggtgttcaacgccaccagattcgccagcgtgtacgcctggaatcggaagagaatctccaactgcgtggccgactattctgtgctgtacaactccgcctctttcagcacctttaagtgctatggcgtgtctcccacaaagctgaatgatctgtgctttaccaacgtgtacgccgatagcttcgtgatcaggggagacgaagtgagacagatcgcaccaggacagacaggaaagatcgcagactacaattataagctgcctgacgatttcaccggctgcgtgatcgcctggaactccaacaatctggattctaaagtgggcggcaactacaattatctgtacaggctgtttcgcaagtccaatctgaagccattcgagcgggacatctccacagagatctaccaggccggctctaccccctgcaatggcgtggagggctttaactgttatttccctctgcagtcttacggcttccagccaacaaacggcgtgggctatcagccctacagagtggtggtgctgtcctttgagctgctgcacgcaccagcaacagtgtgcggcccaaagaagtctaccaatctggtgaagaacaagtgcgtgaacttcaacttcaacggactgaccggcacaggcgtgctgaccgagagcaataagaagttcctgccttttcagcagttcggcagggacatcgcagataccacagacgccgtgcgcgaccctcagaccctggagatcctggacatcacaccatgcagcttcggcggcgtgtccgtgatcacaccaggcaccaatacatccaaccaggtggccgtgctgtatcaggacgtgaattgtaccgaggtgcccgtggcaatccacgcagatcagctgacccctacatggcgggtgtactctaccggcagcaacgtgttccagacaagagccggatgcctggtcggagcagagcacgtgaacaatagctatgagtgcgacatccctatcggcgccggcatctgtgccagctaccagacccagacaaactccccatctggagcaggctcccaccatcaccatcaccatcaccatcaccactga

SEQ ID NO: 4149 - DNA, 2148 bp, Artificial Sequence
  Description of Artificial Sequence: Synthetic polynucleotide
atgggcatcctgccaagcccaggaatgcccgccctgctgtctctggtgagcctgctgtccgtgctgctgatgggatgcgtggcagagacaggcacacagtgcgtgaacctgaccacaaggacccagctgccccctgcctataccaattctttcacacggggcgtgtactatcccgacaaggtgtttagaagctccgtgctgcactccacacaggatctgtttctgcctttcttttctaacgtgacctggttccacgccatccacgtgtccggcaccaatggcacaaagcggttcgacaatcccgtgctgccttttaacgatggcgtgtacttcgccagcaccgagaagtccaacatcatcagaggctggatctttggcaccacactggactctaagacacagagcctgctgatcgtgaacaatgccaccaacgtggtgatcaaggtgtgcgagttccagttttgtaatgatccattcctgggcgtgtactatcacaagaacaataagtcctggatggagtctgagtttcgcgtgtattctagcgccaacaattgcacatttgagtacgtgagccagcccttcctgatggacctggagggcaagcagggcaatttcaagaacctgagggagttcgtgtttaagaatatcgatggctacttcaagatctacagcaagcacaccccaatcaacctggtgcgcgacctgccacagggattctccgccctggagccactggtggatctgcccatcggcatcaacatcacccggtttcagacactgctggccctgcacagatcctacctgacaccaggcgactcctctagcggatggaccgcaggagctgccgcctactatgtgggctatctgcagccccggaccttcctgctgaagtacaacgagaatggcaccatcacagacgcagtggattgcgccctggaccccctgtctgagacaaagtgtacactgaagagctttaccgtggagaagggcatctatcagacaagcaatttcagggtgcagcctaccgagtccatcgtgcgctttcccaatatcacaaacctgtgcccttttggcgaggtgttcaacgccaccagattcgccagcgtgtacgcctggaatcggaagagaatctccaactgcgtggccgactattctgtgctgtacaactccgcctctttcagcacctttaagtgctatggcgtgtctcccacaaagctgaatgatctgtgctttaccaacgtgtacgccgatagcttcgtgatcaggggagacgaagtgagacagatcgcaccaggacagacaggaaagatcgcagactacaattataagctgcctgacgatttcaccggctgcgtgatcgcctggaactccaacaatctggattctaaagtgggcggcaactacaattatctgtacaggctgtttcgcaagtccaatctgaagccattcgagcgggacatctccacagagatctaccaggccggctctaccccctgcaatggcgtggagggctttaactgttatttccctctgcagtcttacggcttccagccaacaaacggcgtgggctatcagccctacagagtggtggtgctgtcctttgagctgctgcacgcaccagcaacagtgtgcggcccaaagaagtctaccaatctggtgaagaacaagtgcgtgaacttcaacttcaacggactgaccggcacaggcgtgctgaccgagagcaataagaagttcctgccttttcagcagttcggccgatggatcgcagataccacagacgccgtgcgcgaccctcagaccctggagatcctggacatcacaccatgcagcttcggcggcgtgtccgtgatcacaccaggcaccaatacatccaaccaggtggccgtgctgtatcaggacgtgaattgtaccgaggtgcccgtggcaatccacgcagatcagctgacccctacatggcgggtgtactctaccggcagcaacgtgttccagacaagagccggatgcctgatcggagcagagcacgtgaacaatagctatgagtgcgacatccctatcggcgccggcatctgtgccagctaccagacccagacaaactccccatctggagcaggctcccaccatcaccatcaccatcaccatcaccactga

SEQ ID NO: 4150 - DNA, 2148 bp, Artificial Sequence
  Description of Artificial Sequence: Synthetic polynucleotide
atgggcatcctgccaagcccaggaatgcccgccctgctgtctctggtgagcctgctgtccgtgctgctgatgggatgcgtggcagagacaggcacacagtgcgtgaacctgaccacaaggacccagctgccccctgcctataccaattctttcacacggggcgtgtactatcccgacaaggtgtttagaagctccgtgctgcactccacacaggatctgtttctgcctttcttttctaacgtgacctggttccacgccatccacgtgtccggcaccaatggcacaaagcggttcgacaatcccgtgctgccttttaacgatggcgtgtacttcgccagcaccgagaagtccaacatcatcagaggctggatctttggcaccacactggactctaagacacagagcctgctgatcgtgaacaatgccaccaacgtggtgatcaaggtgtgcgagttccagttttgtaatgatccattcctgggcgtgtactatcacaagaacaataagtcctggatggagtctgagtttcgcgtgtattctagcgccaacaattgcacatttgagtacgtgagccagcccttcctgatggacctggagggcaagcagggcaatttcaagaacctgagggagttcgtgtttaagaatatcgatggctacttcaagatctacagcaagcacaccccaatcaacctggtgcgcgacctgccacagggattctccgccctggagccactggtggatctgcccatcggcatcaacatcacccggtttcagacactgctggccctgcacagatcctacctgacaccaggcgactcctctagcggatggaccgcaggagctgccgcctactatgtgggctatctgcagccccggaccttcctgctgaagtacaacgagaatggcaccatcacagacgcagtggattgcgccctggaccccctgtctgagacaaagtgtacactgaagagctttaccgtggagaagggcatctatcagacaagcaatttcagggtgcagcctaccgagtccatcgtgcgctttcccaatatcacaaacctgtgcccttttggcgaggtgttcaacgccaccagattcgccagcgtgtacgcctggaatcggaagagaatctccaactgcgtggccgactattctgtgctgtacaactccgcctctttcagcacctttaagtgctatggcgtgtctcccacaaagctgaatgatctgtgctttaccaacgtgtacgccgatagcttcgtgatcaggggagacgaagtgagacagatcgcaccaggacagacaggaaagatcgcagactacaattataagctgcctgacgatttcaccggctgcgtgatcgcctggaactccaacaatctggattctaaagtgggcggcaactacaattatctgtacaggctgtttcgcaagtccaatctgaagccattcgagcgggacatctccaaagagatctaccaggccggctctaccccctgcaatggcgtggagggctttaactgttatttccctctgcagtcttacggcttccagccaacaaacggcgtgggctatcagccctacagagtggtggtgctgtcctttgagctgctgcacgcaccagcaacagtgtgcggcccaaagaagtctaccaatctggtgaagaacaagtgcgtgaacttcaacttcaacggactgaccggcacaggcgtgctgaccgagagcaataagaagttcctgccttttcagcagttcggcagggacatcgcagataccacagacgccgtgcgcgaccctcagaccctggagatcctggacatcacaccatgcagcttcggcggcgtgtccgtgatcacaccaggcaccaatacatccaaccaggtggccgtgctgtatcaggacgtgaattgtaccgaggtgcccgtggcaatccacgcagatcagctgacccctacatggcgggtgtactctaccggcagcaacgtgttccagacaagagccggatgcctgatcggagcagagcacgtgaacaatagctatgagtgcgacatccctatcggcgccggcatctgtgccagctaccagacccagacaaactccccatctggagcaggctcccaccatcaccatcaccatcaccatcaccactga

SEQ ID NO: 4151 - DNA, 2148 bp, Artificial Sequence
  Description of Artificial Sequence: Synthetic polynucleotide
atgggcatcctgccaagcccaggaatgcccgccctgctgtctctggtgagcctgctgtccgtgctgctgatgggatgcgtggcagagacaggcacacagtgcgtgaacctgaccacaaggacccagctgccccctgcctataccaattctttcacacggggcgtgtactatcccgacaaggtgtttagaagctccgtgctgcactccacacaggatctgtttctgcctttcttttctaacgtgacctggttccacgccatccacgtgtccggcaccaatggcacaaagcggttcgacaatcccgtgctgccttttaacgatggcgtgtacttcgccagcaccgagaagtccaacatcatcagaggctggatctttggcaccacactggactctaagacacagagcctgctgatcgtgaacaatgccaccaacgtggtgatcaaggtgtgcgagttccagttttgtaatgatccattcctgggcgtgtactatcacaagaacaataagtcctggatggagtctgagtttcgcgtgtattctagcgccaacaattgcacatttgagtacgtgagccagcccttcctgatggacctggagggcaagcagggcaatttcaagaacctgagggagttcgtgtttaagaatatcgatggctacttcaagatctacagcaagcacaccccaatcaacctggtgcgcgacctgccacagggattctccgccctggagccactggtggatctgcccatcggcatcaacatcacccggtttcagacactgctggccctgcacagatcctacctgacaccaggcgactcctctagcggatggaccgcaggagctgccgcctactatgtgggctatctgcagccccggaccttcctgctgaagtacaacgagaatggcaccatcacagacgcagtggattgcgccctggaccccctgtctgagacaaagtgtacactgaagagctttaccgtggagaagggcatctatcagacaagcaatttcagggtgcagcctaccgagtccatcgtgcgctttcccaatatcacaaacctgtgcccttttggcgaggtgttcaacgccaccagattcgccagcgtgtacgcctggaatcggaagagaatctccaactgcgtggccgactattctgtgctgtacaactccgcctctttcagcacctttaagtgctatggcgtgtctcccacaaagctgaatgatctgtgctttaccaacgtgtacgccgatagcttcgtgatcaggggagacgaagtgagacagatcgcaccaggacagacaggaaagatcgcagactacaattataagctgcctgacgatttcaccggctgcgtgatcgcctggaactccaacaatctggattctaaagtgggcggcaactacaattatctgtacaggctgtttcgcaagtccaatctgaagccattcgagcgggacatctccacagagatctaccaggccggctctaccccctgcaatggcgtggagggctttaactgttatttccctctgcagtcttacggcttccagccaacatatggcgtgggctatcagccctacagagtggtggtgctgtcctttgagctgctgcacgcaccagcaacagtgtgcggcccaaagaagtctaccaatctggtgaagaacaagtgcgtgaacttcaacttcaacggactgaccggcacaggcgtgctgaccgagagcaataagaagttcctgccttttcagcagttcggcagggacatcgcagataccacagacgccgtgcgcgaccctcagaccctggagatcctggacatcacaccatgcagcttcggcggcgtgtccgtgatcacaccaggcaccaatacatccaaccaggtggccgtgctgtatcaggacgtgaattgtaccgaggtgcccgtggcaatccacgcagatcagctgacccctacatggcgggtgtactctaccggcagcaacgtgttccagacaagagccggatgcctgatcggagcagagcacgtgaacaatagctatgagtgcgacatccctatcggcgccggcatctgtgccagctaccagacccagacaaactccccatctggagcaggctcccaccatcaccatcaccatcaccatcaccactga

SEQ ID NO: 4152 - DNA, 2148 bp, Artificial Sequence
  Description of Artificial Sequence: Synthetic polynucleotide
atgggcatcctgccaagcccaggaatgcccgccctgctgtctctggtgagcctgctgtccgtgctgctgatgggatgcgtggcagagacaggcacacagtgcgtgaacctgaccacaaggacccagctgccccctgcctataccaattctttcacacggggcgtgtactatcccgacaaggtgtttagaagctccgtgctgcactccacacaggatctgtttctgcctttcttttctaacgtgacctggttccacgccatccacgtgtccggcaccaatggcacaaagcggttcgacaatcccgtgctgccttttaacgatggcgtgtacttcgccagcaccgagaagtccaacatcatcagaggctggatctttggcaccacactggactctaagacagaaagcctgctgatcgtgaacaatgccaccaacgtggtgatcaaggtgtgcgagttccagttttgtaatgatccattcctgggcgtgtactatcacaagaacaataagtcctggatggagtctgagtttcgcgtgtattctagcgccaacaattgcacatttgagtacgtgagccagcccttcctgatggacctggagggcaagcagggcaatttcaagaacctgagggagttcgtgtttaagaatatcgatggctacttcaagatctacagcaagcacaccccaatcaacctggtgcgcgacctgccacagggattctccgccctggagccactggtggatctgcccatcggcatcaacatcacccggtttcagacactgctggccctgcacagatcctacctgacaccaggcgactcctctagcggatggaccgcaggagctgccgcctactatgtgggctatctgcagccccggaccttcctgctgaagtacaacgagaatggcaccatcacagacgcagtggattgcgccctggaccccctgtctgagacaaagtgtacactgaagagctttaccgtggagaagggcatctatcagacaagcaatttcagggtgcagcctaccgagtccatcgtgcgctttcccaatatcacaaacctgtgcccttttggcgaggtgttcaacgccaccagattcgccagcgtgtacgcctggaatcggaagagaatctccaactgcgtggccgactattctgtgctgtacaactccgcctctttcagcacctttaagtgctatggcgtgtctcccacaaagctgaatgatctgtgctttaccaacgtgtacgccgatagcttcgtgatcaggggagacgaagtgagacagatcgcaccaggacagacaggaaagatcgcagactacaattataagctgcctgacgatttcaccggctgcgtgatcgcctggaactccaacaatctggattctaaagtgggcggcaactacaattatctgtacaggctgtttcgcaagtccaatctgaagccattcgagcgggacatctccacagagatctaccaggccggctctaccccctgcaatggcgtggagggctttaactgttatttccctctgcagtcttacggcttccagccaacaaacggcgtgggctatcagccctacagagtggtggtgctgtcctttgagctgctgcacgcaccagcaacagtgtgcggcccaaagaagtctaccaatctggtgaagaacaagtgcgtgaacttcaacttcaacggactgaccggcacaggcgtgctgaccgagagcaataagaagttcctgccttttcagcagttcggcagggacatcgcagataccacagacgccgtgcgcgaccctcagaccctggagatcctggacatcacaccatgcagcttcggcggcgtgtccgtgatcacaccaggcaccaatacatccaaccaggtggccgtgctgtatcaggacgtgaattgtaccgaggtgcccgtggcaatccacgcagatcagctgacccctacatggcgggtgtactctaccggcagcaacgtgttccagacaagagccggatgcctgatcggagcagagcacgtgaacaatagctatgagtgcgacatccctatcggcgccggcatctgtgccagctaccagacccagacaaactccccatctggagcaggctcccaccatcaccatcaccatcaccatcaccactga

SEQ ID NO: 4153 - DNA, 2148 bp, Artificial Sequence
  Description of Artificial Sequence: Synthetic polynucleotide
atgggcatcctgccaagcccaggaatgcccgccctgctgtctctggtgagcctgctgtccgtgctgctgatgggatgcgtggcagagacaggcacacagtgcgtgaacctgaccacaaggacccagctgccccctgcctataccaattctttcacacggggcgtgtactatcccgacaaggtgtttagaagctccgtgctgcactccacacaggatctgtttctgcctttcttttctaacgtgacctggttccacgccatccacgtgtccggcaccaatggcacaaagcggttcgacaatcccgtgctgccttttaacgatggcgtgtacttcgccagcaccgagaagtccaacatcatcagaggctggatctttggcaccacactggactctaagacacagagcctgctgatcgtgaacaatgccaccaacgtggtgatcaaggtgtgcgagttccagttttgtaatgatccattcctgggcgtgtactatcacaagaacaataagtcctggatggagtctgagtttcgcgtgtattctagcgccaacaattgcacatttgagtacgtgagccagcccttcctgatggacctggagggcaagcagggcaatttcaagaacctgagggagttcgtgtttaagaatatcgatggctacttcaagatctacagcaagcacaccccaatcaacctggtgcgcgacctgccacagggattctccgccctggagccactggtggatctgcccatcggcatcaacatcacccggtttcagacactgctggccctgcacagatcctacctgacaccaggcgactcctctagcggatggaccgcaggagctgccgcctactatgtgggctatctgcagccccggaccttcctgctgaagtacaacgagaatggcaccatcacagacgcagtggattgcgccctggaccccctgtctgagacaaagtgtacactgaagagctttaccgtggagaagggcatctatcagacaagcaatttcagggtgcagcctaccgagtccatcgtgcgctttcccaatatcacaaacctgtgcccttttggcgaggtgttcaacgccaccagattcgccagcgtgtacgcctggaatcggaagagaatctccaactgcgtggccgactattctgtgctgtacaactccgcctctttcagcacctttaagtgctatggcgtgtctcccacaaagctgaatgatctgtgctttaccaacgtgtacgccgatagcttcgtgatcaggggagacgaagtgagacagatcgcaccaggacagacaggaaagatcgcagactacaattatgttctgcctgacgatttcaccggctgcgtgatcgcctggaactccaacaatctggattctaaagtgggcggcaactacaattatctgtacaggctgtttcgcaagtccaatctgaagccattcgagcgggacatctccacagagatctaccaggccggctctaccccctgcaatggcgtggagggctttaactgttatttccctctgcagtcttacggcttccagccaacaaacggcgtgggctatcagccctacagagtggtggtgctgtcctttgagctgctgcacgcaccagcaacagtgtgcggcccaaagaagtctaccaatctggtgaagaacaagtgcgtgaacttcaacttcaacggactgaccggcacaggcgtgctgaccgagagcaataagaagttcctgccttttcagcagttcggcagggacatcgcagataccacagacgccgtgcgcgaccctcagaccctggagatcctggacatcacaccatgcagcttcggcggcgtgtccgtgatcacaccaggcaccaatacatccaaccaggtggccgtgctgtatcaggacgtgaattgtaccgaggtgcccgtggcaatccacgcagatcagctgacccctacatggcgggtgtactctaccggcagcaacgtgttccagacaagagccggatgcctgatcggagcagagcacgtgaacaatagctatgagtgcgacatccctatcggcgccggcatctgtgccagctaccagacccagacaaactccccatctggagcaggctcccaccatcaccatcaccatcaccatcaccactga

SEQ ID NO: 4154 - DNA, 2148 bp, Artificial Sequence
  Description of Artificial Sequence: Synthetic polynucleotide
atgggcatcctgccaagcccaggaatgcccgccctgctgtctctggtgagcctgctgtccgtgctgctgatgggatgcgtggcagagacaggcacacagtgcgtgaacctgaccacaaggacccagctgccccctgcctataccaattctttcacacggggcgtgtactatcccgacaaggtgtttagaagctccgtgctgcactccacacaggatctgtttctgcctttcttttctaacgtgacctggttccacgccaaacacgtgtccggcaccaatggcacaaagcggttcgacaatcccgtgctgccttttaacgatggcgtgtacttcgccagcaccgagaagtccaacatcatcagaggctggatctttggcaccacactggactctaagacacagagcctgctgatcgtgaacaatgccaccaacgtggtgatcaaggtgtgcgagttccagttttgtaatgatccattcctgggcgtgtactatcacaagaacaataagtcctggatggagtctgagtttcgcgtgtattctagcgccaacaattgcacatttgagtacgtgagccagcccttcctgatggacctggagggcaagcagggcaatttcaagaacctgagggagttcgtgtttaagaatatcgatggctacttcaagatctacagcaagcacaccccaatcaacctggtgcgcgacctgccacagggattctccgccctggagccactggtggatctgcccatcggcatcaacatcacccggtttcagacactgctggccctgcacagatcctacctgacaccaggcgactcctctagcggagaaaccgcaggagctgccgcctactatgtgggctatctgcagccccggaccttcctgctgaagtacaacgagaatggcaccatcacagacgcagtggattgcgccctggaccccctgtctgagacaaagtgtacactgaagagctttaccgtggagaagggcatctatcagacaagcaatttcagggtgcagcctaccgagtccatcgtgcgctttcccaatatcacaaacccgtgcccttttggcgaggtgttcaacgccaccagattcgccagcgtgtacgcctggaatcggaagagaatctccaactgcgtggccgactattctgtgctgtacaactccgcctctttcagcacctttaagtgctatggcgtgtctcccacaaagctgaatgatctgtgctttaccaacgtgtacgccgatagcttcgtgatcaggggagacgaagtgagacagatcgcaccaggacagacaggaaagatcgcagactacaattataagctgcctgacgatttcaccggctgcgtgatcgcctggaactccaacaatctggattctaaagtgggcggcaactacaattatctgtacaggctgtttcgcaagtccaatctgaagccattcgagcgggacatctccacagagatctaccaggccggctctaccccctgcaatggcgtggagggctttaactgttatttccctctgcagtcttacggcttccagccaacaaacggccctggccaacagccctacagagtggtggtgctgtcctttgagctgctgcacgcaccagcaacagtgtgcggcccaaagaagtctaccaatctggtgaagaacaagtgcgtgaacttcaacttcaacggactgaccggcacaggcgtgctgaccgagagcaataagaagttcctgccttttcagcagttcggcagggacatcgcagataccacagacgccgtgcgcgaccctcagaccctggagatcctggacatcacaccatgcagcttcggcggcgtgtccgtgatcacaccaggcaccaatacatccaaccaggtggccgtgctgtatcaggacgtgaattgtaccgaggtgcccgatgcaatccacgcagatcagctgacccctacatggcgggtgtactctaccggcagcaacgtgttccagacaagagccggatgcctgatcggagcagagcacgtgaacaatagctatgagtgcgacatccctatcggcgccggcatctgtgccagctaccagacccagacaaactccccatctggagcaggctcccaccatcaccatcaccatcaccatcaccactga

SEQ ID NO: 4155 - DNA, 2148 bp, Artificial Sequence
  Description of Artificial Sequence: Synthetic polynucleotide
atgggcatcctgccaagcccaggaatgcccgccctgctgtctctggtgagcctgctgtccgtgctgctgatgggatgcgtggcagagacaggcacacagtgcgtgaacctgaccacaaggacccagctgccccctgcctataccaattctttcacacggggcgtgtactatcccgacaaggtgtttagaagctccgtgctgcactccacacaggatctgtttctgcctttcttttctaacgtgacctggttccacgccatccacgtgtccggcaccaatggcacaaagcggttcgacaatcccgtgctgccttttaacgatggcgtgtacttcgccagcaccgagaagtccaacatcatcagaggctggatctttggcaccacactggactctaagacacagagcctgctgatcgtgaacaatgccaccaacgtggtgatcaaggtgtgcgagttccagttttgtaatgatccattcctgggcgtgtactatcacaagaacaataagtcctggatggagtctgagtttcgcgtgtattctagcgccaacaattgcacatttgagtacgtgagccagcccttcctgatggacctggagggcaagcagggcaatttcaagaacctgagggagttcgtgtttaagaatatcgatggctacttcaagatctacagcaagcacaccccaatcaacctggtgcgcgacctgccacagggattctccgccctggagccactggtggatctgcccatcggcatcaacatcacccggtttcagacactgctggccctgcacagatcctacctgacaccaggcgactcctctagcggatggaccgcaggagctgccgcctactatgtgggctatctgcagccccggaccttcctgctgaagtacaacgagaatggcaccatcacagacgcagtggattgcgccctggaccccctgtctgagacaaagtgtacactgaagagctttaccgtggagaagggcatctatcagacaagcaatttcagggtgcagcctaccgagtccatcgtgcgctttcccaatatcacaaacctgtgcccttttggcgaggtgttcaacgccaccagattcgccagcgtgtacgcctggaatcggaagagaatctccaactgcgtggccgactattctgtgctgtacaactccgcctctttcagcacctttaagtgctatggcgtgtctcccacaaagctgaatgatctgtgctttaccaacgtgtacgccgatagcttcgtgatcaggggagacgaagtgagacagatcgcaccaggacagacaggaaagatcgcagactacaattataagctgcctgacgatttcaccggctgcgtgatcgcctggaactccaacaatctggattctaaagtgggcggcaactacaattatctgtacaggctgtttcgcaagtccaatctgaagccattcgagcgggacatctccacagagatctaccagagtggctctaccccctgcaatggcgtggagggctttaactgttatttccctctgcagtcttacggcttccagccaacaaacggcgtgggctatcagccctacagagtggtggtgctgtcctttgagctgctgcacgcaccagcaacagtgtgcggcccaaagaagtctaccaatctggtgaagaacaagtgcgtgaacttcaacttcaacggactgaccggcacaggcgtgctgaccgagagcaataagaagttcctgccttttcagcagttcggcagggacatcgcagataccacagacgccgtgcgcgaccctcagaccctggagatcctggacatcacaccatgcagcttcggcggcgtgtccgtgatcacaccaggcaccaatacatccaaccaggtggccgtgctgtatcaggacgtgaattgtaccgaggtgcccgtggcaatccacgcagatcagctgacccctacatggcgggtgtactctaccggcagcaacgtgttccagacaagagccggatgcctgatcggagcagagcacgtgaacaatagctatgagtgcgacatccctatcggcgccggcatctgtgccagctaccagacccagacaaactccccatctggagcaggctcccaccatcaccatcaccatcaccatcaccactga

SEQ ID NO: 4156 - DNA, 2148 bp, Artificial Sequence
  Description of Artificial Sequence: Synthetic polynucleotide
atgggcatcctgccaagcccaggaatgcccgccctgctgtctctggtgagcctgctgtccgtgctgctgatgggatgcgtggcagagacaggcacacagtgcgtgaacctgaccacaaggacccagctgccccctgcctataccaattctttcacacggggcgtgtactatcccgacaaggtgtttagaagctccgtgctgcactccacacaggatctgtttctgcctttcttttctaacgtgacctggttccacgccatccacgtgtccggcaccaatggcacaaagcggttcgacaatcccgtgctgccttttaacgatggcgtgtacttcgccagcaccgagaagtccaacatcatcagaggctggatctttggcaccacactggactctaagacacagagcctgctgatcgtgaacaatgccaccaacgtggtgatcaaggtgtgcgagttccagttttgtaatgatccattcctgggcgtgtactatcacaagaacaataagtcctggatggagtctgagtttcgcgtgtattctagcgccaacaattgcacatttgagtacgtgagccagcccttcctgatggacctggagggcaagcagggcaatttcaagaacctgagggagttcgtgtttaagaatatcgatggctacttcaagatctacagcaagcacaccccaatcaacctggtgcgcgacctgccacagggattctccgccctggagccactggtggatctgcccatcggcatcaacatcacccggtttcagacactgctggccctgcacagatcctacctgacaccaggcgactcctctagcggatggaccgcaggagctgccgcctactatgtgggctatctgcagccccggaccttcctgctgaagtacaacgagaatggcaccatcacagacgcagtggattgcgccctggaccccctgtctgagacaaagtgtacactgaagagctttaccgtggagaagggcatctatcagacaagcaatttcagggtgcagcctaccgagtccatcgtgcgctttcccaatatcacaaacctgtgcccttttggcgaggtgttcaacgccaccagattcgccagcgtgtacgcctggaatcggaagagaatctccaactgcgtggccgactattctgtgctgtacaactccgcctctttcagcacctttaagtgctatggcgtgtctcccacaaagctgaatgatctgtgctttaccaacgtgtacgccgatagcttcgtgatcaggggagacgaagtgagacagatcgcaccaggacagacaggaaagatcgcagactacaattataagctgcctgacgatttcaccggctgcgtgatcgcctggaactccaacaatctggattctaaagtgggcggcaactacaattatctgtacaggctgtttcgcaagtccaatctgaagccattcgagcgggacatctccacagagatctaccaggccggctctaccccctgcaatggcgtggagggctttaactgttatttccctctgcagtcttacggcttccagccaacaaacggcgtgggctatcagccctacagagtggtggtgctgtcctttgagctgctgcacgcaccagcaacagtgtgcggcccaaagaagtctaccaatctggtgaagaacaagtgcgtgaacttcaacttcaacggactgaccggcacaggcgtgctgaccgagagcaataagaagttcctgccttttcagcagttcggcagggacatcgcagataccacagacgccgtgcgcgaccctcagaccctggagatcctggacatcacaccatgcagcttcggcggcgtgtccgtgatcacaccatcaaccaatacatccaaccaggtggccgtgctgtatcaggacgtgaattgtaccgaggtgcccgtggcaatccacgcagatcagctgacccctacatggcgggtgtactctaccggcagcaacgtgttccagacaagagccggatgcctgatcggagcagagcacgtgaacaatagctatgagtgcgacatccctatcggcgccggcatctgtgccagctaccagacccagacaaactccccatctggagcaggctcccaccatcaccatcaccatcaccatcaccactga

SEQ ID NO: 4157 - DNA, 2148 bp, Artificial Sequence
  Description of Artificial Sequence: Synthetic polynucleotide
atgggcatcctgccaagcccaggaatgcccgccctgctgtctctggtgagcctgctgtccgtgctgctgatgggatgcgtggcagagacaggcacacagtgcgtgaacctgaccacaaggacccagctgccccctgcctataccaattctttcacacggggcgtgtactatcccgacaaggtgtttagaagctccgtgctgcactccacacaggatctgtttctgcctttcttttctaacgtgacctggttccacgccatccacgtgtccggcaccaatggcacaaagcggttcgacaatcccgtgctgccttttaacgatggcgtgtacttcgccagcaccgagaagtccaacatcatcagaggctggatctttggcaccacactggactctaagacacagagcctgctgatcgtgaacaatgccaccaacgtggtgatcaaggtgtgcgagttccagttttgtaatgatccattcctgggcgtgtactatcacaagaacaataagtcctggatggagtctgagtttcgcgtgtattctagcgccaacaattgcacatttgagtacgtgagccagcccttcctgatggacctggagggcaagcagggcaatttcaagaacctgagggagttcgtgtttaagaatatcgatggctacttcaagatctacagcaagcacaccccaatcaacctggtgcgcgacctgccacagggattctccgccctggagccactggtggatctgcccatcggcatcaacatcacccggtttcagacactgctggccctgcacagatcctacctgacaccaggcgactcctctagcggatggaccgcaggagctgccgcctactatgtgggctatctgcagccccggaccttcctgctgaagtacaacgagaatggcaccatcacagacgcagtggattgcgccctggaccccctgtctgagacaaagtgtacactgaagagctttaccgtggagaagggcatctatcagacaagcaatttcagggtgcagcctaccgagtccatcgtgcgctttcccaatatcacaaacctgtgcccttttggcgaggtgttcaacgccaccagattcgccagcgtgtacgcctggaatcggaagagaatctccaactgcgtggccgactattctgtgctgtacaactccgcctctttcagcacctttaagtgctatggcgtgtctcccacaaagctgaatgatctgtgctttaccaacgtgtacgccgatagcttcgtgatcaggggagacgaagtgagacagatcgcaccaggacagacaggaaagatcgcagactacaattataagctgcctgacgatttcaccggctgcgtgatcgcctggaactccaacaatctggattctaaagtgggcggcaactacaattatctgtacaggctgtttcgcaagtccaatctgaagccattcgagcgggacatctccacagagatctaccaggccggctctaccccctgcaatggcgtggagggctttaactgttatttccctctgcagtcttacggcttccagccaacaaacggcgtgggctatcagccctacagagtggtggtgctgtcctttgagctgctgcacgcaccagcaacagtgtgcggcccaaagaagtctaccaatctggtgaagaacaagtgcgtgaacttcaacttcaacggactgaccggcacaggcgtgctgaccgagagcaataagaagttcctgccttttcagcagttcggcagggacatcgcagataccacagacgccgtgcgcgaccctcagaccctggagatcctggacatcacaccatgcagccatggcggcgtgtccgtgatcacaccaggcaccaatacatccaaccaggtggccgtgctgtatcaggacgtgaattgtaccgaggtgcccgtggcaatccacgcagatcagctgacccctacatggcgggtgtactctaccggcagcaacgtgttccagacaagagccggatgcctgatcggagcagagcacgtgaacaatagctatgagtgcgacatccctatcggcgccggcatctgtgccagctaccagacccagacaaactccccatctggagcaggctcccaccatcaccatcaccatcaccatcaccactga

SEQ ID NO: 4158 - DNA, 2148 bp, Artificial Sequence
  Description of Artificial Sequence: Synthetic polynucleotide
atgggcatcctgccaagcccaggaatgcccgccctgctgtctctggtgagcctgctgtccgtgctgctgatgggatgcgtggcagagacaggcacacagtgcgtgaacctgaccacaaggacccagctgccccctgcctataccaattctttcacacggggcgtgtactatcccgacaaggtgtttagaagctccgtgctgcactccacacaggatctgtttctgcctttcttttctaacgtgacctggttccacgccatccacgtgtccggcaccaatggcacaaagcggttcgacaatcccgtgctgccttttaacgatggcgtgtacttcgccagcaccgagaagtccaacatcatcagaggctggatctttggcaccacactggactctaagacacagagcctgctgatcgtgaacaatgccaccaacgtggtgatcaaggtgtgcgagttccagttttgtaatgatccattcctgggcgtgtactatcacaagaacaataagtcctggatggagtctgagtttcgcgtgtattctagcgccaacaattgcacatttgagtacgtgagccagcccttcctgatggacctggagggcaagcagggcaatttcaagaacctgagggagttcgtgtttaagaatatcgatggctacttcaagatctacagcaagcacaccccaatcaacctggtgcgcgacctgccacagggattctccgccctggagccactggtggatctgcccatcggcatcaacatcacccggtttcagacactgctggccctgcacagatcctacctgacaccaggcgactcctctagcggatggaccgcaggagctgccgcctactatgtgggctatctgcagccccggaccttcctgctgaagtacaacgagaatggcaccatcacagacgcagtggattgcgccctggaccccctgtctgagacaaagtgtacactgaagagctttaccgtggagaagggcatctatcagacaagcaatttcagggtgcagcctaccgagtccatcgtgcgctttcccaatatcacaaacctgtgcccttttggcgaggtgttcaacgccaccagattcgccagcagttacgcctggaatcggaagagaatctccaactgcgtggccgactattctgtgctgtacaactccgcctctttcagcacctttaagtgctatggcgtgtctcccacaaagctgaatgatctgtgctttaccaacgtgtacgccgatcgcttcgtgatcaggggagacgaagtgagacagatcgcaccaggacagacaggaaagatcgcagactacaattataagctgcctgacgatttcaccggctgcgtgatcgcctggaactccaacaatctggatgctaaagtgggcggcaactacaattatctgtacaggctgtttcgcaagtccaatctgaagccattcgagcggtttatctccacagagatctaccaggccggctctacccccagtaatggcgtggagggctttaactgttatttccctctgcagtcttacgtattccagccaacaaacggcgtgacttatcagccctacagagtggtggtgctgtcctttgagctgctgcacgcaccacatacagtgtgcggcccaaagaagtctaccaatctggtgaagaacaagtgcgtgaacttcaacttcaacggactgaccggcacaggcgtgctgaccgagagcaataagaagttcctgccttttcagcagttcggcagggacatcgcagataccacagacgccgtgcgcgaccctcagaccctggagatcctggacatcacaccatgcagcttcggcggcgtgtccgtgatcacaccaggcaccaatacatccaaccaggtggccgtgctgtatcaggacgtgaattgtaccgaggtgcccgtggcaatccacgcagatcagctgacccctacatggcgggtgtactctaccggcagcaacgtgttccagacaagagccggatgcctgatcggagcagagcacgtgaacaatagctatgagtgcgacatccctatcggcgccggcatctgtgccagctaccagacccagacaaactccccatctggagcaggctcccaccatcaccatcaccatcaccatcaccactga

SEQ ID NO: 4159 - DNA, 2148 bp, Artificial Sequence
  Description of Artificial Sequence: Synthetic polynucleotide
atgggcatcctgccaagcccaggaatgcccgccctgctgtctctggtgagcctgctgtccgtgctgctgatgggatgcgtggcagagacaggcacacagtgcgtgaacctgaccacaaggacccagctgccccctgcctataccaattctttcacacggggcgtgtactatcccgacaaggtgtttagaagctccgtgctgcactccacacaggatctgtttctgcctttcttttctaacgtgacctggttccacgccatccacgtgtccggcaccaatggcacaaagcggttcgacaatcccgtgctgccttttaacgatggcgtgtacttcgccagcaccgagaagtccaacatcatcagaggctggatctttggcaccacactggactctaagacacagagcctgctgatcgtgaacaatgccaccaacgtggtgatcaaggtgtgcgagttccagttttgtaatgatccattcctgggcgtgtactatcacaagaacaataagtcctggatggagtctgagtttcgcgtgtattctagcgccaacaattgcacatttgagtacgtgagccagcccttcctgatggacctggagggcaagcagggcaatttcaagaacctgagggagttcgtgtttaagaatatcgatggctacttcaagatctacagcaagcacaccccaatcaacctggtgcgcgacctgccacagggattctccgccctggagccactggtggatctgcccatcggcatcaacatcacccggtttcagacactgctggccctgcacagatcctacctgacaccaggcgactcctctagcggatggaccgcaggagctgccgcctactatgtgggctatctgcagccccggaccttcctgctgaagtacaacgagaatggcaccatcacagacgcagtggattgcgccctggaccccctgtctgagacaaagtgtacactgaagagctttaccgtggagaagggcatctatcagacaagcaatttcagggtgcagcctaccgagtccatcgtgcgctttcccaatatcacaaacctgtgcccttttggcgaggtgttcaacgccaccagattcgccagcgtgtacgcctggaatcggaagagaatctccaactgcgtggccgactattctgtgctgtacaactccgcctctttcagcacctttaagtgctatggcgtgtctcccacaaagctgaatgatctgtgctttaccaacgtgtacgccgatagcttcgtgatcaggggagacgaagtgagacagatcgcaccaggacagacaggaaagatcgcagactacaattataagctgcctgacgatttcaccggctgcgtgatcgcctggaactccaacaatctggattctaaagtgggcggcaactacaattatctgtacaggctgtttcgcaagtccaatctgaagccattcgagcgggacatctccacagagatctaccaggccggctctaccccctgcaatggcgtggagggctttaactgttatttccctctgcagtcttacggcttccagccaacaaacggcgtgggctatcagccctacagagtggtggtgctgtcctttgagctgctgcacgcaccagcaacagtgtgcggcccaaagaagtctaccaatctggtgaagaacaagtgcgtgaacttcaacttcaacggactgaccggcacaggcgtgctgaccgagagcaataagaagttcctgccttttcagcagttcggcagggacatcgcagataccacagacgccgtgcgcgaccctcagaccctggagatcctggacatcacaccatgcagcttcggcggcgtgtccgtgatcacaccaggcaccaatacatccaaccaggtggccgtgctgtatcaggacgtgaattgtaccgaggtgcccgtggcaatccacgcagatcagctgacccctacatggcgggtgtacaacaccggcagcaacgtgttccagacaagagccggatgcctgatcggagcagagcacgtgaacaatagctatgagtgcgacatccctatcggcgccggcatctgtgccagctaccagacccagacaaactccccatctggagcaggctcccaccatcaccatcaccatcaccatcaccactga

SEQ ID NO: 4160 - DNA, 2148 bp, Artificial Sequence
  Description of Artificial Sequence: Synthetic polynucleotide
atgggcatcctgccaagcccaggaatgcccgccctgctgtctctggtgagcctgctgtccgtgctgctgatgggatgcgtggcagagacaggcacacagtgcgtgaacctgaccacaaggacccagctgccccctgcctataccaattctttcacacggggcgtgtactatcccgacaaggtgtttagaagctccgtgctgcactccacacaggatctgtttctgcctttcttttctaacgtgacctggttccacgccatccacgtgtccggcaccaatggcacaaagcggttcgacaatcccgtgctgccttttaacgatggcgtgtacttcgccagcaccgagaagtccaacatcatcagaggctggatctttggcaccacactggactctaagacacagagcctgctgatcgtgaacaatgccaccaacgtggtgatcaaggtgtgcgagttccagttttgtaatgatccattcctgggcgtgtactatcacaagaacaataagtcctggatggagtctgagtttcgcgtgtattctagcgccaacaattgcacatttgagtacgtgagccagcccttcctgatggacctggagggcaagcagggcaatttcaagaacctgagggagttcgtgtttaagaatatcgatggctacttcaagatctacagcaagcacaccccaatcaacctggtgcgcgacctgccacagggattctccgccctggagccactggtggatctgcccatcggcatcaacatcacccggtttcagacactgctggccctgcacagatcctacctgacaccaggcgactcctctagcggatggaccgcaggagctgccgcctactatgtgggctatctgcagccccggaccttcctgctgaagtacaacgagaatggcaccatcacagacgcagtggattgcgccctggaccccctgtctgagacaaagtgtacactgaagagctttaccgtggagaagggcatctatcagacaagcaatttcagggtgcagcctaccgagtccatcgtgcgctttcccaatatcacaaacctgtgcccttttgatgaggtgttcaacgccaccagattcgccagcgtgtacgcctggaatcggaagagaatctccaactgcgtggccgactattctgtgctgtacaactccgcctctttcagcacctttaagtgctatggcgtgtctcccacaaagctgaatgatctgtgctttaccaacgtgtacgccgatagcttcgtgatcaggggagacgaagtgagacagatcgcaccaggacagacaggaaagatcgcagactacaattataagctgcctgacgatttcaccggctgcgtgatcgcctggaactccaacaatctggattctaaagtgggcggcaactacaattatctgtacaggctgtttcgcaagtccaatctgaagccattcgagcgggacatctccacagagatctaccaggccggctctaccccctgcaatggcgtggagggctttaactgttatttccctctgcagtcttacggcttccagccaacaaacggcgtgggctatcagccctacagagtggtggtgctgtcctttgagctgctgcacgcaccagcaacagtgtgcggcccaaagaagtctaccaatctggtgaagaacaagtgcgtgaacttcaacttcaacggactgaccggcacaggcgtgctgaccgagagcaataagaagttcctgccttttcagcagttcggcagggacatcgcagataccacagacgccgtgcgcgaccctcagaccctggagatcctggacatcacaccatgcagcttcggcggcgtgtccgtgatcacaccaggcaccaatacatccaaccaggtggccgtgctgtatcaggacgtgaattgtaccgaggtgcccgtggcaatccacgcagatcagctgacccctacatggcgggtgtactctaccggcagcaacgtgttccagacaagagccggatgcctgatcggagcagagcacgtgaacaatagctatgagtgcgacatccctatcggcgccggcatctgtgccagctaccagacccagacaaactccccatctggagcaggctcccaccatcaccatcaccatcaccatcaccactga

SEQ ID NO: 4161 - DNA, 2148 bp, Artificial Sequence
  Description of Artificial Sequence: Synthetic polynucleotide
atgggcatcctgccaagcccaggaatgcccgccctgctgtctctggtgagcctgctgtccgtgctgctgatgggatgcgtggcagagacaggcacacagtgcgtgaacctgaccacaaggacccagctgccccctgcctataccaattctttcacacggggcgtgtactatcccgacaaggtgtttagaagccaagtgctgcactccacacaggatctgtttctgcctttcttttctaacgtgacctggttccacgccatccacgtgtccggcaccaatggcacaaagcggttcgacaatcccgtgctgccttttaacgatggcgtgtacttcgccagcaccgagaagtccaacatcatcagaggctggatctttggcaccacactggactctaagacacagagcctgctgatcgtgaacaatgccaccaacgtggtgatcaaggtgtgcgagttccagttttgtaatgatccattcctgggcgtgtactatcacaagaacaataagtcctggatggagtctgagtttcgcgtgtattctagcgccaacaattgcacatttgagtacgtgagccagcccttcctgatggacctggagggcaagcagggcaatttcaagaacctgagggagttcgtgtttaagaatatcgatggctacttcaagatctacagcaagcacaccccaatcaacctggtgcgcgacctgccacagggattctccgccctggagccactggtggatctgcccatcggcatcaacatcacccggtttcagacactgctggccctgcacagatcctacctgacaccaggcgactcctctagcggatggaccgcaggagctgccgcctactatgtgggctatctgcagccccggaccttcctgctgaagtacaacgagaatggcaccatcacagacgcagtggattgcgccctggaccccctgtctgagacaaagtgtacactgaagagctttaccgtggagaagggcatctatcagacaagcaatttcagggtgcagcctaccgagtccatcgtgcgctttcccaatatcacaaacctgtgcccttttggcgaggtgttcaacgccaccagattcgccagcgtgtacgcctggaatcggaagagaatctccaactgcgtggccgactattctgtgctgtacaactccgcctctttcagcacctttaagtgctatggcgtgtctcccacaaagctgaatgatctgtgctttaccaacgtgtacgccgatagcttcgtgatcaggggagacgaagtgagacagatcgcaccaggacagacaggaaagatcgcagactacaattataagctgcctgacgatttcaccggctgcgtgatcgcctggaactccaacaatctggattctaaagtgggcggcaactacaattatctgtacaggctgtttcgcaagtccaatctgaagccattcgagcgggacatctccacagagatctaccaggccggctctaccccctgcaatggcgtggagggctttaactgttatttccctctgcagtcttacggcttccagccaacaaacggcgtgggctatcagccctacagagtggtggtgctgtcctttgagctgctgcacgcaccagcaacagtgtgcggcccaaagaagtctaccaatctggtgaagaacaagtgcgtgaacttcaacttcaacggactgaccggcacaggcgtgctgaccgagagcaataagaagttcctgccttttcagcagttcggcagggacatcgcagataccacagacgccgtgcgcgaccctcagaccctggagatcctggacatcacaccatgcagcttcggcggcgtgtccgtgatcacaccaggcaccaatacatccaaccaggtggccgtgctgtatcaggacgtgaattgtaccgaggtgcccgtggcaatccacgcagatcagctgacccctacatggcgggtgtactctaccggcagcaacgtgttccagacaagagccggatgcctgatcggagcagagcacgtgaacaatagctatgagtgcgacatccctatcggcgccggcatctgtgccagctaccagacccagacaaactccccatctggagcaggctcccaccatcaccatcaccatcaccatcaccactga

SEQ ID NO: 4162 - DNA, 2148 bp, Artificial Sequence
  Description of Artificial Sequence: Synthetic polynucleotide
atgggcatcctgccaagcccaggaatgcccgccctgctgtctctggtgagcctgctgtccgtgctgctgatgggatgcgtggcagagacaggcacacagtgcgtgaacctgaccacaaggacccagctgccccctgcctataccaattctttcacacggggcgtgtactatcccgacaaggtgtttagaagctccgtgctgcactccacacaggatctgtttctgcctttcttttctaacgtgacctggttccacgccatccacgtgtccggcaccaatggcacaaagcggttcgacaatcccgtgctgccttttaacgatggcgtgtacttcgccagcaccgagaagtccaacatcatcagaggctggatctttggcaccacactggactctaagacacagagcctgctgatcgtgaacaatgccaccaacgtggtgatcaaggtgtgcgagttccagttttgtaatgatccattcctgggcgtgtactatcacaagaacaataagtcctggatggagtctgagtttcgcgtgtattctagcgccaacaattgcacatttgagtacgtgagccagcccttcctgatggacctggagggcaagcagggcaatttcaagaacctgagggagttcgtgtttaagaatatcgatggctacttcaagatctacagcaagcacaccccaatcaacctggtgcgcgacctgccacagggattctccgccctggagccactggtggatctgcccatcggcatcaacatcacccggtttcagacactgctggccctgcacagatcctacctgacaccaggcgactcctctagcggatggaccgcaggagctgccgcctactatgtgggctatctgcagccccggaccttcctgctgaagtacaacgagaatggcaccatcacagacgcagtggattgcgccctggaccccctgtctgagacaaagtgtacactgaagagctttaccgtggagaagggcatctatcagacaagcaatttcagggtgcagcctaccgagtccatcgtgcgctttcccaatatcacaaacctgtgcccttttggcgaggtgttcaacgccaccagattcgccagcgtgtacgcctggaatcggaagagaatctccaactgcgtggccgactattctgtgctgtacaactccgcctctttcagcacctttaagtgctatggcgtgtctcccacaaagctgaatgatctgtgctttaccaacgtgtacgccgatagcttcgtgatcaggggagacgaagtgagacagatcgcaccaggacagacaggaaagatcgcagactacaattataagctgcctgacgatttcaccggctgcgtgatcgcctggaactccaacaatctggattctaaagtgggcggcaactacaattatctgtacaggctgtttcgcaagtccaatctgaagccattcgagcgggacatctccacagagatctaccaggccggctctaccccctgcaatggcgtggagggctttaactgttatttccctctgcagtcttacggcttccagccaacaaacggcgtgggctatcagccctacagagtggtggtgctgtcctttgagctgctgcacgcaccagcaacagtgtgcggcccaaagaagtctaccaatctggtgaagaacaagtgcgtgaacttcaacttcaacggactgaccggcacaggcgtgctgaccgagagcaataagaagttcctgccttttcagcagttcggcagggacatcgcagataccacagacgccgtgcgcgaccctcagaccctggagatcctggacatcacaccatgcagcttcggcggcgtgttggtgatcacaccagataccaatacatccaaccaggtggccgtgctgtatcaggacgtgaattgtaccgaggtgcccgtggcaatccacgcagatcagctgacccctacatggcgggtgtacaacaccggcagcaacgtgttccagacaagagccggatgcctggtaggatttgagcacgtgaacaatagctatgagtgcgacatccctgtaggcgccggcatctgtgccagctaccagacccagcgtaactccccatctggagcaggctcccaccatcaccatcaccatcaccatcaccactga

SEQ ID NO: 4163 - DNA, 2148 bp, Artificial Sequence
  Description of Artificial Sequence: Synthetic polynucleotide
atgggcatcctgccaagcccaggaatgcccgccctgctgtctctggtgagcctgctgtccgtgctgctgatgggatgcgtggcagagacaggcacacagtgcgtgaacctgaccacaaggacccagctgccccctgcctataccaattctttcacacggggcgtgtactatcccgacaaggtgtttagaagctccgtgctgcactccacacaggatctgtttctgcctttcttttctaacgtgacctggttccacgccatccacgtgtccggcaccaatggcacaaagcggttcgacaatcccgtgctgccttttaacgatggcgtgtacttcgccagcaccgagaagtccaacatcatcagaggctggatctttggcaccacactggactctaagacacagagcctgctgatcgtgaacaatgccaccaacgtggtgatcaaggtgtgcgagttccagttttgtaatgatccattcctgggcgtgtactatcacaagaacaataagtcctggatggagtctgagtttcgcgtgtattctagcgccaacaattgcacatttgagtacgtgagccagcccttcctgatggacctggagggcaagcagggcaatttcaagaacctgagggagttcgtgtttaagaatatcgatggctacttcaagatctacagcaagcacaccccaatcaacctggtgcgcgacctgccacagggattctccgccctggagccactggtggatctgcccatcggcatcaacatcacccggtttcagacactgctggccctgcacagatcctacctgacaccaggcgactcctctagcggatggaccgcaggagctgccgcctactatgtgggctatctgcagccccggaccttcctgctgaagtacaacgagaatggcaccatcacagacgcagtggattgcgccctggaccccctgtctgagacaaagtgtacactgaagagctttaccgtggagaagggcatctatcagacaagcaatttcagggtgcagcctaccgagtccatcgtgcgctttcccaatatcacaaacctgtgcccttttggcgaggtgttcaacgccaccagattcgccagcgtgtacgcctggaatcggaagagaatctccaactgcgtggccgactattctgtgctgtacaactccgcctctttcagcacctttaagtgctatggcgtgtctcccacaaagctgaatgatctgtgctttaccaacgtgtacgccgatagcttcgtgatcaggggagacgaagtgagacagatcgcaccaggacagacaggaaagatcgcagactacaattataagctgcctgacgatttcaccggctgcgtgatcgcctggaactccaacaatctggattctaaagtgggcggcaactacaattatctgtacaggctgtttcgcaagtccaatctgaagccattcgagcgggacatctccgaagagatctaccaggccggctctaccccctgcaatggcgtggagggctttaactgttatttccctctgcagtcttacggcttccagccaacaaacggcgtgggctatcagccctacagagtggtggtgctgtcctttgagctgctgcacgcaccagcaacagtgtgcggcccaaagaagtctaccaatctggtgaagaacaagtgcgtgaacttcaacttcaacggactgaccggcacaggcgtgctgaccgagagcaataagaagttcctgccttttcagcagttcggcagggacatcgcagataccacagacgccgtgcgcgaccctcagaccctggagatcctggacatcacaccatgcagcttcggcggcgtgtccgtgatcacaccaggcaccaatacatccaaccaggtggccgtgctgtatcaggacgtgaattgtaccgaggtgcccgtggcaatccacgcagatcagctgacccctacatggcgggtgtactctaccggcagcaacgtgttccagacaagagccggatgcctgatcggagcagagcacgtgaacaatagctatgagtgcgacatccctatcggcgccggcatctgtgccagctaccagacccagacaaactccccatctggagcaggctcccaccatcaccatcaccatcaccatcaccactga

SEQ ID NO: 4164 - DNA, 2148 bp, Artificial Sequence
  Description of Artificial Sequence: Synthetic polynucleotide
atgggcatcctgccaagcccaggaatgcccgccctgctgtctctggtgagcctgctgtccgtgctgctgatgggatgcgtggcagagacaggcacacagtgcgtgaacctgaccacaaggacccagctgccccctgcctataccaattctttcacacggggcgtgtactatcccgacaaggtgtttagaagctccgtgctgcactccacacaggatctgtttctgcctttcttttctaacgtgacctggttccacgccatccacgtgtccggcaccaatggcacaaagcggttcgacaatcccgtgctgccttttaacgatggcgtgtacttcgccagcaccgagaagtccaacatcatcagaggctggatctttggcaccacactggactctaagacacagagcctgctgatcgtgaacaatgccaccaacgtggtgatcaaggtgtgcgagttccagttttgtaatgatccattcctgggcgtgtactatcacaagaacaataagtcctggatggagtctgagtttcgcgtgtattctagcgccaacaattgcacatttgagtacgtgagccagcccttcctgatggacctggagggcaagcagggcaatttcaagaacctgagggagttcgtgtttaagaatatcgatggctacttcaagatctacagcaagcacaccccaatcaacctggtgcgcgacctgccacagggattctccgccctggagccactggtggatctgcccatcggcatcaacatcacccggtttcagacactgctggccctgcacagatcctacctgacaccaggcgactcctctagcggatggaccgcaggagctgccgcctactatgtgggctatctgcagccccggaccttcctgctgaagtacaacgagaatggcaccatcacagacgcagtggattgcgccctggaccccctgtctgagacaaagtgtacactgaagagctttaccgtggagaagggcatctatcagacaagcaatttcagggtgcagcctaccgagtccatcgtgcgctttcccaatatcacaaacctgtgcccttttggcgaggtgttcaacgccaccagattcgccagcgtgtacgcctggaatcggaagagaatctccaactgcgtggccgactattctgtgctgtacaactccgcctctttcagcacctttaagtgctatggcgtgtctcccacaaagctgaatgatctgtgctttaccaacgtgtacgccgatagcttcgtgatcaggggagacgaagtgagacagatcgcaccaggacagacaggaaagatcgcagactacaattataagctgcctgacgatttcaccggctgcgtgatcgcctggaactccaacaatctggattctaaagtgggcggcaactacaattatctgtacaggctgtttcgcaagtccaatctgaagccattcgagcgggacatctccacagagatctaccaggccggctctaccccctgcaatggcgtggagggctttaactgttatttccctctgcagtcttacggcttccagccaacaaacggcgtgggctatcagccctacagagtggtggtgctgtcctttgagctgctgcacgcaccagcaacagtgtgcggcccaaagaagtctaccaatctggtgaagaacaagtgcgtgaacttcaacttcaacggactgaccggcacaggcgtgctgaccgagagcaataagaagttcctgccttttcagcagttcggcagggacatcgcagataccacagacgccgtgcgcgaccctcagaccctggagatcctggacatcacaccatgcagcttcggcggcgtgtccgtgatcacaccaggcaccaatacatccaaccaggtggccgtgctgtatcaggacgtgaattgtaccgaggtgcccgtggcaatccacgcacggcagctgacccctacatggcgggtgtactctaccggcagcaacgtgttccagacaagagccggatgcctgatcggagcagagcacgtgaacaatagctatgagtgcgacatccctatcggcgccggcatctgtgccagctaccagacccagacaaactccccatctggagcaggctcccaccatcaccatcaccatcaccatcaccactga

SEQ ID NO: 4165 - DNA, 2148 bp, Artificial Sequence
  Description of Artificial Sequence: Synthetic polynucleotide
atgggcatcctgccaagcccaggaatgcccgccctgctgtctctggtgagcctgctgtccgtgctgctgatgggatgcgtggcagagacaggcacacagtgcgtgaacctgaccacaaggacccagctgccccctgcctataccaattctttcacacggggcgtgtactatcccgacaaggtgtttagaagctccgtgctgcactccacacaggatctgtttctgcctttcttttctaacgtgacctggttccacgccatccacgtgtccggcaccaatggcacaaagcggttcgacaatcccgtgctgccttttaacgatggcgtgtacttcgccagcaccgagaagtccaacatcatcagaggctggatctttggcaccacactggactctaagacacagagcctgctgatcgtgaacaatgccaccaacgtggtgatcaaggtgtgcgagttccagttttgtaatgatccattcctgggcgtgtactatcacaagaacaataagtcctggatggagtctgagtttcgcgtgtattctagcgccaacaattgcacatttgagtaccatagccagcccttcctgatggacctggagggcaagcagggcaatttcaagaacctgagggagttcgtgtttaagaatatcgatggctacttcaagatctacagcaagcacaccccaatcaacctggtgcgcgacctgccacagggattctccgccctggagccactggtggatctgcccatcggcatcaacatcacccggtttcagacactgctggccctgcacagatcctacctgacaccaggcgactcctctagcggagaaaccgcaggagctgccgcctactatgtgggctatctgcagccccggaccttcctgctgaagtacaacgagaatggcaccatcacagacgcagtggattgcgccctggaccccctgtctgagacaaagtgtacactgaagagctttaccgtggagaagggcatctatcagacaagcaatttcagggtgcagcctaccgagtccatcgtgcgctttcccaatatcacaaacaaatgcccttttggcgaggtgttcaacgccaccagattcgccagcgtgtacgcctggaatcggaagagaatctccaactgcgtggccgactattctgtgctgtacaactccgcctctttcagcacctttaagtgctatggcgtgtctcccacaaagctgaatgatctgtgctttaccaacgtgtacgccgatagcttcgtgatcaggggagacgaagtgagacagatcgcaccaggacagacaggaaagatcgcagactacaattataagctgcctgacgatttcaccggctgcgtgatcgcctggaactccaacaatctggattctaaagtgggcggcaactacaattatctgtacaggctgtttcgcaagtccaatctgaagccattcgagcgggacatctccacagagatctaccaggccggctctaccccctgcaatggcgtggagggctttaactgttatttccctctgcagtcttacggcttccagccaacaaacggcccgggccaacagccctacagagtggtggtgctgtcctttgagctgctgcacgcaccagcaacagtgtgcggcccaaagaagtctaccaatctggtgaagaacaagtgcgtgaacttcaacttcaacggactgaccggcacaggcgtgctgaccgagagcaataagaagttcctgccttttcagcagttcggcagggacatcgcagataccacagacgccgtgcgcgaccctcagaccctggagatcctggacatcacaccatgcagcttcggcggcgtgtccgtgatcacaccaggcaccaatacatccaaccaggtggccgtgctgtatcaggacgtgaattgtaccgaggtgcccgacgcaatccacgcagatcagctgacccctacatggcgggtgtactctaccggcagcaacgtgttccagacaagagccggatgcctgatcggagcagagcacgtgaacaatagctatgagtgcgacatccctatcggcgccggcatctgtgccagctaccagacccagacaaactccccatctggagcaggctcccaccatcaccatcaccatcaccatcaccactga

SEQ ID NO: 4166 - DNA, 2148 bp, Artificial Sequence
  Description of Artificial Sequence: Synthetic polynucleotide
atgggcatcctgccaagcccaggaatgcccgccctgctgtctctggtgagcctgctgtccgtgctgctgatgggatgcgtggcagagacaggcacacagtgcgtgaacctgaccacaaggacccagctgccccctgcctataccaattctttcacacggggcgtgtactatcccgacaaggtgtttagaagctccgtgctgcactccacacaggatctgtttctgcctttcttttctaacgtgacctggttccacgccatccacgtgtccggcaccaatggcacaaagcggttcgacaatcccgtgctgccttttaacgatggcgtgtacttcgccagcaccgagaagtccaacatcatcagaggctggatctttggcaccacactggactctaagacacagagcctgctgatcgtgaacaatgccaccaacgtggtgatcaaggtgtgcgagttccagttttgtaatgatccattcctgggcgtgtactatcacaagaacaataagtcctggatggagtctgagtttcgcgtgtattctagcgccaacaattgcacatttgagtacgtgagccagcccttcctgatggacctggagggcaagcagggcaatttcaagaacctgagggagttcgtgtttaagaatatcgatggctacttcaagatctacagcaagcacaccccaatcaacctggtgcgcgacctgccacagggattctccgccctggagccactggtggatctgcccatcggcatcaacatcacccggtttcagacactgctggccctgcacagatcctacctgacaccaggcgactcctctagcggatggaccgcaggagctgccgcctactatgtgggctatctgcagccccggaccttcctgctgaagtacaacgagaatggcaccatcacagacgcagtggattgcgccctggaccccctgtctgagacaaagtgtacactgaagagctttaccgtggagaagggcatctatcagacaagcaatttcagggtgcagcctaccgagtccatcgtgcgctttcccaatatcacaaacctgtgccctctcggcgaggtgttcaacgccaccagattcgccagctcatacgcctggaatcggaagagaatctccaactgcgtggccgactattctgtgctgtacaactccgcctctttcagcacctttaagtgctatggcgtgtctcccacaaagctgaatgatctgtgctttaccaacgtgtacgccgatcgattcgtgatcaggggagacgaagtgagacagatcgcaccaggacagacaggaaagatcgcagactacaattataagctgcctgacgatttcaccggctgcgtgatcgcctggaactccaacaatctggatgctaaagtgggcggcaactacaattatctgtacaggctgtttcgcaagtccaatctgaagccattcgagcggttcatctccacagagatctaccaggccggctctacccccactaatggcgtggagggctttaactgttatttccctctgcagtcttacggcttccagccaacaaacggcgtgacgtatcagccctacagagtggtggtgctgtcctttgagctgctgcacgcaccacatacagtgtgcggcccaaagaagtctaccaatctggtgaagaacaagtgcgtgaacttcaacttcaacggactgaccggcacaggcgtgctgaccgagagcaataagaagttcctgccttttcagcagttcggcagggacatcgcagataccacagacgccgtgcgcgaccctcagaccctggagatcctggacatcacaccatgcagcttcggcggcgtgtccgtgatcacaccaggcaccaatacatccaaccaggtggccgtgctgtatcaggacgtgaattgtaccgaggtgcccgtggcaatccacgcagatcagctgacccctacatggcgggtgtactctaccggcagcaacgtgttccagacaagagccggatgcctgatcggagcagagcacgtgaacaatagctatgagtgcgacatccctatcggcgccggcatctgtgccagctaccagacccagacaaactccccatctggagcaggctcccaccatcaccatcaccatcaccatcaccactga

SEQ ID NO: 4167 - DNA, 2148 bp, Artificial Sequence
  Description of Artificial Sequence: Synthetic polynucleotide
atgggcatcctgccaagcccaggaatgcccgccctgctgtctctggtgagcctgctgtccgtgctgctgatgggatgcgtggcagagacaggcacacagtgcgtgaacctgaccacaaggacccagctgccccctgcctataccaattctttcacacggggcgtgtactatcccgacaaggtgtttagaagctccgtgctgcactccacacaggatctgtttctgcctttcttttctaacgtgacctggttccacgccgaacacgtgtccggcaccaatggcacaaagcggttcgacaatcccgtgctgccttttaacgatggcgtgtacttcgccagcaccgagaagtccaacatcatcagaggctggatctttggcaccacactggactctaagacacagagcctgctgatcgtgaacaatgccaccaacgtggtgatcaaggtgtgcgagttccagttttgtaatgatccattcctgggcgtgtactatcacaagaacaataagtcctggatggagtctgagtttcgcgtgtattctagcgccaacaattgcacatttgagtaccatagccagcccttcctgatggacctggagggcaagcagggcaatttcaagaacctgagggagttcgtgtttaagaatatcgatggctacttcaagatctacagcaagcacaccccaatcaacctggtgcgcgacctgccacagggattctccgccctggagccactggtggatctgcccatcggcatcaacatcacccggtttcagacactgctggccctgcacagatcctacctgacaccaggcgactcctctagcggagaaaccgcaggagctgccgcctactatgtgggctatctgcagccccggaccttcctgctgaagtacaacgagaatggcaccatcacagacgcagtggattgcgccctggaccccctgtctgagacaaagtgtacactgaagagctttaccgtggagaagggcatctatcagacaagcaatttcagggtgcagcctaccgagtccatcgtgcgctttcccaatatcacaaacccttgcccttttggcgaggtgttcaacgccaccagattcgccagcgtgtacgcctggaatcggaagagaatctccaactgcgtggccgactattctgtgctgtacaactccgcctctttcagcacctttaagtgctatggcgtgtctcccacaaagctgaatgatctgtgctttaccaacgtgtacgccgatagcttcgtgatcaggggagacgaagtgagacagatcgcaccaggacagacaggaaagatcgcagactacaattataagctgcctgacgatttcaccggctgcgtgatcgcctggaactccaacaatctggattctaaagtgggcggcaactacaattatctgtacaggctgtttcgcaagtccaatctgaagccattcgagcgggacatctccacagagatctaccaggccggctctaccccctgcaatggcgtggagggctttaactgttatttccctctgcagtcttacggcttccagccaacaaacggcccgggccaacagccctacagagtggtggtgctgtcctttgagctgctgcacgcaccagcaacagtgtgcggcccaaagaagtctaccaatctggtgaagaacaagtgcgtgaacttcaacttcaacggactgaccggcacaggcgtgctgaccgagagcaataagaagttcctgccttttcagcagttcggcagggacatcgcagataccacagacgccgtgcgcgaccctcagaccctggagatcctggacatcacaccatgcagcttcggcggcgtgtccgtgatcacaccaggcaccaatacatccaaccaggtggccgtgctgtatcaggacgtgaattgtaccgaggtgcccgtggcaatccacgcagatcagctgacccctacatggcgggtgtactctaccggcagcaacgtgttccagacaagagccggatgcctgatcggagcagagcacgtgaacaatagctatgagtgcgacatccctatcggcgccggcatctgtgccagctaccagacccagacaaactccccatctggagcaggctcccaccatcaccatcaccatcaccatcaccactga

SEQ ID NO: 4168 - DNA, 2148 bp, Artificial Sequence
  Description of Artificial Sequence: Synthetic polynucleotide
atgggcatcctgccaagcccaggaatgcccgccctgctgtctctggtgagcctgctgtccgtgctgctgatgggatgcgtggcagagacaggcacacagtgcgtgaacctgaccacaaggacccagctgccccctgcctataccaattctttcacacggggcgtgtactatcccgacaaggtgtttagaagctccgtgctgcactccacacaggatctgtttctgcctttcttttctaacgtgacctggttccacgccatccacgtgtccggcaccaatggcacaaagcggttcgacaatcccgtgctgccttttaacgatggcgtgtacttcgccagcaccgagaagtccaacatcatcagaggctggatctttggcaccacactggactctaagacacagagcctgctgatcgtgaacaatgccaccaacgtggtgatcaaggtgtgcgagttccagttttgtaatgatccattcctgggcgtgtactatcacaagaacaataagtcctggatggagtctgagtttcgcgtgtattctagcgccaacaattgcacatttgagtacgtgagccagcccttcctgatggacctggagggcaagcagggcaatttcaagaacctgagggagttcgtgtttaagaatatcgatggctacttcaagatctacagcaagcacaccccaatcaacctggtgcgcgacctgccacagggattctccgccctggagccactggtggatctgcccatcggcatcaacatcacccggtttcagacactgctggccctgcacagatcctacctgacaccaggcgactcctctagcggatggaccgcaggagctgccgcctactatgtgggctatctgcagccccggaccttcctgctgaagtacaacgagaatggcaccatcacagacgcagtggattgcgccctggaccccctgtctgagacaaagtgtacactgaagagctttaccgtggagaagggcatctatcagacaagcaatttcagggtgcagcctaccgagtccatcgtgcgctttcccaatatcacaaacctgtgcccttttggcgaggtgttcaacgccaccagattcgccagcgtgtacgcctggaatcggaagagaatctccaactgcgtggccgactattctgtgctgtacaactccgcctctttcagcacctttaagtgctatggcgtgtctcccacaaagctgaatgatctgtgctttaccaacgtgtacgccgatagcttcgtgatcaggggagacgaagtgagacagatcgcaccaggacagacaggaaagatcgcagactacaattataagctgcctgacgatttcaccggctgcgtgatcgcctggaactccaacaatctggattctaaagtgggcggcaactacaattatctgtacaggctgtttcgcaagtcccatctgaagccattcgagcgggacatctccacagagatctaccaggccggctctaccccctgcaatggcgtggagggctttaactgttatttccctctgcagtcttacggcttccagccaacaaacggcgtgggctatcagccctacagagtggtggtgctgtcctttgagctgctgcacgcaccagcaacagtgtgcggcccaaagaagtctaccaatctggtgaagaacaagtgcgtgaacttcaacttcaacggactgaccggcacaggcgtgctgaccgagagcaataagaagttcctgccttttcagcagttcggcagggacatcgcagataccacagacgccgtgcgcgaccctcagaccctggagatcctggacatcacaccatgcagcttcggcggcgtgtccgtgatcacaccaggcaccaatacatccaaccaggtggccgtgctgtatcaggacgtgaattgtaccgaggtgcccgtggcaatccacgcagatcagctgacccctacatggcgggtgtactctaccggcagcaacgtgttccagacaagagccggatgcctgatcggagcagagcacgtgaacaatagctatgagtgcgacatccctatcggcgccggcatctgtgccagctaccagacccagacaaactccccatctggagcaggctcccaccatcaccatcaccatcaccatcaccactga

SEQ ID NO: 4169 - DNA, 2148 bp, Artificial Sequence
  Description of Artificial Sequence: Synthetic polynucleotide
atgggcatcctgccaagcccaggaatgcccgccctgctgtctctggtgagcctgctgtccgtgctgctgatgggatgcgtggcagagacaggcacacagtgcgtgaacctgaccacaaggacccagctgccccctgcctataccaattctttcacacggggcgtgtactatcccgacaaggtgtttagaagctccgtgctgcactccacacaggatctgtttctgcctttcttttctaacgtgacctggttccacgccatccacgtgtccggcaccaatggcacaaagcggttcgacaatcccgtgctgccttttaacgatggcgtgtacttcgccagcaccgagaagtccaacatcatcagaggctggatctttggcaccacactggactctaagacacagagcctgctgatcgtgaacaatgccaccaacgtggtgatcaaggtgtgcgagttccagttttgtaatgatccattcctgggcgtgtactatcacaagaacaataagtcctggatggagtctgagtttcgcgtgtattctagcgccaacaattgcacatttgagtacgtgagccagcccttcctgatggacctggagggcaagcagggcaatttcaagaacctgagggagttcgtgtttaagaatatcgatggctacttcaagatctacagcaagcacaccccaatcaacctggtgcgcgacctgccacagggattctccgccctggagccactggtggatctgcccatcggcatcaacatcacccggtttcagacactgctggccctgcacagatcctacctgacaccaggcgactcctctagcggatggaccgcaggagctgccgcctactatgtgggctatctgcagccccggaccttcctgctgaagtacaacgagaatggcaccatcacagacgcagtggattgcgccctggaccccctgtctgagacaaagtgtacactgaagagctttaccgtggagaagggcatctatcagacaagcaatttcagggtgcagcctaccgagtccatcgtgcgctttcccaatatcacaaacctgtgcccttttggcgaggtgttcaacgccaccagattcgccagcgtgtacgcctggaatcggaagagaatctccaactgcgtggccgactattctgtgctgtacaactccgcctctttcagcacctttaagtgctatggcgtgtctcccacaaagctgaatgatctgtgctttaccaacgtgtacgccgatagcttcgtgatcaggggagacgaagtgagacagatcgcaccaggacagacaggaaagatcgcagactacaattataagctgcctgacgatttcaccggctgcgtgatcgcctggaactccaacaatctggattctaaagtgggcggcaactacaattatctgtacaggctgtttcgcaagtccaatctgaagccattcgagcgggacatctccacagagatctaccaggccggctctaccccctgcaatcaagtggagggctttaactgttatttccctctgcagtcttacggcttccagccaacaaacggcgtgggctatcagccctacagagtggtggtgctgtcctttgagctgctgcacgcaccagcaacagtgtgcggcccaaagaagtctaccaatctggtgaagaacaagtgcgtgaacttcaacttcaacggactgaccggcacaggcgtgctgaccgagagcaataagaagttcctgccttttcagcagttcggcagggacatcgcagataccacagacgccgtgcgcgaccctcagaccctggagatcctggacatcacaccatgcagcttcggcggcgtgtccgtgatcacaccaggcaccaatacatccaaccaggtggccgtgctgtatcaggacgtgaattgtaccgaggtgcccgtggcaatccacgcagatcagctgacccctacatggcgggtgtactctaccggcagcaacgtgttccagacaagagccggatgcctgatcggagcagagcacgtgaacaatagctatgagtgcgacatccctatcggcgccggcatctgtgccagctaccagacccagacaaactccccatctggagcaggctcccaccatcaccatcaccatcaccatcaccactga

SEQ ID NO: 4170 - DNA, 2148 bp, Artificial Sequence
  Description of Artificial Sequence: Synthetic polynucleotide
atgggcatcctgccaagcccaggaatgcccgccctgctgtctctggtgagcctgctgtccgtgctgctgatgggatgcgtggcagagacaggcacacagtgcgtgaacctgaccacaaggacccagctgccccctgcctataccaattctttcacacggggcgtgtactatcccgacaaggtgtttagaagctccgtgctgcactccacacaggatctgtttctgcctttcttttctaacgtgacctggttccacgccatccacgtgtccggcaccaatggcacaaagcggttcgacaatcccgtgctgccttttaacgatggcgtgtacttcgccagcaccgagaagtccaacatcatcagaggctggatctttggcaccacactggactctaagacacagagcctgctgatcgtgaacaatgccaccaacgtggtgatcaaggtgtgcgagttccagttttgtaatgatccattcctgggcgtgtactatcacaagaacaataagtcctggatggagtctgagtttcgcgtgtattctagcgccaacaattgcacatttgagtacgtgagccagcccttcctgatggacctggagggcaagcagggcaatttcaagaacctgagggagttcgtgtttaagaatatcgatggctacttcaagatctacagcaagcacaccccaatcaacctggtgcgcgacctgccacagggattctccgccctggagccactggtggatctgcccatcggcatcaacatcacccggtttcagacactgctggccctgcacagatcctacctgacaccaggcgactcctctagcggatggaccgcaggagctgccgcctactatgtgggctatctgcagccccggaccttcctgctgaagtacaacgagaatggcaccatcacagacgcagtggattgcgccctggaccccctgtctgagacaaagtgtacactgaagagctttaccgtggagaagggcatctatcagacaagcaatttcagggtgcagcctaccgagtccatcgtgcgctttcccaatatcacaaacctgtgcccttttggcgaggtgttcaacgccaccagattcgccagcgtgtacgcctggaatcggaagagaatctccaactgcgtggccgactattctgtgctgtacaactccgcctctttcagcacctttaagtgctatggcgtgtctcccacaaagctgaatgatctgtgctttaccaacgtgtacgccgatagcttcgtgatcaggggagacgaagtgagacagatcgcaccaggacagacaggaaagatcgcagactacaattataagctgcctgacgatttcaccggctgcgtgatcgcctggaactccaacaatctggattctaaagtgggcggcaactacaattatctgtacaggctgtttcgcaagtccaatctgaagccattcgagcgggacatctccacagagatctaccaggccggctctaccccctgcaatggcgtggagggctttaactgttatttccctctgcagtcttacggcttccagccaacaaacggcgtgggctatcagccctacagagtggtggtgctgtcctttgagaacctgcacgcaccagcaacagtgtgcggcccaaagaagtctaccaatctggtgaagaacaagtgcgtgaacttcaacttcaacggactgaccggcacaggcgtgctgaccgagagcaataagaagttcctgccttttcagcagttcggcagggacatcgcagataccacagacgccgtgcgcgaccctcagaccctggagatcctggacatcacaccatgcagcttcggcggcgtgtccgtgatcacaccaggcaccaatacatccaaccaggtggccgtgctgtatcaggacgtgaattgtaccgaggtgcccgtggcaatccacgcagatcagctgacccctacatggcgggtgtactctaccggcagcaacgtgttccagacaagagccggatgcctgatcggagcagagcacgtgaacaatagctatgagtgcgacatccctatcggcgccggcatctgtgccagctaccagacccagacaaactccccatctggagcaggctcccaccatcaccatcaccatcaccatcaccactga

SEQ ID NO: 4171 - DNA, 2148 bp, Artificial Sequence
  Description of Artificial Sequence: Synthetic polynucleotide
atgggcatcctgccaagcccaggaatgcccgccctgctgtctctggtgagcctgctgtccgtgctgctgatgggatgcgtggcagagacaggcacacagtgcgtgaacctgaccacaaggacccagctgccccctgcctataccaattctttcacacggggcgtgtactatcccgacaaggtgtttagaagctccgtgctgcactccacacaggatctgtttctgcctttcttttctaacgtgacctggttccacgccatccacgtgtccggcaccaatggcacaaagcggttcgacaatcccgtgctgccttttaacgatggcgtgtacttcgccagcaccgagaagtccaacatcatcagaggctggatctttggcaccacactggactctaagacacagagcctgctgatcgtgaacaatgccaccaacgtggtgatcaaggtgtgcgagttccagttttgtaatgatccattcctgggcgtgtactatcacaagaacaataagtcctggatggagtctgagtttcgcgtgtattctagcgccaacaattgcacatttgagtacgtgagccagcccttcctgatggacctggagggcaagcagggcaatttcaagaacctgagggagttcgtgtttaagaatatcgatggctacttcaagatctacagcaagcacaccccaatcaacctggtgcgcgacctgccacagggattctccgccctggagccactggtggatctgcccatcggcatcaacatcacccggtttcagacactgctggccctgcacagatcctacctgacaccaggcgactcctctagcggatggaccgcaggagctgccgcctactatgtgggctatctgcagccccggaccttcctgctgaagtacaacgagaatggcaccatcacagacgcagtggattgcgccctggaccccctgtctgagacaaagtgtacactgaagagctttaccgtggagaagggcatctatcagacaagcaatttcagggtgcagcctaccgagtccatcgtgcgctttcccaatatcacaaacctgtgcccttttggcgaggtgttcaacgccaccagattcgccagcgtgtacgcctggaatcggaagagaatctccaactgcgtggccgactattctgtgctgtacaactccgcctctttcagcacctttaagtgctatggcgtgtctcccacaaagctgaatgatctgtgctttaccaacgtgtacgccgatagcttcgtgatcaggggagacgaagtgagacagatcgcaccaggacagacaggaaagatcgcagactacaattataagctgcctgacgatttcaccggctgcgtgatcgcctggaactccaacaatctggatgcgaaagtgggcggcaactacaattatctgtacaggctgtttcgcaagtccaatctgaagccattcgagcgggacatctccacagagatctaccaggccggctctaccccctgcaatggcgtggagggctttaactgttatttccctctgcagtcttacggcttccagccaacaaacggcgtgggctatcagccctacagagtggtggtgctgtcctttgagctgctgcacgcaccagcaacagtgtgcggcccaaagaagtctaccaatctggtgaagaacaagtgcgtgaacttcaacttcaacggactgaccggcacaggcgtgctgaccgagagcaataagaagttcctgccttttcagcagttcggcagggacatcgcagataccacagacgccgtgcgcgaccctcagaccctggagatcctggacatcacaccatgcagcttcggcggcgtgtccgtgatcacaccaggcaccaatacatccaaccaggtggccgtgctgtatcaggacgtgaattgtaccgaggtgcccgtggcaatccacgcagatcagctgacccctacatggcgggtgtactctaccggcagcaacgtgttccagacaagagccggatgcctgatcggagcagagcacgtgaacaatagctatgagtgcgacatccctatcggcgccggcatctgtgccagctaccagacccagacaaactccccatctggagcaggctcccaccatcaccatcaccatcaccatcaccactga

SEQ ID NO: 4172 - DNA, 2148 bp, Artificial Sequence
  Description of Artificial Sequence: Synthetic polynucleotide
atgggcatcctgccaagcccaggaatgcccgccctgctgtctctggtgagcctgctgtccgtgctgctgatgggatgcgtggcagagacaggcacacagtgcgtgaacctgaccacaaggacccagctgccccctgcctataccaattctttcacacggggcatttactatcccgacaaggtgtttagaagctccgtgctgcactccacacaggatctgtttctgcctttcttttctaacgtgacctggttccacgccatccacggttccggcaccaatggcacaaagcggttcgacaatcccgtgctgccttttaacgatggcgtgtactcggccgcgatcgagaagtccaacatcatcagaggctggatctttggcaccacactggactctaagacacagagcctgctgatcgtgaacaatgccaccaacgtggtgatcaaggtgtgcgagttccagttttgtaatgatccacatctgggcgtgtactatcacaagaacaataagtcctggatggagtctgagtttcgcgtgtattctagcgccaacaattgcacatttgagtacgtgagccagcccttcctgatggacctggagggcaagcagggcaatttcaagcttctgagggagttcgtgtttaagaatatcgatggctacttcaagatctacagcaagcacaccccaatcaacctggtgcgcgacctgccacagggattctccccgctggagccactggtggatctgcccatcggcatcaacatcacccggtttctcacagtcctggccctgcacagatcctacctgacaccaggcgactcctctagcggatggaccgcaggagctgccgcctactatgtgggctatctgcagccccggaccttcctgctgaagtacaacgagaatggcaccatcacagacgcagtggattgcgccctggaccccctgtctgagacaaagtgtacactgaagagctttaccgtggagaagggcatctatcagacaagcaatttcagggtgcagcctaccgagtccatcgtgcgctttcccaatatcacaaacctgtgcccttttggcgaggtgttcaacgccaccagattcgccagcgtgtacgcctggaatcggaagagaatctccaactgcgtggccgactattctgtgctgtacaactccgcctctttcagcacctttaagtgctatggcgtgtctcccacaaagctgaatgatctgtgctttaccaacgtgtacgccgatagcttcgtgatcaggggagacgaagtgagacagatcgcaccaggacagacaggaaagatcgcagactacaattataagctgcctgacgatttcaccggctgcgtgatcgcctggaactccaacaatctggattctaaagtgggcggcaactacaattatctgtacaggctgtttcgcaagtccaatctgaagccattcgagcgggacatctccacagagatctaccaggccggctctaccccctgcaatggcgtggagggctttaactgttatttccctctgcagtcttacggcttccagccaacaaacggcgtgggctatcagccctacagagtggtggtgctgtcctttgagctgctgcacgcaccagcaacagtgtgcggcccaaagaagtctaccaatctggtgaagaacaagtgcgtgaacttcaacttcaacggactgaccggcacaggcgtgctgaccgagagcaataagaagttcctgccttttcagcagttcggcagggacatcgcagataccacagacgccgtgcgcgaccctcagaccctggagatcctggacatcacaccatgcagcttcggcggcgtgtccgtgatcacaccaggcaccaatacatccaaccaggtggccgtgctgtatcaggacgtgaattgtaccgaggtgcccgtggcaatccacgcagatcagctgacccctacatggcgggtgtactctaccggcagcaacgtgttccagacaagagccggatgcctgatcggagcagagcacgtgaacaatagctatgagtgcgacatccctatcggcgccggcatctgtgccagctaccagacccagacaaactccccatctggagcaggctcccaccatcaccatcaccatcaccatcaccactga

SEQ ID NO: 4173 - DNA, 2148 bp, Artificial Sequence
  Description of Artificial Sequence: Synthetic polynucleotide
atgggcatcctgccaagcccaggaatgcccgccctgctgtctctggtgagcctgctgtccgtgctgctgatgggatgcgtggcagagacaggcacacagtgcgtgaacctgaccacaaggacccagctgccccctgcctataccaattctttcacacggggcgtgtactatcccgacaaggtgtttagaagctccgtgctgcactccacacaggatctgtttctgcctttcttttctaacgtgacctggttccacgccatccacgtgtccggcaccaatggcacaaagcggttcgacaatcccgtgctgccttttaacgatggcgtgtacttcgccagcaccgagaagtccaacatcatcagaggctggatctttggcaccacactggactctaagacacagagcctgctgatcgtgaacaatgccaccaacgtggtgatcaaggtgtgcgagttccagttttgtaatgatccattcctgggcgtgtactatcacaagaacaataagtcctggatggagtctgagtttcgcgtgtattctagcgccaacaattgcacatttgagtacgtgagccagcccttcctgatggacctggagggcaagcagggcaatttcaagaacctgagggagttcgtgtttaagaatatcgatggctacttcaagatctacagcaagcacaccccaatcaacctggtgcgcgacctgccacagggattctccgccctggagccactggtggatctgcccatcggcatcaacatcacccggtttcagacactgctggccctgcacagatcctacctgacaccaggcgactcctctagcggatggaccgcaggagctgccgcctactatgtgggctatctgcagccccggaccttcctgctgaagtacaacgagaatggcaccatcacagacgcagtggattgcgccctggaccccctgtctgagacaaagtgtacactgaagagctttaccgtggagaagggcatctatcagacaagcaatttcagggtgcagcctaccgagtccatcgtgcgctttcccaatatcacaaacctgtgcccttttggcgaggtgttcaacgccaccagattcgccagcgtgtacgcctggaatcggaagagaatctccaactgcgtggccgactattctgtgctgtacaactccgcctctttcagcacctttaagtgctatggcgtgtctcccacaaagctgaatgatctgtgctttaccaacgtgtacgccgatagcttcgtgatcaggggagacgaagtgagacagatcgcaccaggacagacaggaaagatcgcagactacaattataagctgcctgacgatttcaccggctgcgtgatcgcctggaactccaacaatctggattctaaagtgggcggcaactacaattatctgtacaggctgtttcgcaagtccaatctgaagccattcgagcgggacatctccacagagatctaccaggccggctctacccccgcaaatggcgtggagggctttaactgttatttccctctgcagtcttacggcttccagccaacaaacggcgtgggctatcagccctacagagtggtggtgctgtcctttgagctgctgcacgcaccagcaacagtgtgcggcccaaagaagtctaccaatctggtgaagaacaagtgcgtgaacttcaacttcaacggactgaccggcacaggcgtgctgaccgagagcaataagaagttcctgccttttcagcagttcggcagggacatcgcagataccacagacgccgtgcgcgaccctcagaccctggagatcctggacatcacaccatgcagcttcggcggcgtgtccgtgatcacaccaggcaccaatacatccaaccaggtggccgtgctgtatcaggacgtgaattgtaccgaggtgcccgtggcaatccacgcagatcagctgacccctacatggcgggtgtactctaccggcagcaacgtgttccagacaagagccggatgcctgatcggagcagagcacgtgaacaatagctatgagtgcgacatccctatcggcgccggcatctgtgccagctaccagacccagacaaactccccatctggagcaggctcccaccatcaccatcaccatcaccatcaccactga

SEQ ID NO: 4174 - DNA, 2148 bp, Artificial Sequence
  Description of Artificial Sequence: Synthetic polynucleotide
atgggcatcctgccaagcccaggaatgcccgccctgctgtctctggtgagcctgctgtccgtgctgctgatgggatgcgtggcagagacaggcacacagtgcgtgaacctgaccacaaggacccagctgccccctgcctataccaattctttcacacggggcgtgtactatcccgacaaggtgtttagaagctccgtgctgcactccacacaggatctgtttctgcctttcttttctaacgtgacctggttccacgccatccacgtgtccggcaccaatggcacaaagcggttcgacaatcccgtgctgccttttaacgatggcgtgtacttcgccagcaccgagaagtccaacatcatcagaggctggatctttggcaccacactggactctaagacacagagcctgctgatcgtgaacaatgccaccaacgtggtgatcaaggtgtgcgagttccagtttgttaatgatccattcctgggcgtgtactatcacaagaacaataagtcctggatggagtctgagtttcgcgtgtattctagcgccaacaattgcacatttgagtacgtgagccagcccttcctgatggacctggagggcaagcagggcaatttcaagaacctgagggagttcgtgtttaagaatatcgatggctacttcaagatctacagcaagcacaccccaatcaacctggtgcgcgacctgccacagggattctccgccctggagccactggtggatctgcccatcggcatcaacatcacccggtttcagacactgctggccctgcacagatcctacctgacaccaggcgactcctctagcggatggaccgcaggagctgccgcctactatgtgggctatctgcagccccggaccttcctgctgaagtacaacgagaatggcaccatcacagacgcagtggattgcgccctggaccccctgtctgagacaaagtgtacactgaagagctttaccgtggagaagggcatctatcagacaagcaatttcagggtgcagcctaccgagtccatcgtgcgctttcccaatatcacaaacctgtgcccttttggcgaggtgttcaacgccaccagattcgccagcgtgtacgcctggaatcggaagagaatctccaactgcgtggccgactattctgtgctgtacaactccgcctctttcagcacctttaagtgctatggcgtgtctcccacaaagctgaatgatctgtgctttaccaacgtgtacgccgatagcttcgtgatcaggggagacgaagtgagacagatcgcaccaggacagacaggaaagatcgcagactacaattataagctgcctgacgatttcaccggctgcgtgatcgcctggaactccaacaatctggattctaaagtgggcggcaactacaattatctgtacaggctgtttcgcaagtccaatctgaagccattcgagcgggacatctccacagagatctaccaggccggctctaccccctgcaatggcgtggagggctttaactgttatttccctctgcagtcttacggcttccagccaacaaacggcgtgggctatcagccctacagagtggtggtgctgtcctttgagctgctgcacgcaccagcaacagtgtgcggcccaaagaagtctaccaatctggtgaagaacaagtgcgtgaacttcaacttcaacggactgaccggcacaggcgtgctgaccgagagcaataagaagttcctgccttttcagcagttcggcagggacatcgcagataccacagacgccgtgcgcgaccctcagaccctggagatcctggacatcacaccatgcagcttcggcggcgtgtccgtgatcacaccaggcaccaatacatccaaccaggtggccgtgctgtatcaggacgtgaattgtaccgaggtgcccgtggcaatccacgcagatcagctgacccctacatggcgggtgtactctaccggcagcaacgtgttccagacaagagccggatgcctgatcggagcagagcacgtgaacaatagctatgagtgcgacatccctatcggcgccggcatctgtgccagctaccagacccagacaaactccccatctggagcaggctcccaccatcaccatcaccatcaccatcaccactga

SEQ ID NO: 4175 - DNA, 2148 bp, Artificial Sequence
  Description of Artificial Sequence: Synthetic polynucleotide
atgggcatcctgccaagcccaggaatgcccgccctgctgtctctggtgagcctgctgtccgtgctgctgatgggatgcgtggcagagacaggcacacagtgcgtgaacctgaccacaaggacccagctgccccctgcctataccaattctttcacacggggcgtgtactatcccgacaaggtgtttagaagctccgtgctgcactccacacaggatctgtttctgcctttcttttctaacgtgacctggttccacgccatccacgtgtccggcaccaatggcacaaagcggttcgacaatcccgtgctgccttttaacgatggcgtgtacttcgccagcaccgagaagtccaacatcatcagaggctggatctttggcaccacactggactctaagacacagagcctgctgatcgtgaacaatgccaccaacgtggtgatcaaggtgtgcgagttccagttttgtaatgatccattcctgggcgtgtactatcacaagaacaataagtcctggatggagtctgagtttcgcgtgtattctagcgccaacaattgcacatttgagtacgtgagccagcccttcctgatggacctggagggcaagcagggcaatttcaagaacctgagggagttcgtgtttaagaatatcgatggctacttcaagatctacagcaagcacaccccaatcaacctggtgcgcgacctgccacagggattctccgccctggagccactggtggatctgcccatcggcatcaacatcacccggtttcagacactgctggccctgcacagatcctacctgacaccaggcgactcctctagcggatggaccgcaggagctgccgcctactatgtgggctatctgcagccccggaccttcctgctgaagtacaacgagaatggcaccatcacagacgcagtggattgcgccctggaccccctgtctgagacaaagtgtacactgaagagctttaccgtggagaagggcatctatcagacaagcaatttcagggtgcagcctaccgagtccatcgtgcgctttcccaatatcacaaacctgtgcccttttggcgaggtgttcaacgccaccagattcgccagcgtgtacgcctggaatcggaagagaatctccaactgcgtggccgactattctgtgctgtacaactccgcctctttcagcacctttaagtgctatggcgtgtctcccacaaagctgaatgatctgtgctttaccaacgtgtacgccgatagcttcgtgatcaggggagacgaagtgagacagatcgcaccaggacagacaggaaagatcgcagactacaattataagctgcctgacgatttcaccggctgcgtgatcgcctggaactccaacaatctggattctaaagtgggcggcaactacaattatctgtacaggctgtttcgcaagtccaatctgaagccagtagagcgggacatctccacagagatctaccaggccggctctaccccctgcaatggcgtggagggctttaactgttatttccctctgcagtcttacggcttccagccaacaaacggcgtgggctatcagccctacagagtggtggtgctgtcctttgagctgctgcacgcaccagcaacagtgtgcggcccaaagaagtctaccaatctggtgaagaacaagtgcgtgaacttcaacttcaacggactgaccggcacaggcgtgctgaccgagagcaataagaagttcctgccttttcagcagttcggcagggacatcgcagataccacagacgccgtgcgcgaccctcagaccctggagatcctggacatcacaccatgcagcttcggcggcgtgtccgtgatcacaccaggcaccaatacatccaaccaggtggccgtgctgtatcaggacgtgaattgtaccgaggtgcccgtggcaatccacgcagatcagctgacccctacatggcgggtgtactctaccggcagcaacgtgttccagacaagagccggatgcctgatcggagcagagcacgtgaacaatagctatgagtgcgacatccctatcggcgccggcatctgtgccagctaccagacccagacaaactccccatctggagcaggctcccaccatcaccatcaccatcaccatcaccactga

SEQ ID NO: 4176 - DNA, 2148 bp, Artificial Sequence
  Description of Artificial Sequence: Synthetic polynucleotide
atgggcatcctgccaagcccaggaatgcccgccctgctgtctctggtgagcctgctgtccgtgctgctgatgggatgcgtggcagagacaggcacacagtgcgtgaacctgaccacaaggacccagctgccccctgcctataccaattctttcacacggggcgtgtactatcccgacaaggtgtttagaagctccgtgctgcactccacacaggatctgtttctgcctttcttttctaacgtgacctggttccacgccgagcacgtgtccggcaccaatggcacaaagcggttcgacaatcccgtgctgccttttaacgatggcgtgtacttcgccagcaccgagaagtccaacatcatcagaggctggatctttggcaccacactggactctaagacacagagcctgctgatcgtgaacaatgccaccaacgtggtgatcaaggtgtgcgagttccagttttgtaatgatccattcctgggcgtgtactatcacaagaacaataagtcctggatggagtctgagtttcgcgtgtattctagcgccaacaattgcacatttgagtaccatagccagcccttcctgatggacctggagggcaagcagggcaatttcaagaacctgagggagttcgtgtttaagaatatcgatggctacttcaagatctacagcaagcacaccccaatcaacctggtgcgcgacctgccacagggattctccgccctggagccactggtggatctgcccatcggcatcaacatcacccggtttcagacactgctggccctgcacagatcctacctgacaccaggcgactcctctagcggatggaccgcaggagctgccgcctactatgtgggctatctgcagccccggaccttcctgctgaagtacaacgagaatggcaccatcacagacgcagtggattgcgccctggaccccctgtctgagacaaagtgtacactgaagagctttaccgtggagaagggcatctatcagacaagcaatttcagggtgcagcctaccgagtccatcgtgcgctttcccaatatcacaaacaaatgcccttttggcgaggtgttcaacgccaccagattcgccagcgtgtacgcctggaatcggaagagaatctccaactgcgtggccgactattctgtgctgtacaactccgcctctttcagcacctttaagtgctatggcgtgtctcccacaaagctgaatgatctgtgctttaccaacgtgtacgccgatagcttcgtgatcaggggagacgaagtgagacagatcgcaccaggacagacaggaaagatcgcagactacaattataagctgcctgacgatttcaccggctgcgtgatcgcctggaactccaacaatctggattctaaagtgggcggcaactacaattatctgtacaggctgtttcgcaagtccaatctgaagccattcgagcgggacatctccacagagatctaccaggccggctctaccccctgcaatggcgtggagggctttaactgttatttccctctgcagtcttacggcttccagccaacaaacggcccgggccaacagccctacagagtggtggtgctgtcctttgagctgctgcacgcaccagcaacagtgtgcggcccaaagaagtctaccaatctggtgaagaacaagtgcgtgaacttcaacttcaacggactgaccggcacaggcgtgctgaccgagagcaataagaagttcctgccttttcagcagttcggcagggacatcgcagataccacagacgccgtgcgcgaccctcagaccctggagatcctggacatcacaccatgcagcttcggcggcgtgtccgtgatcacaccaggcaccaatacatccaaccaggtggccgtgctgtatcaggacgtgaattgtaccgaggtgcccgatgcaatccacgcagatcagctgacccctacatggcgggtgtactctaccggcagcaacgtgttccagacaagagccggatgcctgatcggagcagagcacgtgaacaatagctatgagtgcgacatccctatcggcgccggcatctgtgccagctaccagacccagacaaactccccatctggagcaggctcccaccatcaccatcaccatcaccatcaccactga

SEQ ID NO: 4177 - DNA, 2148 bp, Artificial Sequence
  Description of Artificial Sequence: Synthetic polynucleotide
atgggcatcctgccaagcccaggaatgcccgccctgctgtctctggtgagcctgctgtccgtgctgctgatgggatgcgtggcagagacaggcacacagtgcgtgaacctgaccacaaggacccagctgccccctgcctataccaattctttcacacggggcgtgtactatcccgacaaggtgtttagaagctccgtgctgcactccacacaggatctgtttctgcctttcttttctaacgtgacctggttccacgccatccacgtgtccggcaccaatggcacaaagcggttcgacaatcccgtgctgccttttaacgatggcgtgtacttcgccagcaccgagaagtccaacatcatcagaggctggatctttggcaccacactggactctaagacacagagcctgctgatcgtgaacaatgccaccaacgtggtgatcaaggtgtgcgagttccagttttgtaatgatccattcctgggcgtgtactatcacaagaacaataagtcctggatggagtctgagtttcgcgtgtattctagcgccaacaattgcacatttgagtacgtgagccagcccttcctgatggacctggagggcaagcagggcaatttcaagaacctgagggagttcgtgtttaagaatatcgatggctacttcaagatctacagcaagcacaccccaatcaacctggtgcgcgacctgccacagggattctccgccctggagccactggtggatctgcccatcggcatcaacatcacccggtttcagacactgctggccctgcacagatcctacctgacaccaggcgactcctctagcggatggaccgcaggagctgccgcctactatgtgggctatctgcagccccggaccttcctgctgaagtacaacgagaatggcaccatcacagacgcagtggattgcgccctggaccccctgtctgagacaaagtgtacactgaagagctttaccgtggagaagggcatctatcagacaagcaatttcagggtgcagcctaccgagtccatcgtgcgctttcccaatatcacaaacctgtgcccttttggcgaggtgttcaacgccaccagattcgccagcgtgtacgcctggaatcggaagagaatctccaactgcgtggccgactattctgtgctgtacaactccgcctctttcagcacctttaagtgctatggcgtgtctcccacaaagctgaatgatctgtgctttaccaacgtgtacgccgatagcttcgtgatcaggggagacgaagtgagacagatcgcaccaggacagacaggaacgatcgcagactacaattataagctgcctgacgatttcaccggctgcgtgatcgcctggaactccaacaatctggattctaaagtgggcggcaactacaattatctgtacaggctgtttcgcaagtccaatctgaagccattcgagcgggacatctccacagagatctaccaggccggctctaccccctgcaatggcgtggagggctttaactgttatttccctctgcagtcttacggcttccagccaacaaacggcgtgggctatcagccctacagagtggtggtgctgtcctttgagctgctgcacgcaccagcaacagtgtgcggcccaaagaagtctaccaatctggtgaagaacaagtgcgtgaacttcaacttcaacggactgaccggcacaggcgtgctgaccgagagcaataagaagttcctgccttttcagcagttcggcagggacatcgcagataccacagacgccgtgcgcgaccctcagaccctggagatcctggacatcacaccatgcagcttcggcggcgtgtccgtgatcacaccaggcaccaatacatccaaccaggtggccgtgctgtatcaggacgtgaattgtaccgaggtgcccgtggcaatccacgcagatcagctgacccctacatggcgggtgtactctaccggcagcaacgtgttccagacaagagccggatgcctgatcggagcagagcacgtgaacaatagctatgagtgcgacatccctatcggcgccggcatctgtgccagctaccagacccagacaaactccccatctggagcaggctcccaccatcaccatcaccatcaccatcaccactga

SEQ ID NO: 4178 - DNA, 2148 bp, Artificial Sequence
  Description of Artificial Sequence: Synthetic polynucleotide
atgggcatcctgccaagcccaggaatgcccgccctgctgtctctggtgagcctgctgtccgtgctgctgatgggatgcgtggcagagacaggcacacagtgcgtgaacctgaccacaaggacccagctgccccctgcctataccaattctttcacacggggcgtgtactatcccgacaaggtgtttagaagctccgtgctgcactccacacaggatctgtttctgcctttcttttctaacgtgacctggttccacgccatccacgtgtccggcaccaatggcacaaagcggttcgacaatcccgtgctgccttttaacgatggcgtgtacttcgccagcaccgagaagtccaacatcatcagaggctggatctttggcaccacactggactctaagacacagagcctgctgatcgtgaacaatgccaccaacgtggtgatcaaggtgtgcgagttccagttttgtaatgatccattcctgggcgtgtactatcacaagaacaataagtcctggatggagtctgagtttcgcgtgtattctagcgccaacaattgcacatttgagtacgtgagccagcccttcctgatggacctggagggcaagcagggcaatttccataacctgagggagttcgtgtttaagaatatcgatggctacttcaagatctacagcaagcacaccccaatcaacctggtgcgcgacctgccacagggattctccgccctggagccactggtggatctgcccatcggcatcaacatcacccggtttcagacactgctggccctgcacagatcctacctgacaccaggcgactcctctagcggatggaccgcaggagctgccgcctactatgtgggctatctgcagccccggaccttcctgctgaagtacaacgagaatggcaccatcacagacgcagtggattgcgccctggaccccctgtctgagacaaagtgtacactgaagagctttaccgtggagaagggcatctatcagacaagcaatttcagggtgcagcctaccgagtccatcgtgcgctttcccaatatcacaaacctgtgcccttttggcgaggtgttcaacgccaccagattcgccagcgtgtacgcctggaatcggaagagaatctccaactgcgtggccgactattctgtgctgtacaactccgcctctttcagcacctttaagtgctatggcgtgtctcccacaaagctgaatgatctgtgctttaccaacgtgtacgccgatagcttcgtgatcaggggagacgaagtgagacagatcgcaccaggacagacaggaaagatcgcagactacaattataagctgcctgacgatttcaccggctgcgtgatcgcctggaactccaacaatctggattctaaagtgggcggcaactacaattatctgtacaggctgtttcgcaagtccaatctgaagccattcgagcgggacatctccacagagatctaccaggccggctctaccccctgcaatggcgtggagggctttaactgttatttccctctgcagtcttacggcttccagccaacaaacggcgtgggctatcagccctacagagtggtggtgctgtcctttgagctgctgcacgcaccagcaacagtgtgcggcccaaagaagtctaccaatctggtgaagaacaagtgcgtgaacttcaacttcaacggactgaccggcacaggcgtgctgaccgagagcaataagaagttcctgccttttcagcagttcggcagggacatcgcagataccacagacgccgtgcgcgaccctcagaccctggagatcctggacatcacaccatgcagcttcggcggcgtgtccgtgatcacaccaggcaccaatacatccaaccaggtggccgtgctgtatcaggacgtgaattgtaccgaggtgcccgtggcaatccacgcagatcagctgacccctacatggcgggtgtactctaccggcagcaacgtgttccagacaagagccggatgcctgatcggagcagagcacgtgaacaatagctatgagtgcgacatccctatcggcgccggcatctgtgccagctaccagacccagacaaactccccatctggagcaggctcccaccatcaccatcaccatcaccatcaccactga

SEQ ID NO: 4179 - DNA, 2148 bp, Artificial Sequence
  Description of Artificial Sequence: Synthetic polynucleotide
atgggcatcctgccaagcccaggaatgcccgccctgctgtctctggtgagcctgctgtccgtgctgctgatgggatgcgtggcagagacaggcacacagtgcgtgaacctgaccacaaggacccagctgccccctgcctataccaattctttcacacggggcgtgtactatcccgacaaggtgtttagaagctccgtgctgcactccacacaggatctgtttctgcctttcttttctaacgtgacctggttccacgccgaacacgtgtccggcaccaatggcacaaagcggttcgacaatcccgtgctgccttttaacgatggcgtgtacttcgccagcaccgagaagtccaacatcatcagaggctggatctttggcaccacactggactctaagacacagagcctgctgatcgtgaacaatgccaccaacgtggtgatcaaggtgtgcgagttccagttttgtaatgatccattcctgggcgtgtactatcacaagaacaataagtcctggatggagtctgagtttcgcgtgtattctagcgccaacaattgcacatttgagtaccatagccagcccttcctgatggacctggagggcaagcagggcaatttcaagaacctgagggagttcgtgtttaagaatatcgatggctacttcaagatctacagcaagcacaccccaatcaacctggtgcgcgacctgccacagggattctccgccctggagccactggtggatctgcccatcggcatcaacatcacccggtttcagacactgctggccctgcacagatcctacctgacaccaggcgactcctctagcggagaaaccgcaggagctgccgcctactatgtgggctatctgcagccccggaccttcctgctgaagtacaacgagaatggcaccatcacagacgcagtggattgcgccctggaccccctgtctgagacaaagtgtacactgaagagctttaccgtggagaagggcatctatcagacaagcaatttcagggtgcagcctaccgagtccatcgtgcgctttcccaatatcacaaaccattgcccttttggcgaggtgttcaacgccaccagattcgccagcgtgtacgcctggaatcggaagagaatctccaactgcgtggccgactattctgtgctgtacaactccgcctctttcagcacctttaagtgctatggcgtgtctcccacaaagctgaatgatctgtgctttaccaacgtgtacgccgatagcttcgtgatcaggggagacgaagtgagacagatcgcaccaggacagacaggaaagatcgcagactacaattataagctgcctgacgatttcaccggctgcgtgatcgcctggaactccaacaatctggattctaaagtgggcggcaactacaattatctgtacaggctgtttcgcaagtccaatctgaagccattcgagcgggacatctccacagagatctaccaggccggctctaccccctgcaatggcgtggagggctttaactgttatttccctctgcagtcttacggcttccagccaacaaacggcgtgggccaacagccctacagagtggtggtgctgtcctttgagctgctgcacgcaccagcaacagtgtgcggcccaaagaagtctaccaatctggtgaagaacaagtgcgtgaacttcaacttcaacggactgaccggcacaggcgtgctgaccgagagcaataagaagttcctgccttttcagcagttcggcagggacatcgcagataccacagacgccgtgcgcgaccctcagaccctggagatcctggacatcacaccatgcagcttcggcggcgtgtccgtgatcacaccaggcaccaatacatccaaccaggtggccgtgctgtatcaggacgtgaattgtaccgaggtgcccgatgcaatccacgcagatcagctgacccctacatggcgggtgtactctaccggcagcaacgtgttccagacaagagccggatgcctgatcggagcagagcacgtgaacaatagctatgagtgcgacatccctatcggcgccggcatctgtgccagctaccagacccagacaaactccccatctggagcaggctcccaccatcaccatcaccatcaccatcaccactga

SEQ ID NO: 4180 - DNA, 2148 bp, Artificial Sequence
  Description of Artificial Sequence: Synthetic polynucleotide
atgggcatcctgccaagcccaggaatgcccgccctgctgtctctggtgagcctgctgtccgtgctgctgatgggatgcgtggcagagacaggcacacagtgcgtgaacctgaccacaaggacccagctgccccctgcctataccaattctttcacacggggcgtgtactatcccgacaaggtgtttagaagctccgtgctgcactccacacaggatctgtttctgcctttcttttctaacgtgacctggttccacgccatccacgtgtccggcaccaatggcacaaagcggttcgacaatcccgtgctgccttttaacgatggcgtgtacttcgccagcaccgagaagtccaacatcatcagaggctggatctttggcaccacactggactctaagacacagagcctgctgatcgtgaacaatgccaccaacgtggtgatcaaggtgtgcgagttccagttttgtaatgatccattcctgggcgtgtactatcacaagaacaataagtcctggatggagtctgagtttcgcgtgtattctagcgccaacaattgcacatttgagtacgtgagccagcccttcctgatggacctggagggcaagcagggcaatttcaagaacctgagggagttcgtgtttaagaatatcgatggctacttcaagatctacagcaagcacaccccaatcaacctggtgcgcgacctgccacagggattctccgccctggagccactggtggatctgcccatcggcatcaacatcacccggtttcagacactgctggccctgcacagatcctacctgacaccaggcgactcctctagcggatggaccgcaggagctgccgcctactatgtgggctatctgcagccccggaccttcctgctgaagtacaacgagaatggcaccatcacagacgcagtggattgcgccctggaccccctgtctgagacaaagtgtacactgaagagctttaccgtggagaagggcatctatcagacaagcaatttcagggtgcagcctaccgagtccatcgtgcgctttcccaatatcacaaacctgtgcccttttggcgaggtgttcaacgccaccagattcgccagcgtgtacgcctggaatcggaagagaatctccaactgcgtggccgactattctgtgctgtacaactccgcctctttcagcacctttaagtgctatggcgtgtctcccacaaagctgaatgatctgtgctttaccaacgtgtacgccgatagcttcgtgatcaggggagacgaagtgagacagatcgcaccaggacagacaggaaagatcgcagactacaattataagctgcctgacgatttcaccggctgcgtgatcgcctggaactccaacaatctggattctaaagtgggcggcaactacaattatctgtacaggctgtttcgcaagtccaatctgaagccattcgagcgggacatctccacagagatctaccaggccggctctaccccctgcaatggcgtggagggctttaactgttatttccctctgcagtcttacggcttccagccaacaaacggcgtgggctatcagccctacagagtggtggtgctgtcctttgagctgctgcacgcaccagcaacagtgtgcggcccaaagaagtctaccaatctggtgaagaacaagtgcgtgaacttcaacttcaacggactgaccggcacaggcgtgctgaccgagagcaataagaagttcctgccttttcagcagttcggcagggacatcgcagataccacagacgccgtgcgcgaccctcagaccctggagatcctggacatcacaccatgcagcttcggcggcgtgttagtgatcacaccaggcaccaatacatccaaccaggtggccgtgctgtatcaggacgtgaattgtaccgaggtgcccgtggcaatccacgcagatcagctgacccctacatggcgggtgtactctaccggcagcaacgtgttccagacaagagccggatgcctgatcggagcagagcacgtgaacaatagctatgagtgcgacatccctatcggcgccggcatctgtgccagctaccagacccagacaaactccccatctggagcaggctcccaccatcaccatcaccatcaccatcaccactga

SEQ ID NO: 4181 - DNA, 2148 bp, Artificial Sequence
  Description of Artificial Sequence: Synthetic polynucleotide
atgggcatcctgccaagcccaggaatgcccgccctgctgtctctggtgagcctgctgtccgtgctgctgatgggatgcgtggcagagacaggcacacagtgcgtgaacctgaccacaaggacccagctgccccctgcctataccaattctttcacacggggcgtgtactatcccgacaaggtgtttagaagctccgtgctgcactccacacaggatctgtttctgcctttcttttctaacgtgacctggttccacgccatccacgtgtccggcaccaatggcacaaagcggttcgacaatcccgtgctgccttttaacgatggcgtgtacttcgccagcaccgagaagtccaacatcatcagaggctggatctttggcaccacactggactctaagacacagagcctgctgatcgtgaacaatgccaccaacgtggtgatcaaggtgtgcgagttccagttttgtaatgatccattcctgggcgtgtactatcacaagaacaataagtcctggatggagtctgagtttcgcgtgtattctagcgccaacaattgcacatttgagtacgtgagccagcccttcctgatggacctggagggcaagcagggcaatttcaagaacctgagggagttcgtgtttaagaatatcgatggctacttcaagatctacagcaagcacaccgaaatcaacctggtgcgcgacctgccacagggattctccgccctggagccactggtggatctgcccatcggcatcaacatcacccggtttcagacactgctggccctgcacagatcctacctgacaccaggcgactcctctagcggatggaccgcaggagctgccgcctactatgtgggctatctgcagccccggaccttcctgctgaagtacaacgagaatggcaccatcacagacgcagtggattgcgccctggaccccctgtctgagacaaagtgtacactgaagagctttaccgtggagaagggcatctatcagacaagcaatttcagggtgcagcctaccgagtccatcgtgcgctttcccaatatcacaaacctgtgcccttttggcgaggtgttcaacgccaccagattcgccagcgtgtacgcctggaatcggaagagaatctccaactgcgtggccgactattctgtgctgtacaactccgcctctttcagcacctttaagtgctatggcgtgtctcccacaaagctgaatgatctgtgctttaccaacgtgtacgccgatagcttcgtgatcaggggagacgaagtgagacagatcgcaccaggacagacaggaaagatcgcagactacaattataagctgcctgacgatttcaccggctgcgtgatcgcctggaactccaacaatctggattctaaagtgggcggcaactacaattatctgtacaggctgtttcgcaagtccaatctgaagccattcgagcgggacatctccacagagatctaccaggccggctctaccccctgcaatggcgtggagggctttaactgttatttccctctgcagtcttacggcttccagccaacaaacggcgtgggctatcagccctacagagtggtggtgctgtcctttgagctgctgcacgcaccagcaacagtgtgcggcccaaagaagtctaccaatctggtgaagaacaagtgcgtgaacttcaacttcaacggactgaccggcacaggcgtgctgaccgagagcaataagaagttcctgccttttcagcagttcggcagggacatcgcagataccacagacgccgtgcgcgaccctcagaccctggagatcctggacatcacaccatgcagcttcggcggcgtgtccgtgatcacaccaggcaccaatacatccaaccaggtggccgtgctgtatcaggacgtgaattgtaccgaggtgcccgtggcaatccacgcagatcagctgacccctacatggcgggtgtactctaccggcagcaacgtgttccagacaagagccggatgcctgatcggagcagagcacgtgaacaatagctatgagtgcgacatccctatcggcgccggcatctgtgccagctaccagacccagacaaactccccatctggagcaggctcccaccatcaccatcaccatcaccatcaccactga

SEQ ID NO: 4182 - DNA, 2148 bp, Artificial Sequence
  Description of Artificial Sequence: Synthetic polynucleotide
atgggcatcctgccaagcccaggaatgcccgccctgctgtctctggtgagcctgctgtccgtgctgctgatgggatgcgtggcagagacaggcacacagtgcgtgaacctgaccacaaggacccagctgccccctgcctataccaattctttcacacggggcgtgtactatcccgacaaggtgtttagaagctccgtgctgcactccacacaggatctgtttctgcctttcttttctaacgtgacctggttccacgccatccacgtgtccggcaccaatggcacaaagcggttcgacaatcccgtgctgccttttaacgatggcgtgtacttcgccagcaccgagaagtccaacatcatcagaggctggatctttggcaccacactggactctaagacacagagcctgctgatcgtgaacaatgccaccaacgtggtgatcaaggtgtgcgagttccagttttgtaatgatccattcctgggcgtgtactatcacaagaacaataagtcctggatggagtctgagtttcgcgtgtattctagcgccaacaattgcacatttgagtacgtgagccagcccttcctgatggacctggagggcaagcagggcaatttcaagaacctgagggagttcgtgtttaagaatatcgatggctacttcaagatctacagcaagcacaccccaatcaacctggtgcgcgacctgccacagggattctccgccctggagccactggtggatctgcccatcggcatcaacatcacccggtttcagacactgctggccctgcacagatcctacctgacaccaggcgactcctctagcggatggaccgcaggagctgccgcctactatgtgggctatctgcagccccggaccttcctgctgaagtacaacgagaatggcaccatcacagacgcagtggattgcgccctggaccccctgtctgagacaaagtgtacactgaagagctttaccgtggagaagggcatctatcagacaagcaatttcagggtgcagcctaccgagtccatcgtgcgctttcccaatatcacaaacctgtgcccttttggcgaggtgttcaacgccaccagattcgccagcgtgtacgcctggaatcggaagagaatctccaactgcgtggccgactattctgtgctgtacaactccgcctctttcagcacctttaagtgctatggcgtgtctcccacaaagctgaatgatctgtgctttaccaacgtgtacgccgatagcttcgtgatcaggggagacgaagtgagacagatcgcaccaggacagacaggaaagatcgcagactacaattataagctgcctgacgatttcaccggctgcgtgatcgcctggaactccaacaatctggattctaaagtgggcggcaactacaattatctgtacaggctgtttcgcaagtccaatctgaagccattcgagcgggacatctccacagagatctaccaggccggctctaccccctgcaatggcgtggagggctttaactgttatttccctctgcagtcttacggcttccagccaacaaacggcgtgggctatcagccctacagagtggtggtgctgtcctttgagctgctgcacgcaccagcaacagtgtgcggcccaaagaagtctaccaatctggtgaagaacaagtgcgtgaacttcaacttcaacggactgaccggcacaggcgtgctgaccgagagcaataagaagttcctgccttttcagcagttcggcagggacatcgcagataccacagacgccgtgcgcgaccctcagaccctggagatcctggacatcacaccatgcagcaatggcggcgtgtccgtgatcacaccaggcaccaatacatccaaccaggtggccgtgctgtatcaggacgtgaattgtaccgaggtgcccgtggcaatccacgcagatcagctgacccctacatggcgggtgtactctaccggcagcaacgtgttccagacaagagccggatgcctgatcggagcagagcacgtgaacaatagctatgagtgcgacatccctatcggcgccggcatctgtgccagctaccagacccagacaaactccccatctggagcaggctcccaccatcaccatcaccatcaccatcaccactga

SEQ ID NO: 4183 - DNA, 2148 bp, Artificial Sequence
  Description of Artificial Sequence: Synthetic polynucleotide
atgggcatcctgccaagcccaggaatgcccgccctgctgtctctggtgagcctgctgtccgtgctgctgatgggatgcgtggcagagacaggcacacagtgcgtgaacctgaccacaaggacccagctgccccctgcctataccaattctttcacacggggcgtgtactatcccgacaaggtgtttagaagctccgtgctgcactccacacaggatctgtttctgcctttcttttctaacgtgacctggttccacgccatccacgtgtccggcaccaatggcacaaagcggttcgacaatcccgtgctgccttttaacgatggcgtgtacttcgccagcaccgagaagtccaacatcatcagaggctggatctttggcaccacactggactctaagacacagagcctgctgatcgtgaacaatgccaccaacgtggtgatcaaggtgtgcgagttccagttttgtaatgatccattcctgggcgtgtactatcacaagaacaataagtcctggatggagtctgagtttcgcgtgtattctagcgccaacaattgcacatttgagtacgtgagccagcccttcctgatggacctggagggcaagcagggcaatttcaagaacctgagggagttcgtgtttaagaatatcgatggctacttcaagatctacagcaagcacaccccaatcaacctggtgcgcgacctgccacagggattctccgccctggagccactggtggatctgcccatcggcatcaacatcacccggtttcagacactgctggccctgcacagatcctacctgacaccaggcgactcctctagcggatggaccgcaggagctgccgcctactatgtgggctatctgcagccccggaccttcctgctgaagtacaacgagaatggcaccatcacagacgcagtggattgcgccctggaccccctgtctgagacaaagtgtacactgaagagctttaccgtggagaagggcatctatcagacaagcaatttcagggtgcagcctaccgagtccatcgtgcgctttcccaatatcacaaacctgtgcccttttggcgaggtgttcaacgccaccagattcgccagcgtgtacgcctggaatcggaagagaatctccaactgcgtggccgactattctgtgctgtacaactccgcctctttcagcacctttaagtgctatggcgtgtctcccacaaagctgaatgatctgtgctttaccaacgtgtacgccgatagcttcgtgatcaggggagacgaagtgagacagatcgcaccaggacagacaggaaagatcgcagactacaattataagctgcctgacgatttcaccggctgcgtgatcgcctggaactccaacaatctggattctaaagtgggcggcaactacaattatctgtacaggctgtttcgcaagtccaatctgaagccattcgagcgggacatctccacagagatctaccaggccggctctaccccctgcaatggcgtggagggctttaactgttatttccctctgcagtcttacggcttccagccaacaaacggcgtgggctatcagccctacagagtggtggtgctgtcctttgagctgctgcacgcaccagcaacagtgtgcggcccaaagaagtctaccaatctggtgaagaacaagtgcgtgaacttcaacttcaacggactgaccggcacaggcgtgctgaccgagagcaataagaagttcctgccttttcagcagttcggcaggaaaatcgcagataccacagacgccgtgcgcgaccctcagaccctggagatcctggacatcacaccatgcagcttcggcggcgtgtccgtgatcacaccaggcaccaatacatccaaccaggtggccgtgctgtatcaggacgtgaattgtaccgaggtgcccgtggcaatccacgcagatcagctgacccctacatggcgggtgtactctaccggcagcaacgtgttccagacaagagccggatgcctgatcggagcagagcacgtgaacaatagctatgagtgcgacatccctatcggcgccggcatctgtgccagctaccagacccagacaaactccccatctggagcaggctcccaccatcaccatcaccatcaccatcaccactga

SEQ ID NO: 4184 - DNA, 2148 bp, Artificial Sequence
  Description of Artificial Sequence: Synthetic polynucleotide
atgggcatcctgccaagcccaggaatgcccgccctgctgtctctggtgagcctgctgtccgtgctgctgatgggatgcgtggcagagacaggcacacagtgcgtgaacctgaccacaaggacccagctgccccctgcctataccaattctttcacacggggcgtgtactatcccgacaaggtgtttagaagctccgtgctgcactccacacaggatctgtttctgcctttcttttctaacgtgacctggttccacgccatccacgtgtccggcaccaatggcacaaagcggttcgacaatcccgtgctgccttttaacgatggcgtgtacttcgccagcaccgagaagtccaacatcatcagaggctggatctttggcaccacactggactctaagacacagagcctgctgatcgtgaacaatgccaccaacgtggtgatcaaggtgtgcgagttccagttttgtaatgatccattcctgggcgtgtactatcacaagaacaataagtcctggatggagtctgagtttcgcgtgtattctagcgccaacaattgcacatttgagtacgtgagccagcccttcctgatggacctggagggcaagcagggcaatttcaagaacctgagggagttcgtgtttaagaatatcgatggctacttcaagatctacagcaagcacaccccaatcaacctggtgcgcgacctgccacagggattctccgccctggagccactggtggatctgcccatcggcatcaacatcacccggtttcagacactgctggccctgcacagatcctacctgacaccaggcgactcctctagcggatggaccgcaggagctgccgcctactatgtgggctatctgcagccccggaccttcctgctgaagtacaacgagaatggcaccatcacagacgcagtggattgcgccctggaccccctgtctgagacaaagtgtacactgaagagctttaccgtggagaagggcatctatcagacaagcaatttcagggtgcagcctaccgagtccatcgtgcgctttcccaatatcacaaacctgtgcccttttggcgaggtgttcaacgccaccagattcgccagcgtgtacgcctggaatcggaagagaatctccaactgcgtggccgactattctgaactgtacaactccgcctctttcagcacctttaagtgctatggcgtgtctcccacaaagctgaatgatctgtgctttaccaacgtgtacgccgatagcttcgtgatcaggggagacgaagtgagacagatcgcaccaggacagacaggaaagatcgcagactacaattataagctgcctgacgatttcaccggctgcgtgatcgcctggaactccaacaatctggattctaaagtgggcggcaactacaattatctgtacaggctgtttcgcaagtccaatctgaagccattcgagcgggacatctccacagagatctaccaggccggctctaccccctgcaatggcgtggagggctttaactgttatttccctctgcagtcttacggcttccagccaacaaacggcgtgggctatcagccctacagagtggtggtgctgtcctttgagctgctgcacgcaccagcaacagtgtgcggcccaaagaagtctaccaatctggtgaagaacaagtgcgtgaacttcaacttcaacggactgaccggcacaggcgtgctgaccgagagcaataagaagttcctgccttttcagcagttcggcagggacatcgcagataccacagacgccgtgcgcgaccctcagaccctggagatcctggacatcacaccatgcagcttcggcggcgtgtccgtgatcacaccaggcaccaatacatccaaccaggtggccgtgctgtatcaggacgtgaattgtaccgaggtgcccgtggcaatccacgcagatcagctgacccctacatggcgggtgtactctaccggcagcaacgtgttccagacaagagccggatgcctgatcggagcagagcacgtgaacaatagctatgagtgcgacatccctatcggcgccggcatctgtgccagctaccagacccagacaaactccccatctggagcaggctcccaccatcaccatcaccatcaccatcaccactga

SEQ ID NO: 4185 - DNA, 2148 bp, Artificial Sequence
  Description of Artificial Sequence: Synthetic polynucleotide
atgggcatcctgccaagcccaggaatgcccgccctgctgtctctggtgagcctgctgtccgtgctgctgatgggatgcgtggcagagacaggcacacagtgcgtgaacctgaccacaaggacccagctgccccctgcctataccaattctttcacacggggcgtgtactatcccgacaaggtgtttagaagctccgtgctgcactccacacaggatctgtttctgcctttcttttctaacgtgacctggttccacgccgaacacgtgtccggcaccaatggcacaaagcggttcgacaatcccgtgctgccttttaacgatggcgtgtacttcgccagcaccgagaagtccaacatcatcagaggctggatctttggcaccacactggactctaagacacagagcctgctgatcgtgaacaatgccaccaacgtggtgatcaaggtgtgcgagttccagttttgtaatgatccattcctgggcgtgtactatcacaagaacaataagtcctggatggagtctgagtttcgcgtgtattctagcgccaacaattgcacatttgagtacgtgagccagcccttcctgatggacctggagggcaagcagggcaatttcaagaacctgagggagttcgtgtttaagaatatcgatggctacttcaagatctacagcaagcacaccccaatcaacctggtgcgcgacctgccacagggattctccgccctggagccactggtggatctgcccatcggcatcaacatcacccggtttcagacactgctggccctgcacagatcctacctgacaccaggcgactcctctagcggagaaaccgcaggagctgccgcctactatgtgggctatctgcagccccggaccttcctgctgaagtacaacgagaatggcaccatcacagacgcagtggattgcgccctggaccccctgtctgagacaaagtgtacactgaagagctttaccgtggagaagggcatctatcagacaagcaatttcagggtgcagcctaccgagtccatcgtgcgctttcccaatatcacaaacccttgcccttttggcgaggtgttcaacgccaccagattcgccagcgtgtacgcctggaatcggaagagaatctccaactgcgtggccgactattctgtgctgtacaactccgcctctttcagcacctttaagtgctatggcgtgtctcccacaaagctgaatgatctgtgctttaccaacgtgtacgccgatagcttcgtgatcaggggagacgaagtgagacagatcgcaccaggacagacaggaaagatcgcagactacaattataagctgcctgacgatttcaccggctgcgtgatcgcctggaactccaacaatctggattctaaagtgggcggcaactacaattatctgtacaggctgtttcgcaagtccaatctgaagccattcgagcgggacatctccacagagatctaccaggccggctctaccccctgcaatggcgtggagggctttaactgttatttccctctgcagtcttacggcttccagccaacaaacggcccgggccaacagccctacagagtggtggtgctgtcctttgagctgctgcacgcaccagcaacagtgtgcggcccaaagaagtctaccaatctggtgaagaacaagtgcgtgaacttcaacttcaacggactgaccggcacaggcgtgctgaccgagagcaataagaagttcctgccttttcagcagttcggcagggacatcgcagataccacagacgccgtgcgcgaccctcagaccctggagatcctggacatcacaccatgcagcttcggcggcgtgtccgtgatcacaccaggcaccaatacatccaaccaggtggccgtgctgtatcaggacgtgaattgtaccgaggtgcccgatgcaatccacgcagatcagctgacccctacatggcgggtgtactctaccggcagcaacgtgttccagacaagagccggatgcctgatcggagcagagcacgtgaacaatagctatgagtgcgacatccctatcggcgccggcatctgtgccagctaccagacccagacaaactccccatctggagcaggctcccaccatcaccatcaccatcaccatcaccactga

SEQ ID NO: 4186 - DNA, 2148 bp, Artificial Sequence
  Description of Artificial Sequence: Synthetic polynucleotide
atgggcatcctgccaagcccaggaatgcccgccctgctgtctctggtgagcctgctgtccgtgctgctgatgggatgcgtggcagagacaggcacacagtgcgtgaacctgaccacaaggacccagctgccccctgcctataccaattctttcacacggggcgtgtactatcccgacaaggtgtttagaagctccgtgctgcactccacacaggatctgtttctgcctttcttttctaacgtgacctggttccacgccatccacgtgtccggcaccaatggcacaaagcggttcgacaatcccgtgctgccttttaacgatggcgtgtacttcgccagcaccgagaagtccaacatcatcagaggctggatctttggcaccacactggactctaagacacagagcctgctgatcgtgaacaatgccaccaacgtggtgatcaaggtgtgcgagttccagttttgtaatgatccattcctgggcgtgtactatcacaagaacaataagtcctggatggagtctgagtttcgcgtgtattctagcgccaacaattgcacatttgagtacgtgagccagcccttcctgatggacctggagggcaagcagggcaatttcaagaacctgagggagttcgtgtttaagaatatcgatggctacttcaagatctacagcaagcacaccccaatcaacctggtgcgcgacctgccacagggattctccgccctggagccactggtggatctgcccatcggcatcaacatcacccggtttcagacactgctggccctgcacagatcctacctgacaccaggcgactcctctagcggatggaccgcaggagctgccgcctactatgtgggctatctgcagccccggaccttcctgctgaagtacaacgagaatggcaccatcacagacgcagtggattgcgccctggaccccctgtctgagacaaagtgtacactgaagagctttaccgtggagaagggcatctatcagacaagcaatttcagggtgcagcctaccgtatccatcgtgcgctttcccaatatcacaaacctgtgcccttttggcgaggtgttcaacgccaccagattcgccagcgtgtacgcctggaatcggaagagaatctccaactgcgtggccgactattctgtgctgtacaactccgcctctttcagcacctttaagtgctatggcgtgtctcccacaaagctgaatgatctgtgctttaccaacgtgtacgccgatagcttcgtgatcaggggagacgaagtgagacagatcgcaccaggacagacaggaaagatcgcagactacaattataagctgcctgacgatttcaccggctgcgtgatcgcctggaactccaacaatctggattctaaagtgggcggcaactacaattatctgtacaggctgtttcgcaagtccaatctgaagccattcgagcgggacatctccacagagatctaccaggccggctctaccccctgcaatggcgtggagggctttaactgttatttccctctgcagtcttacggcttccagccaacaaacggcgtgggctatcagccctacagagtggtggtgctgtcctttgagctgctgcacgcaccagcaacagtgtgcggcccaaagaagtctaccaatctggtgaagaacaagtgcgtgaacttcaacttcaacggactgaccggcacaggcgtgctgaccgagagcaataagaagttcctgccttttcagcagttcggcagggacatcgcagataccacagacgccgtgcgcgaccctcagaccctggagatcctggacatcacaccatgcagcttcggcggcgtgtccgtgatcacaccaggcaccaatacatccaaccaggtggccgtgctgtatcaggacgtgaattgtaccgaggtgcccgtggcaatccacgcagatcagctgacccctacatggcgggtgtactctaccggcagcaacgtgttccagacaagagccggatgcctgatcggagcagagcacgtgaacaatagctatgagtgcgacatccctatcggcgccggcatctgtgccagctaccagacccagacaaactccccatctggagcaggctcccaccatcaccatcaccatcaccatcaccactga

SEQ ID NO: 4187 - DNA, 2148 bp, Artificial Sequence
  Description of Artificial Sequence: Synthetic polynucleotide
atgggcatcctgccaagcccaggaatgcccgccctgctgtctctggtgagcctgctgtccgtgctgctgatgggatgcgtggcagagacaggcacacagtgcgtgaacctgaccacaaggacccagctgccccctgcctataccaattctttcacacggggcgtgtactatcccgacaaggtgtttagaagctccgtgctgcactccacacaggatctgtttctgcctttcttttctaacgtgacctggttccacgccatccacgtgtccggcaccaatggcacaaagcggttcgacaatcccgtgctgccttttaacgatggcgtgtacttcgccagcaccgagaagtccaacatcatcagaggctggatctttggcaccacactggactctaagacacagagcctgctgatcgtgaacaatgccaccaacgtggtgatcaaggtgtgcgagttccagttttgtaatgatccattcctgggcgtgtactatcacaagaacaataagtcctggatggagtctgagtttcgcgtgtattctagcgccaacaattgcacatttgagtacgtgagccagcccttcctgatggacctggagggcaagcagggcaatttcaagaacctgagggagttcgtgtttaagaatatcgatggctacttcaagatctacagcaagcacaccccaatcaacctggtgcgcgacctgccacagggattctccgccctggagccactggtggatctgcccatcggcatcaacatcacccggtttcagacactgctggccctgcacagatcctacctgacaccaggcgactcctctagcggatggaccgcaggagctgccgcctactatgtgggctatctgcagccccggaccttcctgctgaagtacaacgagaatggcaccatcacagacgcagtggattgcgccctggaccccctgtctgagacaaagtgtacactgaagagctttaccgtggagaagggcatctatcagacaagcaatttcagggtgcagcctaccgagtccatcgtgcgctttcccaatatcacaaacttttgcccttttggcgaggtgttcaacgccaccagattcgccagcgtgtacgcctggaatcggaagagaatctccaactgcgtggccgactattctgtgctgtacaactccgcctctttcagcacctttaagtgctatggcgtgtctcccacaaagctgaatgatctgtgctttaccaacgtgtacgccgatagcttcgtgatcaggggagacgaagtgagacagatcgcaccaggacagacaggaaagatcgcagactacaattataagctgcctgacgatttcaccggctgcgtgatcgcctggaactccaacaatctggattctaaagtgggcggcaactacaattatctgtacaggctgtttcgcaagtccaatctgaagccattcgagcgggacatctccacagagatctaccaggccggctctaccccctgcaatggcgtggagggctttaactgttatttccctctgcagtcttacggcttccagccaacaaacggcgtgggctatcagccctacagagtggtggtgctgtcctttgagctgctgcacgcaccagcaacagtgtgcggcccaaagaagtctaccaatctggtgaagaacaagtgcgtgaacttcaacttcaacggactgaccggcacaggcgtgctgaccgagagcaataagaagttcctgccttttcagcagttcggcagggacatcgcagataccacagacgccgtgcgcgaccctcagaccctggagatcctggacatcacaccatgcagcttcggcggcgtgtccgtgatcacaccaggcaccaatacatccaaccaggtggccgtgctgtatcaggacgtgaattgtaccgaggtgcccgtggcaatccacgcagatcagctgacccctacatggcgggtgtactctaccggcagcaacgtgttccagacaagagccggatgcctgatcggagcagagcacgtgaacaatagctatgagtgcgacatccctatcggcgccggcatctgtgccagctaccagacccagacaaactccccatctggagcaggctcccaccatcaccatcaccatcaccatcaccactga

SEQ ID NO: 4188 - DNA, 2148 bp, Artificial Sequence
  Description of Artificial Sequence: Synthetic polynucleotide
atgggcatcctgccaagcccaggaatgcccgccctgctgtctctggtgagcctgctgtccgtgctgctgatgggatgcgtggcagagacaggcacacagtgcgtgaacctgaccacaaggacccagctgccccctgcctataccaattctttcacacggggcgtgtactatcccgacaaggtgtttagaagctccgtgctgcactccacacaggatctgtttctgcctttcttttctaacgtgacctggttccacgccatccacgtgtccggcaccaatggcacaaagcggttcgacaatcccgtgctgccttttaacgatggcgtgtacttcgccagcaccgagaagtccaacatcatcagaggctggatctttggcaccacactggactctaagacacagagcctgctgatcgtgaacaatgccaccaacgtggtgatcaaggtgtgcgagttccagttttgtaatgatccattcctgggcgtgtactatcacaagaacaataagtcctggatggagtctgagtttcgcgtgtattctagcgccaacaattgcacatttgagtacgtgagccagcccttcctgatggacctggagggcaagcagggcaatttcaagaacctgagggagttcgtgtttaagaatatcgatggctacttcaagatctacagcaagcacaccccaatcaacctggtgcgcgacctgccacagggattctccgccctggagccactggtggatctgcccatcggcatcaacatcacccggtttcagacactgctggccctgcacagatcctacctgacaccaggcgactcctctagcggatggaccgcaggagctgccgcctactatgtgggctatctgcagccccggaccttcctgctgaagtacaacgagaatggcaccatcacagacgcagtggattgcgccctggaccccctgtctgagacaaagtgtacactgaagagctttaccgtggagaagggcatctatcagacaagcaatttcagggtgcagcctaccgagtccatcgtgcgctttcccaatatcacaaacctgtgcccttttggcgaggtgttcaacgccaccagattcgccagcgtgtacgcctgggttcggaagagaatctccaactgcgtggccgactattctgtgctgtacaactccgcctctttcagcacctttaagtgctatggcgtgtctcccacaaagctgaatgatctgtgctttaccaacgtgtacgccgatagcttcgtgatcaggggagacgaagtgagacagatcgcaccaggacagacaggaaagatcgcagactacaattataagctgcctgacgatttcaccggctgcgtgatcgcctggaactccaacaatctggattctaaagtgggcggcaactacaattatctgtacaggctgtttcgcaagtccaatctgaagccattcgagcgggacatctccacagagatctaccaggccggctctaccccctgcaatggcgtggagggctttaactgttatttccctctgcagtcttacggcttccagccaacaaacggcgtgggctatcagccctacagagtggtggtgctgtcctttgagctgctgcacgcaccagcaacagtgtgcggcccaaagaagtctaccaatctggtgaagaacaagtgcgtgaacttcaacttcaacggactgaccggcacaggcgtgctgaccgagagcaataagaagttcctgccttttcagcagttcggcagggacatcgcagataccacagacgccgtgcgcgaccctcagaccctggagatcctggacatcacaccatgcagcttcggcggcgtgtccgtgatcacaccaggcaccaatacatccaaccaggtggccgtgctgtatcaggacgtgaattgtaccgaggtgcccgtggcaatccacgcagatcagctgacccctacatggcgggtgtactctaccggcagcaacgtgttccagacaagagccggatgcctgatcggagcagagcacgtgaacaatagctatgagtgcgacatccctatcggcgccggcatctgtgccagctaccagacccagacaaactccccatctggagcaggctcccaccatcaccatcaccatcaccatcaccactga

SEQ ID NO: 4189 - DNA, 2148 bp, Artificial Sequence
  Description of Artificial Sequence: Synthetic polynucleotide
atgggcatcctgccaagcccaggaatgcccgccctgctgtctctggtgagcctgctgtccgtgctgctgatgggatgcgtggcagagacaggcacacagtgcgtgaacctgaccacaaggacccagctgccccctgcctataccaattctttcacacggggcgtgtactatcccgacaaggtgtttagaagctccgtgctgcactccacacaggatctgtttctgcctttcttttctaacgtgacctggttccacgccatccacgtgtccggcaccaatggcacaaagcggttcgacaatcccgtgctgccttttaacgatggcgtgtacttcgccaacaccgagaagtccaacatcatcagaggctggatctttggcaccacactggactctaagacacagagcctgctgatcgtgaacaatgccaccaacgtggtgatcaaggtgtgcgagttccagttttgtaatgatccattcctgggcgtgtactatcacaagaacaataagtcctggatggagtctgagtttcgcgtgtattctagcgccaacaattgcacatttgagtacgtgagccagcccttcctgatggacctggagggcaagcagggcaatttcaagaacctgagggagttcgtgtttaagaatatcgatggctacttcaagatctacagcaagcacaccccaatcaacctggtgcgcgacctgccacagggattctccgccctggagccactggtggatctgcccatcggcatcaacatcacccggtttcagacactgctggccctgcacagatcctacctgacaccaggcgactcctctagcggatggaccgcaggagctgccgcctactatgtgggctatctgcagccccggaccttcctgctgaagtacaacgagaatggcaccatcacagacgcagtggattgcgccctggaccccctgtctgagacaaagtgtacactgaagagctttaccgtggagaagggcatctatcagacaagcaatttcagggtgcagcctaccgagtccatcgtgcgctttcccaatatcacaaacctgtgcccttttggcgaggtgttcaacgccaccagattcgccagcgtgtacgcctggaatcggaagagaatctccaactgcgtggccgactattctgtgctgtacaactccgcctctttcagcacctttaagtgctatggcgtgtctcccacaaagctgaatgatctgtgctttaccaacgtgtacgccgatagcttcgtgatcaggggagacgaagtgagacagatcgcaccaggacagacaggaaagatcgcagactacaattataagctgcctgacgatttcaccggctgcgtgatcgcctggaactccaacaatctggattctaaagtgggcggcaactacaattatctgtacaggctgtttcgcaagtccaatctgaagccattcgagcgggacatctccacagagatctaccaggccggctctaccccctgcaatggcgtggagggctttaactgttatttccctctgcagtcttacggcttccagccaacaaacggcgtgggctatcagccctacagagtggtggtgctgtcctttgagctgctgcacgcaccagcaacagtgtgcggcccaaagaagtctaccaatctggtgaagaacaagtgcgtgaacttcaacttcaacggactgaccggcacaggcgtgctgaccgagagcaataagaagttcctgccttttcagcagttcggcagggacatcgcagataccacagacgccgtgcgcgaccctcagaccctggagatcctggacatcacaccatgcagcttcggcggcgtgtccgtgatcacaccaggcaccaatacatccaaccaggtggccgtgctgtatcaggacgtgaattgtaccgaggtgcccgtggcaatccacgcagatcagctgacccctacatggcgggtgtactctaccggcagcaacgtgttccagacaagagccggatgcctgatcggagcagagcacgtgaacaatagctatgagtgcgacatccctatcggcgccggcatctgtgccagctaccagacccagacaaactccccatctggagcaggctcccaccatcaccatcaccatcaccatcaccactga

SEQ ID NO: 4190 - DNA, 2148 bp, Artificial Sequence
  Description of Artificial Sequence: Synthetic polynucleotide
atgggcatcctgccaagcccaggaatgcccgccctgctgtctctggtgagcctgctgtccgtgctgctgatgggatgcgtggcagagacaggcacacagtgcgtgaacctgaccacaaggacccagctgccccctgcctataccaattctttcacacggggcgtgtactatcccgacaaggtgtttagaagctccgtgctgcactccacacaggatctgtttctgcctttcttttctaacgtgacctggttccacgccatccacgtgtccggcaccaatggcacaaagcggttcgacaatcccgtgctgccttttaacgatggcgtgtacttcgccagcaccgagaagtccaacatcatcagaggctggatctttggcaccacactggactctaagacacagagcctgctgatcgtgaacaatgccaccaacgtggtgatcaaggtgtgcgagttccagttttgtaatgatccattcctgggcgtgtactatcacaagaacaataagtcctggatggagtctgagtttcgcgtgtattctagcgccaacaattgcacatttgagtacgtgagccagcccttcctgatggacctggagggcaagcagggcaatttcaagaacctgagggagttcgtgtttaagaatatcgatggctacttcaagatctacagcaagcacaccccaatcaacctggtgcgcgacctgccacagggattctccgccctggagccactggtggatctgcccatcggcatcaacatcacccggtttcagacatatctggccctgcacagatcctacctgacaccaggcgactcctctagcggatggaccgcaggagctgccgcctactatgtgggctatctgcagccccggaccttcctgctgaagtacaacgagaatggcaccatcacagacgcagtggattgcgccctggaccccctgtctgagacaaagtgtacactgaagagctttaccgtggagaagggcatctatcagacaagcaatttcagggtgcagcctaccgagtccatcgtgcgctttcccaatatcacaaacctgtgcccttttggcgaggtgttcaacgccaccagattcgccagcgtgtacgcctggaatcggaagagaatctccaactgcgtggccgactattctgtgctgtacaactccgcctctttcagcacctttaagtgctatggcgtgtctcccacaaagctgaatgatctgtgctttaccaacgtgtacgccgatagcttcgtgatcaggggagacgaagtgagacagatcgcaccaggacagacaggaaagatcgcagactacaattataagctgcctgacgatttcaccggctgcgtgatcgcctggaactccaacaatctggattctaaagtgggcggcaactacaattatctgtacaggctgtttcgcaagtccaatctgaagccattcgagcgggacatctccacagagatctaccaggccggctctaccccctgcaatggcgtggagggctttaactgttatttccctctgcagtcttacggcttccagccaacaaacggcgtgggctatcagccctacagagtggtggtgctgtcctttgagctgctgcacgcaccagcaacagtgtgcggcccaaagaagtctaccaatctggtgaagaacaagtgcgtgaacttcaacttcaacggactgaccggcacaggcgtgctgaccgagagcaataagaagttcctgccttttcagcagttcggcagggacatcgcagataccacagacgccgtgcgcgaccctcagaccctggagatcctggacatcacaccatgcagcttcggcggcgtgtccgtgatcacaccaggcaccaatacatccaaccaggtggccgtgctgtatcaggacgtgaattgtaccgaggtgcccgtggcaatccacgcagatcagctgacccctacatggcgggtgtactctaccggcagcaacgtgttccagacaagagccggatgcctgatcggagcagagcacgtgaacaatagctatgagtgcgacatccctatcggcgccggcatctgtgccagctaccagacccagacaaactccccatctggagcaggctcccaccatcaccatcaccatcaccatcaccactga

SEQ ID NO: 4191 - DNA, 2148 bp, Artificial Sequence
  Description of Artificial Sequence: Synthetic polynucleotide
atgggcatcctgccaagcccaggaatgcccgccctgctgtctctggtgagcctgctgtccgtgctgctgatgggatgcgtggcagagacaggcacacagtgcgtgaacctgaccacaaggacccagctgccccctgcctataccaattctttcacacggggcgtgtactatcccgacaaggtgtttagaagctccgtgctgcactccacacaggatctgtttctgcctttcttttctaacgtgacctggttccacgccatccacgtgtccggcaccaatggcacaaagcggttcgacaatcccgtgctgccttttaacgatggcgtgtacttcgccagcaccgagaagtccaacatcatcagaggctggatctttggcaccacactggactctaagacacagagcctgctgatcgtgaacaatgccaccaacgtggtgatcaaggtgtgcgagttccagttttgtaatgatccattcctgggcgtgtactatcacaagaacaataagtcctggatggagtctgagtttcgcgtgtattctagcgccaacaattgcacatttgagtacgtgagccagcccttcctgatggacctggagggcaagcagggcaatttcaagaacctgagggagttcgtgtttaagaatatcgatggctacttcaagatctacagcaagcacaccccaatcaacctggtgcgcgacctgccacagggattctccgccctggagccactggtggatctgcccatcggcatcaacatcacccggtttcagacactgctggccctgcacagatcctacctgacaccaggcgactcctctagcggatggaccgcaggagctgccgcctactatgtgggctatctgcagccccggaccttcctgctgaagtacaacgagaatggcaccatcacagacgcagtggattgcgccctggaccccctgtctgagacaaagtgtacactgaagagctttaccgtggagaagggcatctatcagacaagcaatttcagggtgcagcctaccgagtccatcgtgcgctttcccaatatcacaaacctgtgcccttttggcgaggtgttcaacgccaccagattcgccagcgtgtacgcctggaatcggaagagaatctccaactgcgtggccgactattctgtgctgtacaactccgcctctttcagcacctttaagtgctatggcgtgtctcccacaaagctgaatgatctgtgctttaccaacgtgtacgccgatagcttcgtgatcaggggagacgaagtgagacagatcgcaccaggacagacaggaaagatcgcagactacaattataagctgcctgacgatttcaccggctgcgtgatcgcctggaactccaacaatctggattctaaagtgggcggcaactacaattatctgtacaggctgtttcgcaagtccaatctgaagccattcgagcgggacatctccacagagatctaccaggccggctctaccccctgcaatggcgtgccgggctttaactgttatttccctctgcagtcttacggcttccagccaacaaacggcgtgggctatcagccctacagagtggtggtgctgtcctttgagctgctgcacgcaccagcaacagtgtgcggcccaaagaagtctaccaatctggtgaagaacaagtgcgtgaacttcaacttcaacggactgaccggcacaggcgtgctgaccgagagcaataagaagttcctgccttttcagcagttcggcagggacatcgcagataccacagacgccgtgcgcgaccctcagaccctggagatcctggacatcacaccatgcagcttcggcggcgtgtccgtgatcacaccaggcaccaatacatccaaccaggtggccgtgctgtatcaggacgtgaattgtaccgaggtgcccgtggcaatccacgcagatcagctgacccctacatggcgggtgtactctaccggcagcaacgtgttccagacaagagccggatgcctgatcggagcagagcacgtgaacaatagctatgagtgcgacatccctatcggcgccggcatctgtgccagctaccagacccagacaaactccccatctggagcaggctcccaccatcaccatcaccatcaccatcaccactga

SEQ ID NO: 4192 - DNA, 2148 bp, Artificial Sequence
  Description of Artificial Sequence: Synthetic polynucleotide
atgggcatcctgccaagcccaggaatgcccgccctgctgtctctggtgagcctgctgtccgtgctgctgatgggatgcgtggcagagacaggcacacagtgcgtgaacctgaccacaaggacccagctgccccctgcctataccaattctttcacacggggcgtgtactatcccgacaaggtgtttagaagctccgtgctgcactccacacaggatctgtttctgcctttcttttctaacgtgacctggttccacgccatccacgggtccggcaccaatggcacaaagcggttcgacaatcccgtgctgccttttaacgatggcgtgtacttcgccagcaccgagaagtccaacatcatcagaggctggatctttggcaccacactggactctaagacacagagcctgctgatcgtgaacaatgccaccaacgtggtgatcaaggtgtgcgagttccagttttgtaatgatccattcctgggcgtgtactatcacaagaacaataagtcctggatggagtctgagtttcgcgtgtattctagcgccaacaattgcacatttgagtacgtgagccagcccttcctgatggacctggagggcaagcagggcaatttcaagaacctgagggagttcgtgtttaagaatatcgatggctacttcaagatctacagcaagcacaccccaatcaacctggtgcgcgacctgccacagggattctccgccctggagccactggtggatctgcccatcggcatcaacatcacccggtttcagacactgctggccctgcacagatcctacctgacaccaggcgactcctctagcggatggaccgcaggagctgccgcctactatgtgggctatctgcagccccggaccttcctgctgaagtacaacgagaatggcaccatcacagacgcagtggattgcgccctggaccccctgtctgagacaaagtgtacactgaagagctttaccgtggagaagggcatctatcagacaagcaatttcagggtgcagcctaccgagtccatcgtgcgctttcccaatatcacaaacctgtgcccttttggcgaggtgttcaacgccaccagattcgccagcgtgtacgcctggaatcggaagagaatctccaactgcgtggccgactattctgtgctgtacaactccgcctctttcagcacctttaagtgctatggcgtgtctcccacaaagctgaatgatctgtgctttaccaacgtgtacgccgatagcttcgtgatcaggggagacgaagtgagacagatcgcaccaggacagacaggaaagatcgcagactacaattataagctgcctgacgatttcaccggctgcgtgatcgcctggaactccaacaatctggattctaaagtgggcggcaactacaattatctgtacaggctgtttcgcaagtccaatctgaagccattcgagcgggacatctccacagagatctaccaggccggctctaccccctgcaatggcgtggagggctttaactgttatttccctctgcagtcttacggcttccagccaacaaacggcgtgggctatcagccctacagagtggtggtgctgtcctttgagctgctgcacgcaccagcaacagtgtgcggcccaaagaagtctaccaatctggtgaagaacaagtgcgtgaacttcaacttcaacggactgaccggcacaggcgtgctgaccgagagcaataagaagttcctgccttttcagcagttcggcagggacatcgcagataccacagacgccgtgcgcgaccctcagaccctggagatcctggacatcacaccatgcagcttcggcggcgtgtccgtgatcacaccaggcaccaatacatccaaccaggtggccgtgctgtatcaggacgtgaattgtaccgaggtgcccgtggcaatccacgcagatcagctgacccctacatggcgggtgtactctaccggcagcaacgtgttccagacaagagccggatgcctgatcggagcagagcacgtgaacaatagctatgagtgcgacatccctatcggcgccggcatctgtgccagctaccagacccagacaaactccccatctggagcaggctcccaccatcaccatcaccatcaccatcaccactga

SEQ ID NO: 4193 - DNA, 2148 bp, Artificial Sequence
  Description of Artificial Sequence: Synthetic polynucleotide
atgggcatcctgccaagcccaggaatgcccgccctgctgtctctggtgagcctgctgtccgtgctgctgatgggatgcgtggcagagacaggcacacagtgcgtgaacctgaccacaaggacccagctgccccctgcctataccaattctttcacacggggcgtgtactatcccgacaaggtgtttagaagctccgtgctgcactccacacaggatctgtttctgcctttcttttctaacgtgacctggttccacgccatccacgtgtccggcaccaatggcacaaagcggttcgacaatcccgtgctgccttttaacgatggcgtgtacttcgccagcaccgagaagtccaacatcatcagaggctggatctttggcaccacactggactctaagacacagagcctgctgatcgtgaacaatgccaccaacgtggtgatcaaggtgtgcgagttccagttttgtaatgatccattcctgggcgtgtactatcacaagaacaataagtcctggatggagtctgagtttcgcgtgtattctagcgccaacaattgcacatttgagtacgtggttcagcccttcctgatggacctggagggcaagcagggcaatttcaagaacctgagggagttcgtgtttaagaatatcgatggctacttcaagatctacagcaagcacaccccaatcaacctggtgcgcgacctgccacagggattctccgccctggagccactggtggatctgcccatcggcatcaacatcacccggtttcagacactgctggccctgcacagatcctacctgacaccaggcgactcctctagcggatggaccgcaggagctgccgcctactatgtgggctatctgcagccccggaccttcctgctgaagtacaacgagaatggcaccatcacagacgcagtggattgcgccctggaccccctgtctgagacaaagtgtacactgaagagctttaccgtggagaagggcatctatcagacaagcaatttcagggtgcagcctaccgagtccatcgtgcgctttcccaatatcacaaacctgtgcccttttggcgaggtgttcaacgccaccagattcgccagcgtgtacgcctggaatcggaagagaatctccaactgcgtggccgactattctgtgctgtacaactccgcctctttcagcacctttaagtgctatggcgtgtctcccacaaagctgaatgatctgtgctttaccaacgtgtacgccgatagcttcgtgatcaggggagacgaagtgagacagatcgcaccaggacagacaggaaagatcgcagactacaattataagctgcctgacgatttcaccggctgcgtgatcgcctggaactccaacaatctggattctaaagtgggcggcaactacaattatctgtacaggctgtttcgcaagtccaatctgaagccattcgagcgggacatctccacagagatctaccaggccggctctaccccctgcaatggcgtggagggctttaactgttatttccctctgcagtcttacggcttccagccaacaaacggcgtgggctatcagccctacagagtggtggtgctgtcctttgagctgctgcacgcaccagcaacagtgtgcggcccaaagaagtctaccaatctggtgaagaacaagtgcgtgaacttcaacttcaacggactgaccggcacaggcgtgctgaccgagagcaataagaagttcctgccttttcagcagttcggcagggacatcgcagataccacagacgccgtgcgcgaccctcagaccctggagatcctggacatcacaccatgcagcttcggcggcgtgtccgtgatcacaccaggcaccaatacatccaaccaggtggccgtgctgtatcaggacgtgaattgtaccgaggtgcccgtggcaatccacgcagatcagctgacccctacatggcgggtgtactctaccggcagcaacgtgttccagacaagagccggatgcctgatcggagcagagcacgtgaacaatagctatgagtgcgacatccctatcggcgccggcatctgtgccagctaccagacccagacaaactccccatctggagcaggctcccaccatcaccatcaccatcaccatcaccactga

SEQ ID NO: 4194 - DNA, 2148 bp, Artificial Sequence
  Description of Artificial Sequence: Synthetic polynucleotide
atgggcatcctgccaagcccaggaatgcccgccctgctgtctctggtgagcctgctgtccgtgctgctgatgggatgcgtggcagagacaggcacacagtgcgtgaacctgaccacaaggacccagctgccccctgcctataccaattctttcacacggggcgtgtactatcccgacaaggtgtttagaagctccgtgctgcactccacacaggatctgtttctgcctttcttttctaacgtgacctggttccacgccatccacgtgtccggcaccaatggcacaaagcggttcgacaatcccgtgctgccttttaacgatggcgtgtacttcgccagcaccgagaagtccaacatcatcagaggctggatctttggcaccacactggactctaagacacagagcctgctgatcgtgaacaatgccaccaacgtggtgatcaaggtgtgcgagttccagttttgtaatgatccattcctgggcgtgtactatcacaagaacaataagtcctggatggagtctgagtttcgcgtgtattctagcgccaacaattgcacatttgagtacgtgagccagcccttcctgatggacctggagggcaagcagggcaatttcaagaacctgagggagttcgtgtttaagaatatcgatggctacttcaagatctacagcaagcacaccccaatcaacctggtgcgcgacctgccacagggattctccgccctggagccactggtggatctgcccatcggcatcaacatcacccggtttcagacactgctggccctgcacagatcctacctgacaccaggcgactcctctagcggatggaccgcaggagctgccgcctactatgtgggctatctgcagccccggaccttcctgctgaagtacaacgagaatggcaccatcacagacgcagtggattgcgccctggaccccctgtctgagacaaagtgtacactgaagagctttaccgtggagaagggcatctatcagacaagcaatttcagggtgcagcctaccgagtccatcgtgcgctttcccaatatcacaaacctgtgcccttttggcgaggtgttcaacgccaccagattcgccagcgtgtacgcctggaatcggaagagaatctccaactgcgtggccgactattctgtgctgtacaactccgcctctttcagcacctttaagtgctatggcgtgtctcccacaaagctgaatgatctgtgctttaccaacgtgtacgccgatagcttcgtgatcaggggagacgaagtgagacagatcgcaccaggacagacaggaaagatcgcagactacaattataagctgcctgacgatttcaccggctgcgtgatcgcctggaactccaacaatctggattctaaagtgggcggcaactacaattatctgtacaggctgtttcgcaagtccaatctgaagccattcgagcgggacatctccacagagatctaccaggccggctctaccccctgcaatggcgtggagggctttaactgttatttccctctgcagtcttacggcttccagccaacaaacggcgtgggctatcagccctacagagtggtggtgctgtcctttgagctgctgcacgcaccagcaacagtgtgcggcccaaagaagtctaccaatctgacgaagaacaagtgcgtgaacttcaacttcaacggactgaccggcacaggcgtgctgaccgagagcaataagaagttcctgccttttcagcagttcggcagggacatcgcagataccacagacgccgtgcgcgaccctcagaccctggagatcctggacatcacaccatgcagcttcggcggcgtgtccgtgatcacaccaggcaccaatacatccaaccaggtggccgtgctgtatcaggacgtgaattgtaccgaggtgcccgtggcaatccacgcagatcagctgacccctacatggcgggtgtactctaccggcagcaacgtgttccagacaagagccggatgcctgatcggagcagagcacgtgaacaatagctatgagtgcgacatccctatcggcgccggcatctgtgccagctaccagacccagacaaactccccatctggagcaggctcccaccatcaccatcaccatcaccatcaccactga

SEQ ID NO: 4195 - DNA, 2148 bp, Artificial Sequence
  Description of Artificial Sequence: Synthetic polynucleotide
atgggcatcctgccaagcccaggaatgcccgccctgctgtctctggtgagcctgctgtccgtgctgctgatgggatgcgtggcagagacaggcacacagtgcgtgaacctgaccacaaggacccagctgccccctgcctataccaattctttcacacggggcgtgtactatcccgacaaggtgtttagaagctccgtgctgcactccacacaggatctgtttctgcctttcttttctaacgtgacctggttccacgccatccacgtgtccggcaccaatggcacaaagcggttcgacaatcccgtgctgccttttaacgatggcgtgtacttcgccagcaccgagaagtccaacatcatcagaggctggatctttggcaccacactggactctaagacacagagcctgctgatcgtgaacaatgccaccaacgtggtgatcaaggtgtgcgagttccagttttgtaatgatccattcctgggcgtgtactatcacaagaacaataagtcctggatggagtctgagtttcgcgtgtattctagcgccaacaattgcacatttgagtacgtgagccagcccttcctgatggacctggagggcaagcagggcaatttcaagaacctgagggagttcgtgtttaagaatatcgatggctacttcaagatctacagcaagcacaccccaatcaacctggtgcgcgacctgccacagggattctccgccctggagccactggtggatctgcccatcggcatcaacatcacccggtttcagacactgctggccctgcacagatcctacctgacaccaggcgactcctctagcggatggaccgcaggagctgccgcctactatgtgggctatctgcagccccggaccttcctgctgaagtacaacgagaatggctttatcacagacgcagtggattgcgccctggaccccctgtctgagacaaagtgtacactgaagagctttaccgtggagaagggcatctatcagacaagcaatttcagggtgcagcctaccgagtccatcgtgcgctttcccaatatcacaaacctgtgcccttttggcgaggtgttcaacgccaccagattcgccagcgtgtacgcctggaatcggaagagaatctccaactgcgtggccgactattctgtgctgtacaactccgcctctttcagcacctttaagtgctatggcgtgtctcccacaaagctgaatgatctgtgctttaccaacgtgtacgccgatagcttcgtgatcaggggagacgaagtgagacagatcgcaccaggacagacaggaaagatcgcagactacaattataagctgcctgacgatttcaccggctgcgtgatcgcctggaactccaacaatctggattctaaagtgggcggcaactacaattatctgtacaggctgtttcgcaagtccaatctgaagccattcgagcgggacatctccacagagatctaccaggccggctctaccccctgcaatggcgtggagggctttaactgttatttccctctgcagtcttacggcttccagccaacaaacggcgtgggctatcagccctacagagtggtggtgctgtcctttgagctgctgcacgcaccagcaacagtgtgcggcccaaagaagtctaccaatctggtgaagaacaagtgcgtgaacttcaacttcaacggactgaccggcacaggcgtgctgaccgagagcaataagaagttcctgccttttcagcagttcggcagggacatcgcagataccacagacgccgtgcgcgaccctcagaccctggagatcctggacatcacaccatgcagcttcggcggcgtgtccgtgatcacaccaggcaccaatacatccaaccaggtggccgtgctgtatcaggacgtgaattgtaccgaggtgcccgtggcaatccacgcagatcagctgacccctacatggcgggtgtactctaccggcagcaacgtgttccagacaagagccggatgcctgatcggagcagagcacgtgaacaatagctatgagtgcgacatccctatcggcgccggcatctgtgccagctaccagacccagacaaactccccatctggagcaggctcccaccatcaccatcaccatcaccatcaccactga

SEQ ID NO: 4196 - DNA, 2148 bp, Artificial Sequence
  Description of Artificial Sequence: Synthetic polynucleotide
atgggcatcctgccaagcccaggaatgcccgccctgctgtctctggtgagcctgctgtccgtgctgctgatgggatgcgtggcagagacaggcacacagtgcgtgaacctgaccacaaggacccagctgccccctgcctataccaattctttcacacggggcgtgtactatcccgacaaggtgtttagaagctccgtgctgcactccacacaggatctgtttctgcctttcttttctaacgtgacctggttccacgccatccacgtgtccggcaccaatggcacaaagcggttcgacaatcccgtgctgccttttaacgatggcgtgtacttcgccagcaccgagaagtccaacatcatcagaggctggatctttggcaccacactggactctaagacacagagcctgctgatcgtgaacaatgccaccaacgtggtgatcaaggtgtgcgagttccagttttgtaatgatccattcctgggcgtgtactatcacaagaacaataagtcctggatggagtctgagtttcgcgtgtattctagcgccaacaattgcacatttgagtacgtgagccagcccttcctgatggacctggagggcaagcagggcaatttcaagaacctgagggagttcgtgtttaagaatatcgatggctacttcaagatctacagcaagcacaccccaatcaacctggtgcgcgacctgccacagggattctccgccctggagccactggtggatctgcccatcggcatcaacatcacccggtttcagacactgctggccctgcacagatcctacctgacaccaggcgactcctctagcggatggaccgcaggagctgccgcctactatgtgggctatctgcagccccggaccttcctgctgaagtacaacgagaatggcaccatcacagacgcagtggattgcgccctggaccccctgtctgagacaaagtgtacactgaagagctttaccgtggagaagggcatctatcagacaagcaatttcagggtgcagcctaccgagtccatcgtgcgctttcccaatatcacaaacctgtgcccttttggcgaggtgttcaacgccaccagattcgccagcgtgtacgcctggaatcggaagagaatctccaactgcgtggccgactattctgtgctgtacaactccgcctctttcagcacctttaagtgctatggcgtgtctcccacaaagctgaatgatctgtgctttaccaacgtgtacgccgatagcttcgtgatcaggggagacgaagtgagacagatcgcaccaggacagacaggaaagatcgcagactacaattataagctgcctgacgatttcaccggctgcgtgatcgcctggaactccaacaatctggattctaaagtgggcggcaactacaattatctgtacaggctgtttcgcaagtccaatctgaagccattcgagcgggacatctccacagagatctaccaggccggcgggaccccctgcaatggcgtggagggctttaactgttatttccctctgcagtcttacggcttccagccaacaaacggcgtgggctatcagccctacagagtggtggtgctgtcctttgagctgctgcacgcaccagcaacagtgtgcggcccaaagaagtctaccaatctggtgaagaacaagtgcgtgaacttcaacttcaacggactgaccggcacaggcgtgctgaccgagagcaataagaagttcctgccttttcagcagttcggcagggacatcgcagataccacagacgccgtgcgcgaccctcagaccctggagatcctggacatcacaccatgcagcttcggcggcgtgtccgtgatcacaccaggcaccaatacatccaaccaggtggccgtgctgtatcaggacgtgaattgtaccgaggtgcccgtggcaatccacgcagatcagctgacccctacatggcgggtgtactctaccggcagcaacgtgttccagacaagagccggatgcctgatcggagcagagcacgtgaacaatagctatgagtgcgacatccctatcggcgccggcatctgtgccagctaccagacccagacaaactccccatctggagcaggctcccaccatcaccatcaccatcaccatcaccactga

SEQ ID NO: 4197 - DNA, 2148 bp, Artificial Sequence
  Description of Artificial Sequence: Synthetic polynucleotide
atgggcatcctgccaagcccaggaatgcccgccctgctgtctctggtgagcctgctgtccgtgctgctgatgggatgcgtggcagagacaggcacacagtgcgtgaacctgaccacaaggacccagctgccccctgcctataccaattctttcacacggggcgtgtactatcccgacaaggtgtttagaagctccgtgctgcactccacacaggatctgtttctgcctttcttttctaacgtgacctggttccacgccatccacgtgtccggcaccaatggcacaaagcggttcgacaatcccgtgctgccttttaacgatggcgtgtacttcgccagcaccgagaagtccaacatcatcagaggctggatctttggcaccacactggactctaagacacagagcctgctgatcgtgaacaatgccaccaacgtggtgatcaaggtgtgcgagttccagttttgtaatgatccattcctgggcgtgtactatcacaagaacaataagtcctggatggagtctgagtttcgcgtgtattctagcgccaacaattgcacatttgagtacgtgagccagcccttcctgatggacctggagggcaagcagggcaatttcaagaacctgagggagttcgtgtttaagaatatcgatggctacttcaagatctacagcaagcacaccccaatcaacctggtgcgcgacctgccacagggattctccgccctggagccactggtggatctgcccatcggcatcaacatcacccggtttcagacactgctggccctgcacagatcctacctgacaccaggcgactcctctagcggatggaccgcaggagctgccgcctactatgtgggctatctgcagccccggaccttcctgctgaagtacaacgagaatggcaccatcacagacgcagtggattgcgccctggaccccctgtctgagacaaagtgtacactgaagagctttaccgtggagaagggcatctatcagacaagcaatttcagggtgcagcctaccgagtccatcgtgcgctttcccaatatcacaaacctgtgcccttttggcgaggtgttcaacgccaccagattcgccagcgtgtacgcctggaatcggaagagaatctccaactgcgtggccgactattctgtgctgtacaactccgcctctttcagcacctttaagtgctatggcgtgtctcccacaaagctgaatgatctgtgctttaccaacgtgtacgccgatagcttcgtgatcaggggagacgaagtgagacagatcgcaccaggacagacaggaattatcgcagactacaattataagctgcctgacgatttcaccggctgcgtgatcgcctggaactccaacaatctggattctaaagtgggcggcaactacaattatctgtacaggctgtttcgcaagtccaatctgaagccattcgagcgggacatctccacagagatctaccaggccggctctaccccctgcaatggcgtggagggctttaactgttatttccctctgcagtcttacggcttccagccaacaaacggcgtgggctatcagccctacagagtggtggtgctgtcctttgagctgctgcacgcaccagcaacagtgtgcggcccaaagaagtctaccaatctggtgaagaacaagtgcgtgaacttcaacttcaacggactgaccggcacaggcgtgctgaccgagagcaataagaagttcctgccttttcagcagttcggcagggacatcgcagataccacagacgccgtgcgcgaccctcagaccctggagatcctggacatcacaccatgcagcttcggcggcgtgtccgtgatcacaccaggcaccaatacatccaaccaggtggccgtgctgtatcaggacgtgaattgtaccgaggtgcccgtggcaatccacgcagatcagctgacccctacatggcgggtgtactctaccggcagcaacgtgttccagacaagagccggatgcctgatcggagcagagcacgtgaacaatagctatgagtgcgacatccctatcggcgccggcatctgtgccagctaccagacccagacaaactccccatctggagcaggctcccaccatcaccatcaccatcaccatcaccactga

SEQ ID NO: 4198 - DNA, 2148 bp, Artificial Sequence
  Description of Artificial Sequence: Synthetic polynucleotide
atgggcatcctgccaagcccaggaatgcccgccctgctgtctctggtgagcctgctgtccgtgctgctgatgggatgcgtggcagagacaggcacacagtgcgtgaacctgaccacaaggacccagctgccccctgcctataccaattctttcacacggggcgtgtactatcccgacaaggtgtttagaagctccgtgctgcactccacacaggatctgtttctgcctttcttttctaacgtgacctggttccacgccatccacgtgtccggcaccaatggcacaaagcggttcgacaatcccgtgctgccttttaacgatggcgtgtacttcgccagcaccgagaagtccaacatcatcagaggctggatctttggcaccacactggactctaagacacagagcctgctgatcgtgaacaatgccaccaacgtggtgatcaaggtgtgcgagttccagttttgtaatgatccattcctgggcgtgtactatcaaaagaacaataagtcctggatggagtctgagtttcgcgtgtattctagcgccaacaattgcacatttgagtacgtgagccagcccttcctgatggacctggagggcaagcagggcaatttcaagaacctgagggagttcgtgtttaagaatatcgatggctacttcaagatctacagcaagcacaccccaatcaacctggtgcgcgacctgccacagggattctccgccctggagccactggtggatctgcccatcggcatcaacatcacccggtttcagacactgctggccctgcacagatcctacctgacaccaggcgactcctctagcggatggaccgcaggagctgccgcctactatgtgggctatctgcagccccggaccttcctgctgaagtacaacgagaatggcaccatcacagacgcagtggattgcgccctggaccccctgtctgagacaaagtgtacactgaagagctttaccgtggagaagggcatctatcagacaagcaatttcagggtgcagcctaccgagtccatcgtgcgctttcccaatatcacaaacctgtgcccttttggcgaggtgttcaacgccaccagattcgccagcgtgtacgcctggaatcggaagagaatctccaactgcgtggccgactattctgtgctgtacaactccgcctctttcagcacctttaagtgctatggcgtgtctcccacaaagctgaatgatctgtgctttaccaacgtgtacgccgatagcttcgtgatcaggggagacgaagtgagacagatcgcaccaggacagacaggaaagatcgcagactacaattataagctgcctgacgatttcaccggctgcgtgatcgcctggaactccaacaatctggattctaaagtgggcggcaactacaattatctgtacaggctgtttcgcaagtccaatctgaagccattcgagcgggacatctccacagagatctaccaggccggctctaccccctgcaatggcgtggagggctttaactgttatttccctctgcagtcttacggcttccagccaacaaacggcgtgggctatcagccctacagagtggtggtgctgtcctttgagctgctgcacgcaccagcaacagtgtgcggcccaaagaagtctaccaatctggtgaagaacaagtgcgtgaacttcaacttcaacggactgaccggcacaggcgtgctgaccgagagcaataagaagttcctgccttttcagcagttcggcagggacatcgcagataccacagacgccgtgcgcgaccctcagaccctggagatcctggacatcacaccatgcagcttcggcggcgtgtccgtgatcacaccaggcaccaatacatccaaccaggtggccgtgctgtatcaggacgtgaattgtaccgaggtgcccgtggcaatccacgcagatcagctgacccctacatggcgggtgtactctaccggcagcaacgtgttccagacaagagccggatgcctgatcggagcagagcacgtgaacaatagctatgagtgcgacatccctatcggcgccggcatctgtgccagctaccagacccagacaaactccccatctggagcaggctcccaccatcaccatcaccatcaccatcaccactga

SEQ ID NO: 4199 - DNA, 2148 bp, Artificial Sequence
  Description of Artificial Sequence: Synthetic polynucleotide
atgggcatcctgccaagcccaggaatgcccgccctgctgtctctggtgagcctgctgtccgtgctgctgatgggatgcgtggcagagacaggcacacagtgcgtgaacctgaccacaaggacccagctgccccctgcctataccaattctttcacacggggcgtgtactatcccgacaaggtgtttagaagctccgtgctgcactccacacaggatctgtttctgcctttcttttctaacgtgacctggttccacgccatccacgtgtccggcaccaatggcacaaagcggttcgacaatcccgtgctgccttttaacgatggcgtgtacttcgccagcaccgagaagtccaacatcatcagaggctggatctttggcaccacactggactctaagacacagagcctgctgatcgtgaacaatgccaccaacgtggtgatcaaggtgtgcgagttccagttttgtaatgatccattcctgggcgtgtactatcacaagaacaataagtcctggatggagtctgagtttcgcgtgtattctagcgccaacaattgcacatttgagtacgtgagccagcccttcctgatggacctggagggcaagcagggcaatttcaagaacctgagggagttcgtgtttaagaatatcgatggctacttcaagatctacagcaagcacaccccaatcaacctggtgcgcgacctgccacagggattctccgccctggagccactggtggatctgcccatcggcatcaacatcacccggtttcagacactgctggccctgcacagatcctacctgacaccaggcgactcctctagcggatggaccgcaggagctgccgcctactatgtgggctatctgcagccccggaccttcctgctgaagtacaacgagaatggcaccatcacagacgcagtggattgcgccctggaccccctgtctgagacaaagtgtacactgaagagctttaccgtggagaagggcatctatcagacaagcaatttcagggtgcagcctaccgagtccatcgtgcgctttcccaatatcacaaacctgtgcccttttggcgaggtgttcaacgccaccagattcgccagcgtgtacgcctggaatcggaagagaatctccaactgcgtggccgactattctgtgctgtacaactccgcctctttcagcacctttaagtgctatggcgtgtctcccacaaagctgaatgatctgtgctttaccaacgtgtacgccgatagcttcgtgatcaggggagacgaagtgagacagatcgcaccaggacagacaggaaagatcgcagactacaattataagctgcctgacgatttcaccggctgcgtgatcgcctggaactccaacaatctggattctaaagtgggcggcaactacaattatctgtacaggctgtttcgcaagtccaatctgaagccattcgagcgggacatctccacagagatctaccaggccggctctaccccctgcaatggcgtggagggctttaactgttatccgcctctgcagtcttacggcttccagccaacaaacggcgtgggctatcagccctacagagtggtggtgctgtcctttgagctgctgcacgcaccagcaacagtgtgcggcccaaagaagtctaccaatctggtgaagaacaagtgcgtgaacttcaacttcaacggactgaccggcacaggcgtgctgaccgagagcaataagaagttcctgccttttcagcagttcggcagggacatcgcagataccacagacgccgtgcgcgaccctcagaccctggagatcctggacatcacaccatgcagcttcggcggcgtgtccgtgatcacaccaggcaccaatacatccaaccaggtggccgtgctgtatcaggacgtgaattgtaccgaggtgcccgtggcaatccacgcagatcagctgacccctacatggcgggtgtactctaccggcagcaacgtgttccagacaagagccggatgcctgatcggagcagagcacgtgaacaatagctatgagtgcgacatccctatcggcgccggcatctgtgccagctaccagacccagacaaactccccatctggagcaggctcccaccatcaccatcaccatcaccatcaccactga

SEQ ID NO: 4200 - DNA, 2148 bp, Artificial Sequence
  Description of Artificial Sequence: Synthetic polynucleotide
atgggcatcctgccaagcccaggaatgcccgccctgctgtctctggtgagcctgctgtccgtgctgctgatgggatgcgtggcagagacaggcacacagtgcgtgaacctgaccacaaggacccagctgccccctgcctataccaattctttcacacggggcgtgtactatcccgacaaggtgtttagaagctccgtgctgcactccacacaggatctgtttctgcctttcttttctaacgtgacctggttccacgcctaccacgtgtccggcaccaatggcacaaagcggttcgacaatcccgtgctgccttttaacgatggcgtgtacttcgccagcaccgagaagtccaacatcatcagaggctggatctttggcaccacactggactctaagacacagagcctgctgatcgtgaacaatgccaccaacgtggtgatcaaggtgtgcgagttccagttttgtaatgatccattcctgggcgtgtactatcacaagaacaataagtcctggatggagtctgagtttcgcgtgtattctagcgccaacaattgcacatttgagtacgtgagccagcccttcctgatggacctggagggcaagcagggcaatttcaagaacctgagggagttcgtgtttaagaatatcgatggctacttcaagatctacagcaagcacaccccaatcaacctggtgcgcgacctgccacagggattctccgccctggagccactggtggatctgcccatcggcatcaacatcacccggtttcagacactgctggccctgcacagatcctacctgacaccaggcgactcctctagcggagaaaccgcaggagctgccgcctactatgtgggctatctgcagccccggaccttcctgctgaagtacaacgagaatggcaccatcacagacgcagtggattgcgccctggaccccctgtctgagacaaagtgtacactgaagagctttaccgtggagaagggcatctatcagacaagcaatttcagggtgcagcctaccgagtccatcgtgcgctttcccaatatcacaaacccgtgcccttttggcgaggtgttcaacgccaccagattcgccagcgtgtacgcctggaatcggaagagaatctccaactgcgtggccgactattctgtgctgtacaactccgcctctttcagcacctttaagtgctatggcgtgtctcccacaaagctgaatgatctgtgctttaccaacgtgtacgccgatagcttcgtgatcaggggagacgaagtgagacagatcgcaccaggacagacaggaaagatcgcagactacaattataagctgcctgacgatttcaccggctgcgtgatcgcctggaactccaacaatctggattctaaagtgggcggcaactacaattatctgtacaggctgtttcgcaagtccaatctgaagccattcgagcgggacatctccacagagatctaccaggccggctctaccccctgcaatggcgtggagggctttaactgttatttccctctgcagtcttacggcttccagccaacaaacggcccgggccaacagccctacagagtggtggtgctgtcctttgagctgctgcacgcaccagcaacagtgtgcggcccaaagaagtctaccaatctggtgaagaacaagtgcgtgaacttcaacttcaacggactgaccggcacaggcgtgctgaccgagagcaataagaagttcctgccttttcagcagttcggcagggacatcgcagataccacagacgccgtgcgcgaccctcagaccctggagatcctggacatcacaccatgcagcttcggcggcgtgtccgtgatcacaccaggcaccaatacatccaaccaggtggccgtgctgtatcaggacgtgaattgtaccgaggtgcccgatgcaatccacgcagatcagctgacccctacatggcgggtgtactctaccggcagcaacgtgttccagacaagagccggatgcctgatcggagcagagcacgtgaacaatagctatgagtgcgacatccctatcggcgccggcatctgtgccagctaccagacccagacaaactccccatctggagcaggctcccaccatcaccatcaccatcaccatcaccactga

SEQ ID NO: 4201 - DNA, 2148 bp, Artificial Sequence
  Description of Artificial Sequence: Synthetic polynucleotide
atgggcatcctgccaagcccaggaatgcccgccctgctgtctctggtgagcctgctgtccgtgctgctgatgggatgcgtggcagagacaggcacacagtgcgtgaacctgaccacaaggacccagctgccccctgcctataccaattctttcacacggggcgtgtactatcccgacaaggtgtttagaagctccgtgctgcactccacacaggatctgtttctgcctttcttttctaacgtgacctggttccacgccatccacgtgtccggcaccaatggcacaaagcggttcgacaatcccgtgctgccttttaacgatggcgtgtacttcgccagcaccgagaagtccaacatcatcagaggctggatctttggcaccacactggactctaagacacagagcctgctgatcgtgaacaatgccaccaacgtggtgatcaaggtgtgcgagttccagttttgtaatgatccattcctgggcgtgtactatcacaagaacaataagtcctggatggagtctgagtttcgcgtgtattctagcgccaacaattgcacatttgagtacgtgagccagcccttcctgatggacctggagggcaagcagggcaatttcaagaacctgagggagttcgtgtttaagaatatcgatggctacttcaagatctacagcaagcacaccccaatcaacctggtgcgcgacctgccacagggattctccgccctggagccactggtggatctgcccatcggcatcaacatcacccggtttcagacactgctggccctgcacagatcctacctgacaccaggcgactcctctagcggatggaccgcaggagctgccgcctactatgtgggctatctgcagccccggaccttcctgctgaagtacaacgagaatggcaccatcacagacgcagtggattgcgccctggaccccctgtctgagacaaagtgtacactgaagagctttaccgtggagaagggcatctatcagacaagcaatttcagggtgcagcctaccgagtccatcgtgcgctttcccaatatcacaaacctgtgcccttttggcgaggtgttcaacgccaccagattcgccagcgtgtacgcctggaatcggaagagaatctccaactgcgtggccgactattctgtgctgtacaactccgcctctttcagcacctttaagtgctatggcgtgtctcccacaaagctgaatgatctgtgctttaccaacgtgtacgccgatagcttcgtgatcaggggagacgaagtgagacagatcgcaccaggacagacaggaaagatcgcagactacaattataagctgcctgacgatttcaccggctgcgtgatcgcctggaactccaacaatctggattctaaagtgggcggcaactacaattatctgtacaggctgtttcgcaagtccaatctgaagccattcgagcgggacatctccacagaggcgtaccaggccggctctaccccctgcaatggcgtggagggctttaactgttatttccctctgcagtcttacggcttccagccaacaaacggcgtgggctatcagccctacagagtggtggtgctgtcctttgagctgctgcacgcaccagcaacagtgtgcggcccaaagaagtctaccaatctggtgaagaacaagtgcgtgaacttcaacttcaacggactgaccggcacaggcgtgctgaccgagagcaataagaagttcctgccttttcagcagttcggcagggacatcgcagataccacagacgccgtgcgcgaccctcagaccctggagatcctggacatcacaccatgcagcttcggcggcgtgtccgtgatcacaccaggcaccaatacatccaaccaggtggccgtgctgtatcaggacgtgaattgtaccgaggtgcccgtggcaatccacgcagatcagctgacccctacatggcgggtgtactctaccggcagcaacgtgttccagacaagagccggatgcctgatcggagcagagcacgtgaacaatagctatgagtgcgacatccctatcggcgccggcatctgtgccagctaccagacccagacaaactccccatctggagcaggctcccaccatcaccatcaccatcaccatcaccactga

SEQ ID NO: 4202 - DNA, 2148 bp, Artificial Sequence
  Description of Artificial Sequence: Synthetic polynucleotide
atgggcatcctgccaagcccaggaatgcccgccctgctgtctctggtgagcctgctgtccgtgctgctgatgggatgcgtggcagagacaggcacacagtgcgtgaacctgaccacaaggacccagctgccccctgcctataccaattctttcacacggggcgtgtactatcccgacaaggtgtttagaagctccgtgctgcactccacacaggatctgtttctgcctttcttttctaacgtgacctggttccacgccatccacgtgtccggcaccaatggcacaaagcggttcgacaatcccgtgctgccttttaacgatggcgtgtacttcgccagcaccgagaagtccaacatcatcagaggctggatctttggcaccacactggactctaagacacagagcctgctgatcgtgaacaatgccaccaacgtggtgatcaaggtgtgcgagttccagttttgtaatgatccattcctgggcgtgtactatcacaagaacaataagtcctggatggagtctgagtttcgcgtgtattctagcgccaacaattgcacatttgagtacgtgagccagcccttcctgatggacctggagggcaagcagggcaatttcaagaacctgagggagttcgtgtttaagaatatcgatggctacttcaagatctacagcaagcacaccccaatcaacctggtgcgcgacctgccacagggattctccgccctggagccactggtggatctgcccatcggcatcaacatcacccggtttcagacactgctggccctgcacagatcctacctgacaccaggcgactcctctagcggatggaccgcaggagctgccgcctactatgtgggctatctgcagccccggaccttcctgctgaagtacaacgagaatggcaccatcacagacgcagtggattgcgccctggaccccctgtctgagacaaagtgtacactgaagagctttaccgtggagaagggcatctatcagacaagcaatttcagggtgcagcctaccgagtccatcgtgcgctttcccaatatcacaaacctgtgcccttttggcgaggtgttcaacgccaccagattcgccagcgtgtacgcctggaatcggaagagaatctccaactgcgtggccgactattctgtgctgtacaactccgcctctttcagcacctttaagtgctatggcgtgtctcccacaaagctgaatgatctgtgctttgttaacgtgtacgccgatagcttcgtgatcaggggagacgaagtgagacagatcgcaccaggacagacaggaaagatcgcagactacaattataagctgcctgacgatttcaccggctgcgtgatcgcctggaactccaacaatctggattctaaagtgggcggcaactacaattatctgtacaggctgtttcgcaagtccaatctgaagccattcgagcgggacatctccacagagatctaccaggccggctctaccccctgcaatggcgtggagggctttaactgttatttccctctgcagtcttacggcttccagccaacaaacggcgtgggctatcagccctacagagtggtggtgctgtcctttgagctgctgcacgcaccagcaacagtgtgcggcccaaagaagtctaccaatctggtgaagaacaagtgcgtgaacttcaacttcaacggactgaccggcacaggcgtgctgaccgagagcaataagaagttcctgccttttcagcagttcggcagggacatcgcagataccacagacgccgtgcgcgaccctcagaccctggagatcctggacatcacaccatgcagcttcggcggcgtgtccgtgatcacaccaggcaccaatacatccaaccaggtggccgtgctgtatcaggacgtgaattgtaccgaggtgcccgtggcaatccacgcagatcagctgacccctacatggcgggtgtactctaccggcagcaacgtgttccagacaagagccggatgcctgatcggagcagagcacgtgaacaatagctatgagtgcgacatccctatcggcgccggcatctgtgccagctaccagacccagacaaactccccatctggagcaggctcccaccatcaccatcaccatcaccatcaccactga

SEQ ID NO: 4203 - DNA, 2148 bp, Artificial Sequence
  Description of Artificial Sequence: Synthetic polynucleotide
atgggcatcctgccaagcccaggaatgcccgccctgctgtctctggtgagcctgctgtccgtgctgctgatgggatgcgtggcagagacaggcacacagtgcgtgaacctgaccacaaggacccagctgccccctgcctataccaattctttcacacggggcatatactatcccgacaaggtgtttagaagctccgtgctgcactccacacaggatctgtttctgcctttcttttctaacgtgacctggttccacgccatccacggatccggcaccaatggcacaaagcggttcgacaatcccgtgctgccttttaacgatggcgtgtacagtgccgctattgagaagtccaacatcatcagaggctggatctttggcaccacactggactctaagacacagagcctgctgatcgtgaacaatgccaccaacgtggtgatcaaggtgtgcgagttccagttttgtaatgatccacatctgggcgtgtactatcacaagaacaataagtcctggatggagtctgagtttcgcgtgtattctagcgccaacaattgcacatttgagtacgtgagccagcccttcctgatggacctggagggcaagcagggcaatttcaagtggctgagggagttcgtgtttaagaatatcgatggctacttcaagatctacagcaagcacaccccaatcaacctggtgcgcgacctgccacagggattctccccgctggagccactggtggatctgcccatcggcatcaacatcacccggtttttaacagttctggccctgcacagatcctacctgacaccaggcgactcctctagcggatggaccgcaggagctgccgcctactatgtgggctatctgcagccccggaccttcctgctgaagtacaacgagaatggcaccatcacagacgcagtggattgcgccctggaccccctgtctgagacaaagtgtacactgaagagctttaccgtggagaagggcatctatcagacaagcaatttcagggtgcagcctaccgagtccatcgtgcgctttcccaatatcacaaacctgtgcccttttggcgaggtgttcaacgccaccagattcgccagcgtgtacgcctggaatcggaagagaatctccaactgcgtggccgactattctgtgctgtacaactccgcctctttcagcacctttaagtgctatggcgtgtctcccacaaagctgaatgatctgtgctttaccaacgtgtacgccgatagcttcgtgatcaggggagacgaagtgagacagatcgcaccaggacagacaggaaagatcgcagactacaattataagctgcctgacgatttcaccggctgcgtgatcgcctggaactccaacaatctggattctaaagtgggcggcaactacaattatctgtacaggctgtttcgcaagtccaatctgaagccattcgagcgggacatctccacagagatctaccaggccggctctaccccctgcaatggcgtggagggctttaactgttatttccctctgcagtcttacggcttccagccaacaaacggcgtgggctatcagccctacagagtggtggtgctgtcctttgagctgctgcacgcaccagcaacagtgtgcggcccaaagaagtctaccaatctggtgaagaacaagtgcgtgaacttcaacttcaacggactgaccggcacaggcgtgctgaccgagagcaataagaagttcctgccttttcagcagttcggcagggacatcgcagataccacagacgccgtgcgcgaccctcagaccctggagatcctggacatcacaccatgcagcttcggcggcgtgtccgtgatcacaccaggcaccaatacatccaaccaggtggccgtgctgtatcaggacgtgaattgtaccgaggtgcccgtggcaatccacgcagatcagctgacccctacatggcgggtgtactctaccggcagcaacgtgttccagacaagagccggatgcctgatcggagcagagcacgtgaacaatagctatgagtgcgacatccctatcggcgccggcatctgtgccagctaccagacccagacaaactccccatctggagcaggctcccaccatcaccatcaccatcaccatcaccactga

SEQ ID NO: 4204 - DNA, 2148 bp, Artificial Sequence
  Description of Artificial Sequence: Synthetic polynucleotide
atgggcatcctgccaagcccaggaatgcccgccctgctgtctctggtgagcctgctgtccgtgctgctgatgggatgcgtggcagagacaggcacacagtgcgtgaacctgaccacaaggacccagctgccccctgcctataccaattctttcacacggggcgtgtactatcccgacaaggtgtttagaagctccgtgctgcactccacacaggatctgtttctgcctttcttttctaacgtgacctggttccacgccatccacgtgtccggcaccaatggcacaaagcggttcgacaatcccgtgctgccttttaacgatggcgtgtacttcgccagcaccgagaagtccaacatcatcagaggctggatctttggcaccacactggactctaagacacagagcctgctgatcgtgaacaatgccaccaacgtggtgatcaaggtgtgcgagttccagttttgtaatgatccattcctgggcgtgtactatcacaagaacaataagtcctggatggagtctgagtttcgcgtgtattctagcgccaacaattgcacatttgagtacgtgagccagcccttcctgatggacctggagggcaagcaggacaatttcaagaacctgagggagttcgtgtttaagaatatcgatggctacttcaagatctacagcaagcacaccccaatcaacctggtgcgcgacctgccacagggattctccgccctggagccactggtggatctgcccatcggcatcaacatcacccggtttcagacactgctggccctgcacagatcctacctgacaccaggcgactcctctagcggatggaccgcaggagctgccgcctactatgtgggctatctgcagccccggaccttcctgctgaagtacaacgagaatggcaccatcacagacgcagtggattgcgccctggaccccctgtctgagacaaagtgtacactgaagagctttaccgtggagaagggcatctatcagacaagcaatttcagggtgcagcctaccgagtccatcgtgcgctttcccaatatcacaaacctgtgcccttttggcgaggtgttcaacgccaccagattcgccagcgtgtacgcctggaatcggaagagaatctccaactgcgtggccgactattctgtgctgtacaactccgcctctttcagcacctttaagtgctatggcgtgtctcccacaaagctgaatgatctgtgctttaccaacgtgtacgccgatagcttcgtgatcaggggagacgaagtgagacagatcgcaccaggacagacaggaaagatcgcagactacaattataagctgcctgacgatttcaccggctgcgtgatcgcctggaactccaacaatctggattctaaagtgggcggcaactacaattatctgtacaggctgtttcgcaagtccaatctgaagccattcgagcgggacatctccacagagatctaccaggccggctctaccccctgcaatggcgtggagggctttaactgttatttccctctgcagtcttacggcttccagccaacaaacggcgtgggctatcagccctacagagtggtggtgctgtcctttgagctgctgcacgcaccagcaacagtgtgcggcccaaagaagtctaccaatctggtgaagaacaagtgcgtgaacttcaacttcaacggactgaccggcacaggcgtgctgaccgagagcaataagaagttcctgccttttcagcagttcggcagggacatcgcagataccacagacgccgtgcgcgaccctcagaccctggagatcctggacatcacaccatgcagcttcggcggcgtgtccgtgatcacaccaggcaccaatacatccaaccaggtggccgtgctgtatcaggacgtgaattgtaccgaggtgcccgtggcaatccacgcagatcagctgacccctacatggcgggtgtactctaccggcagcaacgtgttccagacaagagccggatgcctgatcggagcagagcacgtgaacaatagctatgagtgcgacatccctatcggcgccggcatctgtgccagctaccagacccagacaaactccccatctggagcaggctcccaccatcaccatcaccatcaccatcaccactga

SEQ ID NO: 4205 - DNA, 2148 bp, Artificial Sequence
  Description of Artificial Sequence: Synthetic polynucleotide
atgggcatcctgccaagcccaggaatgcccgccctgctgtctctggtgagcctgctgtccgtgctgctgatgggatgcgtggcagagacaggcacacagtgcgtgaacctgaccacaaggacccagctgccccctgcctataccaattctttcacacggggcgtgtactatcccgacaaggtgtttagaagctccgtgctgcactccacacaggatctgtttctgcctttcttttctaacgtgacctggttccacgccatccacgtgtccggcaccaatggcacaaagcggttcgacaatcccgtgctgccttttaacgatggcgtgtacttcgccagcaccgagaagtccaacatcatcagaggctggatctttggcaccacactggactctaagacacagagcctgctgatcgtgaacaatgccaccaacgtggtgatcaaggtgtgcgagttccagttttgtaatgatccattcctgggcgtgtactatcacaagaacaataagtcctggatggagtctgagtttcgcgtgtattctagcgccaacaattgcacatttgagtacgtgagccagcccttcctgatggacctggagggcaagcagggcaatttcaagaacctgagggagttcgtgtttaagaatatcgatggctacttcaagatctacagcaagcacaccccaatcaacctggtgcgcgacctgccacagggattctccgccctggagccactggtggatctgcccatcggcatcaacatcacccggtttcagacactgctggccctgcacagatcctacctgacaccaggcgactcctctagcggatggaccgcaggagctgccgcctactatgtgggctatctgcagccccggaccttcctgctgaagtacaacgagaatggcaccatcacagacgcagtggattgcgccctggaccccctgtctgagacaaagtgtacactgaagagctttaccgtggagaagggcatctatcagacaagcaatttcagggtgcagcctaccgagtccatcgtgcgctttcccaatatcacaaacctgtgcccttttggcgaggtgttcaacgccaccagattcgccagcgtgtacgcctggaatcggaagagaatctccaactgcgtggccgactattctgtgctgtacaactccgcctctttcagcacctttaagtgctatggcgtgtctcccacaaagctgaatgatctgtgctttaccaacgtgtacgccgatagcttcgtgatcaggggagacgaagtgagacagatcgcaccaggacagacaggaaagatcgcagactacaattataagctgcctgacgatttcaccggctgcgtgatcgcctggaactccaacaatctggattctaaagtgggcggcaactacaattatctgtacaggctgtttcgcaagtccaatctgaagccattcgagcgggacatctccacagagatctaccaggccggctctaccccctgcaatggcgtggagggctttaactgttatttccctctgcagtcttacggcttccagccaacaaacggcgtgggctatcagccctacagagtggtggtgctgtcctttgagctgctgcacgcaccagcaacagtgtgcggcccaaagaagtctaccaatctggtgaagaacaagtgcgtgaacttcaacttcaacggactgaccggcacaggcgtgctgaccgagagcaataagaagttcctgccttttcagcagttccaaagggacatcgcagataccacagacgccgtgcgcgaccctcagaccctggagatcctggacatcacaccatgcagcttcggcggcgtgtccgtgatcacaccaggcaccaatacatccaaccaggtggccgtgctgtatcaggacgtgaattgtaccgaggtgcccgtggcaatccacgcagatcagctgacccctacatggcgggtgtactctaccggcagcaacgtgttccagacaagagccggatgcctgatcggagcagagcacgtgaacaatagctatgagtgcgacatccctatcggcgccggcatctgtgccagctaccagacccagacaaactccccatctggagcaggctcccaccatcaccatcaccatcaccatcaccactga

SEQ ID NO: 4206 - DNA, 2148 bp, Artificial Sequence
  Description of Artificial Sequence: Synthetic polynucleotide
atgggcatcctgccaagcccaggaatgcccgccctgctgtctctggtgagcctgctgtccgtgctgctgatgggatgcgtggcagagacaggcacacagtgcgtgaacctgaccacaaggacccagctgccccctgcctataccaattctttcacacggggcgtgtactatcccgacaaggtgtttagaagctccgtgctgcactccacacaggatctgtttctgcctttcttttctaacgtgacctggttccacgcctaccacgtgtccggcaccaatggcacaaagcggttcgacaatcccgtgctgccttttaacgatggcgtgtacttcgccagcaccgagaagtccaacatcatcagaggctggatctttggcaccacactggactctaagacacagagcctgctgatcgtgaacaatgccaccaacgtggtgatcaaggtgtgcgagttccagttttgtaatgatccattcctgggcgtgtactatcacaagaacaataagtcctggatggagtctgagtttcgcgtgtattctagcgccaacaattgcacatttgagtaccatagccagcccttcctgatggacctggagggcaagcagggcaatttcaagaacctgagggagttcgtgtttaagaatatcgatggctacttcaagatctacagcaagcacaccccaatcaacctggtgcgcgacctgccacagggattctccgccctggagccactggtggatctgcccatcggcatcaacatcacccggtttcagacactgctggccctgcacagatcctacctgacaccaggcgactcctctagcggagaaaccgcaggagctgccgcctactatgtgggctatctgcagccccggaccttcctgctgaagtacaacgagaatggcaccatcacagacgcagtggattgcgccctggaccccctgtctgagacaaagtgtacactgaagagctttaccgtggagaagggcatctatcagacaagcaatttcagggtgcagcctaccgagtccatcgtgcgctttcccaatatcacaaacccgtgcccttttggcgaggtgttcaacgccaccagattcgccagcgtgtacgcctggaatcggaagagaatctccaactgcgtggccgactattctgtgctgtacaactccgcctctttcagcacctttaagtgctatggcgtgtctcccacaaagctgaatgatctgtgctttaccaacgtgtacgccgatagcttcgtgatcaggggagacgaagtgagacagatcgcaccaggacagacaggaaagatcgcagactacaattataagctgcctgacgatttcaccggctgcgtgatcgcctggaactccaacaatctggattctaaagtgggcggcaactacaattatctgtacaggctgtttcgcaagtccaatctgaagccattcgagcgggacatctccacagagatctaccaggccggctctaccccctgcaatggcgtggagggctttaactgttatttccctctgcagtcttacggcttccagccaacaaacggcgtgggccaacagccctacagagtggtggtgctgtcctttgagctgctgcacgcaccagcaacagtgtgcggcccaaagaagtctaccaatctggtgaagaacaagtgcgtgaacttcaacttcaacggactgaccggcacaggcgtgctgaccgagagcaataagaagttcctgccttttcagcagttcggcagggacatcgcagataccacagacgccgtgcgcgaccctcagaccctggagatcctggacatcacaccatgcagcttcggcggcgtgtccgtgatcacaccaggcaccaatacatccaaccaggtggccgtgctgtatcaggacgtgaattgtaccgaggtgcccgatgcaatccacgcagatcagctgacccctacatggcgggtgtactctaccggcagcaacgtgttccagacaagagccggatgcctgatcggagcagagcacgtgaacaatagctatgagtgcgacatccctatcggcgccggcatctgtgccagctaccagacccagacaaactccccatctggagcaggctcccaccatcaccatcaccatcaccatcaccactga

SEQ ID NO: 4207 - DNA, 2148 bp, Artificial Sequence
  Description of Artificial Sequence: Synthetic polynucleotide
atgggcatcctgccaagcccaggaatgcccgccctgctgtctctggtgagcctgctgtccgtgctgctgatgggatgcgtggcagagacaggcacacagtgcgtgaacctgaccacaaggacccagctgccccctgcctataccaattctttcacacggggcgtgtactatcccgacaaggtgtttagaagctccgtgctgcactccacacaggatctgtttctgcctttcttttctaacgtgacctggttccacgccatccacgtgtccggcaccaatggcacaaagcggttcgacaatcccgtgctgccttttaacgatggcgtgtacttcgccagcaccgagaagtccaacatcatcagaggctggatctttggcaccacactggactctaagacacagagcctgctgatcgtgaacaatgccaccaacgtggtgatcaaggtgtgcgagttccagttttgtaatgatccattcctgggcgtgtactatcacaagaacaataagtcctggatggagtctgagtttcgcgtgtattctagcgccaacaattgcacatttgagtacgtgagccagcccttcctgatggacctggagggcaagcagggcaatttcaagaacctgagggagttcgtgtttaagaatatcgatggctacttcaagatctacagcaagcacaccccaatcaacctggtgcgcgacctgccacagggattctccgccctggagccactggtggatctgcccatcggcatcaacatcacccggtttcagttcctgctggccctgcacagatcctacctgacaccaggcgactcctctagcggatggaccgcaggagctgccgcctactatgtgggctatctgcagccccggaccttcctgctgaagtacaacgagaatggcaccatcacagacgcagtggattgcgccctggaccccctgtctgagacaaagtgtacactgaagagctttaccgtggagaagggcatctatcagacaagcaatttcagggtgcagcctaccgagtccatcgtgcgctttcccaatatcacaaacctgtgcccttttggcgaggtgttcaacgccaccagattcgccagcgtgtacgcctggaatcggaagagaatctccaactgcgtggccgactattctgtgctgtacaactccgcctctttcagcacctttaagtgctatggcgtgtctcccacaaagctgaatgatctgtgctttaccaacgtgtacgccgatagcttcgtgatcaggggagacgaagtgagacagatcgcaccaggacagacaggaaagatcgcagactacaattataagctgcctgacgatttcaccggctgcgtgatcgcctggaactccaacaatctggattctaaagtgggcggcaactacaattatctgtacaggctgtttcgcaagtccaatctgaagccattcgagcgggacatctccacagagatctaccaggccggctctaccccctgcaatggcgtggagggctttaactgttatttccctctgcagtcttacggcttccagccaacaaacggcgtgggctatcagccctacagagtggtggtgctgtcctttgagctgctgcacgcaccagcaacagtgtgcggcccaaagaagtctaccaatctggtgaagaacaagtgcgtgaacttcaacttcaacggactgaccggcacaggcgtgctgaccgagagcaataagaagttcctgccttttcagcagttcggcagggacatcgcagataccacagacgccgtgcgcgaccctcagaccctggagatcctggacatcacaccatgcagcttcggcggcgtgtccgtgatcacaccaggcaccaatacatccaaccaggtggccgtgctgtatcaggacgtgaattgtaccgaggtgcccgtggcaatccacgcagatcagctgacccctacatggcgggtgtactctaccggcagcaacgtgttccagacaagagccggatgcctgatcggagcagagcacgtgaacaatagctatgagtgcgacatccctatcggcgccggcatctgtgccagctaccagacccagacaaactccccatctggagcaggctcccaccatcaccatcaccatcaccatcaccactga

SEQ ID NO: 4208 - DNA, 2148 bp, Artificial Sequence
  Description of Artificial Sequence: Synthetic polynucleotide
atgggcatcctgccaagcccaggaatgcccgccctgctgtctctggtgagcctgctgtccgtgctgctgatgggatgcgtggcagagacaggcacacagtgcgtgaacctgaccacaaggacccagctgccccctgcctataccaattctttcacacggggcgtgtactatcccgacaaggtgtttagaagctccgtgctgcactccacacaggatctgtttctgcctttcttttctaacgtgacctggttccacgccaaacacgtgtccggcaccaatggcacaaagcggttcgacaatcccgtgctgccttttaacgatggcgtgtacttcgccagcaccgagaagtccaacatcatcagaggctggatctttggcaccacactggactctaagacacagagcctgctgatcgtgaacaatgccaccaacgtggtgatcaaggtgtgcgagttccagttttgtaatgatccattcctgggcgtgtactatcacaagaacaataagtcctggatggagtctgagtttcgcgtgtattctagcgccaacaattgcacatttgagtaccatagccagcccttcctgatggacctggagggcaagcagggcaatttcaagaacctgagggagttcgtgtttaagaatatcgatggctacttcaagatctacagcaagcacaccccaatcaacctggtgcgcgacctgccacagggattctccgccctggagccactggtggatctgcccatcggcatcaacatcacccggtttcagacactgctggccctgcacagatcctacctgacaccaggcgactcctctagcggagaaaccgcaggagctgccgcctactatgtgggctatctgcagccccggaccttcctgctgaagtacaacgagaatggcaccatcacagacgcagtggattgcgccctggaccccctgtctgagacaaagtgtacactgaagagctttaccgtggagaagggcatctatcagacaagcaatttcagggtgcagcctaccgagtccatcgtgcgctttcccaatatcacaaaccattgcccttttggcgaggtgttcaacgccaccagattcgccagcgtgtacgcctggaatcggaagagaatctccaactgcgtggccgactattctgtgctgtacaactccgcctctttcagcacctttaagtgctatggcgtgtctcccacaaagctgaatgatctgtgctttaccaacgtgtacgccgatagcttcgtgatcaggggagacgaagtgagacagatcgcaccaggacagacaggaaagatcgcagactacaattataagctgcctgacgatttcaccggctgcgtgatcgcctggaactccaacaatctggattctaaagtgggcggcaactacaattatctgtacaggctgtttcgcaagtccaatctgaagccattcgagcgggacatctccacagagatctaccaggccggctctaccccctgcaatggcgtggagggctttaactgttatttccctctgcagtcttacggcttccagccaacaaacggcgtgggccaacagccctacagagtggtggtgctgtcctttgagctgctgcacgcaccagcaacagtgtgcggcccaaagaagtctaccaatctggtgaagaacaagtgcgtgaacttcaacttcaacggactgaccggcacaggcgtgctgaccgagagcaataagaagttcctgccttttcagcagttcggcagggacatcgcagataccacagacgccgtgcgcgaccctcagaccctggagatcctggacatcacaccatgcagcttcggcggcgtgtccgtgatcacaccaggcaccaatacatccaaccaggtggccgtgctgtatcaggacgtgaattgtaccgaggtgcccgatgcaatccacgcagatcagctgacccctacatggcgggtgtactctaccggcagcaacgtgttccagacaagagccggatgcctgatcggagcagagcacgtgaacaatagctatgagtgcgacatccctatcggcgccggcatctgtgccagctaccagacccagacaaactccccatctggagcaggctcccaccatcaccatcaccatcaccatcaccactga

SEQ ID NO: 4209 - DNA, 2148 bp, Artificial Sequence
  Description of Artificial Sequence: Synthetic polynucleotide
atgggcatcctgccaagcccaggaatgcccgccctgctgtctctggtgagcctgctgtccgtgctgctgatgggatgcgtggcagagacaggcacacagtgcgtgaacctgaccacaaggacccagctgccccctgcctataccaattctttcacacggggcgtgtactatcccgacaaggtgtttagaagctccgtgctgcactccacacaggatctgtttctgcctttcttttctaacgtgacctggttccacgccatccacgtgtccggcaccaatggcacaaagcggttcgacaatcccgtgctgccttttaacgatggcgtgtacttcgccagcaccgagaagtccaacatcatcagaggctggatctttggcaccacactggactctaagacacagagcctgctgatcgtgaacaatgccaccaacgtggtgatcaaggtgtgcgagttccagttttgtaatgatccattcctgggcgtgtactatcacaagaacaataagtcctggatggagtctgagtttcgcgtgtattctagcgccaacaattgcacatttgagtacgtgagccagcccttcctgatggacctggagggcaagcagggcaatttcaagaacctgagggagttcgtgtttaagaatatcgatggctacttcaagatctacagcaagcacaccccaatcaacctggtgcgcgacctgccacagggattctccgccctggagccactggtggatctgcccatcggcatcaacatcacccggtttcagacagtactggccctgcacagatcctacctgacaccaggcgactcctctagcggatggaccgcaggagctgccgcctactatgtgggctatctgcagccccggaccttcctgctgaagtacaacgagaatggcaccatcacagacgcagtggattgcgccctggaccccctgtctgagacaaagtgtacactgaagagctttaccgtggagaagggcatctatcagacaagcaatttcagggtgcagcctaccgagtccatcgtgcgctttcccaatatcacaaacctgtgcccttttggcgaggtgttcaacgccaccagattcgccagcgtgtacgcctggaatcggaagagaatctccaactgcgtggccgactattctgtgctgtacaactccgcctctttcagcacctttaagtgctatggcgtgtctcccacaaagctgaatgatctgtgctttaccaacgtgtacgccgatagcttcgtgatcaggggagacgaagtgagacagatcgcaccaggacagacaggaaagatcgcagactacaattataagctgcctgacgatttcaccggctgcgtgatcgcctggaactccaacaatctggattctaaagtgggcggcaactacaattatctgtacaggctgtttcgcaagtccaatctgaagccattcgagcgggacatctccacagagatctaccaggccggctctaccccctgcaatggcgtggagggctttaactgttatttccctctgcagtcttacggcttccagccaacaaacggcgtgggctatcagccctacagagtggtggtgctgtcctttgagctgctgcacgcaccagcaacagtgtgcggcccaaagaagtctaccaatctggtgaagaacaagtgcgtgaacttcaacttcaacggactgaccggcacaggcgtgctgaccgagagcaataagaagttcctgccttttcagcagttcggcagggacatcgcagataccacagacgccgtgcgcgaccctcagaccctggagatcctggacatcacaccatgcagcttcggcggcgtgtccgtgatcacaccaggcaccaatacatccaaccaggtggccgtgctgtatcaggacgtgaattgtaccgaggtgcccgtggcaatccacgcagatcagctgacccctacatggcgggtgtactctaccggcagcaacgtgttccagacaagagccggatgcctgatcggagcagagcacgtgaacaatagctatgagtgcgacatccctatcggcgccggcatctgtgccagctaccagacccagacaaactccccatctggagcaggctcccaccatcaccatcaccatcaccatcaccactga

SEQ ID NO: 4210 - DNA, 2148 bp, Artificial Sequence
  Description of Artificial Sequence: Synthetic polynucleotide
atgggcatcctgccaagcccaggaatgcccgccctgctgtctctggtgagcctgctgtccgtgctgctgatgggatgcgtggcagagacaggcacacagtgcgtgaacctgaccacaaggacccagctgccccctgcctataccaattctttcacacggggcgtgtactatcccgacaaggtgtttagaagctccgtgctgcactccacacaggatctgtttctgcctttcttttctaacgtgacctggttccacgccatccacgtgtccggcaccaatggcacaaagcggttcgacaatcccgtgctgccttttaacgatggcgtgtacttcgccagcaccgagaagtccaacatcatcagaggctggatctttggcaccacactggactctaagacacagagcctgctgatcgtgaacaatgccaccaacgtggtgatcaaggtgtgcgagttccagttttgtaatgatccattcctgggcgtgtactatcacaagaacaataagtcctggatggagtctgagtttcgcgtgtattctagcgccaacaattgcacatttgagtacgtgagccagcccttcctgatggacctggagggcaagcagggcaatttcaagaacctgagggagttcgtgtttaagaatatcgatggctacttcaagatctacagcaagcacaccccaatcaacctggtgcgcgacctgccacagggattctccgccctggagccactggtggatctgcccatcggcatcaacatcacccggtttcagacactgctggccctgcacagatcctacctgacaccaggcgactcctctagcggatggaccgcaggagctgccgcctactatgtgggctatctgcagccccggaccttcctgctgaagtacaacgagaatggcaccatcacagacgcagtggattgcgccctggaccccctgtctgagacaaagtgtacactgaagagctttaccgtggagaagggcatctatcagacaagcaatttcagggtgcagcctaccgagtccatcgtgcgctttcccaatatcacaaacctgtgcccttttggcgaggtgttcaacgccaccagattcgccagcgtgtacgcctggaatcggaagagaatctccaactgcgtggccgactattctgtgctgtacaactccgcctctttcagcacctttaagtgctatggcgtgtctcccacaaagctgaatgatctgtgctttaccaacgtgtacgccgatagcttcgtgatcaggggagacgaagtgagacagatcgcaccaggacagacaggaaagatcgcagactacaattataagctgcctgacgatttcaccggctgcgtgatcgcctggaactccaacaatctggattctaaagtgggcggcaactacaattatctgtacaggctgtttcgcaagtccaatctgaagccattcgagcgggacatctccacagagatctaccaggccggctctaccccctgcaatggcgtggagggctttaactgttatttccctctgcagtcttacggcttccagccaacaaacggcgtgggctatcagccctacagagtggtggtgctgtcctttgagctgctgcacgcaccagcaacagtgtgcggcccaaagaagtctaccaatctggtgaagaacaagtgcgtgaacttcaacttcaacggactgaccggcacaggcgtgctgaccgagagcaataagaagttcctgccttttcagcagttcggcagggacatcgcagataccacagacgccgtgcgcgaccctcagaccctggagatcctggacatcacaccatgcagcttcggcggcgtgtccgtgatcacaccaggcaccaatacatccaaccaggtggccgtgctgtatcaggacgtgaattgtaccgaggtgcccgtggcaatccacgcacaacagctgacccctacatggcgggtgtactctaccggcagcaacgtgttccagacaagagccggatgcctgatcggagcagagcacgtgaacaatagctatgagtgcgacatccctatcggcgccggcatctgtgccagctaccagacccagacaaactccccatctggagcaggctcccaccatcaccatcaccatcaccatcaccactga

SEQ ID NO: 4211 - DNA, 2148 bp, Artificial Sequence
  Description of Artificial Sequence: Synthetic polynucleotide
atgggcatcctgccaagcccaggaatgcccgccctgctgtctctggtgagcctgctgtccgtgctgctgatgggatgcgtggcagagacaggcacacagtgcgtgaacctgaccacaaggacccagctgccccctgcctataccaattctttcacacggggcgtgtactatcccgacaaggtgtttagaagctccgtgctgcactccacacaggatctgtttctgcctttcttttctaacgtgacctggttccacgccgaacacgtgtccggcaccaatggcacaaagcggttcgacaatcccgtgctgccttttaacgatggcgtgtacttcgccagcaccgagaagtccaacatcatcagaggctggatctttggcaccacactggactctaagacacagagcctgctgatcgtgaacaatgccaccaacgtggtgatcaaggtgtgcgagttccagttttgtaatgatccattcctgggcgtgtactatcacaagaacaataagtcctggatggagtctgagtttcgcgtgtattctagcgccaacaattgcacatttgagtaccatagccagcccttcctgatggacctggagggcaagcagggcaatttcaagaacctgagggagttcgtgtttaagaatatcgatggctacttcaagatctacagcaagcacaccccaatcaacctggtgcgcgacctgccacagggattctccgccctggagccactggtggatctgcccatcggcatcaacatcacccggtttcagacactgctggccctgcacagatcctacctgacaccaggcgactcctctagcggagaaaccgcaggagctgccgcctactatgtgggctatctgcagccccggaccttcctgctgaagtacaacgagaatggcaccatcacagacgcagtggattgcgccctggaccccctgtctgagacaaagtgtacactgaagagctttaccgtggagaagggcatctatcagacaagcaatttcagggtgcagcctaccgagtccatcgtgcgctttcccaatatcacaaaccattgcccttttggcgaggtgttcaacgccaccagattcgccagcgtgtacgcctggaatcggaagagaatctccaactgcgtggccgactattctgtgctgtacaactccgcctctttcagcacctttaagtgctatggcgtgtctcccacaaagctgaatgatctgtgctttaccaacgtgtacgccgatagcttcgtgatcaggggagacgaagtgagacagatcgcaccaggacagacaggaaagatcgcagactacaattataagctgcctgacgatttcaccggctgcgtgatcgcctggaactccaacaatctggattctaaagtgggcggcaactacaattatctgtacaggctgtttcgcaagtccaatctgaagccattcgagcgggacatctccacagagatctaccaggccggctctaccccctgcaatggcgtggagggctttaactgttatttccctctgcagtcttacggcttccagccaacaaacggccctggctatcagccctacagagtggtggtgctgtcctttgagctgctgcacgcaccagcaacagtgtgcggcccaaagaagtctaccaatctggtgaagaacaagtgcgtgaacttcaacttcaacggactgaccggcacaggcgtgctgaccgagagcaataagaagttcctgccttttcagcagttcggcagggacatcgcagataccacagacgccgtgcgcgaccctcagaccctggagatcctggacatcacaccatgcagcttcggcggcgtgtccgtgatcacaccaggcaccaatacatccaaccaggtggccgtgctgtatcaggacgtgaattgtaccgaggtgcccgatgcaatccacgcagatcagctgacccctacatggcgggtgtactctaccggcagcaacgtgttccagacaagagccggatgcctgatcggagcagagcacgtgaacaatagctatgagtgcgacatccctatcggcgccggcatctgtgccagctaccagacccagacaaactccccatctggagcaggctcccaccatcaccatcaccatcaccatcaccactga

SEQ ID NO: 4212 - DNA, 2148 bp, Artificial Sequence
  Description of Artificial Sequence: Synthetic polynucleotide
atgggcatcctgccaagcccaggaatgcccgccctgctgtctctggtgagcctgctgtccgtgctgctgatgggatgcgtggcagagacaggcacacagtgcgtgaacctgaccacaaggacccagctgccccctgcctataccaattctttcacacggggcgtgtactatcccgacaaggtgtttagaagctccgtgctgcactccacacaggatctgtttctgcctttcttttctaacgtgacctggttccacgccatccacgtgtccggcaccaatggcacaaagcggttcgacaatcccgtgctgccttttaacgatggcgtgtacttcgccagcaccgagaagtccaacatcatcagaggctggatctttggcaccacactggactctaagacacagagcctgctgatcgtgaacaatgccaccaacgtggtgatcaaggtgtgcgagttccagttttgtaatgatccattcctgggcgtgtactatcacaagaacaataagtcctggatggagtctgagtttcgcgtgtattctagcgccaacaattgcacatttgagtacgtgagccagcccttcctgatggacctggagggcaagcagggcaatttcaagaacctgagggagttcgtgtttaagaatatcgatggctacttcaagatctacagcaagcacaccccaatcaacctggtgcgcgacctgccacagggattctccgccctggagccactggtggatctgcccatcggcatcaacatcacccggtttcagacactgctggccctgcacagatcctacctgacaccaggcgactcctctagcggatggaccgcaggagctgccgcctactatgtgggctatctgcagccccggaccttcctgctgaagtacaacgagaatggcaccatcacagacgcagtggattgcgccctggaccccctgtctgagacaaagtgtacactgaagagctttaccgtggagaagggcatctatcagacaagcaatttcagggtgcagcctaccgagtccatcgtgcgctttcccaatatcacaaacctgtgcccttttggcgaggtgttcaacgccaccagattcgccagcgtgtacgcctggaatcggaagagaatctccaactgcgtggccgactattctgtgctgtacaactccgcctctttcagcacctttaagtgctatggcgtgtctcccacaaagctgaatgatctgtgctttaccaacgtgtacgccgatagcttcgtgatcaggggagacgaagtgagacagatcgcaccaggacagacaggaaagatcgcagactacaattataagctgcctgacgatttcaccggctgcgtgatcgcctggaactccaacaatctggattctaaagtgggcggcaactacaattatctgtacaggctgtttcgcaagtccaatctgaagccattcgagcgggacatctccacagagatctaccaggccggctctaccccctgcaatggcgtggagggctttaactgttatttccctctgcagtcttacggcttccagccaacaaacggcgtgggctatcagccctacagagtggtggtgctgtcctttgagctgctgtttgcaccagcaacagtgtgcggcccaaagaagtctaccaatctggtgaagaacaagtgcgtgaacttcaacttcaacggactgaccggcacaggcgtgctgaccgagagcaataagaagttcctgccttttcagcagttcggcagggacatcgcagataccacagacgccgtgcgcgaccctcagaccctggagatcctggacatcacaccatgcagcttcggcggcgtgtccgtgatcacaccaggcaccaatacatccaaccaggtggccgtgctgtatcaggacgtgaattgtaccgaggtgcccgtggcaatccacgcagatcagctgacccctacatggcgggtgtactctaccggcagcaacgtgttccagacaagagccggatgcctgatcggagcagagcacgtgaacaatagctatgagtgcgacatccctatcggcgccggcatctgtgccagctaccagacccagacaaactccccatctggagcaggctcccaccatcaccatcaccatcaccatcaccactga

SEQ ID NO: 4213 - DNA, 2148 bp, Artificial Sequence
  Description of Artificial Sequence: Synthetic polynucleotide
atgggcatcctgccaagcccaggaatgcccgccctgctgtctctggtgagcctgctgtccgtgctgctgatgggatgcgtggcagagacaggcacacagtgcgtgaacctgaccacaaggacccagctgccccctgcctataccaattctttcacacggggcgtgtactatcccgacaaggtgtttagaagctccgtgctgcactccacacaggatctgtttctgcctttcttttctaacgtgacctggttccacgccatccacgtgtccggcaccaatggcacaaagcggttcgacaatcccgtgctgccttttaacgatggcgtgtacttcgccagcaccgagaagtccaacatcatcagaggctggatctttggcaccacactggactctaagacacagagcctgctgatcgtgaacaatgccaccaacgtggtgatcaaggtgtgcgagttccagttttgtaatgatccattcctgggcgtgtactatcacaagaacaataagtcctggatggagtctgagtttcgcgtgtattctagcgccaacaattgcacatttgagtacgtgagccagcccttcctgatggacctggagggcaagcagggcaatttcaagaacctgagggagttcgtgtttaagaatatcgatggctacttcaagatctacagcaagcacaccccaatcaacctggtgcgcgacctgccacagggattctccgccctggagccactggtggatctgcccatcggcatcaacatcacccggtttcagacatttctggccctgcacagatcctacctgacaccaggcgactcctctagcggatggaccgcaggagctgccgcctactatgtgggctatctgcagccccggaccttcctgctgaagtacaacgagaatggcaccatcacagacgcagtggattgcgccctggaccccctgtctgagacaaagtgtacactgaagagctttaccgtggagaagggcatctatcagacaagcaatttcagggtgcagcctaccgagtccatcgtgcgctttcccaatatcacaaacctgtgcccttttggcgaggtgttcaacgccaccagattcgccagcgtgtacgcctggaatcggaagagaatctccaactgcgtggccgactattctgtgctgtacaactccgcctctttcagcacctttaagtgctatggcgtgtctcccacaaagctgaatgatctgtgctttaccaacgtgtacgccgatagcttcgtgatcaggggagacgaagtgagacagatcgcaccaggacagacaggaaagatcgcagactacaattataagctgcctgacgatttcaccggctgcgtgatcgcctggaactccaacaatctggattctaaagtgggcggcaactacaattatctgtacaggctgtttcgcaagtccaatctgaagccattcgagcgggacatctccacagagatctaccaggccggctctaccccctgcaatggcgtggagggctttaactgttatttccctctgcagtcttacggcttccagccaacaaacggcgtgggctatcagccctacagagtggtggtgctgtcctttgagctgctgcacgcaccagcaacagtgtgcggcccaaagaagtctaccaatctggtgaagaacaagtgcgtgaacttcaacttcaacggactgaccggcacaggcgtgctgaccgagagcaataagaagttcctgccttttcagcagttcggcagggacatcgcagataccacagacgccgtgcgcgaccctcagaccctggagatcctggacatcacaccatgcagcttcggcggcgtgtccgtgatcacaccaggcaccaatacatccaaccaggtggccgtgctgtatcaggacgtgaattgtaccgaggtgcccgtggcaatccacgcagatcagctgacccctacatggcgggtgtactctaccggcagcaacgtgttccagacaagagccggatgcctgatcggagcagagcacgtgaacaatagctatgagtgcgacatccctatcggcgccggcatctgtgccagctaccagacccagacaaactccccatctggagcaggctcccaccatcaccatcaccatcaccatcaccactga

SEQ ID NO: 4214 - DNA, 2148 bp, Artificial Sequence
  Description of Artificial Sequence: Synthetic polynucleotide
atgggcatcctgccaagcccaggaatgcccgccctgctgtctctggtgagcctgctgtccgtgctgctgatgggatgcgtggcagagacaggcacacagtgcgtgaacctgaccacaaggacccagctgccccctgcctataccaattctttcacacggggcgtgtactatcccgacaaggtgtttagaagctccgtgctgcactccacacaggatctgtttctgcctttcttttctaacgtgacctggttccacgccatccacgtgtccggcaccaatggcacaaagcggttcgacaatcccgtgctgccttttaacgatggcgtgtacttcgccagcaccgagaagtccaacatcatcagaggctggatctttggcaccacactggactctaagacacagagcctgctgatcgtgaacaatgccaccaacgtggtgatcaaggtgtgcgagttccagttttgtaatgatccattcctgggcgtgtactatcacaagaacaataagtcctggatggagtctgagtttcgcgtgtattctagcgccaacaattgcacatttgagtacgtgagccagcccttcctgatggacctggagggcaagcagggcaatttcaagaacctgagggagttcgtgtttaagaatatcgatggctacttcaagatctacagcaagcacaccccaatcaacctggtgcgcgacctgccacagggattctccgccctggagccactggtggatctgcccatcggcatcaacatcacccggtttcagacactgctggccctgcacagatcctacctgacaccaggcgactcctctagcggatggaccgcaggagctgccgcctactatgtgggctatctgcagccccggaccttcctgctgaagtacaacgagaatggcaccatcacagacgcagtggattgcgccctggaccccctgtctgagacaaagtgtacactgaagagctttaccgtggagaagggcatctatcagacaagcaatttcagggtgcagcctaccgagtccatcgtgcgctttcccaatatcacaaacctgtgcccttttggcgaggtgttcaacgccaccagattcgccagcgtgtacgcctggaatcggaagagaatctccaactgcgtggccgactattctgtgctgtacaactccgcctctttcagcacctttaagtgctatggcgtgtctcccacaaagctgaatgatctgtgctttaccaacgtgtacgccgatagcttcgtgatcaggggagacgaagtgagacagatcgcaccaggacagacaggaaagatcgcagactacaattataagctgcctgacgatttcaccggctgcgtgatcgcctggaactccaacaatctggattctaaagtgggcggcaactacaattatctgtacaggctgtttcgcaagtccaatctgaagccattcgagcgggacatctccacagagatctaccaggccggcaataccccctgcaatggcgtggagggctttaactgttatttccctctgcagtcttacggcttccagccaacaaacggcgtgggctatcagccctacagagtggtggtgctgtcctttgagctgctgcacgcaccagcaacagtgtgcggcccaaagaagtctaccaatctggtgaagaacaagtgcgtgaacttcaacttcaacggactgaccggcacaggcgtgctgaccgagagcaataagaagttcctgccttttcagcagttcggcagggacatcgcagataccacagacgccgtgcgcgaccctcagaccctggagatcctggacatcacaccatgcagcttcggcggcgtgtccgtgatcacaccaggcaccaatacatccaaccaggtggccgtgctgtatcaggacgtgaattgtaccgaggtgcccgtggcaatccacgcagatcagctgacccctacatggcgggtgtactctaccggcagcaacgtgttccagacaagagccggatgcctgatcggagcagagcacgtgaacaatagctatgagtgcgacatccctatcggcgccggcatctgtgccagctaccagacccagacaaactccccatctggagcaggctcccaccatcaccatcaccatcaccatcaccactga

SEQ ID NO: 4215 - DNA, 2148 bp, Artificial Sequence
  Description of Artificial Sequence: Synthetic polynucleotide
atgggcatcctgccaagcccaggaatgcccgccctgctgtctctggtgagcctgctgtccgtgctgctgatgggatgcgtggcagagacaggcacacagtgcgtgaacctgaccacaaggacccagctgccccctgcctataccaattctttcacacggggcgtgtactatcccgacaaggtgtttagaagctccgtgctgcactccacacaggatctgtttctgcctttcttttctaacgtgacctggttccacgccatccacgtgtccggcaccaatggcacaaagcggttcgacaatcccgtgctgccttttaacgatggcgtgtacttcgccagcaccgagaagtccaacatcatcagaggctggatctttggcaccacactggactctaagacacagagcctgctgatcgtgaacaatgccaccaacgtggtgatcaaggtgtgcgagttccagttttgtaatgatccattcctgggcgtgtactatcacaagaacaataagtcctggatggagtctgagtttcgcgtgtattctagcgccaacaattgcacatttgagtacgtgagccagcccttcctgatggacctggagggcaagcagggcaatttcaagaacctgagggagttcgtgtttaagaatatcgatggctacttcaagatctacagcaagcacaccccaatcaacctggtgcgcgacctgccacagggattctccgccctggagccactggtggatctgcccatcggcatcaacatcacccggtttcagacactgctggccctgcacagatcctacctgacaccaggcgactcctctagcggatggaccgcaggagctgccgcctactatgtgggctatctgcagccccggaccttcctgctgaagtacaacgagaatggcaccatcacagacgcagtggattgcgccctggaccccctgtctgagacaaagtgtacactgaagagctttaccgtggagaagggcatctatcagacaagcaatttcagggtgcagcctaccgagtccatcgtgcgctttcccaatatcacaaacctgtgcccttttggcgaggtgttcaacgccaccagattcgccagcgtgtacgcctggaatcggaagagaatctccaactgcgtggccgactattctgtgctgtacaactccgcctctttcagcacctttaagtgctatggcgtgtctcccacaaagctgaatgatctgtgctttaccaacgtgtacgccgatagcttcgtgatcaggggagacgaagtgagacagatcgcaccaggacagacaggaaagatcgcagactacaattataagctgcctgacgatttcaccggctgcgtgatcgcctggaactccaacaatctggattctaaagtgggcggcaactacaattatctgtacaggctgtttcgcaagtccaatctgaagccattcgagcgggacatctccacagagatctaccaggccggctctaccccctgcaatggcgtggagggctttaactgttatttccctctgcagtcttacggcttccagccaacaaacggcgtgggctatcagccctacagagtggtggtgctgtcctttgagctgctgcacgcaccagcaacagtgtgcccgccaaagaagtctaccaatctggtgaagaacaagtgcgtgaacttcaacttcaacggactgaccggcacaggcgtgctgaccgagagcaataagaagttcctgccttttcagcagttcggcagggacatcgcagataccacagacgccgtgcgcgaccctcagaccctggagatcctggacatcacaccatgcagcttcggcggcgtgtccgtgatcacaccaggcaccaatacatccaaccaggtggccgtgctgtatcaggacgtgaattgtaccgaggtgcccgtggcaatccacgcagatcagctgacccctacatggcgggtgtactctaccggcagcaacgtgttccagacaagagccggatgcctgatcggagcagagcacgtgaacaatagctatgagtgcgacatccctatcggcgccggcatctgtgccagctaccagacccagacaaactccccatctggagcaggctcccaccatcaccatcaccatcaccatcaccactga

SEQ ID NO: 4216 - DNA, 2148 bp, Artificial Sequence
  Description of Artificial Sequence: Synthetic polynucleotide
atgggcatcctgccaagcccaggaatgcccgccctgctgtctctggtgagcctgctgtccgtgctgctgatgggatgcgtggcagagacaggcacacagtgcgtgaacctgaccacaaggacccagctgccccctgcctataccaattctttcacacggggcgtgtactatcccgacaaggtgtttagaagctccgtgctgcactccacacaggatctgtttctgcctttcttttctaacgtgacctggttccacgccatccacgtgtccggcaccaatggcacaaagcggttcgacaatcccgtgctgccttttaacgatggcgtgtacttcgccagcaccgagaagtccaacatcatcagaggctggatctttggcaccacactggactctaagacacagagcctgctgatcgtgaacaatgccaccaacgtggtgatcaaggtgtgcgagttccagttttgtaatgatccattcctgggcgtgtactatcacaagaacaataagtcctggatggagtctgagtttcgcgtgtattctagcgccaacaattgcacatttgagtacgtgagccagcccttcctgatggacctggagggcaagcagggcaatttcaagaacctgagggagttcgtgtttaagaatatcgatggctacttcaagatctacagcaagcacaccccaatcaacctggtgcgcgacctgccacagggattctccgccctggagccactggtggatctgcccatcggcatcaacatcacccggtttcagacactgctggccctgcacagatcctacctgacaccaggcgactcctctagcggatggaccgcaggagctgccgcctactatgtgggctatctgcagccccggaccttcctgctgaagtacaacgagaatggcaccatcacagacgcagtggattgcgccctggaccccctgtctgagacaaagtgtacactgaagagctttaccgtggagaagggcatctatcagacaagcaatttcagggtgcagcctaccgagtccatcgtgcgctttcccaatatcacaaacctgtgcccttttggcgaggtgttcaacgccaccagattcgccagcgtgtacgcctggaatcggaagagaatctccaactgcgtggccgactattctgtgctgtacaactccgcctctttcagcacctttaagtgctatggcgtgtctcccacaaagctgaatgatctgtgctttaccaacgtgtacgccgatagcttcgtgatcaggggagacgaagtgagacagatcgcaccaggacagacaggaaagatcgcagactacaattataagctgcctgacgatttcaccggctgcgtgatcgcctggaactccaacaatctggattctaaagtgggcggcaactacaattatctgtacaggctgtttcgcaagtccaatctgaagccattcgagcgggacatctccacagagatctaccaggccggctctaccccctgcaatggcgtggagggctttaactgttatttccctctgcagtcttacggcttccagccaacaaacggcgtgggctatcagccctacagagtggtggtgctgtcctttgagctgctgcacgcaccagcaacagtgtgcggcccaaagaagtctaccaatctggtgaagaacaagtgcgtgaacttcaacttcaacggactgaccggcacaggcgtgctgaccgagagcaataagaagttcctgccttttcagcagttcggcagggacatcgcagataccacagacgccgtgcgcgaccctcagaccctggagatcctggacatcacaccatgcagcttcggcggcgtgtccgtgatcacaccacaaaccaatacatccaaccaggtggccgtgctgtatcaggacgtgaattgtaccgaggtgcccgtggcaatccacgcagatcagctgacccctacatggcgggtgtactctaccggcagcaacgtgttccagacaagagccggatgcctgatcggagcagagcacgtgaacaatagctatgagtgcgacatccctatcggcgccggcatctgtgccagctaccagacccagacaaactccccatctggagcaggctcccaccatcaccatcaccatcaccatcaccactga

SEQ ID NO: 4217 - DNA, 2148 bp, Artificial Sequence
  Description of Artificial Sequence: Synthetic polynucleotide
atgggcatcctgccaagcccaggaatgcccgccctgctgtctctggtgagcctgctgtccgtgctgctgatgggatgcgtggcagagacaggcacacagtgcgtgaacctgaccacaaggacccagctgccccctgcctataccaattctttcacacggggcgtgtactatcccgacaaggtgtttagaagctccgtgctgcactccacacaggatctgtttctgcctttcttttctaacgtgacctggttccacgccatccacgtgtccggcaccaatggcacaaagcggttcgacaatcccgtgctgccttttaacgatggcgtgtacttcgccagcaccgagaagtccaacatcatcagaggctggatctttggcaccacactggactctaagacacagagcctgctgatcgtgaacaatgccaccaacgtggtgatcaaggtgtgcgagttccagttttgtaatgatccattcctgggcgtgtactatcacaagaacaataagtcctggatggagtctgagtttcgcgtgtattctagcgccaacaattgcacatttgagtacgtgagccagcccttcctgatggacctggagggcaagcagggcaatttcaagaacctgagggagttcgtgtttaagaatatcgatggctacttcaagatctacagcaagcacaccccaatcaacctggtgcgcgacctgccacagggattctccgccctggagccactggtggatctgcccatcggcatcaacatcacccggtttcagacactgctggccctgcacagatcctacctgacaccaggcgactcctctagcggatggaccgcaggagctgccgcctactatgtgggctatctgcagccccggaccttcctgctgaagtacaacgagaatggcaccatcacagacgcagtggattgcgccctggaccccctgtctgagacaaagtgtacactgaagagctttaccgtggagaagggcatctatcagacaagcaatttcagggtgcagcctaccgagtccatcgtgcgctttcccaatatcacaaacctgtgcccttttggcgaggtgttcaacgccaccagattcgccagcgtgtacgcctggaatcggaagagaatctccaactgcgtggccgactattctgtgctgtacaactccgcctctttcagcacctttaagtgctatggcgtgtctcccacaaagctgaatgatctgtgctttaccaacgtgtacgccgatagcttcgtgatcaggggagacgaagtgagacagatcgcaccaggacagacaggaaagatcgcagactacaattataagctgcctgacgatttcaccggctgcgtgatcgcctggaactccaacaatctggattctaaagtgggcggcaactacaattatctgtacaggctgtttcgcaagtccaatctgaagccattcgagcgggacatctccacagagatctaccaggccggctctaccccctgcaatggcgtggagggctttaactgttatttccctctgcagtcttacggcttccagccaacaaacggcgtgggctatcagccctacagagtggtggtgctgttatttgagctgctgcacgcaccagcaacagtgtgcggcccaaagaagtctaccaatctggtgaagaacaagtgcgtgaacttcaacttcaacggactgaccggcacaggcgtgctgaccgagagcaataagaagttcctgccttttcagcagttcggcagggacatcgcagataccacagacgccgtgcgcgaccctcagaccctggagatcctggacatcacaccatgcagcttcggcggcgtgtccgtgatcacaccaggcaccaatacatccaaccaggtggccgtgctgtatcaggacgtgaattgtaccgaggtgcccgtggcaatccacgcagatcagctgacccctacatggcgggtgtactctaccggcagcaacgtgttccagacaagagccggatgcctgatcggagcagagcacgtgaacaatagctatgagtgcgacatccctatcggcgccggcatctgtgccagctaccagacccagacaaactccccatctggagcaggctcccaccatcaccatcaccatcaccatcaccactga

SEQ ID NO: 4218 - DNA, 2148 bp, Artificial Sequence
  Description of Artificial Sequence: Synthetic polynucleotide
atgggcatcctgccaagcccaggaatgcccgccctgctgtctctggtgagcctgctgtccgtgctgctgatgggatgcgtggcagagacaggcacacagtgcgtgaacctgaccacaaggacccagctgccccctgcctataccaattctttcacacggggcgtgtactatcccgacaaggtgtttagaagctccgtgctgcactccacacaggatctgtttctgcctttcttttctaacgtgacctggttccacgccatccacgtgtccggcaccaatggcacaaagcggttcgacaatcccgtgctgccttttaacgatggcgtgtacttcgccagcaccgagaagtccaacatcatcagaggctggatctttggcaccacactggactctaagacacagagcctgctgatcgtgaacaatgccaccaacgtggtgatcaaggtgtgcgagttccagttttgtaatgatccattcctgggcgtgtactatcacaagaacaataagtcctggatggagtctgagtttcgcgtgtattctagcgccaacaattgcacatttgagtacgtgagccagcccttcctgatggacctggagggcaagcagggcaatttcaagaacctgagggagttcgtgtttaagaatatcgatggctacttcaagatctacagcaagcacaccccaatcaacctggtgcgcgacctgccacagggattctccgccctggagccactggtggatctgcccatcggcatcaacatcacccggtttcagacactgctggccctgcacagatcctacctgacaccaggcgactcctctagcggatggaccgcaggagctgccgcctactatgtgggctatctgcagccccggaccttcctgctgaagtacaacgagaatggcaccatcacagacgcagtggattgcgccctggaccccctgtctgagacaaagtgtacactgaagagctttaccgtggagaagggcatctatcagacaagcaatttcagggtgcagcctaccgagtccatcgtgcgctttcccaatatcacaaacctgtgcccttttggcgaggtgttcaacgccaccagattcgccagcgtgtacgcctggaatcggaagagaatctccaactgcgtggccgactattctgtgctgtacaactccgcctctttcagcacctttaagtgctatggcgtgtctcccacaaagctgaatgatctgtgctttaccaacgtgtacgccgatagcttcgtgatcaggggagacgaagtgagacagatcgcaccaggacagacaggaaagatcgcagactacaattataagctgcctgacgatttcaccggctgcgtgatcgcctggaactccaacaatctggattctaaagtgggcggcaactacaattatctgtacaggctgtttcgcaagtccaatactaagccattcgagcgggacatctccacagagatctaccaggccggctctaccccctgcaatggcgtggagggctttaactgttatttccctctgcagtcttacggcttccagccaacaaacggcgtgggctatcagccctacagagtggtggtgctgtcctttgagctgctgcacgcaccagcaacagtgtgcggcccaaagaagtctaccaatctggtgaagaacaagtgcgtgaacttcaacttcaacggactgaccggcacaggcgtgctgaccgagagcaataagaagttcctgccttttcagcagttcggcagggacatcgcagataccacagacgccgtgcgcgaccctcagaccctggagatcctggacatcacaccatgcagcttcggcggcgtgtccgtgatcacaccaggcaccaatacatccaaccaggtggccgtgctgtatcaggacgtgaattgtaccgaggtgcccgtggcaatccacgcagatcagctgacccctacatggcgggtgtactctaccggcagcaacgtgttccagacaagagccggatgcctgatcggagcagagcacgtgaacaatagctatgagtgcgacatccctatcggcgccggcatctgtgccagctaccagacccagacaaactccccatctggagcaggctcccaccatcaccatcaccatcaccatcaccactga

SEQ ID NO: 4219 - DNA, 2148 bp, Artificial Sequence
  Description of Artificial Sequence: Synthetic polynucleotide
atgggcatcctgccaagcccaggaatgcccgccctgctgtctctggtgagcctgctgtccgtgctgctgatgggatgcgtggcagagacaggcacacagtgcgtgaacctgaccacaaggacccagctgccccctgcctataccaattctttcacacggggcgtgtactatcccgacaaggtgtttagaagctccgtgctgcactccacacaggatctgtttctgcctttcttttctaacgtgacctggttccacgccgagcacgtgtccggcaccaatggcacaaagcggttcgacaatcccgtgctgccttttaacgatggcgtgtacttcgccagcaccgagaagtccaacatcatcagaggctggatctttggcaccacactggactctaagacacagagcctgctgatcgtgaacaatgccaccaacgtggtgatcaaggtgtgcgagttccagttttgtaatgatccattcctgggcgtgtactatcacaagaacaataagtcctggatggagtctgagtttcgcgtgtattctagcgccaacaattgcacatttgagtaccatagccagcccttcctgatggacctggagggcaagcagggcaatttcaagaacctgagggagttcgtgtttaagaatatcgatggctacttcaagatctacagcaagcacaccccaatcaacctggtgcgcgacctgccacagggattctccgccctggagccactggtggatctgcccatcggcatcaacatcacccggtttcagacactgctggccctgcacagatcctacctgacaccaggcgactcctctagcggagaaaccgcaggagctgccgcctactatgtgggctatctgcagccccggaccttcctgctgaagtacaacgagaatggcaccatcacagacgcagtggattgcgccctggaccccctgtctgagacaaagtgtacactgaagagctttaccgtggagaagggcatctatcagacaagcaatttcagggtgcagcctaccgagtccatcgtgcgctttcccaatatcacaaacaaatgcccttttggcgaggtgttcaacgccaccagattcgccagcgtgtacgcctggaatcggaagagaatctccaactgcgtggccgactattctgtgctgtacaactccgcctctttcagcacctttaagtgctatggcgtgtctcccacaaagctgaatgatctgtgctttaccaacgtgtacgccgatagcttcgtgatcaggggagacgaagtgagacagatcgcaccaggacagacaggaaagatcgcagactacaattataagctgcctgacgatttcaccggctgcgtgatcgcctggaactccaacaatctggattctaaagtgggcggcaactacaattatctgtacaggctgtttcgcaagtccaatctgaagccattcgagcgggacatctccacagagatctaccaggccggctctaccccctgcaatggcgtggagggctttaactgttatttccctctgcagtcttacggcttccagccaacaaacggcccgggctatcagccctacagagtggtggtgctgtcctttgagctgctgcacgcaccagcaacagtgtgcggcccaaagaagtctaccaatctggtgaagaacaagtgcgtgaacttcaacttcaacggactgaccggcacaggcgtgctgaccgagagcaataagaagttcctgccttttcagcagttcggcagggacatcgcagataccacagacgccgtgcgcgaccctcagaccctggagatcctggacatcacaccatgcagcttcggcggcgtgtccgtgatcacaccaggcaccaatacatccaaccaggtggccgtgctgtatcaggacgtgaattgtaccgaggtgcccgatgcaatccacgcagatcagctgacccctacatggcgggtgtactctaccggcagcaacgtgttccagacaagagccggatgcctgatcggagcagagcacgtgaacaatagctatgagtgcgacatccctatcggcgccggcatctgtgccagctaccagacccagacaaactccccatctggagcaggctcccaccatcaccatcaccatcaccatcaccactga

SEQ ID NO: 4220 - DNA, 2148 bp, Artificial Sequence
  Description of Artificial Sequence: Synthetic polynucleotide
atgggcatcctgccaagcccaggaatgcccgccctgctgtctctggtgagcctgctgtccgtgctgctgatgggatgcgtggcagagacaggcacacagtgcgtgaacctgaccacaaggacccagctgccccctgcctataccaattctttcacacggggcgtgtactatcccgacaaggtgtttagaagctccgtgctgcactccacacaggatctgtttctgcctttcttttctaacgtgacctggttccacgccatccacgtgtccggcaccaatggcacaaagcggttcgacaatcccgtgctgccttttaacgatggcgtgtacttcgccagcaccgagaagtccaacatcatcagaggctggatctttggcaccacactggactctaagacacagagcctgctgatcgtgaacaatgccaccaacgtggtgatcaaggtgtgcgagttccagttttgtaatgatccattcctgggcgtgtactatcacaagaacaataagtcctggatggagtctgagtttcgcgtgtattctagcgccaacaattgcacatttgagtacgtgagccagcccttcctgatggacctggagggcaagcagggcaatttcaagaacctgagggagttcgtgtttaagaatatcgatggctacttcaagatctacagcaagcacaccccaatcaacctggtgcgcgacctgccacagggattctccgccctggagccactggtggatctgcccatcggcatcaacatcacccggtttcagacactgctggccctgcacagatcctacctgacaccaggcgactcctctagcggatggaccgcaggagctgccgcctactatgtgggctatctgcagccccggaccttcctgctgaagtacaacgagaatggcaccatcacagacgcagtggattgcgccctggaccccctgtctgagacaaagtgtacactgaagagctttaccgtggagaagggcatctatcagacaagcaatttcagggtgcagcctaccgagtccatcgtgcgctttcccaatatcacaaacctgtgcccttttggcgaggtgttcaacgccaccagattcgccagcgtgtacgcctggaatcggaagagaatctccaactgcgtggccgactattctgtgctgtacaactccgcctctttcagcacctttaagtgctatggcgtgtctcccacaaagctgaatgatctgtgctttaccaacgtgtacgccgatagcttcgtgatcaggggagacgaagtgagacagatcgcaccaggacagacaggaaagatcgcagactacaattataagctgcctgacgatttcaccggctgcgtgatcgcctggaactccaacaatctggattctaaagtgggcggcaactacaattatctgtacaggctgtttcgcaagtccaatctgaagccattcgagcggttcatctccacagagatctaccaggccggctctaccccctgcaatggcgtggagggctttaactgttatttccctctgcagtcttacggcttccagccaacaaacggcgtgggctatcagccctacagagtggtggtgctgtcctttgagctgctgcacgcaccagcaacagtgtgcggcccaaagaagtctaccaatctggtgaagaacaagtgcgtgaacttcaacttcaacggactgaccggcacaggcgtgctgaccgagagcaataagaagttcctgccttttcagcagttcggcagggacatcgcagataccacagacgccgtgcgcgaccctcagaccctggagatcctggacatcacaccatgcagcttcggcggcgtgtccgtgatcacaccaggcaccaatacatccaaccaggtggccgtgctgtatcaggacgtgaattgtaccgaggtgcccgtggcaatccacgcagatcagctgacccctacatggcgggtgtactctaccggcagcaacgtgttccagacaagagccggatgcctgatcggagcagagcacgtgaacaatagctatgagtgcgacatccctatcggcgccggcatctgtgccagctaccagacccagacaaactccccatctggagcaggctcccaccatcaccatcaccatcaccatcaccactga
